United States Patent Application Publication US 2004/0214272 A1 - sequence listing, part 30

SEQ ID NO: 123507 - DNA, 297 bp, Zea mays
  unsure (1)..(297): unsure at all n locations
  Clone ID: MRT4577_44119C.1
agtaaagttgttacaatccagacggtaaaccgaattagtgttacatcctgctgtatgttttgagttgttgtgtggtgtacggcgttgggttagggagcnaaccctagcggacccgtcaccccgtaagggctgtaccttcggttgggagcgtgattggtaaattggggtgggcntatttgccnggaaccaatagtacaagttcaactacaccaaataaacccaaggctaacgtttggtcgcttaaaatcgttacctttgggttaaattttgccgcctaaagaaacgagtactgcacgt

SEQ ID NO: 123508 - DNA, 962 bp, Zea mays
  unsure (1)..(962): unsure at all n locations
  Clone ID: MRT4577_4411C.1
ggccgcttttttttttttttttttctttttttttacatcgaccgcttacagcaggcagccattgacattgattgatgagcacacatcgatcatgagcatacgccggctggtgcaactactacacgcctacgatctgaacaagtagagtacagagaagaccacactgttcactcgacggacggacgaacgaatggatggatctgatggtagtacacatgtacggcgttgctcagtcagttagttgccggggacgaagttcgtggcgtatgcccaggcgggctggactacctggggaaccccaacctggtgcacgcacagagcatcctggccatctgggcgtgccaggtggtgctcatgggcttcgtcgagggctaccgcgtcggcggcggcccgctcggggaagggctcgacaaggtgtaccccggcggcgccttcgacccgctgggcctcgccgacgacccggacaccgccgccgagctcaaggtgaaggagctcaagaacggccgccttgccatgttctccatgttcggcttcttcgtgcaggccatcgtcaccggcaagggccccatcgagaacctcttcgaccacgtcgccgaccccgtcgccaacaacgcctgggcatacgccacgaacttcgtccccggcaactaactgactgagcaacgccgtacatgtgtactaccatcagatccatccattcgttcgtccgtccgtcgagtgaacagtgtggtcttctctgtactctacttgttcagatcgtaggcgtgtagtagttgcaccagccggcgtatgctcatgatcgatgtgtgctcatcaatcaatgtcaatggctgcctgctgtaagcggtcgatgtaaactaagcacagacgcatgtatcgtcatcagtggatgaaaaaaaaaaaaaaaaaaaaaaaaaaaaaaaaaaaataaaaaaaaaaaaaaaaaaaaaannaanntnatt

SEQ ID NO: 123509 - DNA, 751 bp, Zea mays
  Clone ID: MRT4577_44120C.1
cattgggtacctcgaggccggccgggttatactttctagtttctgattattcaacttttagtgtgttagtgttttgttttgtgaataaccttgtattggaaagatattaggtacctggattgcataatacatttgccacatagtttttctacttgttcattgtttgttccttctcgtcactcttatttttttccttctcaaaggatctgaagagctgtgtgttatactgttatttcattaagaagaaaatagaccaagatattacaccagccacccacacccggttatgcaacatcttcctatgaaaagaattttaagcagaaaagttcttgaacacttctttgtaaaaaatgatttaagaagcactgtatctggacatagttgttaaggcgttgcctaggcggtaaggcgagctgggatcgtaaggcgtcctccttgccttagtctagagcctaaggcgggtggaagcggcaccacggcggcagctgcgatgcggcaaagggtggcacagcgggcggcggagagcggcacgtcggctgctttagagggcgacacaacgacagggcggagggcggctgctggtagagagacatggagaagcggggagagagagggaggcgctggtggtgggagagagcgctaggagaggggagagagggaggccggaggcggctggtgctggagagagagggagctgtgtggctgggagaacgggagctgtgcggctgggagaaaagatgcgagagggtga

SEQ ID NO: 123510 - DNA, 145 bp, Zea mays
  Clone ID: MRT4577_44121C.1
tcttgacacaagcgaagcaaacccaaagggggaattttataggaacaggcgcttgccaaccaacaaaggctggaccaggttccattgctgaagccttgataaggggtcaacctatactacttaatgacatcacacttggacagga

SEQ ID NO: 123511 - DNA, 693 bp, Zea mays
  Clone ID: MRT4577_44122C.1
aatggtcctgggtctgctcagggacagcaaactcctcagccatttcagcaacagatggttccaaggggacgtgtgtaccggtacccacctggacctcgtcacatgcctgaggttcaacagatgcctggggttggtgttggaggtatggttcagccatatgacatgggaagcttccctgtgcgagatgctggtgtgtcacctgctcctccaattggaactctcacatctgcccttgcaaatgctactccagagcaacaaagaacgatacttggcgaaagcctctatccacttgttgagaagcttgaacaccaacaagctgccaaggtgacgggcatgcttctggagatggaccagacggaggtgctgcatctgctcgagtctccagaggctctcaagtccaaggttgccgaggcgatggatgttctccgcaacgtggcccagcagcaaaacccgaatgcccctaccagccagctcgcgggtctaaccttgagcgacggcattatctcttagtttagagtcagtttgcggtctcatgatgctatagattgttttgtcctccatggttgaactttggtgagttgcgtttttgcactggttgttaggctctatctgcctggtctctttgccaatgattggcagtcaccttttcccgtgtttggctactattgagggcttggttacatacctcttctg

SEQ ID NO: 123512 - DNA, 506 bp, Zea mays
  Clone ID: MRT4577_44123C.1
acttagaaattctgaaaggtccctgaaagttacatgcagtccaagccatcacaggaacaaaaaacagaacgaaacacccggaaagccccgaaaagccccaggggggcgaaacaaaacacaacaacagcgacaccagcaacacaaaccaacgcaccaaagccaaaaacaaaagaaaacaagtgcatacaagaagccacaaggatagaaaaaagttatcacaaaagggccccctcccctcccgtgggagaaagcgcagagaaaaaaggggaaccaggggggccctaggaccacacactaaaaggcagggggacggagggacagaggaggacgaaggattaccaggcatgccgctccacgataagggcccaagccagcgcagctcatcctgaccctgccagagcggagacgaggcaagaacataccactgctgccctgggcccacccatgccggagcccaccgaacatcacccacaatgggaaagagtaaggaaaagacgcggctagcc

SEQ ID NO: 123513 - DNA, 592 bp, Zea mays
  Clone ID: MRT4577_44124C.1
ctcgaggccggccggggtttgctgcttcttaatttaattcgtatgtgatgtattctgctcaccctagcaaaaaaaaaaaaaaatgcatcgatgccaagttgtgaaaaaaaaaaaaaaaaaaaaaaaaaaaaaaaaaaaaaaaaaaaaaaaaaaaaaaaaaaaaaaaaaatttcccatccatcacagttagttagggttcctaatcaccgacaaaaaatctcttcttcacctcactaacaccgagttagaagttcgttctgtcctgaaaaaagggccgttcgttcctcctccaagaagttggtcggggggggggtcctggaagcggcgctgttgttgttggcggggggggccggaacggcgtcggcggcggtgagctgcggcaaggggacgtcgtcgggggcgccgggcctcgggaacgcaatgggaagcgcggggtcgccctccgcggggggttgcaggggggggcgctcgctcaacagccgggggtcgtcgggggaaaaccggaaggccacctgaaactgcctcaagagaatgacgggccggttcgggggcggggtaagaatggccaacgccgcaaacatccccggaaagg

SEQ ID NO: 123514 - DNA, 216 bp, Zea mays
  Clone ID: MRT4577_44125C.1
cccacgcgtccggatacaaagaagattgctgctaataatcgatgaacacgggagggggctttagaagatactaattccctcgtgactgtcgcgggcagaaaagggtcaggatgctttaaccgtaccagatcaattgaggtcccttccatgagattccagaatcttactacagtcaccgaccgttccggcctctgttcctctggctcaatgacatgg

SEQ ID NO: 123515 - DNA, 384 bp, Zea mays
  Clone ID: MRT4577_44126C.1
gcggcgacgtggagtctgcggtaacgacaagacagatttggaaacattatggccttctggtataagcaccattgctatctattttaccctagaatgccacttatactgtcgcggtattatagaactagacttgttgacatatagccaacatgcttctattaatagctagacaatttatgcactcactcaccataaggaagtcacctgctattaaccagtcatgacgaacagtgaaggagctacggtactatgcgtgactatcctcaactccatatggtgcggcgttaaaccaatttgtcatgcgttcatctcaatcttccaaaaaaaggaaactagctatctagaggaaactaactatctctatctagaagaagctgagaaaga

SEQ ID NO: 123516 - DNA, 149 bp, Zea mays
  Clone ID: MRT4577_44127C.1
aaaaaacccaccccagtactattgggcaacattcccatatttattccccaaagttattaagaatattggaacccgggacaatgggagcccaacggcaaaaccacctcattttggatttgcacccgcccgggcggcccctcaaaagggca

SEQ ID NO: 123517 - DNA, 1197 bp, Zea mays
  Clone ID: MRT4577_44128C.1
accctcgaggctctccgggagaagaacccaggctgcagccgaaacccccggtctccgtcatccgaccccgcctcgacggcccagatccacttgccgccgctgccctcgtgctcctcactccctcgcctcctccggggccgcggctccgcggcgaagacagctgcgagcggggcggccatttctaggcggaagcgcgggcggctgggctagcagattgattggtttgagtggttgggtcggctctaggaaacgccccgccgcgtgatggggtgcttccattccacggcgaagcggcaacaccctggctacgaggaccccgtgcacctcgcctcccagaccgcctgaagaattccagctagcactatttaagaatcagaggaaagaaaatcttttcgccaatcggatatttgaccttttcgatgtcaagaaaaggggtgtcattgattttggtgactttgtccgagctctaaatgtgtttcatccaaatatcccaatggaagaaaaagtcgatttctcgttcaagctatacgatatggatggcacagggtttattgaacggaaggaggttaagcagatgttaattgctcttctaggagaatcagaaatgaggctatctgatgatatcattgagacaatcctggataagacattctctgatgctgatgcaaatcaggatgggaaaatagatagaacagagtgggagaattttgtcacaagaaatccttccttgatgaagataatgactctgccatacctcaaggacatcacaacaacattccccagctttgtgtttaactctgaagtcgatgatctcgtcacgtgaccacgattttctctccgatgtatagttaacaaggagaacctgtcgagggttacgactggagatttctagcctctggcattatgaatggagggtatattcatgcggctaccaggaagggtgcgtcaaaattgtctgccacagatgtacttgacgagctgtagtttttactcggtgataatgttgatgcttttgtgttggtgatgattgggacttgagttagtatgcagagatgaacatttttcatttttaccagtgggaagtctctattttgtttgtgaaactgcgacgtgcgtgtctgtactgatcaaatatgattcttgtcaaagtagtactgcattctactattttacaaaaaaaaaaaaaaaaaagcggcc

SEQ ID NO: 123518 - DNA, 527 bp, Zea mays
  Clone ID: MRT4577_44129C.1
tgtcatctccacttctccagggcccaggctgacgcactgccaagggaagaaaaaccagctcccttgcaaatggcgattccgtgtgttcaagcgggacgatgcctgcttcaaggcaacgtcgtctagcgaaggaaattgcctcgtccagtacctcctctccatgcttcctcagtgacgctcatctcatctccactccacttctccgccagcgccgcgacatctccaggcgtgggctgaagctgaatggtgagcagtgagttggtggctgtgggcctgtggctgctggtgcaggcgtgcacctggctgggcggtggccgactggctctggccgccggtgtgcttgtgtttgtgtgtgcagtgcagctggctggtgcagatgtgcttgtgtttttattttattcatatcttattcttgagaacttgatgtatcttctcttatcatgagtgactgtgtgattgtgagtatcctgaatagctattattattgtggttgtgtaaaaaaaaaaaaaaaaaaggcccctagggcc

SEQ ID NO: 123519 - DNA, 255 bp, Zea mays
  Clone ID: MRT4577_4412C.1
ggtggactgactcctgaactgtggataggggtgatagcgtgctcgagaatcgagcggaccacggcggcaatggcacggacacggaggagcagatgtacaacatgggtcggctacttggcaagtctgaggaggaccttctcaagatcgtcatcgacagtacctgtgcgagacgcactgtattcaccgatctactacaggacgcgtacagccattaccgggacaaggttgctataaggatatagtgtctctcgagcc

SEQ ID NO: 123520 - DNA, 571 bp, Zea mays
  unsure (1)..(571): unsure at all n locations
  Clone ID: MRT4577_44130C.1
gccacgcgtccgcccgaccccaaggccgaacgggggaagttttgcagtcccagcctccgggtagcgcagcgggggcgggaggtcagcttcccgcctcgtctgggtcggttcggccccgctccgacgcgtggtgggcgcgagcgcgaccagtctgcgaccccccggcttcagtcagcgttagtgaggttgaggctctattcgagctgttcaagagcataagtggttcggtgattgatgatggcctgatcaacaaggaagaattccagctagcactatttaagaatcagaggaaagaaaatcttttcgccaatcggatatttgaccttttcgatgtcaagaaaaggggtgtcattgattttggtgactntgtccgagctctaaatgtgtttcatccaaatatcccaatggaagaaaaagtcgatttctcgttcaagctatacgatatggatggcacagggtttattgaacgaaaggaggttaagcagatgttaattgctctcctaggagaatcagaaatgaggctatctgatgagatcattgagacactcctggatgagacattttcagatgc

SEQ ID NO: 123521 - DNA, 1761 bp, Zea mays
  Clone ID: MRT4577_44131C.1
tgcctcacggggcccgggggctccgagcggggccgccagcgcgactccccgcctcgtctcggccggttcggccccgctccgacgcgtggtgggcgcgagcgcgaccagtctgcgacccccggcttcaggtccgttccgcaccccgcttcgtccaaccaatcgccgccgcgtctcgtcgcatcgcctccttttcccccgcccgcgcccggacggcggcctcgcctcgccagaagaacccaggctgcagccgaaacccccggtctccgtcatccgaccccgcctcgacggcccagatccacttgccgccgctgccctcgtgctcctcactccctcgcctcctccggggccgcggctccgcggcgaagacagctgcgagcggggcggccatttctaggcggaagcgcgggcggctgggctagcagattgattggtttgagtggttgggtcggctctaggaaacgccccgccgcggcgatggggtgcttccattccacggcgaagcggcaacaccctggctacgaggaccccgtgcacctcgcctcccagaccgccttcagcgttagtgaggttgaggctctattcgagctgttcaagagcataagtggttcggtgattgatgatggcctgatcaacaaggaagaattccagctagcactatttaagaatcagaggaaagaaaatcttttcgccaatcggatatttgaccttttcgatgtcaagaaaaggggtgtcattgattttggtgactttgtccgagctctaaatgtgtttcatccaaatatcccaatggaagaaaaagtcgatttctcgttcaagctatacgatatggatggcacagggtttattgaacgaaaggaggttaagcagatgttaattgctctcctaggagaatcagaaatgaggctatctgatgagatcattgagacaatcctggataagacattttcagatgctgatgcaaatcaggatggaaaaatagatagaacagagtgggagaattttgtcacaagaaatccttccttgatgaagataatgactctgccatacctcaaggacataacaacaacattccctagctttgtgtttaactcggaagtcgacgatctcgtcacgtgaccaccactctctccgatgtatagttaataaggagttttttctcccctcaaccgcaaaaaggagaacctgtcgagggttacgagtggagatttccagctttctctggcaatgaatggagggtgcgtcaaattggctgccacaaatgtacgagacgacctgtagttttcactcagggcttgtttgggagcaagtggaatgaagggtattgataggactataatcccttgctatctaaaattgaatagtggaggattatatgccctccaattcactccattacctttactcccaaacaagccctcaatggtaatgatgatgcttttgtgttggtgatgattgagactgagttagtatgcagatgtgaacagtttccatttttaccagtgggaaggctgttttgtttgtgaaactgcgatgtgcttgtttgcacactgtactgatcaaacctttgtcttgtcaaatgcgacgtgcgtgtctgtactgatcaaatatgattcttgtcaaagtagtactgcattctactattgagaaaaaaaaaaaaaaaaaatttttaaggcgtcgcctaggcgtccaggcgctcggctaaaccttggcgccttgcccgcctaggcgctaaggcgctcggagtgtttgcttgctcgccta

SEQ ID NO: 123522 - DNA, 255 bp, Zea mays
  Clone ID: MRT4577_44132C.1
aggagatgctggtatatgctgtcggccgcatcgtatacccgaaccgcgaggccctcatcgccagcatggcgcgtgggagcgagcataccaatggcctggagtgctccgacgtagaggcttgagattcctggtgtcatgggccgccaagggaaactgcccaaaccccggcagaatggtgtatatgctcccgcggagggaagtagtcttgactaatctgtaacacttggggatgcttaatgcgaccatacaagttca

SEQ ID NO: 123523 - DNA, 448 bp, Zea mays
  unsure (1)..(448): unsure at all n locations
  Clone ID: MRT4577_44133C.1
agtggagatctaggaggaggtcgcggtgccgtttctcctttttngcgcagcagcacctcattcccccatgccatcgatcccggcctccgtgactccgtcgaccccaaccatcgtcgcacggagatgtgccctgggcctacgctcctgctgaccaagctactgaaatgtgctctttgctatttcacaaaagaggcaaaaacaaaagccgataacagaaaacctaatcccccaaaccccaatccatctcgagttgctatttaatgtttctgttcttcccctccgatctgatgtctctagctcctcttcccgtggcgatcgagttgctatttaattgcctctgttttctccttcgacaactgtccaataccttctcccttaggcctggcacggtcttggttggtactgcgtcacatagctcctttgtataggtgtgcttanctcgtacagc

SEQ ID NO: 123524 - DNA, 199 bp, Zea mays
  Clone ID: MRT4577_44134C.1
tcgttcgctatcggtctctcgcctgtacggagccagggacggaggtaaccgaccgattagcactgcattcccaaacaaccactctcatgaacagcgccctcgtgtgcgacaggaccaagacccggactgttttctaacccagccagcagttcgttaccagaaaaccaggtcccggtccaccgctgaggaccgcctctcc

SEQ ID NO: 123525 - DNA, 386 bp, Zea mays
  Clone ID: MRT4577_44135C.1
gggggggggggggcattcctccctacctcaaacatggaaacaatgaaaaaaaacccaggcgggggggccacacaccggggagcccccctgcaaaacaacaaggaaacacccaccaaacatgctttgctggtggcaaagccccccctgggccaaaattttataccaaccgaaccaccggggggcaaaccaccattcattcatcatttaaatataaaaagcaccccaaccaggcgtttttccaaaaaaaaaaacccccggaacgggaaggggcccctccacccatgcattcatccccgagcgaactcggggccccccaagccatggggaatcaaacaaaaacaaaactagctgcctttttacagccttaactactaaccccctttttt

SEQ ID NO: 123526 - DNA, 189 bp, Zea mays
  Clone ID: MRT4577_44136C.1
cggacgcgtgggctgacacgtgttctgactcgttttcctaccgcttccaccttccaactgagggccgggggtgacttccagtcccctccgcatttctcaccgcctttctttccatgtgaggcatcttctctccttctttctttgttctctccccccattcctcctttgactatcgcacaccttcttttt

SEQ ID NO: 123527 - DNA, 479 bp, Zea mays
  Clone ID: MRT4577_44137C.1
ccgggaccagcattccaaccattccattcctacatccaaatactgcaagtcaccaacaccaacacaaaccaccaccacacattacaacgcaaccatgagcgcccaggacatccccactggcgacttccaggacaacgagtaccagagccgtaccgggcagagcgagattcctgtccagaccgacgacaagcccgtcgaggaccccattgaccctgacactgccgattccgatgcccagcttgaggccgacgagaaggacgccatcgaccaaagcaacatcatcgacgagcgtaccagaggtgcgaccaaatcctccggcacctaccaggagcccggtgatgaggagggtcttcctggccctgaagatggcaccagccgtgttgctggtggacctaactagagacgcacacgcatgatctgtcgagtgcacgcataatgcccatatttagataccacaatgaaaacatccttaatcaacc

SEQ ID NO: 123528 - DNA, 590 bp, Zea mays
  Clone ID: MRT4577_44138C.1
gagagctcctggaggcaaatcaacagccatggcgaggtaattgatcagcaacttcgtcaataatgggctgcacttgccctctggttagcttctttagtgacaggggcaagccgagataagtgcaagggaaggaagaaacctggcaaggcagctgctgctgcaggacttccatctccccaacgccgcgacggatgggataaacacagcttttctgcacattagtttgcagccccgaagcttccccaaaaagcttcaaaatgttgagaacaacttgaatgttttgatcttttggctgtaaaaacaataccacatcgtccgaagagggatagcctatgttgcagtggcctggttgatagtggctgcagcagccccctttcctctgctttagagactagaaaaccaagtacatccataaccagtataaaaagcattggtgacaacgggtccccttgtttcaatctgagtggaggaggttgccaaaagaccactaaagatgtctctccaaatctgtccaaaacctagtttctgaagaacttctagaaggaaagcccaagaaatagagtcaaaagcctttgtgatgttcgagtttc

SEQ ID NO: 123529 - DNA, 213 bp, Zea mays
  Clone ID: MRT4577_44139C.1
gaagctcgatcctacgactgtgaacaatgtgtgcaggtctttaagccgtccccaaaacttactaaacatcaggataatttagactggagaggaatcatacaaatgtgaggaatgtggaaaagcttttaacctatcttaacaacttactgacgataagatactttacgctagatagtaagcctacaaatgtaaagtctgtggccgagcctttaa

SEQ ID NO: 123530 - DNA, 257 bp, Zea mays
  Clone ID: MRT4577_4413C.1
gccagcagagtcgtctttcaggttttggcaagctcgggctgtggagagtttcctccgagggaccacctcctatgcagcgcagatgttcctgctgaagcgaggcctcttggagcacatcctttactgcattgtggacagcgagtgtaagtcaagggatgtgctccagagttactttgacctcctgggggagctgatgaagttcaacgttgatgcattcaagagattcaatacatatatcaacaccgatgcaaagttcc

SEQ ID NO: 123531 - DNA, 287 bp, Zea mays
  Clone ID: MRT4577_44140C.1
ggacccccgcaaaccaagccactagttttttcatatcttgtaaccttggggcacccaaaattaagggcaccggagtggctattttgggtgtaaagggttcgaacaccaaagagaaaaaccggctttcttgggggagagggccctccaactctggcgtcctaactgataatagcaaaaactatcttgctaaaaccaaaaatggatctggtttgtcctggattcacccggctgtaaccccttttattaaactgactccttggtgattttttcgcccttattaattcctt

SEQ ID NO: 123532 - DNA, 276 bp, Zea mays
  Clone ID: MRT4577_44141C.1
gaaaagaaaaacatattggacgtggaacaagtagggacgactccaccgcctacagcctacatgactcggaatgaacgatgaaactgcatatatattatttcacacgcatgcgcccatactgccattcaacgtatctagatggtgtacactgtcggaccaaacactgggccaccagcaggacgcttaaatatgacttaactatcatatttttgacacctcattcaacacacactggaataggaggaactcatccaaaactcacacgagctcagacta

SEQ ID NO: 123533 - DNA, 292 bp, Zea mays
  Clone ID: MRT4577_44142C.1
gtcactcactgcatcgttcgttcattcattaactactggaaattatagagccacatctgttggtctgtgaacctgcggggaaggactaacgagtcgaatatgactgcggcggtgctttccgtgcgcacgacgactacttctctgctagcagcagtcatcctgtgcctatgcatcgtctccctctccccccgctgagccgctgtcgcgcggttttccctcggcgccagcccatgacgctcgtgatgcgctctgccttcgacgtctcgttctgcaccgtcagctgcatggagct

SEQ ID NO: 123534 - DNA, 682 bp, Zea mays
  Clone ID: MRT4577_44143C.1
ccggccggggtatccctctgcgctcttctcttttcctttccccgcgacacctactcttttcccacctcgccctcgtccttcccggtgaccgccgctagcgccgacccaccctgcctccttcctccttgggctggtggctgccgcgagcttctctctcagcaccttgtttgctcgcgcgagggtgcgccatgcccatccggcattcttcggtggcgacgcgtgtgcggatctgcgtttttcttccagacgggctttgagcgggtcctccccatcttgacccctccctcccttcgtccattgccgcccgacgcgccgtcgctcactacacacacggatggatctccctccgagcgctaccgtgattcagtaaggcggcccagaggctacgatggagcgggagacagattgagcgccggtaatgccactgccacacccgacggacgtgccacgagtaggaggcgccgacgaaggcggtgcccttcgcgactacggcgccggtttcggtcaaggagaagcagagcctttccgggacgccaggtctgtgtgcgcccgccgtgttgccttgctgatggtgtgcgtgtgtactattgcaactctctcggcgcccgcttgctctagcagtttgctatcttggccgccgtcgcccatctgtggccgcagatcggacatcgaggtgattgcg

SEQ ID NO: 123535 - DNA, 347 bp, Zea mays
  Clone ID: MRT4577_44144C.1
gaactttattttttttttttttttttttttttgtgttttttgggcgattatagggtatttttttcacccgatgctccacaaccattaaccgtcagccggcatcagggttgtaattctgttggaactggttccaattcttaaactgagatgctatataaccgtcctaccactggaccatagatggggaaaacacctggttcaaaacctactaggattctaaactggacaactccggactccaaaacaagcatctcgcaaacaaagctttttgtgctaacggcacctattgttgaatacactccccactgaaggattgcttactggtttcttatctcaaaaatagatgg

SEQ ID NO: 123536 - DNA, 301 bp, Zea mays
  unsure (1)..(301): unsure at all n locations
  Clone ID: MRT4577_44145C.1
aacttaaaatgtcagctacaataaaacaggccaccaacaagggggggtatcttgaaacttattttaacaccaagacaaaacgggntacagcgagcgcacatgagcaaaccctggccagacacaacataatcgcccagcaacacataccactttcgtcccttggcgctaaagccaaagaggacccaacagaaagcccgttccaacaatggctaaatcagaatgcataatcatacaaacgatgactgaccgccctaaagcacggaacttaatttgacacaacggcccgtgacagctgcaagcc

SEQ ID NO: 123537 - DNA, 763 bp, Zea mays
  Clone ID: MRT4577_44146C.1
cttcccaacactacgaccgcctctctcttgtgtcggcaacagcagcgcagccagtagcccagtactccttgctccacgccgccgctcaaaaccggcagaagtaagaacggggagggaagcacgccccaaacgttccgaggtttcgcctctcggagcgcaccaacgccacccggagcgactcgccaccggcgcggagaaggagggcggaggctaggcgatggcggacgagaatgaggctgggaagaaagaggaagaggaatttagcacaggccctctgtcagtactaatgatgagtgttaagaacaacacccaggttctcatcaattgccgcaacaacaagaagctgcttggccgggttcgtgcttttgatcgccactgtaacatggtgcttgagaacgtgcgggagatgtggacagaggtccccaagactggcaagggcaaaaagaaggctctgcctgtgaacaaggatagattcatcagcaagatgttcctcaggggcgactcggtcatcatcgtgctgaggaaccccaagtgatcgcccaaccggaagccaggtctctgttgaaaactgtagcttatgatgtatgttggggatgattaactggttatcttgaactgacgttcatgtggcatcgcaatggcacatgaacatacggcgttccatgagtttgttaaccggagtatgaacctaccacctgcggtatttgatccctgaatgttgagtttgcacttctgcttattattgccttgccccaccgtgttt

SEQ ID NO: 123538 - DNA, 260 bp, Zea mays
  Clone ID: MRT4577_44147C.1
ctttttcttatttgattggattgcttctatacggtggcgactttataatattaccgagcacaactttcatcaataacaagagggtgcgctgactttgatcattacttttgaatagacccagcagctcttatgggaggatccatacattctggtgtgttattggggaatggagtgtgtttctatttataacatgaatgtgtgatttttatccctgctaatgtttggctgtttgaattacaggcaccaagatggactttttc

SEQ ID NO: 123539 - DNA, 1068 bp, Zea mays
  Clone ID: MRT4577_44148C.1
ccggccgggcggcggcgacgtgatgaagaagaacttgctcacgccgccgctcgaaaccggcagaagtttagaagaacggggagggaagcacgcccccaaacgttccgaggtttcgcctctcggagcgcaccaacgccacccggagcgactcgccaccggcgcggagaaggagggcggaggctaggcgatggcggacgagaatgaggctgggaagaaagaggaagaggaatttagcacaggccctctgtcagtactaatgatgagtgttaagaacaacacccaggttctcatcaattgccgcaacaacaagaagctgcttggccgggttcgtgcttttgatcgccactgtaacatggtgctcgagaacgtgcgggagatgtggacagaggtccccaagactggcaagggcaaaaagaaggctctgcctgtgaacaaggatagattcatcagcaagatgttcctcaggggcgactcggtcatcatcgtgctgaggaaccccaagtgacagcccaaccggaagccaggtctctgttgaaaactgtagcttatgatgtatgttggggatgattaaggccttgttcgtttacgtcggattgcaaccggaatcattccagctaatcaaagtttatataaattagagaagtaatccggctaggaatcgttccaacccaccaatccgatagaaacgaacaaggcctaactggttatcttgaactgacgttcatgtggcatcgcaatggcacatgaacatacggcgttccatgagtttgttaaccggaatatgaacctaccacctgcggtatttgatccctgaatgttgagtttgcacttctgcttaaaaaaaaaaaaaaaaaaaaaaaaaaaaccctcatcccaaatctcaacccaagaacaaaaatggccaccgccaccactgaagccgaagtccgtgagtccctcggcacgaagttcggtcgcctcaaggaacaggcgaaagacatggcctccaggcaccccgtcgctggagccgcggccgtcatcgctgtcagcgccgtgggcgcctacttcttgtggcccgggcagccccgg

SEQ ID NO: 123540 - DNA, 821 bp, Zea mays
  Clone ID: MRT4577_44149C.1
agaacggggagggaagcacgcccccaaacgttccgaggttcgcctctcggagcgcaccaacgccacccggagcgactcgccaccggcgcggagaaggagggcggaggctaggcgatggcggacgagaatgaggctgggaagaaagaggaagaggaatttagcacaggccctctgtcagtactaatgatgagtgttaagaacaacacccaggttctcatcaattgccgcaacaacaagaagctgcttggccgggttcgtgcttttgatcgccactgtaacatggtgctcgagaacgtgcgggagatgtggacagaggtccccaagactggcaagggcaaaaagaaggctctgcctgtgaacaaggatagattcatcagcaagatgttcctcaggggcgactcggtcatcatcgtgctgaggaaccccaagtgaccgcccaaccggaagccagttccaacttacagcaaagggtttctattttgcttcaagccttcaatggcggtggcggatccatgagaaacctaacgttctttgatgggacgtgctcgcaacagacagtcagctatgactgatgtgatgcactaccgtctaccaaaatttaatatacatgtacagttaaagggagtttgggctgattgcattacgccacagaccacactcaacaagctctcatcgagtctgtaactctgtactcagtactgttccatccggcctgacctgagctatttgtatgctggcatggacggatagagtctggatattctcggacagtctagattgacgtaattatttttatttggtgaacttgtatttgttggatc

SEQ ID NO: 123541 - DNA, 316 bp, Zea mays
  Clone ID: MRT4577_4414C.1
tcttgttaatggagtaaactgtgcaactggaggatgccatgtctcttatagtaagtcactaactggatcccatggaaatgggctatcaggatctgtttttccaactaccggcttttcaggtgtggtagaaactgaagatggatcactggaggatgttatttcttctcaaaattctgctgtttcttcccagaattccccagattacgttgttcgtagaaccgatccaataggttctagttcgttacaaaatttcactgaagagggctgtattatgagaaatatgtccaatgggactggcatctctactgactataca

SEQ ID NO: 123542 - DNA, 803 bp, Zea mays
  Clone ID: MRT4577_44150C.1
ccggccgggaaatccctctccctctggattcctcctccggtcctcccgtttcccccttctccttccgcttcgccattccttctcggtcagaacgacgcgcatccccgcccgcacgttcctgtgctctcgcttctccggaggcgactcgggttgggacttgggaggctagcgagaaggtgctacctgggccaactcctccgatcgcccgcaggagaagggtacctctccgcctccccgccctcgtcgggcctttcccatcgccacccgcgaggccacgcgctccagctcttgtgaaccggaagggttctggatttcggagccaagcgaccagcgcggtggctcggccgggctgacactcccctcccctgtcgcccggtctcttccttcccgagcggaactcccctgcgtcttgccgcttctggagaaaaattatagaggaaggacatgcgggatccatttgatgcaccggttgatctcattaacccagaccataatggtgggaacaaactttctaggactggtgcagtgtctgctggggactatggtttacaaaatggacccaaatcctttgctccaaactccgacaccctagtcaggcatcaagtccagggtgcatccttgcacaaagacttagttttggaagatcccaatactcgtatcatggatcctgagaccaaggaactttactttagatcacaatcacaagaggatgagatcttgttgcttcgcaagaaaattgctgaggcatctctcaaggagctgagtttactgggtgaaaaacatattctggagaggaggctcac

SEQ ID NO: 123543 - DNA, 1290 bp, Zea mays
  unsure (1)..(1290): unsure at all n locations
  Clone ID: MRT4577_44151C.1
aaataagaatgctcttcaacaatatgctcaaggtccaagtgaccgacatattgagcaaatgtaccatggatccagttttcagcaggatactggaggtactactccctctaattattttgaagaaggaagagtagacggtggctcacagttatacccatctgatggtgatgctttacctggtattgagggatttcaaattgctggtgaacctagaccaggatgtcaattaacagcatgcggtttccctacaaatggtactaccctttgcaatttccaggtatgttgttttctgctcttttgttatgattttttataattgctataaatgtcaattcttgtaaataaaacctttcaccccattgatgttgctgttttagtgggttcgccatcttgaaaatggtatcaaacagtctatcgaaggtgccacgatgtatgactatgtggttactgcagatgatgttggtactcttcttgctgtagactgtacgcctatggatgacaatggccgccagggtgatttggtgacagaatttgctaataatgggaataagataacatgtgatccagagatgcagagtcatatcgatgcatgtatttctaaagggagagctgaatttgaagtttttgtcctggcttattctcctgaggaatgggaactggctacattggtgctcacacgacctaattatcagattaagttcaaacagaccggtaatgttgtaattgacgagaagtactcacaaagtctacagacaaaaattccaaatgggcgcacaactcagtttgttttaataactgcgggtacaactcttccatttaacacacagggaatatcagagccaaacaatgaggattacgatgttaggttacgtgatctaatcgtattagtcatgagaacttttcagaaaaaggctctagatgctaaaaggaaaggaaaggcttagaattcatgtaaatcttttacaaaagtagaaccgtagaagattttcctatttctgattgttttgtgcagtatttgataatttttgtccttgaggtggaatgagcttctcgatagagcaggaatttcaagagttacctggtgggcacataaatggttagaggaacgtaggatcgattcttatcctaattctttttttccttcgcattgcttactctaagttaagccatgtcactgcggtctttgtaaattctaagcagccagtgctgcaaataaacctatgagatgttcgctgcagctcttggatgacttaacatgcccatatgattgttgattttgtttaannaaaa

SEQ ID NO: 123544 - DNA, 381 bp, Zea mays
  Clone ID: MRT4577_44152C.1
ggaaaaatgcccacactgaaaagggttataccccggatggagccgcaagcaaataaaaaccagacaaaaggcaccggatacacataaagggggggggggaaacacatagaaaataaaagggccgggagggaaaaaaaagccgggcgacgggggggtacactaaaaagtacaaacactgcgaagggcggggccggctaggcacggcccaaagggggggggccgtaacggggcgggggggccttttcacccgccttggacactcaggggcaggcgttggcggggtggctgggaaaaaaccctggggggaacccccgccccctaggggctcccgggactttctggacgggggcttggggggcatcctttttttttttttggggg

SEQ ID NO: 123545 - DNA, 2269 bp, Zea mays
  unsure (1)..(2269): unsure at all n locations
  Clone ID: MRT4577_44153C.1
tccctctccctctggattcctcctccggtgctcccgttttcccccttccccttccgcttcgccattccttctcggtcagaacgacgcgcatccccgcccgcacgttcccgtgctctcgcttctccggaggcgaccggggttgggacttgggaggctagcgagaaggtgctgcctgggccaactcctccgatcgcccgcaggagaaggtatctctccgcctccccgccctcgtcgggcctttcccatcgccacccgcgaggccacgcgctctagctcttgtgaaccggaagggttctggatttctgagccaagcgaccagcgcggtggctcggccgggctgacactcccctcccctgtcgcccggtctcttccttcccgagcggaactcccatgcgtcttgccgctaattctattttgcttcgcattgcttgctctaagttaagccatgtcactgcggtccttgtaaatttttagcagccactgctgcaaataaacctacaaaatgttcggtgcagctcttggatgtgctaggaactatgctttacaaaatggacccaaatcctttgccccaaactccgacaccctagtcaggcatcaagtccaggttgcatccttgcacaaagacttagttttggaagatcccaatactcgtatcatggatcctttgaccgatccaattacttttatcatggaacctgagacgaaggagcttttctttagatcaaagaaacttggggacgagattctgttgcttcgcaggaaaatggctgagacatatatccaggagatgagattcctgggttaaaaacttattgtggagaggaagcacacagactctagaattggtgttgacgagcaatagaacgagaatataactggtgctttgcaacaaatgagacagaagaaaaaacatctagaggacaatatgagactgtaaaatgaaattaatgtattggtaggcatgctagaatattttacttctcgctcacttcacataattgcttcattcattacaagtcttactaaacgttaggcccccaagattccaattaagcccaggtgtttatatgaccagttaggtgatatgactcaatctggaaatatatataatcccaatcttcagcaagtaaccctatcaagaaatgaaccttccccatcttataatttggattcaaataggaacactcttcaacagtatgctcaaggtccaagtgaccgacatatggatcaaatgtaccatggatccaattttcagcaggatactggcggtactactccctctaattattttgggggagacagaagagtagatggtgactcacagttataccaacctgatggtgacactttacctggtattgaggggtttcaaattgctggtgaacctagaccaggatttcaattaacagcatgcggttttcctactaatggtactaccctttgcaatttccagtgggttcgccatcttgaaaatggtaccagacagtctatcgaaggtgccacgatgtatgactatgtggtcactgcagatgatgttggtactcttcttgctgtagactgtacgcctatggatgacaatggccgccagggtgatttggtgacagaatttgctaataatgggaataagataacatgtgatccagagatgcagagtcatatcgatgcatgtatttctaatgggagagctgaatttgaagtttttgtcctggcttattctcctgaggagtgggaattggctacattggtgctaacacgacctaactatcagattaagttcaaaaagaccggtgaagctataattgatgagaagtactcacaaagtctacagatgaaaattccaaatgggcgcacaactcaatttgttttagtaactgcgggtgcaactctcccatttaacacacagggaatatcagagccaaacaatgaggattacgatgttaggttacgcgatctaatcgtattagtcatgagaactttccagaaaaaggctttagatgccaaaaggaaagtcaacacttagaatccatgttgatctgttacaaaagattctatgtaaaaccgtagaaaattttcctatttttgattgttttgtgcagtattcgatgatttttgttcttgagatggaatgagctctcgatcaaagttttactaggtgctgttcttgagatggaatgagctctcgatcaaaaaaaaaaaatatcccttttatatgtcaatttctgatcttgaaccaattgttttctggnttgtgtgtttacatgttttcatt

SEQ ID NO: 123546 - DNA, 276 bp, Zea mays
  Clone ID: MRT4577_44154C.1
gtgccacctactataaggtttatattagatggagagatgccgccttatttacttgcaaaggacctgattttgcaaattattggtgagatttcagtatctggtgcgacctacaaatcaatggagtttgttggatcaactgtagaaagtctaaccctttttctgaccagcttttttgagaatttggctgtgaggagaatctggctgtggagagaatctgagtatcgtggggattacgtgcggaggaagatgaagtggtctaaagggttcaggatctag

SEQ ID NO: 123547 - DNA, 251 bp, Zea mays
  Clone ID: MRT4577_44155C.1
tcggtcagcgcattgatccatacccacccggagcttggatacttggagttccagaccagcgagctcgtgcgccgggagctccacgccatggggatcccctacaggcaccccttcgtcgtcaccggcgtggtagctactgtcggcaccggcggtccgtccttcgttgttctgtggtcggacatggacgcgctgtccttacaagaaatgtgtggagtgggaacactataacaaaatccctttgaagacgcatg

SEQ ID NO: 123548 - DNA, 847 bp, Zea mays
  Clone ID: MRT4577_44156C.1
tgatctgcacggggaagaacccgctgacgcggccgtcgatgaaagaggtcctgcaccagctcatcaggtgcgaacagatcgccgctgaggcagaggcgtgccaggcgagctaccagggcggcggaggcggcggcacgccgcttcctcgagtcgaggaagaaaggcagccggcgacggagcatgtctgactccggacggtggaacgacgacgacgaggaggacagcggcaacttcgttgtgcacgtggtgtagtcggttcggacagtatacagctactggcctcctgctgcaagctcatccatggaggaatttcgtagaggcgccggaggccggcatgagcgcaagaacaaacaaccaagtgtagtatatagatgagtgaacgaagaggtgctgtgatttagctacaaaaccagaagccaatctccaatcacacaagaaggaggttcttggaggtgttggatcgcgatcgcacttagcaagtgtcaatactgcgtgtaataacaagtgccagttttgggcacttttgggtttcagaaaacttggagaccacaaaatctcaggaaatgtcaatggggcatgagtgggtcggcttatctgcaattgtctgtgcttcgtactgcatgctgaaagaatgtgtcaagggctcaaggcttactacagcaggtcgcgcaaagcgtcccggacgcgcaattttcgtggtcggacgcgagcgccaaaatgaggaggctgcgcaaaacaaagcgtattcttgtgtcgaggagtttactgcacatagtgcatatattaaatcatcactatacattttagatctaatatttttagttgatcattataatttacaaataaa

SEQ ID NO: 123549 - DNA, 3252 bp, Zea mays
  unsure (1)..(3252): unsure at all n locations
  Clone ID: MRT4577_44157C.1
cggacccggggcgccacgcgtgcgccggaagcgccagtgcggcttccggggcgcggctgccctccctggcgcgctcccgcgcactgcacgccgttagactgtctccagatcgatttgtcaacgaatcagctcaccggagatatacctgaagatttcggcaatctcaagaacctcacaatactgtttctgtacaacaaccagctcagcggcaccatcccggcaagcatcgggctgttaccacagctcaaggatatccgcttgttccaaaaccagctgtccggagagctcccgccggagctgggcaagcactcgccgttgggcaacctcgaggtgtccatcaacaacctctccggcccgctgcgagagtcgctctgcgccaacgggaagctcttcgacatcgtcgccttcaacaacagcttctcaggcgagctccccgcggaactcggggactgcatcactataaacaacctgatgctacacaacaacaacttctcaggcgacttcccggagaagatatggtcgttcccgaatctgaccttggtgatggtccagaacaacagtttcaccggcaccctgccggcccagatatcctccaaaatggcacggattgagataggcaacaacaggttctccggctccttcccggcctctgcaccagcgctcaaggtgctccatgcggagaacaaccggctgggcggcgagttgccgcctgacatgagcaagctcgccaaccttactgatttgtcagtgcccggcaaccagatctctggctccatcccaacatcgatcaagctgctgcagaaactgaattcactcgacatgagaggcaaccggctgtccagcgccatacctcctgggagcatcgggcttctcccagcactgacgatgcttgacctgtccgacaatgagatcaccggcagcatcccgtcagacgtaagcaacgtgttcaacttgcttaacttgtcatcaaaccagctcaccggcgaggtgccggcgcagctgcagagtgcagcctacgaccagagcttcctcggcaaccggctctgcgccagggcggactcaggcacgaacctcccaacgtgtccagccggatgccgggggtgccacgacgagctttccaagggcctgatcatcctcttcgcgatgctcgctgccattgtcctcgtcggctgcatcggcattgcctggctgctgttccggcgccggaaggagagccaggaggtgacggactggaagatgacggcgttcacgcagctcaacttctccgaatcggacgtgctcagcaacatccgcgaggagaacgtgatcggcagcggcgggtccggaaaggtgtaccggatccatctcggcaacggtaatgccagccacagcgaggagcgcggcatcggcggcgacggcaggatggtcgccgtcaagaggatatggaactcaaggaaggtcgacgagaagctggacaaggagttcgaatcggaggtgaaggtgctgggcaacatcaggcacaacaacatcgtgaagctgctctgctgcatctcgagccaggaagccaagttgctggtgtacgagtacatggagaacggcagcctggaccggtggctgcaccaccgagaccgggagggcgcgcccgcgccgctggactggccgaccaggctcgccatcgccgtcgacgcggccaaggggctcagctacatgcaccacgactgcgctcccccgatcgtgcaccgcgacgtcaagtccagcaacatcctgctggacccggacttccaggccaagatcgccgactttgggctcgcccggattctcgtcaagtcaggcgagccccagtcagtgtcagccatcggcgggacattcgggtacatggctccagaatatgggtacaggccgaaggtaagcgagaaggtggacgtctacagcttcggcgtcgtcctgctagaacttacaaccggcaaggtcgcgaacgacagcggcgcggacctgtgcctggcagaatgggcatggcggcggtaccagagaggcccgctactcgacgacgtcgtcgacgaagccatccgggagccggcttacatgcaagatatcctgtcggtgttcaccctcggcgtgatctgcacgggggagaacccgctgacgcggccgtcgatgaaagaggtcctgcaccagctcatcaggtgcgagcagatcgccgctgaggcagaggcgtgccaggcgagctaccagggcggcggaggcggcggcacgccgctcctcgagtcgaggaagaaaggcagccggcgacggagcatgtctgactccggacggtggaacgacgacgacgaggaggacagcggcaacttcgttgtgcacgtggtgtagtcggttcggacagtatacagctactggcctcctgctgcaagctcatccatggaggaatttggtagaggcgccggaggccggcctctgcggagcaggcgcctgaagatgaccgatccggcatgagcgcaagaacaaacaaccaagtgtagtatatagatgaatgaacgaagaggtaaggctgtgatttagctacaaaaccacaagccaatctccaatcacacaagaaggaggttctggagatgttggatcgcgatcgcacttagcaagtgtcaatactgcgtgtaataacaagtgccagttttgggcacttttgggtttcagaaaactgaagaccacaaaatctcaggaaatgccaatgggtcatgagtgggtcgcttatctgcaattgtctgtgcttcgtactgcaggctgaaagaatgtgtcagggcttactccagcaggtcgcgcaaagcgtcccggacgcgcaattttcgtggtcggacgcgggcgccaaaatgaggaggctgcgcaaaacgaagcgtattcttctgtaatctctcttttcctcctgcattcattccttgcaacggccacggcctctcccctcgccgcgagagcgcccaacctggcgtctcctccgccgccgccggtttccctggagcaggtgaatggggacgggaagcgactgccggcggtgagcgaaggatcctgtcccaggccgaagtccactcgtcgtcgccgcaagaggcgccgcaccacttcgtcggagagcgacatatattcgattgcaacaccgaaggctgcaaggtttcttccaaatccgaactcgtgctcctagatctgtgtatcttccatgttttcccactaaagcccccgttggntagggtaactaaagtttagtgactaaattttagtcacttttaatcc

SEQ ID NO: 123550 - DNA, 142 bp, Zea mays
  Clone ID: MRT4577_44158C.1
ctctggaaccgctctcgggagccctggcggccggcaaccgtggtggtgaaccgtcggagctcgcgcggcactcgcgttctcgggcacataccagtactgatcaagcgtgagtgtgagcgcgagtggaacttggccgtgaagt

SEQ ID NO: 123551 - DNA, 339 bp, Zea mays
  Clone ID: MRT4577_44159C.1
ctcctttttatcactagtcgcaattcatccccgggccgtgcgtttattttttcggggggcaacatcacaacttaaattccatcataaccagaaccgccctattacttcctttctatccagacccacaaaaactgcagtccctatctccattccccccaaacacattttacaaaacaatcctttcccaaaactcgccagcttgttaccccgaaacactcttcccggctgaactttttacgtatcaccaacacccctctttgttgttttttttcgcgcgcgcaccgcgactctttggtttgcattgcgccatcctgaccatcagaaggcagacttcttttt

SEQ ID NO: 123552 - DNA, 201 bp, Zea mays
  unsure (1)..(201): unsure at all n locations
  Clone ID: MRT4577_4415C.1
ttgtcattcggatgcaagttggaatccggctcgagagagcggcctgtgacagcctcaagggcttttttaccgcgcccatggcatagtcagaccgattcagagtcagacacngagggaggagccgctggcgtagatagcagacaaggatgccctgcggaacggatacactcagacgcacagcctgtgcagccagaagagcgt

SEQ ID NO: 123553 - DNA, 277 bp, Zea mays
  Clone ID: MRT4577_44160C.1
ctgttgggacagtctgcctctacccgtcccagctgccgttgagcgccctgggttccgctagggcctcccttctcgctcaggagaccaggggcagaccagggcttgtgcctggcatgaggtctcttaagtgacccgttccgccttcacccagcacctttgttgagggcctgccatatctgggccccgagtacccagtctgtagggaaagtggacatccatactcaccccccaggcatggccctgggaggctgactgtgcatggctccagggaggccag

SEQ ID NO: 123554 - DNA, 209 bp, Zea mays
  Clone ID: MRT4577_44161C.1
atccaggggcaatcgaatataaattttcttccggcgtggccaagggaggtgccgagtctgtaccagtacgacgactcaggccagaacacacggcgtatggtatggtacacagcaaggccgtgttgttgctgtaagttttgtaatttctgtttccttctcggcttcgcaacatgcccagtaacagagtgttcttccatcatatacagcaa

SEQ ID NO: 123555 - DNA, 379 bp, Zea mays
  Clone ID: MRT4577_44162C.1
agcacgccaacacctacagatggttcaacgccaacaccaacatcgggtcagccgtctgatcccacttctactggtgatcctagtactgcaacaccgtctccgccttcggatcccaacgcgacgccgactcccccaccagatggttccaccaacactggaccagatggaacgactccaagcaatccagatgggaagccgacaccgccaacaccagattcgttgggtggttcgaatcctagcccaagtcaagatccttcgagtacgagtacaagcactgctccacccacgggctctcctagtccagatgcgccgccgtctcgtaggaattatcgaccgcgtgggcatagtggagagtacttcaagagatcccctctcaata

SEQ ID NO: 123556 - DNA, 477 bp, Zea mays
  Clone ID: MRT4577_44163C.1
cagtagatctctttatctcatctctatttcaaacagaaacagaagacataatttatgtctgtatgattataaatcgtttgcggcggcggcggacgggagtgccaaagttgcaaatttctccgttgcaggggccgagcagctagctgcatgcataatggaggcgggcaggcaggcgccacatggctggcagccgatgattgttcatgctagctgcgcggccgttccagcaaacaacacacatggcttagtgggtaatccggcaaacgagtcgctatatagatactagactaatacggcagaaaccacagctcattcaacacatgccaccgcacacccccctcctcagccgcggtcggacggtcagcacaaggggcactaactacgcagggtgcctgtcggtgcgcccttggattggttggaagaaaaataggacagattgcaacaagccaacggccggctaacagccccagattcatt

SEQ ID NO: 123557 - DNA, 285 bp, Zea mays
  Clone ID: MRT4577_44164C.1
gccactcgtacgacgacgcgtcagactggaggccgggggggctactacctgcgtacggggcaaacacgactcaataaccttcacacgtaaacccctacgaaccacgggatcctgacctcggcctaccgctgagacagtgcagatattcctacacaggagttagcaccaaatgacagactgcgtcatgacaaaccgaaactgtgggctccaatccagtgaacgaaccactagttaggaggcccatatcccgacgctgtaaccgggaggcctatacgggaacctttt

SEQ ID NO: 123558 - DNA, 1037 bp, Zea mays
  Clone ID: MRT4577_44165C.1
ccggccgggcctcttttttccccaaaagaaatcttggggcatgccacgagcctagctttttcatggcaaatcctgattactagtttcttttatcttgctcttttttttcgaaaataggagggcacaggaggaggaagatggcgtcgaagaggatccagaaggagctcaaggatcttcagaaggaccctcccacctcgtgcagtgcaggtcctgttggtgaagatatattccactggcaggcaacaataatgggtccatctgatagcccatattctggtggagttttcctagttacaatccattttcctcccgattatcctttcaaaccaccaaaggtggcattccgcaccaaggtgttccatccaaacatcaacagcaacgggagcatctgccttgacatcctgaaggaccagtggagcccggcgctaaccatctccaaggtgctgctgtccatctgctccctgctgaccgatccgaaccccgacgatcctctggtccccgagatagcgcacatgtacaagacggaccggaacaagtacgagaacaccgcgaggacctggacccaaaggtacgccatgtagggagggggtaccctacctggccctttgggggtccgccggaattgccgctgctgcgttgtgttcctggacctggacctggactggagactggacgtgtctccgtgtattagatcctgtgctgccccccccccccccagattgggtttgcagtgcagtgcgccgtgtggtgctgaatgctgtattgcgtcgcttggaggctgtaattctgaatgccaaaatactggtgattggaaccattttgcgttggatgctgctgcaggcgaggccatgtttgcgtccttttcccttcaccggtcatcgtgttggaagaaagggcgatccggagcaggtggtttcatttttttttactggcatttcaattcttttttttttcactaaggaggcctggatcaagaattacaatatacttaatagagtagattatctggttttaaaaaaaaaaaaaaaaaagcggcc

SEQ ID NO: 123559 - DNA, 425 bp, Zea mays
  Clone ID: MRT4577_44166C.1
gaacctccagagaataggtcctcttggacagctcgtctccatgatacctggatttagcggccagtttattgaaaagggaaatgagaaggaaggccaagcgaagattaagcggtacatgacaatgatggactccatgaccgatgcagagcttgacgggacggacccaaagctgatgaaccagtcacgaatcaaccggatcgctcggggatccggcaggcgcgtggaggaagtggtgcacatgctggacgagtacaagcgaattgccaaggtgtggaagaaattgccagtgttgaacaacaacaggagatcggatatgaaccgcgacattaggcgcataagcgatgcgattcctcccaatatgctgactcagcttggtggcatcgctgggctgcagaatatgatcaaacaaatgggcgggcgcgatc

SEQ ID NO: 123560 - DNA, 734 bp, Zea mays
  unsure (1)..(734): unsure at all n locations
  Clone ID: MRT4577_44167C.1
ctggagtagcttgcaggctgggttatcaccgacacgccaacaatgcaggaataagatgagacgtggacaagtactacaggcgcaccaaggacgcccgagccgggcgccagggagggaagtactacagcttcttatcgcacctcgaggcgctgcacgcctcggcgccgcctttgccacccccgccctcgggcatgaccacggtgcaagctggccctcatcagccgatggaaatggcatggacggcgggccctacggtgctgggccctgccgccgtcgccggcctgccggacctcagcttctcgtcgatgtccgagtccgactcagagtacgactcggacgacgacgacgaccactctggtgcgggggaggagggcctcagcgggggcgagtgcgacagggagatgatggccaccttcgagaggatgatgaagcagttcacggagaagcaagacgccatgcagcgcgtgttcctggagacgctggagcggtgcgaggcagagcgcacggcgcgcgaggaggcgtggcggcgccaggaggtcgcccgcatgaaccgcgagcgcgagcagctcgccagggagcgcgccgccgcggcctcccgcgacgccgcgctgatcgcgttcctccagcgtgtcggcggggggcagggcgagcccgcgcggctccctccgcacggcgccggcgtcgtgcccccgccgcctatgccggactgcgcccctccgtcgccncggcgccac

SEQ ID NO: 123561 - DNA, 721 bp, Zea mays
  unsure (1)..(721): unsure at all n locations
  Clone ID: MRT4577_44168C.1
gctcacccacttctacactcacccntctgaaacattcagacacccaacaactaccgaatacacacagcacacccacaatcatgcagatcttcgtcaagaccctcaccggaaagaccatcaccctcgaggttgagtcttctgacactatcgacaatgtcaagagcaagatccaggacaaggagggcattcccccagaccagcagcgcttgatcttcgccggcaagcagcttgaggatggtcgcaccctgtccgactacaacatccagaaggaatcgaccctgcatctcgtcctccgccttcgtggaggtatgcagatcttcgttaagactttgaccggcaagaccatcactcttgaggttgagtcatccgacaccatcgacaacgtcaagtcaaagatccaagacaaggagggcatccctccggatcagcaacgccttatcttcgccggaaagcaactcgaggacggccgcaccctgtccgactacaacattcagaaggagtccacactgcaccttgtcctccgcctgcgcggtggtatgcaaatcttcgtcaagaccctgactggcaagaccatcacgctcaaggtggaatcaagcgacactattgacaacgtcaagtcgaagattcaggacaaggagggtattcctccggaccagcagcgtctcatcttcgccggaaagcaattggaagacggccgtactctctccgactacacatccaa

SEQ ID NO: 123562 - DNA, 333 bp, Zea mays
  Clone ID: MRT4577_44169C.1
gagctcacttgtcggcggccgccctcctttttttttttttttttttttttttattgtctttgttttgttttcagggtcttacattccatgcaaacagcagatcccccacgggcaatacgacccgccttcgccaaacgggaacccaaaaaagaaaacccccactacccgagaaacaaaaaacggcccccccaaaaacccgggggggggacaagcgggggaaaaaaccaaagagccgtccagttaagccgcccacaaaactccagggggaccccaaacacagggaaacgggcaccgaggtcccccgggaaaacatgcccatgggggaccacccca

SEQ ID NO: 123563 - DNA, 335 bp, Zea mays
  Clone ID: MRT4577_4416C.1
agtatacactcgatcgacgcggatccagaacacaattgcacgagagctagaagcagcacaagaacatggcgtccaagcgactcctcgagatagtagctctcctgctcgccgacgatttcattgacgcctcaggagcagataaggacgacgaagaccaaccgatgaaggagagcgtcgataacagagtagacgtgcaggactaatgcgcagctgtcgcatcttatgaaaggagatttgccacaaggaactacatgacccagagccttttgggcccttcgatgactgttagcgaaggcatcaatgacccaccgaagcggactccgctctgagctaat

SEQ ID NO: 123564 - DNA, 276 bp, Zea mays
  unsure (1)..(276): unsure at all n locations
  Clone ID: MRT4577_44170C.1
cccgggnntcgccccgcgtttctgggcnnttcccgctggcttcttcccttggtggcccttgttcctccctctttcgtcggccctgttccatccgttccctttggtgcctttgttggcccccttcctcggggcgcnccctctgcggcagcttgtgcttgctttccttgctgcctcctctccgctcctgctgtttctttcgtggggcgcggcttgctgctttgntctctgcttcttctttgcttcggcttcttcttcctttctgctcgctgcctgctg

SEQ ID NO: 123565 - DNA, 205 bp, Zea mays
  unsure (1)..(205): unsure at all n locations
  Clone ID: MRT4577_44171C.1
cccactctttttttcactccctctcacaaanaacaacgaaaccctataacaaagggggggcggcacacactcccactccattatcaacgacaataacttcttttccgnaaacccaacaaccaccgccgcctagcgcctccgctctacggctccacttcccgccccctcacgccagtccgtccccgacttcgctttcgcgaccgca

SEQ ID NO: 123566 - DNA, 244 bp, Zea mays
  Clone ID: MRT4577_44172C.1
attcatatatttaattatttatttttttattggttatcggaatcaaaaacataaacaaccattttgcaggcagtgtgttgcgaccgattccacggaaagctgatctttcatacagtcgtctaacacacgcctagcttcgacctggttgactcgatcggaatcacatcacaccataacaggtaatttattacccaacatctagatgttttaccaactgggaaacattgctgaccaaaggaaactt

SEQ ID NO: 123567 - DNA, 1260 bp, Zea mays
  Clone ID: MRT4577_44173C.1
ttgggaccctcgaggccggccgggaggccgcaaacccaggaaggcgccaggtgccctgtcgcagcagttcgcactccgcagggcaccaccgtccacctccaccgccaccgatcggtagcaacgcgcaccaccgcgtcgtcgtacggcagcacacggaaagagagagagagagagagagagagagaggaatgggcgaccacgagggtcacggggtcgatttcgagaagaaggccgatcagaagctctccggctggggcctcttcggcaataagtacgaggaagccgccgacctcctcgacagggctggcagcttcttcaaactcgcgaagaactggagcagagcggctgcggtatacaaaaagattgcagattgtcatttgcagggggataacaagcacgatgctgcctctgcttatgttgaggcagcaaactgctacaagaagttctccctgcaagatgctgcacaagcacttaacagtgccgttaatcttttccaggaaatcagtagactgaacatggctgcaagatacagcaaggatatcggtgaaatctatctgcaagaacaagatttagagaatgccgcagtctacctgaatcgcgctgctgatctttttgatagtgagggacaatcctctcaggcaaacagcatgacacagaaaatcgctgaaatatatgctcagctggaaaagtaccagaaagcaaccgagctctttgaagaaattgctcgtaaatcaataaacaataaccttctcaagtacggtgtcagaggcactcttcttaatgcgggcatttgccaactttgtagaggtgatgttgttgctataaataattcattggagcgctatcaggacattgacccaaccttctcagggacacgcgaatacaagcttttggcagaccttgcagcctctacggatgaaggagacgttggcaagtttactgatgcagtaaaggagtttgacagcatgacacgcctggatccttggaaaacaactctccttctgaaggcaaagaacgagttgaagaaaaaggaggaggatgaggatgatctaacctaggctctgttccacaaaaggtttcatgatttcgttgaggatgccgtgaaatcattacacaagattgtttgatataagtatggatatacaaaacctcctggataccgcatttggaatccagtagctgccatttatatatatggcatcctatatgttgcatttgtggattattgttcatggttatatatgctacccatattactcc

SEQ ID NO: 123568 - DNA, 439 bp, Zea mays
  Clone ID: MRT4577_44174C.1
gagccgaagctaaaggtatatattttcctgtcacaaaacattgtaattgaaaatgtcgaactcataatcttcttctcttctagataaaataattagagcagaaaattcatcaatatgacgactctgtattccattcgaaggtcttttttgagccatgttgtaattgttgcaactgatttgtccttcaaacagaagacttcagaagcctccttttttaatatgatacaagctgatgaatgatgtgatgcttgatgagatgatgctatgatgcctaccctgctgaagatgtgtaacacccaaaaccatattttagataaattaggaaaattgttcttagatttaaaattcatttgttctgtaataaagagtttaaatgaaaatatctttatttgagaaaaattattcccttaaataatatatttgaagatattctctaaaa

SEQ ID NO: 123569 - DNA, 235 bp, Zea mays
  Clone ID: MRT4577_44175C.1
gtctacacacggatcaataacactaactgggggcccggtcattctccgggtggggcgtactactacctttttcaggcattctgaccaaccaacttctcgtgactgccatggctctgctctccgacctgatgaacctcaacttttcgggccggaccgggaagatcatcacctagtccatttggcttgccgtttccggcttggacacaaggagcaaagcatggaccctctccggact

SEQ ID NO: 123570 - DNA, 913 bp, Zea mays
  Clone ID: MRT4577_44176C.1
ggtaccctcgaggtctcggccgggtgcctgtatattggtctgcgagaacaaccctatgggatggggacggcagagtggagggcctccaagagcccggcttactacaagcgcggggactatgtgcctggcttaaaggtcgatggaatggatgttcttgctgtgaagcaagcttgcaaatttgccaaagaacatgcccttgaaaatgggccaattgtaagtatttaagaaatagttctgatttctaccatttcaattacatgaatgcatgcatatcttagaccacataatccatcacgtatgggattatgccataagatgttactagtaaactggaaagatttactaggctacaagcagatacaaatatctttctaccagaacatttgtttgcccctctgctttcctgaatacagtcttactccaaaaatgtggaaataatatgtttggtgcagctatttccttatgatctgatatgcaatcagatgtacttcacgatttcagtttattgtttttctgaccaacttcagtgtttctgtcgcaacatttcaacttatttgcaagtggttattttgtttttactcttttatcttgagctcaattcttttttgaatgaaattcttgagttcatttcttgtcaaatgggttttatacagttttgccttatgttttgcacctttgcttatcaccatattctattcaacaagcaagcccagaatgcaatactttgtgtaaggtagtccctgcggagtgtggactgcttacacctagaaacatgttttgccaccatttctggtgtctaatttatatttttctcactggcattactcctagttctgatttgaaggtctgcaacatgttcattatagtggatgaaaaaatatcttggaggcattaatatttgaaacaatatctt

SEQ ID NO: 123571 - DNA, 381 bp, Zea mays
  Clone ID: MRT4577_44177C.1
cggctcgagggaagtatgacaggcacaactgagtggtaatttaccacagaatgccgtactggcaacaccgcaacaagggtatacatatcacataattgattaaaaatggtattatcctagtacgatttgtaatttaggtaaaatttctttctcagatttagttcaagaaaatcagaaaggaaacaaacaggtgggcatgctgccaaagttcaagactaatacagattagatatggaacgttttgcgcgcacacagtttttatctgtattgctgtatggaaccttctactcataggtgccaggcccagaagcagggcccaaaattctctgcaaatcacaatagtcctggaatatgaatatctagcaacgaatatttgagcaa

SEQ ID NO: 123572 - DNA, 275 bp, Zea mays
  Clone ID: MRT4577_44178C.1
actactaacgagcacgccatggagcaaaccaaggcagcggtgagcagcactctgggggggggagtggaagggggggacaagacagcgaggaaggcgctgaaggggggggccggcggcgacacaagcgaggagagcctgcacgcactggcatgggcgctggacaacggcgtgcggggccacccggacgcgacgctcggcgtctgtcacacccagcacgccggcgaccacttcacctaccccggcgccgggcacgggatcggggacgccccggcctc

SEQ ID NO: 123573 - DNA, 279 bp, Zea mays
  Clone ID: MRT4577_44179C.1
gtcggccacgcgtccgcaaacggccaatcaatggacatgacgaccccagtgataacaaaaaagtcagctggtacagatagatggaaaatgtcatttgtgatgccagcgaagtatggttccaatttgcctcgcccaaaagatccttctgtgattatcaaggaggtgcccagcaaaatagttgccgttgcagccttttcaggtccataatattgtacttctgtcatacccatttcatagctgtatgtgattaagaagctatatattcagagtcaagtacat

SEQ ID NO: 123574 - DNA, 228 bp, Zea mays
  Clone ID: MRT4577_4417C.1
aattattacaacgcacaaaaaatgcattatgggggtgttttatgcaacgacccaaacgggctagtgcttcatccaatcgtcgtatgacgtcaattctcaatggtcagagtcaccggccgcatcaaagtccgaatcattaatcaagtccacttcatccgaagggtcgctatcgataatatagataggcttgttgagtgtctcgggggctcttctaggaacaacagccgg

SEQ ID NO: 123575 - DNA, 309 bp, Zea mays
  Clone ID: MRT4577_44180C.1
cgcacgccctcgcccgagccatcttcgaaggcggaccacatgacggaccagctcatcgacgagctcaacgaggacttcaaggtggtctataacgatggcgacagcggtgtcaatacctacgagcttgcaactgagatgcgctctgttgggcacaaccttactgaaaaacagcttgaagacatgatcaacgacatggatgctgatggcgatgctaccattgacttgaccaatgacctgaacctgatggcgaagctgatgaaagacaccaactacgacgacgaccttaaggaggaccttaacgaggtctac

SEQ ID NO: 123576 - DNA, 175 bp, Zea mays
  Clone ID: MRT4577_44181C.1
ccttttcctttttttttttttttcctttcgcggggtccatttttgtttagataaccaaagcacacaaaccctatcaaaaaagattaacacacactttaaatttataacacggacacttaacgccttacctcaccaacaccaatgaggctaacctaactccctttatcaggtttta

SEQ ID NO: 123577 - DNA, 378 bp, Zea mays
  Clone ID: MRT4577_44182C.1
gagagcatacatcagctcgactatgctgcggaagtctgctctgagggccgtagtcgagacgctttcaactgactcaactctttatgtgaggtagcaatattgaattgctggtcccgaacaagaatggttacatttcattgcaaaatctgtaatttgctctagcgaagaacttcactgatgcaatgaaggacttcagggatgtttattttgttaacaccgtgtgcgcttttttgtacaagaaactggatttttaagagtttgtcgtttccgacatcattgttttaccattatggaagccttgtgatacctgttttcagtacgcgaggctcccgttctatctgatctacatggtaagaaacttttcaattgtgactaaga

SEQ ID NO: 123578 - DNA, 615 bp, Zea mays
  Clone ID: MRT4577_44183C.1
cccgggagagagcccggctggggaggaagaaccgatcgaacaacttttcttttttctagctataggatccaacggacgtcgatcgggcgatcgacatggacaggccatgccaccaccagcaccagttcttcatgccgccgccgccgcagcagcagcagctttgcgtgccgatgatggacgacccgtcgtcgttcttggcggagatgggcatcgggggcggagatgggccgtcgtcgtccgcgaggggggagaggaagcggcggttcacggaggagcagatacggtcgctggagtccacgttccgcgcgcgccacgggcacgccaagctggagccccgggagaaggcggagctggcgcgggagctgggcctgcagccgcggcaggtggccatctggttccagaacaagcgcgcccgctggcgctccaagcagctcgagcacgactacgccgtgctccgcgccaagttcgacgacctccacgcccgcgtcgagtccctcaagcgcgacaagctcgccctctccacgcagctttttgcttggtgcgcgcgcgtgcatgaccagttgaacgagctaagcgagaggctgagagaccgggaggatcctgccgccgccggct

SEQ ID NO: 123579 - DNA, 269 bp, Zea mays
  unsure (1)..(269): unsure at all n locations
  Clone ID: MRT4577_44184C.1
cgcgacgnccgtccttgtttttttttttcctttttttatttttttttgaaaggaaaattttgaaatttttaaaaattttttaaaaaaaccccaaaattttggaaccagttcaatttaattccccccgggtttttcggaaaaattgggactttccttcggggggttaaaaatcaaaagctggaattttcaaagggaaattttagggggttttcccccaacccaaacggggcccaattttttttaggggaggctttaaagggtccaaaaac

SEQ ID NO: 123580 - DNA, 631 bp, Zea mays
  Clone ID: MRT4577_44185C.1
gccggccgggcctgcgtattagacagaatgtgcctcctcactctcccgcctcctcctcagagtcacgaatcgttatcgccatattaggctgctcctcctgacaagctttatgcgcgtgcaaagcttgtacgagagttgtgtcttttgtaccgaacatgggctatcatgtttatgcttctggttcagacgaccctggaaagtgcgaaccacataacaattgtctcctactgagaacacgctagtggcgatctaccacgtccgaccagcgatcatgtatccctcttctaaagcgtaacatacagtctgctgctagcgctactgcgccatcgctgtttataacaagaggatgatccgtcgtggactaagtcgatatcacatcttatcaattctgcccatgtctatttcccttgcaggagctcattcacgctatactcagtggtattactcacctgcaatattgcgcagctcccttccccgggactgggaacatgcagtccatacccaagttaatcagcgtgtgttgcatcaaatcttacctgatgttttcctctatcacaacagaaccctatgtagctgacgaaacaacctgtaaacagaatgaatggctaatgaaaactacaagcatatatat

SEQ ID NO: 123581 - DNA, 1565 bp, Zea mays
  unsure (1)..(1565): unsure at all n locations
  Clone ID: MRT4577_44186C.1
tttacatcgattcgcgcgaagcgggccggtcggccggcgaggaaagggtggtggtgcggcgcgaagcgttttggcccggtgctccagtaccttgcagtcggcgtgtgctacacggagtgtgtgaagccgccggcgcagctttctttggcacgagcacgaccgcacgaggcaagctcagcgaggtttgcttgacgtctaccagctgcataataacttgactcagaagaagaagatggacgctttcacacatgttcctcccggntttcgtttccaccctaccgacgaggaactcgntgattactaccttaggaaaaaggnagnactgaagaagatagatttggatgtgataaaagatgtggatttgnacaagattgagncttgggatctgcaagaaaagtgcaggattggaagcgaagagcagaacgagtggtacttcttcagccacaaggacaagaagtacccaaccggnactcgcaccaacagagcgacgacggncggtttttggaaggccacggggagagacaagncgatctacgtgaagaactgcctcgttagggatgaggaagacactggttttctacaaaggccgggcgcccaatggacagaagtcagactggatcatgcacgagtatcgcctggagaccaacaacaatggaattccacatgaggaaggatgggttgtatgcagggtgttcaggaagcgactcgcgactgtccaaagaatggtcggggactcgccttactggttcaatgaccacgcggggttcatggcgccggagctcggctcaccgaggcaggcggcgcaccaccagcagaacgtcatgatgtaccacaggcaacagagcagctacagctacccttgcaaggtggagctggagtaccaccacctccttccccaggagcacttcctgcagcagctccctcagctggagagccccaagctccctgaccttattggccaagtagacactactctccagccagcatgcggccttacacaggagcatggtgcccctcgctacaccctgcaggagcttcaggccgagcctctctatctggcgactggcggggacacagattggcgagctctcgacaagttcatggcgtcccagcttagccacggagacatcacccctaataaggattcagctaataactactccaatccggcactgcaggtgattcagcagtctgaagagaaagaagaggccttggactacgtgtcaacgtcagcctcctgtggaggggacaatgatttgtggaaataacagcgtcaatggtaatacatattcacatacgcactaaatcactggactagtgcattattccctcattacacagttaataacattgaggcgtgctggatgtaatgtaacgtagtatataaagtagccaactgattcatgtgtcatggtatagtagaatggtatgtgcataacaaagtgtaaccgagtaggtcacacgtccatgcataagttggcataatgtctggtgttaataataaggttagctaacagctgaagctaaggagcttcagcactgatttggcaaaaaaaaaaaaaaaa

SEQ ID NO: 123582 - DNA, 409 bp, Zea mays
  Clone ID: MRT4577_44187C.1
atcgaatgccctcctcggggccgggcgggaatttttccaaaaactatagctgctaataactgtatctgtacatgtgtacccgagagactccattatattatattgcatccatctctccaactgaacgtacacacagcccaacacagatggcacgccgccaccgccctggtgagcagcagcagcctccgcgccccggcgcccttctccgtcggcgcccgcgcgacctcccggccggcgcctgtcgccacagtagtgacgccgctgcccgcgaccacagcacctgccgcccgcgagagccacgctgccagcacaggacacccacaacaacaagctcatcacgccgaacggagaggaacagcatcaagatgcccggcgacggctacatcctggactatgccaagaaacaagg

SEQ ID NO: 123583 - DNA, 397 bp, Zea mays
  Clone ID: MRT4577_44188C.1
ggccggaaaaggcccggcccaaaaaaacgggaggttaataagggaaaaaaaaaaaaggggtaaaatacaaaccgggcccagggcccaggggaaaaattggggcattcgcccccaaaaaaagaaaagccccaaaaaacctgggccggccccaaaccaaaggggggcctggacggcccccaagtaaaaacggggcaaccggggtggggcccgggctagccttaaacctaaagggcagaaacccccgggggacagaagatcccccccagggggggggcgggaatccccgggcatttggacaaaaccccggggtcgcccaaaaaccgggggcacacagccctggtctcccgggggttgaacaaaccgcacccggggcacttgggccccaagggacccgggg

SEQ ID NO: 123584 - DNA, 698 bp, Zea mays
  Clone ID: MRT4577_44189C.1
tgggccccccctcgagttttttttttttttttttaggacccaatgtctatttattccagacaatctaatttcctttctaaacgctacagtatttacatttacaaatttacaggactgcacccacgtacatgtggtagaaaataaaccctacactacaattctcttctctgcattcttgcaggtagatgactgacaggtcacaaccacagggttaggttagtcctgtactgctactgtacatgaaccagaaactgatgatcagaggcatatctaaactgaagctcttgcagtgttctaacagtttggacttcaaggaagacttgtcaatagaagtcatttcttttttgtgccagcatacatggctctttcccactgcgcgacatcttcgaaccgcgagggcggtggcggtaggacctcacgctctaccaggtcccaaccgttgaatatgctatctggcacgccaccatgcttcaccaacttagcggtgtacaagaagctctggtttgagttcaggaggaggttgtctagagtgctgggcatgatggttgtgtgcatgctgtccataaaactgctgtccgacgatacggctgaacttgacttccaaatcgatctgtttagctgctgcgcttgcttttctgaccttgaagcatggttcatttcatagcagttcgaaaggcctttgatgacataacgatgga

SEQ ID NO: 123585 - DNA, 331 bp, Zea mays
  Clone ID: MRT4577_4418C.1
attcggcttggggcggttgtcgacagtttttttaacaggataagactggaggacaccttatcgagggttcacgttaccttggcccacaaactaggccatggtgtgtttgctgtcgcatgatatggcatttaccagtaccaggaagttcccgtggtattcaagacattggactacacttacaagatggccggtctccaagcacagatgggagcagtaaacaatgagcccatcaattgcaggaactagtggacacatgccactgtgtggacggctcacgccgtacttcaaatgaggcaaacatgctgactcagcttgtttcagaaggaaaagc

SEQ ID NO: 123586 - DNA, 376 bp, Zea mays
  Clone ID: MRT4577_44190C.1
ggaaggaatgtctatctatttcagacaatttaatttcctttctaaatgctaccggatttatatttacaaatttacagggctgcacccatgtacatgtatggcagcaaataaaccctacactacaattctcctctctgcattcttgcagtgtagatgactgacagatcacagccacagggttaggctagtcctgtactgctactgtacatgaaccagaaactgatgatcaagggcatatctaaactgatgttctaacagtttgtacttcaagggcatctctaaactaatgttctaacagtttgtacttcaaggaggacctgtcaatagaagtcatttcttttttgtgccagcatacatggctctttcccactgcgcg

SEQ ID NO: 123587 - DNA, 681 bp, Zea mays
  Clone ID: MRT4577_44191C.1
tcgaggccggccggggccgagtctgcgtggctgctgagccagtactgctcacgccagcacaacagtgatcagccaacacgtatcctcaactccaactcgtccagccgattcttcatccgtcgtccacaggcttcagacgtagctcgccagcttcgacctccgccctgcccttgaccccactcgcccgttcttgttcccgacgctcgagctcacctcagcttcgctgtgcccctgcgttcggcctcttccctccaccagcggacgtccttggtctcgctttcctcgccgtgacaaggccccgaccacgatgtcatcctcctgtgagcccccttgctgtgtcgcttgcctgcaccctctttgttcgatgaaatggtcaagtcggtaactattgccgttgctcacagctaagctagctgttgaagccgggcctcgcgtaccgcctattcgatgaaatgcccaaacaccacgtccgctccttgtcccaacaccctgtcacaattccgtgcgttgccggaatcccatatgtgtgaggacagacaatccgtgcaatagttgtttgatgtttggtgttatgcgcaaatcagaaatcgtcatcattatcccgaatatcgatttgggtttgtgatatggtacgctagttgatcacgtgatgcggaaatcgagctgagtcgatcacgaaat

SEQ ID NO: 123588 - DNA, 481 bp, Zea mays
  Clone ID: MRT4577_44192C.1
cctccaaaactgggacgactagcatagttcctctacacttcaacgatccattgcacatatccgtcctcctgccaatctccacaacgcctctggctacttgaaccctacaaccgccaaaatttcgttcctgcgccacttcttcacgcgcgccccctcacccacaactatgtccgccacaaagaccaagggccagtccatcatcgacgagaaccccgtcgccgtcttctcaaagtcctactgcccatactgcaaccagggcaagcagctgctgagcgccagcggcgcaaagttctacgccatcgagctcgaccaagtcaacgacggttcagcaatccagtctgtgctcgccgacatcactggacagaggaccgttcccaacatcttcatcgcccagcagcacattggtgtgaacagtgacttgcaggccaagatgggcaagctcaccccctgctcaagggagctggcgccctataagcgtccg

SEQ ID NO: 123589 - DNA, 731 bp, Zea mays
  Clone ID: MRT4577_44193C.1
tgggataaatactaagtgagtgctgttagatgacgatcacttggtgaccatccttttgtgttggcactcgttcagattatccatcttcaggtttatcatcagtatctccttgcgaagaagcccacgcttaacagcatttcgtgatcgactcagctcgatttccgcatcacgtgatcaactagcgtaccatatcacaaaccaaatcgatatttgggataatgatgacgatttctgatttgcgcataacaccaaacatcaaacaactattgcacggattgtctgtcctcacacatatgggattcctctcctccgaaacacacaccagtacacaaacataaaccacagttaatcattgataccaagcaaagaactaattgaatagaagaaaatcgatgtcttaccggcaacgcacggaattgtgacagggtgttgggacaaggagcggacgtggtgtttgggcatttcatcgaataggcggtatgcgaggcccggcttcaacagctagcttagaggaggatgacatcgtggtcggggccttgtcacggcgaggaaagcgagaccaaggacgtccgctggtggagggaagaggccgaacgcaggggcacagcgaagctgaggtgagctcgagcgtcgggaacaagaacgggcgagtggggtcaagggcagggcggaggtcgaagctggcgagctacgtctgaagcctgggacgacggatcccggccggcctcgag

SEQ ID NO: 123590 - DNA, 637 bp, Zea mays
  Clone ID: MRT4577_44194C.1
gattccacaaatcctccgcaacttcaccgcgtatcatcatttttcatcggtcctactcctatcatccacaaaatcagagcgatattgatggcgaccatggcggagaagaacccggcgttgaagaaggaggcgtcggacgacccctccgatgaggcggctccgatccaagaacgcccccgcgatgcacaagccccaggaggagatccgcttacctgcggacaagttcgccgacaaggaggccgtcgacaacaacggcatgaagaaggagaacaacatcgcgcagaccgtacaagacctacatctgcaaggtcctgaagcaggagcaccacgacctcggcatctcctccaaggacatgcccatcatgaactccttcatcctccacgtcgtcgagatattcggcgcgcaggccgacaagctcggccggccacaacaagaaggccacgatcacctcccgagagatccagacctccgttcgtctcctactccccggagagctcgtactgcacgccgtctcggatggtacctgggtacgacaccaaggtcacctctgcttgaccgccttgcattatgcgtcgatgtagcctgcttctcgaggaagcactgtgatgtggcgcttctcatggaactagcggaggt

SEQ ID NO: 123591 - DNA, 839 bp, Zea mays
  unsure (1)..(839): unsure at all n locations
  Clone ID: MRT4577_44195C.1
gccggccggttctagttacatatacatttcatatgaatcctatccctatacttccagtatcaggtgtgaggcagcggagaatcagctcgaacctgatacccgtgccacaatttcagctcgggctttctcaagggcgtccggcaagttctccggcttccgccccccagcttgggcgaaattgggcttgcctccaccgcctccgccgcagagtttggctatgccactcacgaacttcccggcctgcagccccatttcgacgattgcagggctgaaggcagcaaccaggctgactttaccatcccctgggcttgatcctaaaatcaccgcagcagggtctttgagggtgtctatgagatactccgcagcgcttttcagcccatctgcgtctacatcacccatgttctcgaccacaatcctatagaaaactgattgaaagtggacgatggaaattgaagtcaaatcggagatggtcaaacgccacaagggaaccagcctgtgaagtttctgaaccaactacacttttaagagcagattgtagtagatgtgttgcagtgtgatgagcctacaaagtgcaggaagcagaaagaagttatataacaagattagccccttagtttcatccatggtggaaaaaaacaagattagcccctgtgacatgataatggagacaatanagagttcatgtctgatttcttacaacaaatttgcttataacagacatgtcacatgtgatataagctaagctatgaccggtcacaaaatataagttacaaacagaagtcctgtacagatttgcatataaatcagaatggttgtatggatgctgtcagaaggcatga

SEQ ID NO: 123592 - DNA, 203 bp, Zea mays
  Clone ID: MRT4577_44196C.1
cggaattcccggtcgtgtcgtcgcgtatggcctcgcctatgctctacttttaccccatccctgcacagcgccgctcaccgtcaccggaccagggtagcgatcgatggctgaggtacacatcgagccgcccttgatggtggacgacgttcggcacgcgccggagggccgtgagaacgacctcgaggccatcgagctcgcgcgct

SEQ ID NO: 123593 - DNA, 1304 bp, Zea mays
  Clone ID: MRT4577_44197C.1
gaactctttattgtctccattatcatgtcacaggggctattcttggttttttccaccacggatgaaactaaggggctaatcttgttatataacttctttctgcttcctgcactttgtaggctcatcacactgcaacacatctactacaatctgctcttaaaagtgtagttggttcagaaacttcacaggctggttcccttgtggcgtttgaccatctccgatttgacttcaatttccatcgtccactttctgaagaggaattaacaacaattgaagcacttataaaccaatggattggcaatgcagcacatgttgagacaaaagtcatggctttgcaagatgcaaaaaatgctggtgcaattgcaatgtttggagaaaaatacggtgaacaggtcagagtcgtcgcggttcccgggatctcattggaactctgtggtgggactcacgtcagtaatactgctgagattcgtggtttcaagataatttcagaacaaggaatagcttctgggatcagaaggatagaagcagttgcaggtgatgcttttgttgactatgtgtgtgctcgggacaactacatgcggcgcttatgcttatcccttaaggttaaggctgaagatgtgaacagtagagtagaaacaattcttgaagagctaagagcaaccagaaacgaagcatcatctctacgcagcaaaattgcagtgctaaaagcagcttctcttgcaagtagagctacaactgtggagccccagaatgtcaggattgtggtcgagaacatgggtgatgtagacgcagatgggctgaaaagcgctgcggagcatctcatagacaccctcaaagaccctgctgcggtgattttaggatcaagcccaggggatggtaaagtcagcctggttgctgccttcagccctgcaatcgtcgaaatggggctgcaggccgggaagttcgtgagtggcatagccaaactctgcggcggaggcggtggaggcaagcccaatttcgcccaagctggggggcggaagccggagaacttgccggatgcccttgagaaagcccgagctgaaattgtggcaggggtatcaagttcgagctgattctccgctgcctcacacctgatactggaagtatagggataggattcatatgaaatgtatgtgtaattatcattggcattctaagcgaaaacacttttgtattctccctaccttgccgtgtatgctctctgcagatgacggaacaaattttgtcgcttgtaattgtaactagtggccgaacagaacggggaaaagataaaatcttcacacagc

SEQ ID NO: 123594 - DNA, 333 bp, Zea mays
  unsure (1)..(333): unsure at all n locations
  Clone ID: MRT4577_44198C.1
ctgcagtaccagtcccgaattcccagggggaggcacgcgggcgggaaatctctacaaggggagtgttggcacagatcttgatagggccactaattancttggggtacatngggaaccgggtcaaacaatttacctaaaaattaacaacaagattcctgggctcggtatgcgactagataggagtaactgggatctccattatgccacaaggtgctcaaaggagataccttattcttactagagactccttcttgattccatgcaaagaggagcgcatgcttttcatccgctcaaattaggttgatgcgtcatgggcactattcacacccctcc

SEQ ID NO: 123595 - DNA, 1398 bp, Zea mays
  Clone ID: MRT4577_44199C.1
gcaatttgatgtaattggtggttttgtgtactttgtcttggttttctcaatgtttccacagtgtgactcatttcacatcttacatgaagactcctgggctggtcgtatcaatggtttcttcactgcaatgtggaatgctgtttttgagattctagagaggtaccctgtgtccctaccgggtgttgttactctattgatggtatcgtttttctttgtacccacgaaactgtcccgtaggagacgtgttttgcttggttttcttcatgccgctgctcatcttacttcggcagtgctactgatgctacttatggaattagctattgaaatctgcattcggaaccatctattagcaacatcaggttaccataccctttatgaatggtaccgaaaagtggaaagcgaacattttcctgatcccacaggacttcgcgctcgtctcgagcattggacctttggactttaccctgcatgtattaagtacctcatgtctgcattcgacatcccagaggttatggcagtaactagaagtacaatctgcaaaaaaggaatagagtcccttcccaggggaggtgccatcatctattatgtctgtgttttcctgtacttctgggtcttgtcaacacctgtcgtatcgctggtgtttgggagctacttatatttatgcataaactggttccatatccatttcgatgaggccttctcctcgctgcgcatagcaaactataaggcattcacacggctccacatcaagaaaaacggagaccttgaggtcttcaccctggctgtggacaaggtgccaaaggattggatgctggatccagactgggacatggaacccaagcagccattccagatgagctacaccaggaaattcccaagcaaatggagggctgcgtcgggccttgacccaatcaatgctgtgcgcattgttgaccggtttgtcatcccgcgaacgccctcaagtcctacaacaccaggaggctctgtttcaagtcctacaacaccaggaggctccgtttcaagtcctacaacaccaggaggctttatgagatgatgttcatgctgctgtgaaatataatgtaatgtacacaaggatatcttcgacttctcgggagaaattgtacagtacacaaggtcctctaacataccacgggagaaatagttgggaaaaaaaatagagggcaaatctccacaagatccaaatgttgtacatctggtgttatatcagttgtcctgatcaggtgtaatgataagtttttcaaacttacaaataaattgataaactgagtccggccctgcctggttgcatggatgcagcctgaacatgtttggttggttggctctgtgttgggccaagtactggagatacatttcctccttggggcctgggaatttgtc

SEQ ID NO: 123596 - DNA, 759 bp, Zea mays
  unsure (1)..(759): unsure at all n locations
  Clone ID: MRT4577_4419C.1
atcacacagcgacaccgcgtggttcgttaggaaaggaaatcgattcccccagcatctgatctcttcggtgctagagaaatataggccgccgccgcctcctcctcattcggtgaaaggtgcgcagttagggttgggagatctcttgcctcacgacacgagcagcagaatttgtcgggggccgcacatagcttctgctcgctaatctgagtattcttatacttgctgaagggctcctgttgccactcgctgcagttaaatactcccgtggaacgttcatattccctgaagcacagccttccccacacaagaacttcgctgacatgaagaccttcctgaatcgcttcttcggtggcctcaagtccggtggcaatgcttatgtgattggtgactctgcgaagcccgggcagaagtggcacgtctactacgccgctgagcaccctgaggagcctgtcgttactctggagaatgactgggctggacaagaagaaagcttctgtcttcttcaagaccactgctgatggttactcgctgtgcgccaaggagatgaccaagctctctggtatctcggacatcatcccagagatggagatctgngactncgacttcgagccctgtggctactccatgaatgctgnncatggccctgctttgncgaccattcatgtgacctcagaggacggcttcagctatgcaagctacgaggtcatgggcttcaacccgggctctttctcttatggtgacctggttaagagggtgctg

SEQ ID NO: 123597 - DNA, 612 bp, Zea mays
  Clone ID: MRT4577_441C.1
ccggccgtctcggagccctcgcgtcccctagccatgcacctgtctcgtatgccccaactgcccgaacgccattccccggcctcgctgtcccctccgcgcagctgcgcagtcgcggtgtgaccggccgtggaggagccctcgcgtcccctagcccaaccagccatgggcccccattgtttccccttccgcgcagccagggcccccaggtacctgtctcttggatatattgagttcacttttgaggatttctttgcgatgatttttgtgtatttggatagatgaattggtttacaagccgcctgaagtctgtaactgtagaacaggtttggtttggattattgtggtgcatgtgcatgcttcttgtcgatccttcgaggctcagatatgctgattccgacgtggctgcggccaacggcggcgtcattccggggcccaacaggttcagcctcgagttcggcagccactcagtatctacactctcttgtttcgtttgtgcatttctaaatttcctaccttttggaattaactgtcccatgctcgaggtcagtttagttgcagctgaagtgcgactgaaagatgtatttgctgagtactcaacatgtgatattgtga

SEQ ID NO: 123598 - DNA, 153 bp, Zea mays
  Clone ID: MRT4577_44200C.1
gcttaaaatgatatcatcatatatgtaccctcagatatcacattttggctgtctggattacatgcatagctctgtttctgtgccgagttattaattttgtcagtcacttacatgtcactactgtctgagtctctgctacttgaggagctccca

SEQ ID NO: 123599 - DNA, 594 bp, Zea mays
  Clone ID: MRT4577_44201C.1
gaccgacttacgcactccaaaagaacgtaggataagaccatagacacccgtgcactctagaagtccttggatcacatgcaccgacaggatgtgcaccaatctgataggtacgaagctgactacagggaaccctacaaaggggtactcaaagagggacttttgtgcataaccccaaaagagctgaacaaagccatgactaacagaccacaatccctgaaatggccaagcctctcttgacgcgaacagctgcatgtgagtatacattacctggagacagaacttgataacacttgttttatcctatccaatattgtgaactatttactataagacgaaaatgatcttttataccttgctataaaataaataacatgggagatggctagatgagttctttgtctccactgacacctaatgccatacatcatatcagtgagaactccgcctattaagtaaacttcttgcttatagagggatgcggaaagcagagccttcatcaaactaccacccaaacttgctgacatggggacggtacggccaactagatcctgacaagttcaagtggccatggagccaacttcagcggtggactga

SEQ ID NO: 123600 - DNA, 469 bp, Zea mays
  unsure (1)..(469): unsure at all n locations
  Clone ID: MRT4577_44202C.1
tcgtcccacgcgtccggnatcgcgaagggccgctgggaatgttagcatgcgttgcacggaaacaatggagctgcatggtcgtgttagtacagtcagctatgttccaactgcactgtactactgaaaacgatggctttgtatgagaatatgtacataaaatacaacaagagtagtgctaatatacgatcacttatctgccaccgggagaaaaaaaaaaaaaaaaaaaaaaaaaacaccgaaaaaaaaaaaaaaaaaaaaaaaaaaaaaaaaaaaaaaaaaaaaaaaaaaaaaaaaaaaaaaaaaatcgcgtttcactaatagaaaacttaattttgcctgggctggaacatgcttcgcttctgattttgttgcgccccaaaccaaatttaatcgaatgttggcgtgcctctatttgatctgaattttcctgcccttgcctttcctaattttcttcttttttgtccccccc

SEQ ID NO: 123601 - DNA, 312 bp, Zea mays
  Clone ID: MRT4577_44203C.1
atagtcgtcgtggttatgccgcgtcgtagctcggattcgctcgaggatttcctacaggcttgattcgatttggggttctcgctatattgtctttcgtcctactactttctttcttgtttaggcaaatgtaattgatgaggggcactgtgctcagcctcttctcttgtgattaaactttaaggaagcataggattcttagcatagatccttaaacaagggggtgatggttctcaaggcttgcagcggggtttattgtcaacactgaagagaatcaggcatttcagcatctcacgtatgagcgctgagtatcga

SEQ ID NO: 123602 - DNA, 296 bp, Zea mays
  Clone ID: MRT4577_44204C.1
ttttctttttttttttttttaaagaacaaaagggcgttcaaaaattttggatttaccttttcataaggtgaaaaaacttggggattttccccaacccaacccaacccaaactttttttagcctgggacaaaaaaaataccccttcttaggggcataccagcttaaacttaactcactatcctaattgttttcaaccaggatttttttacaggccttttaacacataaacaaaaatccttgtttaagcattaactttattcaatttgggcccagccccttttaaagggccccaaccc

SEQ ID NO: 123603 - DNA, 328 bp, Zea mays
  Clone ID: MRT4577_44205C.1
gttagcgtccggcgcggcatgactttagactacgaggctccgaccaacctggccgggttggttatatatcagcacagggatgactaaccgctgtattggtttttgattagtgaagggaagcagagactaaaaggtcttgatgaactgctgggcgtgcctctgcacaggtgctctgagacccgtgtttgaatttggttccgcaatctgctggctccacagacctcccttgaatgagaacaactacagtcggggaaaaacatgtgcatagctgtggccctgcagaaattgatatacgatgacggtcgcccactacatgacgcatccggac

SEQ ID NO: 123604 - DNA, 496 bp, Zea mays
  Clone ID: MRT4577_44206C.1
attcacaaaagcctcacaattgtaatatcattcacaactgggacatttacagatagctcacaactcccagctcttttttaaaagcaacggtgaaacagcagatgggaaccaagtaagctgtgctgaatctgcctttcaacaggggaagcaggaacatgggcacatcaggttttctcgccttctggcttgcttaacgtaggggcggcctggctgcttgacggggggggggcttccaactggggggggcttgacagagcggcggcctgggtcctaagggatctactagcaggacaaaggcccacaccattgaaagaaccagcaagccgtgcccttgataaagaatgaaaatcctcaattgcagttttctccactgatacccatcaaaggttggggcttggggcccaactgaacccactacggggtgtgcattcttccttctcctggtcccacgggaagacaatttagatatgtggtgggcaagcccaactcgcgcgcg

SEQ ID NO: 123605 - DNA, 564 bp, Zea mays
  unsure (1)..(564): unsure at all n locations
  Clone ID: MRT4577_44207C.1
cggaaccggcaancccgggcngcngcccaacctctcgcncgccagaagaaacagccgccgggggggggggcgggggcacagaagggggggggcgggaagacccannaagaccaagcgnannncaaacgngnccaagngaaanncaagagaaggcgggcnggcaagacagacnacagggccagggaaaggcggannaaccaagacaaaaacaaggggggggggggggggacannannnnngngcgannnaccaacaaggacagcacggcacaaancanagcggcgaggagagcgggggaganggggcnggcggcggccgacnggcaggaggggccancgaggggggcgggaggnggggnggccaacgcggcagggggccgcgggacggggcgggggggggggggggcgggggggggagggccgnggggggggggggggggngggggggcggggggggggccggggggaggggcgggggcggggggggggggcgcgggggcgggggggggggggggggggggggggggcgggggncggggggngggcgggggcgccgggggggggg

SEQ ID NO: 123606 - DNA, 516 bp, Zea mays
  Clone ID: MRT4577_44208C.1
aaacacttatcggacgcgtgggtgaatgaattgttaaccaaacccaattgcagaagacattcatccactaaatcgtcacatgatccaccttagttcataagtttataccaccctagttataggtcacttggtcagtagctgcaacttgcaagtgatttagggtttaataaaaaatttctggtagtaaagttgaaaggtatggtttgaggagagtgaatggtatcatgtcgaattacagtacattacaatttacaagtaaattgattagtcctctggtctgttgattggtagcatgtttttcctatgtaattgcctctgttcttcttctttaggggctaggttcgttgtaatcatttgaccgtggggatgtttgtactaaattcttatttctcttaaggaaaatcatgctaatgcacagccgcgaaaaaaagtaaattgatgaacaaatctacctaacttttgatttctgttggattttaactctagtctacctctttgaaattaaaaggctgtgct

SEQ ID NO: 123607 - DNA, 737 bp, Zea mays
  unsure (1)..(737): unsure at all n locations
  Clone ID: MRT4577_44209C.1
gttccagcctctcaaancaatcttgtgtgtaagaaccattacaagagaagccactgtgacaagagctacacctgcagccgttgcaacaccaagaagttctctgtcatcgcggacttgaagactcatgagaagcactgtggtcgtgacaagtggctctgttcttgcggaacgaccttctccaggaaggacaagctttttggacatgttgcgcttttccaaggccacacacctgcgctccccgtggaagacggggatgtaccagaaggttcaccggcccctcaggacggcgaaccaacgaatgaaatggcgaggagcatggtgtatagcttcccgtgtagctcgtctgatggtttattgaacctcgacatgaaaatggctgatgacgtgcgtggttatctctcgccgctgagctttgataattgctttggcgcgtttgacgacttcactcgccctggatttgacatctctgaggaccccttctccttcccgccttcaggatcttgcagttatgggcagcagaacggtgatagctgatggatgccgccatcgatgatgactacaccgcggcactgtcaacctttatgtatgttgttgcatgatgctagtttggttcatcctctgttcaagagccattttaggctatgcctttaactttcttaagtgtacctccgtttgtggtcattaataatgatcaaggacttctagataaaaaaaaaaaaaaaaaaaaaaaagcggcc

SEQ ID NO: 123608 - DNA, 2013 bp, Zea mays
  Clone ID: MRT4577_4420C.1
gcgaccgcggccggtggcgcaggcggagcgcccgatcgcacctgcctctcgtcgtggccgtcctcgtgctccttcttccggcctatcttctcttctcatcggcctactccaccacgctccgcgactctcttcgctttccccttcgcccccggaggtggcgaggcgccccggtgcgggggataagtggagctctaggggcaaacgtgaaagtggaatgcactaaagaaggccaagggtgacaagaagaagtctagcagtagacgttcctccctgatgtacgaagctccccttggctacagcatcgaggatatccgccctgcaggcggcatcaagaagttctccgctgcttactcgaactgcgcgaggaagccatcctgatatctctgttgtcatccccatcctagtagcgtagaaaccacctgcattttcattttgatctccctaatccctccggctagctgctttccagtgaccaaaagatatcaaagaccacttcccgtcttcctcccgtgggctgtctgtcatctggctctgaaacgatggcagtcctgcaagttgctgctgctgcccctccccctgtctctgtgattgggttcgagggatttgagaagcgccttgagatcagcttctctgaggcacctgtcttagcggaccctcgagccagcgggatgcgtgcgcccccccgtgttcgttaggctctgttcttgatccccctccatctgatctcttgtgtgctagagaaatataggccgccgccgcctcctcctcattcggtgaaagcctgtttttagggttggacgatctcttgcctcacgacacgagcagcagaatttgtcgagggccgctggttgctgcgagaggtccgggccttcgtgggatcttgaaaattgaatgttctaatggagtccaagggtggcaagaagaagtctagcagtagtcgttcctccctgatgtacgaagctccccttggctaccgcatctgaggatatccgccctgcaggcggcatctgagaagttctccgctgcttactcgaactgcgcgaggaagccactcctgatatctctgttgtcatccccatcctagtagcgcacaaaccacctgcattttcattttgatctccctaatccctccggctagctgctttccagtgacctgaagatatcaaagaccacttcccgtcttcctcccgtggtctgtctgtcatctggctctgaaacgatggcagtctgctgcccctccccctgtctctgtgattgggttcgagggatttgagaagcgccttgagatcagcttctctgaggcacctgtcttggctgaccccagcggaaggtgactgcgtgcgctctcgcgtgcccagatcgactctgttcttgaccttgctcggtgcaccattgtgtccgagctctcaaacgaggacttcgactcttatgtctcatctgcgtcgagcctgttttctacccattatgggattctgatcaagacgggtggagaggtgctagcttctgcctgagttctctgttgccgtgaccatcttcggtgatcgggacaatgcgaagacctgggggacgaaactggatgctgaggcctatgcttgcagcaacatggttgagcaggtgctgccgtttggtggcttgctcatctatcagagcttcactgttacggccgaaacgacccatgggtcgccgaggtcagtcctgcatgacttcgctggtgacattgtcaagaatcgctcagagagtgatgctccctgggaagctgatgctgtggatgagagcgaggaaagagatgtaaagaagatgaaatgctgatgtggtcgacgatagatcagattcagagttgctgcccctggttatcttgtgaagcagccaagcctaattatttatgccccataacctgtgctattgtaatgtgtcacatgcttatatttgcaataaacagctttaggtggtcaaaaaaaaaaaaaaaaaaaaaaaaaaaaaaaaaaaaaaactcgaggggggaaaccggtaccc

SEQ ID NO: 123609 - DNA, 388 bp, Zea mays
  unsure (1)..(388): unsure at all n locations
  Clone ID: MRT4577_44210C.1
gcgtgnnttattgggttattacatnctnntcatatttacacccagtacagccatgganaattagcacagacaagagacaacgcagcagaggatctcgagctgaagcggagcccagatccagaaactgcgcgagacgaacaccaaagcaaactgcatcgattcaagaaagggaactctttttttcgtgcctatttttccccctgtgccaagatgtgacactgactgagcagccgtcggtggatgaacggatctggtccttcagcgcggctgctggacgggccgagggcttgaggtggcggcgtggggcatcgacaggtggtggagggcgcacggtgggccgccggacaccccgaggtacgcggcgaaggcgcccgcgagggctgccctc

SEQ ID NO: 123610 - DNA, 408 bp, Zea mays
  Clone ID: MRT4577_44211C.1
ggggacaggttccttcccaggcaaaaaaaggttatcattattgggcccccagggggcgggaaaattatttttttaaaaacgggcctttaccaaatcttaaagggaaaaaaagactggggacctcgctttttttaataaaaaagggttatgtataaaaaaagcccttgaccatgccaaaaggggaccccccatttaatttggcattgaaaaccccatggtaaaaaaaccaggggggggttttttaaacaaaaaccctcactcaaaaaaagggttccaaaaccaaaaaagaaattcgggggaaattttattcacccccaggaaccacatcaaaaaaataatctgggggggcttccttggcttggaaaaaaaaaatttgaaaacccctgaaactttcgatatcttgaaaaa

SEQ ID NO: 123611 - DNA, 810 bp, Zea mays
  unsure (1)..(810): unsure at all n locations
  Clone ID: MRT4577_44212C.1
tttgcgactgcatccatcaccaaaggtggcccaagagagccatggcatgatattcattcccgattggaaggtccaattgcctgggatgttctttacaatttcgagcagagatggagaaagcagggtggcaaagatcttctcgtgcagctcagggatctctctgacataattatccccccttctcctgtcatgttcccagaggacagagatacatggaatgtccagctcttcagatctattgatggtggtgctgcttttggcttccctgatactcctgaggaagctgcaagggctgggcttgtaagtggaaaggatcaaatcattgacaggagcatccaggatgcatacataaatgccatccggcgggcaaaggacttcatctacattgagaaccaatacttccttggaagttcctactgctggaaacctgaaggaatcaagcctgaagaaattggtgctctgcatgtgattcctaaggagctttcgttgaagattgtcagtaagattgaagccggagaacggtttactgtttatgttgtggtgccaatgtggcctgagggcatgccagagagtgcatctgtacaagcaattctggactggcaaaggagaacaatggagatgatgtacactgacatcacacaagctctcgaggcaaagggaattgaagcaaaccccaaggaatacctcactttcttctgcctagntaaccgtgaggtgaagcaggatggggaatatgaaccccaggagcagccagaactgaatactgattacgtccgcgctcaagaaaggctagggaggttcatgatctac

SEQ ID NO: 123612 - DNA, 467 bp, Zea mays
  unsure (1)..(467): unsure at all n locations
  Clone ID: MRT4577_44213C.1
gtgggggacaatatggattgatggcgcagggagtaaatgcttttcatctccatctatttgtacagccatagttcataacaatccacacaacactctgcttttactgcaggtatctatgttcctgcagccacatcttgacatcctccgcatctctctcaagccatgcggctttggcactgatggcgtcgatgctctgagacagcgccatatcgaagcccttggtgctcttgctgctgaagaacgcctggatatcttcaatgtgttcccggtgagtgaagcccgatgttgtaatggcaacaaccgaacttagcatgctcaagctaggaggcagccttctctccagctccgaccagttgtccgtgacccacttccaaagcgcgtgcaagccccccgcgtgtgaccttaaggcagcaatgggcaaatagatgtcttggcccttgacttngtcactgagggccgcacgggtg

SEQ ID NO: 123613 - DNA, 320 bp, Zea mays
  Clone ID: MRT4577_44214C.1
gttagacacccagattctctcacaaaggtgcaggcaggagctgaaagcagtacatgaagacgttcagtctgatatttcggagcacaagttgaagggccatatgcggtggatctaggtgctcatgaacctgcgttcgctacggggagctgtaccgttacatttgcgttacttagggcgcattcgtgcatgtctgctttctacttaagcgttcgatcatgtctgtgatcgagtccgtgacgtgcgttttgtcaacgatggcgtcctgccttggtgtctttgctgagttcattctggaccggggatgtgccctgttaattttc

SEQ ID NO: 123614 - DNA, 608 bp, Zea mays
  Clone ID: MRT4577_44215C.1
agcgttcttgaacggtgacctccaggaggaggtgtatgtgcagcaagcgcctgggtttgctcaacctggacaggaacacaaggtatatcgactgcacaaagctctttatggtttgcatcaggctccccgtgcatggaataaaaaactggatgaacaactgggtgttctgggatttgtgagatgtccatctgaggctgctatctactgccgtggaagagacgcggagagactggttgtaggtgtctatgttgacgatctggtgatcacaggcactagcagcagcagcatcaggaagttcaagacagaaatgactaatatttttaagatgagtgaccttgggttgctatcttattacctgggtattgaagtgaggcaggaagaagctgggatcaggttgtctcaaggaagctatgcaagaaaaattctggagaagtgtggtctagaggactgcaatccctgcaccgtgccgatgcagcctaagctgaagttgagtagggaaagtgatagttcaaaaatcaatgtgactgaatacagaagcttggtagggagcctgagataccttgggaatactcgacctgacttggcatattcaggtggatatgtgagta

SEQ ID NO: 123615 - DNA, 438 bp, Zea mays
  Clone ID: MRT4577_44216C.1
aaagaaaatttatttttatcttttcctgtatccgcttttggggcactcgaagtgcttatttaacccttctaatacacgatcaatctaaacaataggagcttttggagcccgaataataggagctactgtagcctgaataataggagctactttatcctaaacaattggaactaacttaaactgaataacaggagatatcttaacatatttctattctcatgtttttgggtcacgacccaacatgcattttgttttgagagccgttgatcccctcgagctcctcctatgcatacatgttctgctaatgatttcttaattttttcttctggagaagacttcaggtatccttctccagtcctgactgaaacggcccaatcggaagagataaagtggacaccgtgcttagcgcttgaccagccggcttgaatccactcaaat

SEQ ID NO: 123616 - DNA, 967 bp, Zea mays
  Clone ID: MRT4577_44217C.1
atgcccattgtacttgttgactggtctgatatccgtgagcaaaaacggcttatggtattgcgagcttcagtcgcactacacggtcgttctgttactctttatgagaaagcgttcccgctttcagagcaatgttcaaagaaagctcatgaccaatttctagccgaccttgcgagcattctaccgagtaacaccacaccgctcattgtcagtgatgctggctttaaagtgccatggtataaatccgttgagaagctgggttggtactggttaagtcgagtaagaggaaaagtacaatatgcagacctaggagcggaaaactggaaacctatcagcaacttacatgatatgtcatctagtcactcaaagactttaggctataagaggctgactaaaagcaatccaatctcatgccaaattctattgtataaatctcgctctaaaggccgaaaaaatcagcgctcgacacggactcattgtcaccacccgtcacctaaaatctactcagcgtcggcaaaggagccatggattctagcaactaacttacctgttgaaattcgaacacccaaacaacttgttaatatctattcgaagcgaatgcagattgaagaaaccttccgagacttgaaaagtcctgcctacggactaggcctacgccatagccgaacgagcagctcagagcgttttgatatcatgctgctaatcgccctgatgcttcaactaacatgttggcttgcgggcgttcatgctcagaaacaaggttgggacaagcacttccaggctaacacagtcagaaatcgaaacgtactctcaacagttcgcttaggcatggaagttttgcggcattctggctacacaataacaagggaagacttactcgtggctgcaaccctactagctcaaaatttattcacacatggttacgttttggggaaattatgaggggatctccacaggggcccggtaccca

SEQ ID NO: 123617 - DNA, 791 bp, Zea mays
  Clone ID: MRT4577_44218C.1
cccacgcgtccgcccacgcgtccgcccacgcgtccgcgtgctaaagtgtcctcactgctgctctcctccgctccgcagctcatggcttcctcggtctccctccgtggcgccatcctccagcgcccccacctcacgccccgccccgacgcccgccgcgcgcccacgacgaggcgccgcgccgtgcctgcaaagatctgctgcatcggatgggaccccgagggcatcctgggcgcgccgcagggcggccacatcgcgcgcctcgagttccgccgccgcctcgagagggactccgaggcgcgcgaggccttcgagcgccaggtgcgcgaggagaaggagcggcgccgcagcgagcgcgaggcgcgggtgatcccggacacggacgccggcctcgtcgagttcttcctcgacaccgacgcgcgcgagatcgagatcgagatcggcaggctgcggcccaggctcagccaggactttcggccacgtctcgcgcgagatagcgcagatcaaatttgcagtcaccaggacagcggagatggaagacagactgatcgagctggaggcgatgcagaaggttcttcttgagggagttgaggcgtacgacaagttgcagaacgaccttgttacagcgaaagaacggctcatgaagattctgcagtcaagtgacagaaaatcgacactgctggaaatggtggagcggaacgagctcaatatatccatactaacacttctcgatgagaacatcgcgagcgcgaagacgagtaatcaggatgaggcggccgccgactagagaactc

SEQ ID NO: 123618 - DNA, 892 bp, Zea mays
  Clone ID: MRT4577_44219C.1
ccggggtgcaggcagcggataacgtgctaaagtgtcctcactgctgctctcctccgctccgcagctcatggcttcctcggtctccctccgtggcgccatcctccagcgcccccacctcacgccccgccccgacgcccgccgcgcgccaacgacgaggcgccgcgccgtgcctgcaaagatctgctgcatcggatgggtgattcttcttcttgtctctgactctgtggtttacccgagcacggtgcacggccacttatccgtccggctggccgcccgtctcccgtttcctctttcctgaccacgatcgcctttggggctgggctgggcaggaccccgagggcatcctgggcgcgccgcagggcggccacatcgcgcgcctcgagttccgccgccgcctcgagagggactccgaggcgcgcgaggccttcgagcgccaggtgcgcgaggagaaggagcggcgccgcagcgagcgcgaggcgcgggtgatcccggacacggacgccggcctcgtcgagttcttcctcgacaccgacgcgcgcgagatcgagatcgagatcggcaggctgcggcccaggctcggccaggacttcttcggccacgtctcgcgcgagatagcgcagatcaaatttgcagtcaccaggacagcggagatggaagacagactgatcgagctggaggcgatgcagaaggttcttcttgagggagttgaggcgtacgacaagttgcagaacgaccttgttacagcgaaagaacggctcatgaagattctgcagtcaagtgacagaaaatcgacactgctggaaatggtggagcggaacgagctcaatatatccatactaacacttctcgatgagaacattgcgagcgcgaagacgagtaatcaggatgaggc

SEQ ID NO: 123619 - DNA, 1204 bp, Zea mays
  Clone ID: MRT4577_4421C.1
tcattgggtacctcgaggccggccgggatccacagcgacaccgcgtggttcgttaggaaaggaaatcgattcccccgcatctgatctcttcggtgctagagaaatataggccgccgccgcctcctcctcattcggtgaaaggtgcgcagttagggttgggagatctcttgcctcacgacacgagcagcagaattcgtcgagggccgctggttgctgcgagaggtccgtaccttcgtgggatcttgaaaattgaatgttctaatggagtccaagggtggcaagaagaagtctagcagtagtcgttcctccctgatgtacgaagctccccttggctacagcatcgaggatatccgccctgcaggcggcatcaagaagttctccgctgcttactcgaactgcgcgaggaagccatcctgatatctctgtcgtcatccccatactagtagcgtagaaaccacctgcattttcattttgatctccctaatccctccggctagctgctttccagtgaccaaaagatatcaaagaccacttcccgtcttcctcccgtggctgtctgtcatctggctctgaaacgatggcagtcctgcaagttgctgctgctgcccctccccctgtctctgtgattgggttcgagggatttgagaagcgccttgagatcagcttctctgaggcacctgtcttggctgaccccagcggaaggggactgcgtgcgctctcgcgtgcccagatcgactctgttcttgaccttgctcggtgcaccattgtgtccgagctctcaaatgacgactttgactcctatgtcttatctgagtcgagcctgtttgtctacccgtacaagattgtgatcaagacctgtggaactacaaagcttctgctcgctattccgaggatccttgaacttgctgaagagctcctgttgccactcgctgcagttaaatactcccgtgggacgttcatattccctgaagcacagccttccccacacaagaactttgctgaagaggttgccttcctgaatcgcttcttcggtggcctcaagtccggtggcaatgcttatgtgattggagactctgcgaagcccgggcagaagtggcacgtctactacgccgctgagcaccctgaggagcctctcattactctggagaatgacatgactgggctggacaagaagaaagcttctgtcttcttcaagactctgctg

SEQ ID NO: 123620 - DNA, 1754 bp, Zea mays
  Clone ID: MRT4577_44220C.1
gccggccgggcctgcgtgtccacaacttagtacctggcacgcggcgaaacgccgaaaccgcgtcaagttccccttcttcgatcccccaatcgccgtaaccctagactcgccaccgccggcgcgatgctccgctcgccgggcaattcgccccgccgcctctcaccgtcgcccacacccgcgccctccacccctcgcccggcctccccgcccccctccaacgccccctcctcgaagcgccgccggtcggaagtgctcgacgaggacacctacgtcgccgccatcgagcgcatcatcgagcgcgactacttccccgacctgccccgcctccgggaccgcctcgactggctgcaggccgtgcggtcccacgacccgctcatcctacgcgacgcgcagctcaagatcctagaccgccgccgccgcgcccagcgccacgcggcggggcccgtccccacgccgacgccggccacctccaccgcgctccgctccccgtcctttctcaccacccccgccggatccgtcgccggcggcgtgggaggtcccgacgccgaccacgacgacgacgtcgcggccgcgctctccctcgacggcttcttctcgccgcttcaccagcgaggacaacgactccttctcgcgcatcctagacaaggtgaaccagcgccgccgcgagcgctacgcgcacctgctggagccgccgccgcctgccgaggcggggagcaaagcgtcagagggcgccaagcgcgacaggatcacggacgggtacggtacatcggggcagccaccgagtacgctcgagggcgccaagttcacggcaaagaaccagctcatgtactacccggctgaccagggggaagcgcccctcacggaggaggagcgcgcagagcggctcagggggatgaccaaggagataaacaagccgaacaccaggctacatggcagagccacggctgatgacgcgaggcccaaggaggaggagggggccgccatactgtacgcgctagttgcaggctctactccgggagggatggcctaccacgaccctgacaagttgaagaagtacgatctggaggacctgaggaagaccccgaaccctttctacctcgagtcggacaagaaggccggcaacgggtacagttttgtgaggacgccgtcgccggcacccggcgtggacgagtcgccgttcatgacgtggggtgagatcgatggaacaccgctgaggctggactccgatgagacgccgggcggtagcgagagagcgcatttcaagatgccgccacctcctgctcgcgatgtcaaggcgcacctgctttcgagggacgccgctcggaaaataaaggagcggtctaataccttccataggccgcccctaccctcccctgcgaggggtgtcagcgcaagccctagaaccctctcgcgggccgcgcaaaaattcgtgaggaacgccatctccaagtcgtcaaagtcctccagcgccattgacgaatctctccgtgcaagctacagaggctcgaccccgtctgcgagcactcccaagtcaaggttttcacgagaccctggcctcgcatcgcgttctccatccacaaggcagggttccacccctccctggtgagtgttggtgagtgttagtaaaccacttaatgttatttcataaaatgggtaggtggcccatcctgtactgtaacaaattgtataatgatggaagacatgaaatgatgaagtgatgcttatttactcttaaaaaaaaaaaaaaaaaactc

SEQ ID NO: 123621 - DNA, 836 bp, Zea mays
  Clone ID: MRT4577_44221C.1
ctccgcagaagtaccgaatctaccttagaaagctcggtgatggcacactgaggagttctagtccatttgctgatgaaactgaagcatttcggagaaacatgaatgtcccatccttcattagctcttcgagctcaagcaaccattttgcaaagatgaattcctcatcactaattggaacggagacattgctacccacagagtcagtttatatcatgagcccccagaaaaacttgggcatttctcggtcaaacatggaaccagttagccatggtgttaacttacccaaagatgttattcctatgccagtgcaggatattagcagattcatttcttctggcaagtcctatgcacctgtatggagtgatgggctgctaggtagaagccagtgcttcccttctggtccttctggcagctcctttgcaaatatttcaaatagtgtggtgttgaacgcaagcaaacctttctctgttgatatttctgggagatcattagcaaatggctcaaatgacaggccaccattgacctcgaacatgtgcttttcttcgtctcattcttgcagctcctatgcgagcatattgggtggcaagattttgggatcaagcagacgtattcctttcgaagacatagcagatggtgagatgttggctcctggtattttaccattgcagtctcctcagttggtgaaacagccttcttctgctggcctatttaacgaggttgccagagacgttcaccaatttgcaggacttagcaactccctggaagttgctgtgccgccaaggttttctgatcttggtcataatgtggaacatctgaaagtcattcgcagggtaaca

SEQ ID NO: 123622 - DNA, 2573 bp, Zea mays
  Clone ID: MRT4577_44222C.1
gccggccgggctgcgcaattcggcacgaggagcttcccttccccgtcgtctatccgcgtcagtttcgactttcgattcccctcgccctcgccgacggccagacgccgaacgtctcgccctctcccgacgctccccgcctcccccttgatccgccgagcgcggcggccgccgccgccgccgaacccgatctccccccctcccgcgtgacaggcacggcctcccctcggttggaagggtttgctgtatcatgcattttttgtggataatcttcattttctcttgagtcaccgattcttttgttgtcttcaaaatgtcgggcttgctgaactcaaaccttaatagttcggcatcaaatctttcagactcagctggaaggccatttacagcatccttttcgggtcaatctggatcaattccaggttttcatcattctggcttgcataacactcatggaagttacaatcttccgagtatgcctggatcacttgcacaaaggaatgctgccatgagtggccttccgtcctctggggttcaacaacctggaggtagcattcctgggagattcccttcaaacaaccttccagttggcatgcctcagattcctcatgcacattcaggtgtcagtggtagagggatgaattttggcgcaggtccggcatttagtagcagcatgaatattggtggtaacatccaaggcttatcctcgggcttgggctccggtggtaatcgcaattctgttcatgggatgccagtatcttcatctataggaaactcgggtcaacggataagttctgtaggaaatatggtaagtgcaagcaatattggaagaaatataggcactggtggtttgtccgtgccaagtattgcatcacgaatcccacgggtccggtgtgctgtttattacgtatctgtttatcagagtgcatgtctcatccagcttttttaatctctgaaaccagcaactcctcagttgataaatatgcttggaagttcatatccaacatctggaggttcattatcacagagccaaattcaagcaggaaataattcttttagttctatggggatgttgcatgatgccagtgacactgctccatttgacataaatgattttccccaattgtctggtcgacctagttctgctggtggtccgcaaggacaatatggatcactgcgcaagcaaggagttggtgttaatacccttgtgcaacaaaaccaggaattcagcattcaaaatgaagacttcccggctttgcctggatataaaggtaacccttcggattataatgctatagagttgcatcacaaggaacaactccacgataatgtacctgtaattcaagcacagcagtatcctatggcaaggtcaggcttaggaagtagctacctacccaatcgacaacaacaccagcaaggtgctaattcagtccagaatggcggatcccacaatattttactgagaccacccagtcaaacttctagtttgggatcatatgatccatttctgcagcaataccagcagcctcagcctcaaaatcatttcagattgcagcagatgtcttcagctgcacattcatatcgggatcagattcaaaagattcaggcgggaccgacaccacctgatccatatggcttgttaggatttttgggtgttataaggatgaatgatgctgatttagcatctcttgctttaggaatagatttgacagcattgggtttgaacttgaactcgccagataatctatacaagacatttggctcaccctggtcgaatgacccagcaaaaggagatactgattttcgaattccagcttgttacctctttgacaaaactcctccactacagaccttactttttcagaggtttcacatagtaacactatttttcgtcttctatagcatgccaaaagatgaagctcagctgtactctgccaatgaactgtataatcggggatggttttaccataaagaagtgcacttatggctcaccagaatttcaaatgtggaacctctagtaaaaactcacctctatgaacgtggatcttactattgctttgacccagaatcctgggacacaatacgcaaggacaactttgttctccactatgagatggtagagaaaaggccagttctgccttcaacatcaccaaaccttagatgaaaagaaaatctaggacggggagaggaacaaagaaacatataacgatctgcaggaaggactaaggaggcaggaagtcgcagaacagaattggggatgtccaattaacaccccttgtaattactaaaactgtgagcgaatgttgcgtttttcttgcactccccccttcgccctcctaattaaactgcctaatgttcaggattagtttttctccagcttcaaaataacaacgcatagatggttttgatgttctgtcctctgtccaaccatatcatgtcgatgctcagcgaaagataaaatcataccatgtcgatgatcaccggacgcgtgggtcgacccgggaattccggacccaaaaaaaaaaaaaaaaaaaaaaaaaaaaaaaaaaaaaaaaaaactcgagagggggcgccgg

SEQ ID NO: 123623 - DNA, 571 bp, Zea mays
  Clone ID: MRT4577_44223C.1
cccacgcgtcgccacgcgtccgattcttcctttcttggtatccgaaaccatagatctggtgtattgagactattgtcatgcctaataatcgaagattctcttcaggctcatccatttctgcagcaataccagcagcctcagcctcaaaacatttcagattgcagcagatgtcttcagctgcacattcatatcgggatcagattcaaaagattcaggcgggaccgacaccacctgatccatatggcttgttaggatttttgggtgttataaggatgaatgatgctgatttagcatctcttgctttaggaatagatttgacagcattgggtttgaacttgaactcgccagataatctatacaagacatttggctcaccctggtcgaatgacccagcaaaaggagatactgattttcgaattccagcttgttacctctttgacaaaactcctccactacagaccttactttttcagaggtttcacatagtaacactatttttcgtcttctatagcatgccaaaagatgaagctcagctgtactctgccaatgaactgtataatcggggatggtt

SEQ ID NO: 123624 - DNA, 1401 bp, Zea mays
  unsure (1)..(1401): unsure at all n locations
  Clone ID: MRT4577_44224C.1
gccggccgggcctggaagtcccttctcctcccctccggcctcagcttcccttccccgtcgtctatccgcgtcagtttcgactttcgattcccctcgccctcgccgacggccagacgccgaacgtctcgccctctcccgacgctccccgcctcccccttgatccgccgagcgcggcggccgccgccgccgccgaacccgatctccccccctcccgcgtgacaggcacggcctcccctcggtcgcggagatttgtgtgctcgtacctgcgaagaattgatcgtgtgggattatattctacggttcggtagtttcagcgtcagctctcatatgaaatgttgctgctgtcgtgctttgcgctgatcaggttggaagggtttgctgtatcatgcattttttgtggataatcttcattttctcttgagtcaccgattcttttgttgtcttcaaaatgtcgggcttgctgaactcaaaccttaatagttcggcatcaaatctttcagactcagctggaaggccatttacagcatccttttcgggtcaatctggatcaattccaggttttcatcattctggcttgcataacactcatggaagttacaatcttccgagtatgcctggatcacttgcacaaaggaatgctgccatgagtggccttccgtcctctggggttcaacaaccctggaggtagcattcctgggagattcccttcaaacaaccttccagttggcatgcctcagattcctcatgcacattcaggtgtcagtggtagagggatgaattttggcgcaggtccggcatttagtagcagcatgaatattggtggtaacatccaaggcttatcctcgggcttgggctccggtggtaatcgcaattctgttcatgggatgccagtatcttcatctataggaaactcgggtcaacggataagttctgtaggaaatatggtaagtgcaagcaatattggaagaaatataggcactggtggtttgtccgtgccaagtattgcatcacgaatcaatttgaatggtagtggtgggagtggtagtctgaatgtgcaaggatccagtcgaatgatgaatggattgcttcatcaataagcaactcctcagttgataaatatgcttggaagttcatatccaacatctggaggttcattatcacagagccaaattcaagcaggaaataattcttttagttctatggggatgttgcatgatgccagtgacactgctccatttgacataaatgattttccccaattgtctggtcgacctagttctgctggtggtccgcaaggacaatatggatcactgcgcaagcaaggagttggtgttaatacccttgtgcaacanaaccaggaattcagcattcaaaatgaagacttcccggctttgcctggat

SEQ ID NO: 123625 - DNA, 341 bp, Zea mays
  Clone ID: MRT4577_44225C.1
gcgtctccttagcccgcagccgacatctctgcctcttccgctctcggcggagatcccgagatgactctctttggtgtattcgatggtaactggggcaaaaatgctgcagagttcgctgcggagaacatgcccaagtttttggccgaggagttcaagaaggtgaacggcggacgagagatcgaaggagctgtcaagaggagttacctcaagactgacgaggagttcctcaagagggacgagagcggcagctcgtgctgcgtaacatccgttctacaaaagggtggtctgatcttctccaacactacagactgccgtgcggttctcagtcgagcagggaaagc

SEQ ID NO: 123626 - DNA, 372 bp, Zea mays
  Clone ID: MRT4577_44226C.1
cccacgcgtccgcggtcgcgtgggcggacgcgtgggcggacgcgtgggaaagaaaactaggacggggagaggaacaaagaaacatataacgatctgcaggaaggactaaggaggcaggaagtcgcagaacagaattggggatgtccaattaacaccccttgtaattactaaaactgtgagcgaatgttgcgtttttcttgcactccccccttcgccctcctaattaaactgcctaatgttcaggattagtttttctccagcttcaaaataacaacgcatagatggttttgatgttctgtcctccgtccaaaaaaaaaaaaaaaaaaataaaaaaaaaaaaaaaaaaaaaaaaaaaaaaaaaaaaaaaacaag

SEQ ID NO: 123627 - DNA, 270 bp, Zea mays
  unsure (1)..(270): unsure at all n locations
  Clone ID: MRT4577_44227C.1
ngagtgcctccaccctcctgcgcctccaccctcctcgccgcctcactccctctgaggtcgcagatccgtccggttagacgaagccggccgcacccatggcctccggcgatctcgccagcacttactaccccatcttcatcagcgtcgtcggcatcgatattggaactgcgaaaactacatttgtgaagagggatctcactgtagagtttgagaataaatatgaaccaaccattgcagcgcaagctcatcccctagatatctccacctaaa

SEQ ID NO: 123628 - DNA, 1382 bp, Zea mays
  unsure (1)..(1382): unsure at all n locations
  Clone ID: MRT4577_44228C.1
atagttcaagcaaagtttaagtatcttagtgaacattatgcgcacgtcagacaaatgcgaatggatggatcatctttttacagagctttccttttctcttacttggaaaaccttgggaaaatgcaagctagtcatgctgaggtcactcgcttaatggaatgtgtggcaaggtccagagagaaattttgtcgtttacattggaatgatgcgtacttctcaaatcctgaagcatttttctcaagtgttgtttctgagttcgagcaattggtcaattcagttgccaatgggctaaatgctgatgagctttacaagagaagcctacatgagattacatcatccaggattctttgtttgtttagattgctgacagaggttcatatccgtacacatcatgcggactacccagaattcagtcaggaaacagaagcccttatgaatcaggagcaagcacaacatcaggagctacgagttcaatcagaagttactctctgtcaagcacaactgataaacacccagagcaaggaagggatgataacaactcaaccatgccggctggaaacttgttttcgtctgatcgcatgcctttagttatcttactgagtaggaagggtcaatatggcattctttatcgcaagtgaacaagttctgactatacggcagcctctggtggacagttctaaccggaactgtttgggttataacatggaaacctattgacaacctactctagtgtgggtgtttgattgtgcatctgcttccaaaatgtatctggttacatttttgcccccgacaaaaaatactccatttgctagatgtgctgatgcatgcagtttatgaaacaaatttggacttggcataaaatctgaggctgggagcagtgggacagatctgttactttttcggtttatttttcttatggatgtttgtaccattgctgaagcatggatggaagattcatatttggtaagaacatatgaaggactagttgttttctgatacagcaggacgtggtttggatcattcaagttcaaggaccaataacaccaaaatttcagaatgaaggcattttttgagagtccttgttactgcaggctctcctgaggacactaaaagttggatgcattctagaaggagcttcaaattattgataatgatgtggactttgtatttttattgtgaaaaatctttgaacacgaaaaaaaaaaaaaaaaaagcggagcattgacagcagactcaatcaaatgaaaatatagtatgcgagcggtctttttttgggataaaaaactcatgtgaatggaggactcattcagtgctaaaaaaaaaaggaagaannnnnnnnnnnnnnnnnnnnnnnnnnnnnnnnnnnnnnnnnnnnnnnnnnn

SEQ ID NO: 123629 - DNA, 786 bp, Zea mays
  unsure (1)..(786): unsure at all n locations
  Clone ID: MRT4577_44229C.1
ctcgaggcaaaaagaatacctccgcccaccaaanaacaaccgtgttgccaagcacagttatgctaactgcacctttgtaaccccagaacctcttgagaaggcactacaatgtcaggagccgctatctgattttggtcgnngaaatatgcagaaaattctatagttcagcaaaagtttaagattcttagtgaacattatgcgcacgtcagacaaatgcgaatggatggatcatctttttacagagctttccttttctcttacttggcttgtaatcaggaaaaccttgggaaaatgcaagctagtcatgctgaggtcactcgcttaatggaatgtgtggcaaggtccagagagaaattttgtcgtttacattggaatgatgcgtacttctcaaatcctgaagcatttttctcaagtgttgtttctgagttcgagcaattggtcaattcagttgccaatgggctaaatgctgatgagctttacaagagaagcctacatgagattacatcatccaggaggaggatacaattttttttgggatgtgttgtttatttgttctctatgtaacattttctttggttagttctttgtttgtttagattgctgacagaggttcatatccgtacacatcatgcggactacccagaattcagtcaggaaacagaagcccttatgttttgcttagcatcggtgcgtccctttgaagctggagctaacattctacaaatgagtgctctatcaagtgcacttggcattccattgcacctgtcttgtacggatgtaaccacg

SEQ ID NO: 123630 - DNA, 3226 bp, Zea mays
  unsure (1)..(3226): unsure at all n locations
  Clone ID: MRT4577_4422C.1
ggccggcactgggcaccctcgggccggggcgggatacacagcgacaccgcgtggttcgttaggaaaggaaatcgattcccccagcatctgatctcttcggtgctagagaaatataggccgccgccgcctcctcctcattcggtgaaaggtgcgcagttagggttgggagatctcttgcctcacgacacgagcagcagaatttgtcgagggccgctggttgctgcgagaggtccgggccttcgtgggatcttgaaaattgaatgttctaatggagtccaagggtggcaagaagaagtctagcagtagtcgttcctccctgatgtacgaagctccccttggctacagcatcgaggatatccgccctgcaggcggcatcaagaagttctccgctgcttactcgaactgcgcgaggaagccatcctgatatctctgttgtcatccccatcctagtagcgtagaaaccacctgcattttcattttgatctccctaatccctccggctagctgctttccagtgaccaaaagatatcaaagaccacttcccgtcttcctcccgtggcctgtctgtcatctggctctgaaacgatggcagtcctgcaagttgctgctgctgcccctccccctgtctctgtgattgggttcgagggatttgagaagcgccttgagatcagcttctctgaggcacctgtcttggctgaccccagcggaaggggactgcgtgcgctctcgcgtgcccagatcgactctgttcttgaccttgctcggtgcaccattgtgtccgagctctcaaacgaggacttcgactcttatgtcttatctgagtcgagcctgtttgtctaccaatactctaatggaatccaagggtggcaagaagaagtctagcagtagtcgttcctccctgatgtacgaagctccccttggctacagcatcgaggatatccgccctgcaggcggcatcaagaagttctccgctgcttactcgaactgcgcgaggaagccatcctgatatctctgttgtcatccccatcctagtagcgtagaaaccacctgcattttcattttgatctccctaatccctccggctagctgctttccagtgaccaaaagatatcaaagaccacttcccgtcttcctcccgtggcctgtctgtcatctggctctgaaacgatggcagtcctgcaagttgctgctgctgcccctccccctgtctctgtgattgggttcgagggatttgagaagcgccttgagatcagcttctctgaggcacctgtcttggctgaccccagcggaaggggactgcgtgcgctctcgcgtgcccagatcgactctgttcttgaccttgctcggtgcaccattgtgtccgagctctcaaacgaggacttcgactcttatgtcttatctgagtcgagcctgtttgtctacccatacaagattgtgatcaagacctgtggaactacaaagcttctgctcgctattccgaggatccttgaacttgctgaagagctcctgttgccactcgctgcagttaaatactcccgtggaacgttcatattccctgaagcacagccttccccacacaagaacttcgctgacgaggttgccttcctgaatcgcttcttcggtggcctcaagtccggtggcaatgcttatgtgattggtgactctgcgaagcccgggcagaagtggcacgtctactacgccgctgagcaccctgaggagcctgtcgttactctggagatgtgcatgactgggctggacaagaagaaagcttctgtcttcttcaagaccactgctgatggttactcgctgtgcgccaaggagatgaccaagctctctggtatctcggacatcatcccagagatggagatctgtgacttcgacttcgagccctgtggctactccatgaatgctgttcatggccctgctttgtcgaccattcatgtgaccccagaggacggcttcagctatgcaagctacgaggtcatgggcttcaacccgggctctttctcttatggtgacctggttaagagggtgctgaggtgctttggtccaactgagttctctgttgccgtgaccatcttcggtgatcgggacaatgcgaagacctgggggacgaaactggatgctgaggcctatgcttgcagcaacatggttgagcaggtgctgccgtttggtggcttgctcatctatcagagcttcactgttacggccgaaacgacccatgggtcgccgaggtcagtcctgcatgacttcgctggtgacattgtcaagaatcgctcagagagtgatgctccctgggaagctgatgctgtggatgagagcgaggaaagagatgtaaagaagatgaaatgctgatgtggtcgacgatagatcagattcagagttgctgccactggttatcttgtgaagcagccaagcctaattatttatgccacataacctgtgctattgtaatgtgtcacatgcttatatttgcaataaacagctctaggtggtcagctttgtctgccgcaatgagcagtgtatcgatattgtggttttgaattgtttggatctaaataaagtcttgtgttcgatacaaaaaaaaaaaaaaaaaaggggacatggttaagagggtgctgaggtgctttggtccaactgagttctctgttgccgtgaccatcttcggtgatcgggacaatgcgaagacctgggggacgaaactggatgctgaggcctatgcttgcagcaacatggttgagcaggtgctgccgtttggtggcttgctcatctatcagagcttcactgttacggccgaaacgacccatgggtcgccgaggtcagtcctgcatgacttcgctggtgacattgtcaagaatcgctcagagagtgatgctccctgggaagctgatgctgtggatgagagcgaggaaagagatgtaaagaagatgaaatgctgatgtggtcgacgatagatcagattcagagttgctgccactggttatcttgtgaagcagccaagcctaattatttatgccacataacctgtgctattgtaatgtgtcacatgcttatatttgcaataaacagctctaggtggtcagctttgtctgccgcaatgagcagtgtatcgatattgtggttttgaattgtttggatctaaataaagtcttgttcgatacaaaaaaaaaaaaaaaaaaaaaaaaaaaaaaaaaaaaaaaaaaaaaaaaanggggggggggggggg

SEQ ID NO: 123631 - DNA, 371 bp, Zea mays
  Clone ID: MRT4577_44230C.1
ggttatcccaaaaaaatgaccgctcgcatactatattttcatttgattgagtctgctgtcaatgctaatcctagttctccacaagaagggtgttcaaagatttttcacaataaaaatacaaagtccacatcattatcaataatttgaagctccttctagaatgcatttaacttttagccagcattaccaatcacagacctcaggagagcctgcagtaacaaggactctcaaaaaatgccttcgttctgaaattttggggttattggtccttgaacttgaatgatccaaaccacgtcctgctgtatcagaaaacaactagtccttcatatgttcttaccaaatatgaatcttccatccatgcttcagcaatg

SEQ ID NO: 123632 - DNA, 403 bp, Zea mays
  Clone ID: MRT4577_44231C.1
cagccgtagtgtggtaatatatttacctaaataggaagcgtaacgcgggagtaagtaacgcgaatttcgaatattagccttttatttctaaaataatgaacatcaattaatataagggtagtaatttttgttctgcattttcttagtaggtttgctaagtcatttttgaaggaacatcctcattttgaatttacgattgaagtattttctcagttataaaatttcttgatactttaataaaataatgtggaccgttttgatgtttcctttttattacaaagtgccataaattatgttgttactgattatccaagtgattatttggcagcgtatccgaatagattatttttcgaaatactgaatttagaatttacacgtttatgtttttaaaagcttttttaaa

SEQ ID NO: 123633 - DNA, 2185 bp, Zea mays
  Clone ID: MRT4577_44232C.1
cgccagcccgcccacagaaaagccgttctcccctctttctcgattcgacgaggggaagactcgtcgagccgccggccagcccatctcggcgcattcccggagaatccctccggaaaccggtcgatcctgggtcatccaacacacagcacttcgcttctcccgcgtccccgacccgcgcgcaagccctcatgcggttagggctgtaacgatctcgtctcgctaccggcggccggctgcggaacgggccaccccacgcgctcctctgagttcgttcgactaatctaccgctgactgtactttgggctgtcgccaccagaaagccctcacgagtcctttgcctcctcactccgtcaggctcgtcgccacagggttttgttcctaactttttagcttcaatttttgtcttgaatggcaacacctctggatgttccactggatgatttgattaagagcagagctgggaggggaacaggaagaggcaggggacaaggagggggtcgaggcagaggtgatggccaaaggttggctcgtggttcgtggcgtgggcgtggtactggcaacttccgtgaaaggggacttggggtgtcttcgcggaggccacttggtgttaatacttggtcctcatcatttgctattgccaaggcaagcacacaactataactgtttttctgttaccttcgagaatccaaattgcagtaggtacctgatgagaagtggctataaacttattaaaatggcacagcccaactgttccattcagaccatatctgtgaccatttaactgtggagcttcaaagaggatccaatggctttttcattgagacctgtctcttctctgccgagtatgtagggtggtgaggcatatgttggtttgtgctggctattgcttcaaagttcaaactgataactttgtctctactcgtgagcaagctgatggactacttaataatctgtggataaggccttttcatgtatacagaaatagcaccattatgtggaatggtatagggttttatgattttgctgatgctagttgcttcatcaagtactgtggattgatgagttttgagattttatgctaatacttgctcgtcacaacatcgacatgcatgatatggaatattacagtcattcaataaagcaaaggattttgtgtggagacatgatctctttgaggatagcatggtagcagctgggctttctgggatagaatctggaacaaagctttacatttcaaatttgcactatggagtgacaagtgaagatctacaggagcttttttcagaaatgggtcatttgaagcactgtgctgttcattatgacagttatagacacccaactggttcggctgaggtgatattcaccaggagaagtgaagctctcgcagcactgaagcgatataataatatgcgccttgatgggaaggccatgaagattgaagtaataggagcagaattgggtctatcagctgctgccgtaccccagattagtgttgttcctggtgcaagcagaagagggcagagagaagttgttatgatgcctggtggaagtgggtttggacaaggtgcatctggcccatctagttcgcttcctgggtggaagcgtggaggctttgttcgaagaggacaagggcgtgttagttttcctcaaagagggcgagggcaagtgcgcagccgtggccgtggccgtggccgcagtagctttgttcagagccgtggacgtggctatgtgcgcaggggtaatgcagagaaatcagccaaacaattggacaatgaacttgacaactacaactctggtgcgatgaatgtcgactaagttaatccatcgtgacatcattcaatccaacctggaagttggaactatgttgaagctaagcttgttttctgtcggtattctgtcaaatgtgcacacttctgtcatgctctagtggcatcagttgaagattagatattccattattcctactgcaatagtcttgtgatatcagaatttgctgtaattgaatgatgaattatgttttcaaccgttgaaaggtttgctgtcaaaatttcaatattatcctagttattgtcagaattttcagtaggcattagccaaaaagattggtgctgactactggtatatcagaatttgctgtaattgaatgatgaattatgttttcaaccgttgaaaggtttggtgtcac

SEQ ID NO: 123634 - DNA, 184 bp, Zea mays
  Clone ID: MRT4577_44233C.1
gtgaaaatcgaggaacaaaggcctgatgtcaggcttgagagcggtgagcacaagaatgctgatagtgacagtataattcaacacccacatgtatatacttcggcagtagtgcaaactcaaaaaaaaaaaaaaaaaaaaaaaaaaaaaaaaaaaaaaaaaaaaaaaaaaaaaaaaaggggggggg

SEQ ID NO: 123635 - DNA, 201 bp, Zea mays
  Clone ID: MRT4577_44234C.1
ttgtgctcgcgtacgagcgctcggcattcaacacaacggagacgagaatcctggaggtcgtcacggacccggtggccttccgcgaagagcaccgccgccacttccgatgagctacgccgacgatgtgaacgtcgacaaggcggaggacatgctgctgcaccggaattcctgaactgcatccgacctcggtggatccacaat

SEQ ID NO: 123636 - DNA, 1721 bp, Zea mays
  Clone ID: MRT4577_44235C.1
ctggccgggaaaagctggccccgccagcccgcccacagaaaagccgttctcccctctttctcgattcgacgaggtgaagactcgtcgagccgccggccagcccatctcggcgcattcccggagaatccctccggaaaccggtcgatcctgggtcatccaacacacagcacttcgtttctcccgcgtccccgacccgcgcgcaagccctcatgcggttagggctgtaacgatctcgtctcgctaccggcggccggctgcggaacgggccaccccacgcgctcctctgagttcgttcgactaatctaccgctgaaactgtactttgggctgtcgccaccagaaagccctcacgagtcctttgcctcctcactccgtcaggctcgtcgccacagggttttgttcctaactttttagcttcaatttttgtcttgaatggcaacacctctggatgttccactggatgatttgattaagagcagagctgggaggggaacaggaagaggcaggggacaaggagggggtcgaggcagaggtgatggccaaaggttggctcgtggttcgtggcgtgggcgtggtactggcaacttccgtgaaaggggacttggggtgtcttcgcggaggccacttggtgttaatacttggtcctcatcatttgctattgccaagtcattcaataaagcaaaggattttgtgtggagacatgatctctttgaggatagcatggtagcagcctgggctttctgggatagaatctggaacaaagctttacatttcaaatttgcactatggagtgacaagtgaagatctacaggagcttttttcagaaatgggtcatttgaagcactgtgctgttcattatgacagttatagacacccaactggttcggctgaggtgatattcaccaggagaagtgaagctctcgcagcactgaagcgatataataatatgcgccttgatgggaaggccatgaagattgaagtaataggagcagaattgggtctatcagctgctgccgtaccccagattagtgttgttcctggtgcaagcagaagagggcagagagaagttgttatgatgcctggtggaagtgggtttggacaaggtgcatctggcccatctagttcgcttcctgggtggaagcgtggaggctttgttcgaagaggacaagggcgtgttagttttcctcaaagagggcgagggcaagtgcgcagccgtggccgtggccgtggccgcagtagctttgttcagagccgtggacgtggctatgtgcgcaggggtaatgcagagaaatcagccaaacaattggacaatgaacttgacaactacaactctggtgcgatgaatgtcgactaagttaatccatcgtgacatcattcaatccaacctggaagttggaactatgttgaagctaagcttgttttctgtcggtattctgtcaaatgtgcacacttctgtcatgctctagtggcatcagttgaagattagatattccattattcctactgcaatagtcttgtgatatcagaatttgctgtaattgaatgatgaattatgttttcaaccgttgaaaggtttgctgtcaaaatttcaatattatcctagttattgtcagaattttcagtaggcattagccaaaaagattggtgctgactactggtatatcagaatttgctgtaattgaatgatgaattatgttttcaaccgttgaaaggtttggtgtc

SEQ ID NO: 123637 - DNA, 319 bp, Zea mays
  unsure (1)..(319): unsure at all n locations
  Clone ID: MRT4577_44236C.1
gccttcctggggaaaaatctccagnctancgtgcccactgngnccccttccctttcagtnnccctttccccccgggctgtgggtacccagtacctagtacccaagcatcttcttcagggctcccaccaagcgcaaacacccgcaggcagcggcagcgggcacgatactggtgaccccccccgccgcgtcaaggcctgcctcctcctggtgatcccncggacctggcggggtagggaaccaagcggagcgcaccctcgcctccttccggctgaagaacctcnagggagagaggatggggctctgcagggccgggcccccc

SEQ ID NO: 123638 - DNA, 259 bp, Zea mays
  Clone ID: MRT4577_44237C.1
ccacgcgtccggtcagccttcaaggaaaagtacgagcatatagctgacaagaatgataagttagaggagcaggttacctacctctccagctccttcctttctttcaaggatcagctggtagtggctctaagctggaactggctccaagtgaagctgttccccgcacagactgttcgttgcttcgggagcaatgaccggcaccgcatcaagcggcaaacaggcgaaaggagagccttcggctgaccacagcagtctgtgc

SEQ ID NO: 123639 - DNA, 786 bp, Zea mays
  Clone ID: MRT4577_44238C.1
ccccttcagttacctaccccgaggagcataccgagccgagagaggtgggagagagacagaggcagcagagctccacccgaggggagaaggaaaagaaagctccggcctcgcccctcccgcctgctgtcccaagccccaagccaagattctctcgttgcatcgccgtaaatagcgccattcgaacgcgggttccgagctggtgtccaagaagttgaatttggaggtgaaaatgtcggtgatccatgccgacgacatcgagatatcgctgtgcgacggcaactcggaggacgagcgccgccgccggaagatagggtcgctgcgccggaaggccatccacgcgctcaagaaacgcggcaggcgtcgcgtcgacttccgcttcccgccggccatctccatcgaggacgtccgcgatgccgaggaggagcgcgccgtctccgccttccgtgagcgtctggccgcgcacggcctcctgcccgaaaagcacgacgactaccacatgatgctaaggttcttgaaggcgaggaagttcgacgccgagaaggcaatgcagatgtgggcagacatgctgcgatggaggaaagagtttggggccgacacaatacttgaggattttgagtttgatgaactggatgaggtgctgtgccactacccacagggataccatggcgtcgaccgagaaggccggccggtgtacatcgagaggctcggcaaggtcgaccctaacaagctcatgcagatcacctctgtggacaggtacatcaagtaccatgtgcaggagttttgaga

SEQ ID NO: 123640 - DNA, 671 bp, Zea mays
  Clone ID: MRT4577_44239C.1
ccggccgggagtatagtaccattcactagttcaatataaaacattggctgcgaatgtgataaccatgtggacgtctgatgcgagtacatgttgcgatggctgtggggttggtgttcttggtgagcggggcatggtgcgtgtctcccaaagtctgcccaggaaataacatcacggtcatctatggcaaggactggttggacgctaaagagacatggtatggaaagccgacgggtgccggtccagaccacaaccgaggaggctgcggttacaaagatgtgaacacatccccccttcgatagcatgggtgcatgtggcaacatcctcatcttctaggatggtatgggttgaggttcctgcttcgagatctcgcgcgataagcctgtggaatgctcaggtgaggccgtggaggtgcacatcactgacatgaactatgagcctatcgcggcgtaccacttcgatttatcaggcactacgaatcgacgccatggccaagaacggcgaggaggataagctacacaaggtgggcatcatcgacgtgcatatacgaaggtctaagtgcaagtacgactccaatgtcagcttccaccttgaaaaggggtgcgtgtcctactacctggcactgctggataactacgtgctacggcgactgtgacattgtcgtagtggacctc

SEQ ID NO: 123641 - DNA, 398 bp, Zea mays
  Clone ID: MRT4577_4423C.1
ttattcggcacgaggccgcccgatttccttgcacgaaacgccgctgcttcgggcttgcgctgcggtgcgggtacggcgctcacctcaccttcacctacatctcgcactctgtccgtctgtctccaccagctaccaaggcagccagcaagtaagcaagcaaccgactgcccccttgcccggacgcagtacacctcgcgccggtgagcgagcgaatgccgcgggagctctagccctcggctcctcgcccgggccggcgtgtcgttccgatccatgaggaagctgccgccagcgcaccgcctccggtggatgcgcgcgctgctcctcgcgctcccgctcgtctcgctccccatcctctacgcggcgctcggcgcggcgcgctcgtcggcctcggcggcgcg

SEQ ID NO: 123642 - DNA, 211 bp, Zea mays
  Clone ID: MRT4577_44240C.1
cctccttttttttttttttttcggaaacaggggggacattattgtagtaccctaatccggagctttattacacgggggttcagagtccaagagcacagcaaggctacatcgagcgccctagggttagtcggaggcggcggctactcgaagatgaagtgcttgtaaacggcctaggaaatttaccaggtgctgtatatgcccttggggaaga

SEQ ID NO: 123643 - DNA, 2121 bp, Zea mays
  Clone ID: MRT4577_44241C.1
gcatccatggccgacgatacagagaacggtgaccgggcgaatgctgccaaaggccgccagcccatgcccaccttccgtgccggctccatcttcttcgacccgcacgagcacggctgccatttcatcgaacaagcgccataccggacatggcaaccggatcccctcgccgccgtcctctgccgctcctcctcctgttcctgctcctcttcgccgccaacggcagggccaatgccgcccgccccggcggccccagccccataaagaacgtggtggtgctggcgctggagaaccggtcgttcgaccacatgctgggctggatgcgccgcctgttgggcctccccgtcgacgggctcaacggcacggagtgcaaccccaattccaactccacatcctccatctgcgtgtccgccgacgccgacctcgtcgtccccgacgacccgggccactccttcgaggacgtcctggagcaggtgttcggcaacgtctccgccgccgctgcgcagccgcagccctccatgtcgggcttcgtccgcagcgcgctctccgtcaacgcggtcctctcctccgccgtgatgcgcgccttccgcccctccctcctcccggccttctccgcgctcgcgccccaattcgccgtcttcgaccgctggttctcctccatcccggggcccacgcagcccaaccggctgttcctctactccgccacctcccgcggcgccgtcgcgcacgacaagctcgacctcctcctcggctacccgcagcgcaccatcttcgagtccctcgccgccgacggccacgacttcgccgtctacttcaagaccatccccaccgttctcttctaccgccgcctccgcgcgctccgctacgccgcccgcgccttccaccgctacgacgccgccttcaaggaacacgcccgacgcggcgtcctcccggcgctctccgtcatcgagcccaggtacttcgacctcacggggacccccgccgacgacgaccacccggcgcacgacgtcgccaacgggcagcgtctcgtcaaggacgtgtacgaggcgctccgggccagcccgcagtggaaccagacgctgctcatcgtcacctacgacgagcacggtggcttctacgaccacgtcgccacgcccaccgccggcgtgcccagccccgacggcatccggggcccgccgcccttcttcttcaagttcgaccgcctcggcgtcagggtgcccaccatcatggtctcgccgtggatcaagaagggcaccgtcgtcggccgcgccctcgggcccacggacacctccgagttcgaacactcctccattccggccaccatcaagaagatcttcaacctctcgtccgatttcctcaccaagagagacgcgtgggccggtaccttcgaccacatcttcaccgagctcgaccaaccaagaacagattgcccagagacattaccggaggtgccatttgagagaccaactccacccaaagaacacggctggctctcagatttccagcgggagctcgtcgagctcgcgagcttcctaaacggcgactacatgctgacgagccttgcgcaggagaaccgtaagaagaagatgacagtcaaacaggccgatgcgtacgtgcggcgagccatcacgagctttctgcaggcgagcaagcaggcggtgcggttgggcgcaaacgaatctgccattgtgacaatgaggtcgtctctgacaagcaagagcacacgctcatcaagcccttgagttgattcagtctgctaatacatatagctagtgaacagatggatttgagtccacggtctaatgtatattgcctctgaaatgtttatagctgaatagggagctagcagagcctttttaaatataacttttgtttctcttgtcacatattaccaatgtagtataagagttttctgttgacctcaaatgtagatctgcaacctcattttgatcttggattcacgttttggagggacacacgtaagtgttacatatatgtttttttagataatgaaatggaacatggagtgttatatatcacaaattgaatacctttggtcaaaaaaaaaaaaaaaaaaaaaaaaaaaaaaaaaaaaaaaaaaaaaaaaaaccacaccacaaacac

SEQ ID NO: 123644 - DNA, 570 bp, Zea mays
  Clone ID: MRT4577_44242C.1
gctcggaattcggctcgaggaagaacattaccagggccttttttgtcgacttggagcccacagcgataggcgaggtgacgacgggggctgaccgctagattcaccctcctgagcagatcatcttacacaaggaacatgcagcgaacaacttcgcccgcggacattacacacttggaagaaaagtcaaaaatctccgccttgatccgataccctaatttgaagaccactgcactggactccaaggtgttatgaacctcaatgacgctgatggcggaacaggctgccgcctgacttcgctagtttaagaacagctagcagtacattatggtcggagctcagaactcggtttcaccatctatccttccctacagatctcacatgctggaggcgagccatatgacagagctctttgcatgcattcattgattgaccacacatatgttgatgtactcattgctacgaaccgatctatgacatatgcaagagtgctctaggcaatgaacgtgcaacatacaccaatctgaacaggcttatataacaagctgtctcatatctgactaccctcttgag

SEQ ID NO: 123645 - DNA, 869 bp, Zea mays
  Clone ID: MRT4577_44243C.1
ggccgcgggttttttttttttttttttcctttcggagcaagtccggcgaggagacagttcattgacatcacaaaccactgcagcgtgagccacatagttaacttgaaagatttcatttgcctgccagatcctgttcaatccgccaaaagcaaggccatgcaaatgtcaataggtaacccattcccaaaccagggaaattgtgactccggtccccttttcgcactgcctgttgtatcctccactgcaacatcgccccgactcgacgcttttgagccccattccgaccaacatcttgaaccgtttaacggtaagacttctggaagcgggcacgggcaccgggaccaccgaacttcttgggctcgcaacggcggttgtcggcaacgaggagggttcggtcgaactggacgagagcctgcttgaggaggttcttggagtgctcatcgacgaacttctggtagtaggcgatcagggacttggcgatagcttgtcggatagcgtagacctgtgacacctggccacctccagatactctaacgcgcacatctacattggcgaacttgtcaaggccaacaacgaggagaggctcgtagaccttgaagcggagaatctcaggctggacgagctggagaggacgtccgttgaccttgatgagacccttaccggccttgcagtgggcgacagcagtagccgtcttcttcttaccgaagcactgaacggagttggtggagctcatgattgcggttgtcgtgatgccggaggggaatgagcgatcggccgtcccgggcggggtgatggccttgactgagttgagattttgccaccgccgaatacccggccggcaatcgccctataggagtgtatacgcgcgt

SEQ ID NO: 123646 - DNA, 333 bp, Zea mays
  Clone ID: MRT4577_44244C.1
gccggccgggtccaagactggtaatgaagtcgtggtgcattcacgctgtatccgtgccgtgatatattatatatatatagctgaacgatcgacggagtagcctgtctgatggcatcgctcgctgcctgcctgcctgcagacgaccagagggacccgttcaggctgcccacgaaggagaacatccggatggcgatgcactggctggtgcagggctgcagctacggcgactccctggtgttccacttctcgggcatcggcaggcaggtggcggacgacgacggcgacgaggcggacgggtaccacgaggccctctgccccctccacgcccccccc

SEQ ID NO: 123647 - DNA, 276 bp, Zea mays
  unsure (1)..(276): unsure at all n locations
  Clone ID: MRT4577_44245C.1
tgctcccgctgatagcaaatcagaccgggaganccgcttaacgtgtccagcgggcttaagcactcccccgcggggtgacccgtacggggcgtcacgccgaccacaccggccttcctcggggtggccaccggcccgcccggcgccgggacggggcccatcaggacaagcatgtacatggcctgctacaacccggcctacaacccgagtggcatacgggtaacacccatcaatggggccatggaccacacttagaggacccggcactacaataccgac

SEQ ID NO: 123648 - DNA, 408 bp, Zea mays
  Clone ID: MRT4577_44246C.1
aaaggcacaagctacagcaggcttgtttacacagttacagacgcaccgcacggcatacacaaagagatgcgagaatcgcgattatcattagcgcttccagctcaaacagatagcatcgggtgcaatgccaacctactgggccagtgactggataccacggatagaccaagactaagtgggaaccaccaaatggcacggacagcgccacgaagaggggcaaccgcaaacctacgctcttgaacgtgttggcgtcagtgcctgggccaaagcactagaactcgccgtacatcaagccgctgctcccctggctaggcgaatctgacagccggcccagtccacggggaccaccttctcccccatatttttgtaccagcagactaccctgggaggagtcccctccagctgcgg

SEQ ID NO: 123649 - DNA, 221 bp, Zea mays
  Clone ID: MRT4577_44247C.1
aatcattaatattctacattcttttgagaaggggcgccattgtttaaaaataaacacgcgcttcgatatgtgacctcaagtgcgcagtatcggcagccttttttacaggttttatagaagaaaggcttccacctgcgcaggaagggagcgggcgagcgagcaggtcgcatttcagctgacagtgttttctcgaggcagcaaacggggtaggagaacagggg

SEQ ID NO: 123650 - DNA, 321 bp, Zea mays
  unsure (1)..(321): unsure at all n locations
  Clone ID: MRT4577_44248C.1
cggaaancaacgggaacgacccaccgccgcccaataaatacgcacccgcggacgcacggggagcccaaggaggggggcttaaaaagcgcaagccgccgacccaacccaaacccctcacacacgaggagaaggaccaacaagacacccaagagaaccccccctgagaaacaaaggacccaccccgcaaaacgagaacaggagcagcacaaggaggaaaacccccaccccacgcacccaagagcaagacaaccacaaatggaggaagcaaaacacacacaaacccccaacccagacgaacacggcccgggaaacccaggccac

SEQ ID NO: 123651 - DNA, 1379 bp, Zea mays
  Clone ID: MRT4577_44249C.1
aaggtgaagctcaacatcgacaacatgttcgcggcgctcgagtccctcaagcaacaagggagggcggatgggccgtcctccaggaagaatcacggcgcagggcccgcactgcagcagtagcaggaaccgcctcaaaggaggcgcatggcgccatggtattgggcgagggcgtcggtgccgcgcatgcttgagttcgccgagagggcgccgagctcgagtgacgcggtgagggcatcaagctcgagctcaccatgagtctccacatcgctactgccatccactgtttcgctgccatttgcagcgactgtgctccagttcgatcgtttgggggaaaaggtgagtcctcccatttcctgtagatgcatggccgtggatgacggtaaatttatcaaattccaagctttacgggttagtcacaagcgtttactggggtagcggtatgcttccagtgaacaacaaggtaccctgtggaaagattaattattgcaattaatttactaagattacatatatattgttatttctgtgttggactgttggtttcatgttcacttttgtgtgtcgtcagccagcgattgctatgatgattacatcaaagtgtcaaactggtttataatattgatgatggatatacttgttttagaaaggtcatggagcttggttttcttgagaagacgattacaggtatcattgaggagttgattaagaggcacaagcaaattgatgcagttcatttcatacaagctttcagagccattcccccttcacctctgctgaagacatatattgaggaatttaaggatacaattgaaaataatggggatgcaactgttaattgtttattttcatttttttatcaacagacaaaatgagcagttgtacaagtatggggacacaaagtcatcccagaatatcatgcttttgtagctcaaaaaactcattaaagcgaacctgttgttctgggacaagctaaatttcccaccatttagagcttccatcaaaggtaccacaaccatctcatgttcaaacagctcctcctggaaatgcgcgccttcacctcatgccgaaacccattgaatgtcccttagaatctttttgtttgatttcgtggtggtggtggaggtggggaggaggaattgagttagttatcgcatgcccaagttcccggtttgtttcgagaggagaacagatgatcgattgcctccctgcttggttaaatgtgccatctaagatttcagaattgtaatgcaggggctggatttgatcaaaattgtcatcgtataagattggccttgtacttttttaaaaacatgcaaaacttacgcatcttcgcttattatgtactctctatattttaccttttctggcgctgaattgac

SEQ ID NO: 123652 - DNA, 463 bp, Zea mays
  Clone ID: MRT4577_4424C.1
gaaatctaacaccattcacttttacggttttctaaaaaaacattgtatgttacaggtgcacccgtcgcacagcaggagcgtcaaggtcatctacacaggactttgcctacaactatttgtgcgaaagagccaatgcagactgcttaagagaaaccagccttgtctgggggcaggagatggcgcgccttacacaaacttcaccggcagagagagcagtttaattacctacgacttaatgacgacgggcaacgtggccttgcaggaagcatgggacactgttctgggtgatgtccatcaggccgagagatggatgcttgagcttccatccagagatgaccaacccatgctgaagatactggcctccgtggaccagctgagattcaaaacatggaaacagaactgtggcgaacagttaagatctgatggtcttagatgttgcttcgatggattgtacgaggagatc

SEQ ID NO: 123653 - DNA, 410 bp, Zea mays
  Clone ID: MRT4577_44250C.1
ggggcgcgcgtccgggttctgcgggggctgcggctgatgatcacgatctatacacctagtttggttggtcagtgtgattcccgtgactgcgtgtggttaaaactgatcatactaaacacgctgggcatgcaatggtatttatttggcggacatttggacgtgggggggatggtgcgcaacaaaaaaaaaagaacataaggggaaaaaatgaatggaggaaaaaaagaaggaaaaaaaaataggaagggcaaagacaaaaaatagggggggcgaaactttaggggggccaagttaaaaaaactataacatcaggggggggcgttttaggggggccaaacttacttccggtgggatgcgacggtattttttttttttggggggggcaaaatcaattgggcggggggggtttt

SEQ ID NO: 123654 - DNA, 194 bp, Zea mays
  Clone ID: MRT4577_44251C.1
ctcgttttgatttggactgatgaaaaagcagtgaaactagcctttatttatggctaactttgcctgttgtatgccgcaaatctactttttttcttggcaacgtctcgtttcgcacgatccaaaaaaaaaaaaaaaaaaaaaaaaaaaaaaaaaaaaaaaaaaaaaaaaaaaaaaaaaaaaaaaaaaatggaaaa

SEQ ID NO: 123655 - DNA, 414 bp, Zea mays
  Clone ID: MRT4577_44252C.1
aggacgcgtgggtttcctgtagctattagttagtccagaacatttttccctatcaaatcttcacctttaaaagcttttgatttgattaaccacattccggtgcaacaaaccttttggggttgccagtaaaaaaattcaaaatgaatcaatgaacttaaatccccgggttaattacctttaaattcttacaccaacaattgctccaaaacggtggttacatcgggctgtgagtaatcaacacccttttttgttgaatgttatcacaacacatggggacgtggtataaagtgaagaaagaatgaggggtccattccttttattccgtaaggaactcagaagctttcgagcatactagttcaagttgggaattttactctgtagatgtagataaacaattcagattcatggggtgta

SEQ ID NO: 123656 - DNA, 2153 bp, Zea mays
  Clone ID: MRT4577_44253C.1
aaaagaatagaagaaaacttcactgaaacagctatagatgtgtattgataggcaccctaagctcatcgagatcaaagcagcatcacagacgagttcaatattttttttattctagggaaacaatcctttcttgtaggaacacagtctcataccttttctacaccatgagctgcgtgtactttaattccacaagtttgacataagtccagcagaaatgtactaataagtttacatgccaaagagttaatcaatgctgataaatcagcaatatctaagtattatcatcagcattttcttcagtatcttgcaacaaagctcctcgtactcttgccctccgaggcaaaggggccacgcgcttcgtacctttagcaggaggaactttgctaggtaaagccactggtgtttgctgctgtacagcaacaatcatttgatcagagcttggaggtgcacccgacacacttggaaacttatcagtcacaagctttggctttgtagcctttcttttgtcgaggaatgaaagggcttcaagttgcttttgcattacttcgtttttttctctttcagagtctagattttccatgagctgtgacactcgttcttgttctctggatgcatgttcctgcctggtcttgtaagattcatagagcgcaagggagaaatcagcaatgacatctttgagcgcagatgcggcaactctatcgagagagagagtgatgcgaggtagtccctttgccttggtagccacaagctcagcagtatcaggacctagggccgcggcagggaagaagagcctgacttggtcggaagacaaggaagaatagaggtagtcgaggaagtcggagcaggagccagcgatgccaacgtcatcttggaggtcgcggaggccgtcgaggtcgagggagcgatgccaagcgaaggagtggaggtcggtggcgacgacgcggaggccgccctgggattgggcgtggaagagcacgggtcggcgcaggagagcatcggcatcttcgttggatttgtccggcttggcctcgccaaagacggctgccatgctcgccatcggcgccggcaggaaggaagacgctgttcacgtacggattacgtgagttgcctttgaaagcgtaaagacgtggggggcgcctctccgcctgtctctttctttctcgctttggtcgtcctcctcgattaacgattctggtggggagggaaagggaacgggagcgggaggggaatccaattgcgatggcctccgactcgggcgatttcggtggggagaacaagtcgttggaaacggcgaggcggctgctggaggagaccttcacgagtgaggcagaggcggaggcgctaccgagcttgccctcggggttctacgacgccttcgtcctgaggggaatccgcgtcgtccaggccctccagcccggcacactcctctgccacttcaacgtgccctccagactactcaactcgggcggcttcctgcacggcggcgcaaccgcctccctcgtggatctggttgcctccgccgccttcgccactgccgggctacgcaccaggggctcaccccttgagatgaacatctcctaccttgatgctgcttttgctgatgaagagattgatatcgaggcgaaggttcttcgcgctggcaaggcagtaggggttgccgttgtggaactgaagaagaaatctggcaaaatcatcgcccaagctcgctactccaaatatcttggtgttagtaaactctgaatcatgatgctgcctcccatatatacggggatatggtagcagcaagcaagcagggtgtgggtttggttcgacagcaagtgttgttactactctacattatatcttgggtgttagtaaactctgaatcatgatgctgtattactgttactcaaccatcatctcagctacttattattcttgtgttatgagtcttcctcggattgcattaaactaaactacagtatacagcaaatacttgtatatatgtatgagcctgagcttcaggcattgcatgtggatgtgtggctttgtctggaactttttcttgtacataaaacaaaagacatggctgataaacatgtgtacctagctgcctcttgcaaaaaaaaaaaaaaaaaaaaaaaaaaagggcggcgactagttctagatcgcga

SEQ ID NO: 123657 - DNA, 365 bp, Zea mays
  Clone ID: MRT4577_44254C.1
aattccgtcgacccaccgtcgctacctcgcgacctactctgacttcactcttatctccaccgatccatgagctataaactctaactccgccggccactccttccccaacacccaacacatctcaacctctgctatgcgcaatgcatacatccagaccgaatcacgccgtcccttgccaaaaatctcccaatgtgatgaccacgatcccgcttgcccaaaccgatttactttcatattccacaaacccagacatgaccaaaactgctgcaactgccaatacacaggatcatctttcaagcaccccacaactgataagctagactcttatcctgcataaccctgctccaagaaatcccttcgctgtc

SEQ ID NO: 123658 - DNA, 174 bp, Zea mays
  unsure (1)..(174): unsure at all n locations
  Clone ID: MRT4577_44255C.1
cgggtgcgacccacgcgtgtcgggatccattgagtttactaagtaggttcttgtggggatatattccttcatttgccgtgctgctgccaacaacagtntggttgttctgtnccggcgaacccaaaaccggttcaaaagagaaaaaggcccaacccaatggggtgccgtggaggc

SEQ ID NO: 123659 - DNA, 391 bp, Zea mays
  unsure (1)..(391): unsure at all n locations
  Clone ID: MRT4577_44256C.1
agcgtccgcccagcgtccggnaccagccgtcagttgcagataagatactgaatgaggtactactgcaggcttgttaaccttcacatgtttactaggggaaattaattgtcctcagtgtctcttgggtttcatctgtaagtcgcctccttggtacacttaaaacgaaagcagcctgatcacaagtagcaggagctgcggttatccagtnnaaaaaaaaaaaaaaaaaaaaaaaaaaaaaaaaaaaaaaaaaaaaaaaaaaaaaggaagaaaaattaaaaaaaataaaaaataaaaaaaatagtaaatgaaaaaaaaaaaacatgtaaaaaagataaaaaataaattagggggggtggttttaaaaattaaaaaatttttaaaaccggggaaa

SEQ ID NO: 123660 - DNA, 268 bp, Zea mays
  Clone ID: MRT4577_44257C.1
gaaaaaggaactgacaatcctgactcctcaaacaccactgccatagtccaaataatgaatatccggaccatactaaagcaaaacctccaaaactgggaaagtgtgcaccactgaacatacatattatctttttgggggagaacaataaactaaaagtgaaaccaaaaagattcgggcatcacaatactcggcccatgcacatagtgatacaaaattatcttaaaattaccaacgaagcagaaatttaaattgttttctgacacgcacg

SEQ ID NO: 123661 - DNA, 1846 bp, Zea mays
  unsure (1)..(1846): unsure at all n locations
  Clone ID: MRT4577_44258C.1
taggggcctttttgttttttttttttgacacaaatcacacacacaacatttttgcagcggaaatcttagtaccaaattttacaggttacaaaaattttacattgtacatgaccggggtgattacaaaggtgattcaaagaaataactttaaactgttataaattatttataagtttaaaatatatgctagctcaagtgaccatcctcaataagaagataaagatggggtatacttatataagaaggccgagcccaccggcacttaacaccatcaacagcagcacaaaactataacctgaaaaacaacagggaataaaaccctttgttgcagtgaagaggtctagatccctctacaagctacccagttagatggctcctccacttgatcagcagccactggagtagattcctcttcagtcaccacttcagcttgaatcttcagtccttgtgctgggagttctatatgaaataacatgatcatggatgtttatgcttatgcaacttgaaaagaaaatactaagaagcatcacaggacttacacctctctaaaggtgcatacaaaaactaacaaaaccttaagagagctaaatactctaatatcacaactcaattcaccaaccaaactaggaaaccttgcctccataaccaatcaagtactttatttatgcattaagcaaggatccaaactgcatgtactacaatntatagtgtccaagaatcagccacaattcattgaacctattttcagttctctgaattcatcttttagtgctccattcctctctctctgttcagtgctttgtaactcacaaattccctcaacaacaaacacaactcatttactccaagttattctctagacatagctctactactttggcatagcatccccagactgaaaccatactaatcaaaagttatgatgccacaaaatagagcaaaatcacaaaaaagttcagtttcagtgaactgaaacagcactgcacccactctggcagagaagtttgggacacctttttactgccaacttatacagtagcaagcccattccttgaatgaaacttgttgtccttgatgtggtcttttatctggatgtggaatccctaacccatttccccttggagtaattaccacaaggctccaaagttgggtaaaaactaactcaaactgccagcaacagttaactaaatttacatatctccagtcggacagcacaacttggagccactttaactcctctttttgtgtagcaccaagtccaaccctctttagggaatttgttctcctatatatgtcctttcagtttgctaaagaattcctaacccaaattgccttgcactaattaccatagggctccaaactagacacccttgtgctgaatttcagttcacagtggactgaatacaattcagtttcagccgccagacagtctagatttgagcagctgttactccaattttcatatagcatccaacaagactgtcttaaggagatttgttcatcatcatatgagcttcactatctgatgtagagcacaaaacatgtatagctcggctaaggaaactttgaaagttacctggtcacggcgaggtggactaactactgacgatggtcaccacctagggactggtacaccaagctctgggcagatggaccaagatattgggaggggattaactccggggaaacataggctacaagagccaaggagatcactcgagctctaggactgcacggcctactggaccttgacttaagtaggagatgggaagactagggcagatcgagttggtggctgggaagaggagcttagacttacaaacacgaaccgctaagacaccaagtg

SEQ ID NO: 123662 - DNA, 1329 bp, Zea mays
  Clone ID: MRT4577_44259C.1
taccctccgggctggccgcagtaattcggcacaagcggctagtggacgcacgcgccgctcccaaccgagacgacgagccgcccaaggcgacgagccattactcccgtttccccaaatcccaccacgcaggcagtcaggcacccgcattgtttcaaaaatctcgaatcggcccctggttctggcagcgcagccgccgccggcggacggagggccctctttccgggtgaggcaagtcgaggcctgctttgcctcgctgtaagctcgccggaagagggaaccggggaggggaaaagacgcgcggcagtggtggagtggaggtgccaaggctgagggaggcgcgccgccgcccatggacgccgcgcggtgggtcgtgtgcctgctcgtgacggtcatctgcttgtcgtgcgccgccgccgctaccgccgccgtgaggtcgccggcggcgaggctgcaccgccacctcaagcggctcaacaagccggccgtgaagagtatcgagagtccagacggggacatgatagactgcgtgcacatctcacaccagccagcgtttgatcacccatacctcaagaaccacacgatccagatgaggccgaactaccaccccgaagggctgtacgaggaatccaaggcctccagcagcagtggcgagaggcctatggctcagctctggcatcagaacgggaggtgccccgaaggtacggtccccatcaggagaacgaggaaggacgacctgctgagggcaagctcgatgcgtcggtacggcaggaagcggcgcgccgccgcgaacccgatgtccgtcagtcccaccatgctcaacgagggtggccatcagcatgccatagcgtacgtccagggcgacaagtactacggcgccaaggcgactatcaatgtgtgggcgcccaagatcgaacagcccaacgagttcagcttgtcccagctctggatcttgggcggctcattcggggaggatctgaacagcatcgaggctgcatggcaggttagccccgacctctacggggataacaacacgaggctcttcacgtactggactagtgatgcgtaccaggcgacagggtgctacaacatgctgtgctcagggttcatccagatcaacaaccagatcgccatgggcgccagcatcttcccgacctcgagctactccggctcccagtcgtatagcagcatacgtgatctgcaaggaccccaaggatggcaactggtggatgcagttcagcaaggactacgtgctggggtactggccgtcgttcctcttctcgtaactggcggacagcgcgtcgatggtggaattggggcgggaagtggtga

SEQ ID NO: 123663 - DNA, 1418 bp, Zea mays
  unsure (1)..(1418): unsure at all n locations
  Clone ID: MRT4577_4425C.1
actactatccggcgtcttcacatcgccggctctcccccgctccgtctccctcccctcatctcgtcgaaaacctataaattcggagtgagattgtgttcgtccgttcgctttcgtttcttcgagatctgtgaggaggggggagagacagatccgtcgcttgctccctgttcgaggtttgtgacgaggacgagcagcagattcgacgcgcgcctccgaggttcttcctggaactaatttgatgtgctatggaatccaagggtggtaaaaagtccagcagtagtcgttcctccctcatgtacgaagctcccctcggctacagcatcgaggacgtccgccctgcaggaggcattgagaagttccgctccgctgcctactcaaactgctccaggaagccatcctgataatccctctcgcgcccccatcctaattgcttagaattcccttctgctttcaattcatcttcctaaaatttctctggctagctgcttttctctgaccagcaaagtctttcctcctctaccaaccttctcaaacaatggccgtctctgcgattgggtttgagggatatgagaagcgcctggagataaccttctctgaagcgccagtcttcactgaccccaatggcaggggattgcgtgccctcgaggccggccgggatgactccgaaccgcgtggttcgttaggaaaggaaatcgattcccccgcatctgatctcttcggtgctagagaaatataggccgccgccgcctcctcctcattcggtgaaaggtgcgcagttagggttgggagatctcttgcctcacgacacgagcagcagaattcgtcgagggccgctggttgctgcgagagtgaaaattgaatgttctaatggagtccaagggtggcaagaagaagtctagcagtagtcgttcctccctgatgtacgaagctccccttggctacagcatcgaggatatccgccctgcaggcggcatcaagaagttctccgctgcttactcgaactgcgcgaggaagccatcctgatatctctgtcgtcatccccatactagtagcgtagaaaccacctgcattttcattttgatctccctaatccctccggctagctgctttccagtgaccaaaagatatcaaagaccacttcccgtcttcctcccgtggctgtctgtcatctggctctgaaacgatggcagtcctgcaagttgctgctgctgcccctccccctgtctctgtgattgggttcgagggatttgagaagcgccttgagatcagcttctctgaggcacctgtcttggctgaccccagcggaaggggactgcgtgcgctctcgcgtgcccagatcgactctgttcttgaccttgctcggtgcaccattgtgtccgagctctcaaatgacgancttgactcctatgtnctatctg

SEQ ID NO: 123664 - DNA, 794 bp, Zea mays
  Clone ID: MRT4577_44260C.1
gcggcccaattgagcccctccgcttccgcccttccgcccttccgccaccaccaccacacctcgtccagcggcggtcggcaaaccctagaaccttagacccatccgccatactgcggttactgggcgcgggctagggccgggcctccgtaatcgcagcttgcggcgatgccgcttttcatctccgacgaggagctccgtctcctcggcggcgacacggctgccgttgccgagcgggctgatgctgccatccgtgagctccggcggcaggtggataccgtacgcgccgaggcggatgccgctgcgatcgctgccgagcagacctgcgccctcctcgagcaacggtacgcctccctctccgcggagttcgatcgctccaaggccgaggctgccgagctcaccgcctctgccgagcgccgcgctgccgagcttgcctcctctcaggcggagatacatcagcttcgcatccaggcgattgctaaggatggtgaggtggagaggttgaaaattgaaatctcggagctgcacaagtccaagtgccagtcgctggagttgattgagcagagagatgcagaaattaaagagaaggacgacatcatccagagctactacaataaaattgtaaacctggcagaaacttctgctggtaaagaggccaggatacaagaggtcgaagcaaagtttacccattgtcaagcaatttgcaatcgcatgactcaggagaaggagctgcttgaaaagcacaatgtctggcttgatgaagaactgaaagcaaaagtgaagaacttggctgaact

SEQ ID NO: 123665 - DNA, 697 bp, Zea mays
  Clone ID: MRT4577_44261C.1
ctttgagaatacaactggaccgagtttgctacaacaccttactggccatatatgtgaagacagggaaatatgatgaaattgctactgtatgtgaagaaatggagaaattgggcattgagaaggacactgttacttacaattccttgattaatggatacggaaagcaaggacgcttggacatggtcgctttccttgttcaagatatgcgggcgcaaggcgtagctcctagtgtgctgacatactcaactttgatagatatctattcggcaggactcgatccgtggagatgcatttaatgtctatttggattttaaggagtctggtctaaaggcagatgttgttctgttcagctcttttattgatactttggccaagaatggcttggttgagtgtgctttgtctttgcttgatgagatgatgaagatgggtatcaagccaaatgttgtaacctacaacacaatcattgatgcatttggcaagtcgaagatttttactgaggaggattctgatattggtgacatgggaattgttggggtttatggtggccaggttgtaagggtcactaatccagtgataagatgacggcgctctgccactgatgttaggatgaggaggtcacaggaactatttttcattctggaattgtttcagaagatggtccatccaggtgtacggccaaatgttgttacattttctg

SEQ ID NO: 123666 - DNA, 423 bp, Zea mays
  unsure (1)..(423): unsure at all n locations
  Clone ID: MRT4577_44262C.1
tctttnacnnctaaataattctcccacaacaacacaaaaccaggggggatttttgggggattacggcggtttttttcccaaaaaaaaaaacagttcacccaggaacccaggtaagggggggcccccaacatgagcaaaggagtagggaaaaacataagagaggatttttacgggccatgcccggcccggagatcgcccaggggccctgggctagcaggggctaccctacaaaccggggggccccacacctaaacccaaagggtcatgttttttcaaaaggggaatcgaaccgggacgggaaataaaccggacccgggggcccccccgggaaaaccggaccgggccccggaggggaaccaactttcccaaagggggggcgaaaaaaaagcctggcgaaaaaaggggaaaaagctgttcccgggg

SEQ ID NO: 123667 - DNA, 211 bp, Zea mays
  unsure (1)..(211): unsure at all n locations
  Clone ID: MRT4577_44263C.1
cggcaggttccggtcctgatttcttttgtttacccacgtttccctagttattcgaaacggcaacacccttttgttgttcgtttgagaaccttaacgcgcatacccgcccaaagagcaangctnnggattttggcagactccgtttgggttgcccccagtctgaagcgcatccagagcagcctcttctaataatacataggctgcctcctaa

SEQ ID NO: 123668 - DNA, 620 bp, Zea mays
  unsure (1)..(620): unsure at all n locations
  Clone ID: MRT4577_44264C.1
cggtnccggcattcccgggcataatcatagtcagctcaaatgtattcagccacagctaagctcatcaagaatctagcagatgattttgctgtgaaggatctaggaaatcttgagtacttcctaggaattgaagtgaagaaaacaagagaaggaattctgttgtctcaaaaggttatgcacttgatctcctgaagaaggcaaatctggagaaatgcaaagcattttcaaccccaatgtctgcaactgacaagctgtccaagaatcaaggaacaacactgaatgagaaagagcatttcagatataggagtacagttggtggactccaatacctgacactcactcgacctgacttatcatttgcagtcaacaaggtgagtcaatacctacaaagtccaactgatgtgcattggacagctgtcaaaagaatacttcgatttgtgaaaggaacaatagactatggactactaattcagaagacaccttcagtcatgttgtcaagcttctctgatgcagactgggctggctgcccggattacaggaaatcaactagtggttttgccctcttcttgggtgataatctagtggcctggcgctcaaggaagcaagccactgtgtccagg

SEQ ID NO: 123669 - DNA, 2024 bp, Zea mays
  Clone ID: MRT4577_44265C.1
agacttacttgcgacatcgttgacgcgctcgaggcgtccatgctctacaaggaggccgcggctgttgcgggaggggcaacgtacacgcggaaactgccccagaggaatacccggtgagcagccagcggagtcccacgctgggcgtcgtcggcggccaccacgcctgagagtaagcgacccgggcagaccatctccaagggacacaagaattacgagctcatgctgcagctgcaattgggcatcaggcattccgtgggtaagtcttcggccgtgccgatgcgagcactgcaaccgggcgattttgacccaggggagaagttctggacacggttcccaccagagggttcgaaggtcacgctaccacattcatctggagagttccgatggaaggactactgccccatggtgttcaggcatttgaggaagttgtttgctgttgatacagcggattacatgcttgcgatctgtggcaatgatgctctgagggagctgtcttcacccggcaaaagtgggagcttcttttaccttacccaagatgaccgattcatgattaagacagtgaagaaatcagaagtcaagctgctaattcgaatgttaaatagctactacaaccatttcaatcgatacaagaactcgttaatcacgaggttctatggtgtacactgtgtgaagccccttaatggacaaaaggtccgattcattgtcatgggtaatctgttctgttcagaataccagatacatccccgttttgatttgaaaggttcatcctatggacgaacagcagacaactttgaagatgaaattgatgagacaactacactcaaggatttggacctcaatttagtctttcccatgcaacgatcttgctacaccgatctccatgaacactcgggacaagactgcgattttttggaatcagatgggatcatggattacagtttctcgctaggagttcacttttgtagatgacatctctgcctcaaagatgggatcctctacttttactgcctctccaaagcttttaacaaagagtgagtcatttcaaggtggtggcacgccagagctttgcttctcggatgatgattttgatatggtacctgattgccaccggaaacctctgattagacttggtgcacacatgccagcccgggcagagcaagcatccaggaggagtgaattcgacccgcttctcctaacaggtggaggattcctgttcccaaaccagaccggcgaagtgcatgatgtgattttattctttgggataattgacatcctccaggattacagcttaagaaagcgggccgagcatgcttacaagtcattacagacagatcccaactcgatctctgccgtggacccgaagctctactcgaagaggttccaagacttcatcggcagaatttttgtggaagatggctaactggcattggatagagattaaccgcgaattccatgcggaggccagagcacctgtaatgattccgggacagtttttttgcgctcagtaaagaagtctgcataattgccaagaatcatcttcatccatggggatccggtaaagcagcagcccctcggctgggtgtaacctactgtgaagcatcaggtcagcagtgaaggagatctgagttcgaagcaaatttgccgcgaattctctccggaaatcattcgagtggctggattttgaagcgcagccatgggatcggaggattttgtctgtaaaatgatgtgattcggcgggtgagagactggttcttccgggtccattgtagcagcagtcctttttttttatctccttagttttgttggagttcttttccccccgctccccttctatatatatcgttccgatgtgaggaatggggcagggagttttgtttccagaaagatgatatttaaggctgcggctggcagtgaacaataagatcatgtacagatacaccttgatcctgggaatgggtggattagaattgaattcagcatcttcatgaccaaaaaaaaaaaaaaaaaaaaaaaaaaaaaaaaaa

SEQ ID NO: 123670 - DNA, 1449 bp, Zea mays
  Clone ID: MRT4577_44266C.1
cattgggtacctcgaggccggccgggccgcagagctcctccctctctctctgtctgctgtgctcagataatagcgacacctcctttcctctccctcgaggtgtctctcccagaacgcacagcacagtcgcagaacaggaaggcagagagcagcgccgcgatgagaggaggaggagcggggcccactgcggcgttcatgtccgacgagccgcctccagccgacgcggaagaggtggaggagaactccggcgccgaggaggaggacgaggagacggtggtggagcaggacgacgacgagctggagctggggctctgcctcggctccaagcaacagcagcagcagcatccgccgccgtgccggatcctcacggcccgggacctgcagccgaggtccctgtcaccggattcctccgtgtcctcttcctcccccgcggcaggtgcaggtaccgcggcgccaagcaagagggccaaggcggatgcggcgcccaactcgccagggacggtcgcgtctggccacccacagagctttggagtggtgggatggccacccataagaactttcaggatgaacagcctatttaaccaggccaaagagaatgcatcggaggctggcgccaagaagcccatcgtcgaacctgacatgcaggaagacaaggaggagagcaagaaaggccggaccgtcggttgggtgaaggtgaacatggaaggagatatcattggaaggaaggtcgatctcaatgcccatcgctcttacaagacccttgcctcagcacttgagctcatgttcatgaagccgtccattggtctttgcacttctagcagttcaaagactctaaagctattagacagctcatcggagtatcagctcacctatgaggacagggacggggactggatgcttgttggagatgttccctgggagatgtttgtaggttcagtgaagaggctcaagatcatgagaacctcagacgccaaaggtctcggtccacgattccaagggtctcacagacccacagcagcttgcacgagaggcaggacgtgaaaccaccgatgtgcgtttggtgctaacaccgctggtgaagcttgaactgtatttgatatcacgtaacagtaacagcagcccatatcgctggcatagttgtgagattacggggctgtttggtttactgtctaaggcgccacaacatggctaacttttatgtctaagtttagttcttcaattcgaacgactaaacttaggcaacttcattgtgtctagtggaaatagtagaagtttttttttttgcttcttccctgtggtgccctcgttgagcttttcttatgggctatacgagcatcatcgcccccagctcttctgtccacgctgtttacctgtgaggaatggtcgcccaaagtgttggtttttatccttgtgtttgatatggcagaagtatctgctctgctgtttcat

SEQ ID NO: 123671 - DNA, 301 bp, Zea mays
  Clone ID: MRT4577_44267C.1
gacctctgctgcagcccgtgccgccgccgcctcctgggaagagaggaagcgggagaggagcccactgtcgcctgtcacccaatatctccagccgcgcagtcccgaagagtgtaagatgttcgcctgcgccaagctcgcctgcaccccctctctgatccgagctggatccagagttgcatacagaccaatttctgcatcagtgttatctcgaccagaggctagtaggactggagagggctctacggtatttaatggggcccagatggtgtgtcccagctaatccaaagggagtttcagacca

SEQ ID NO: 123672 - DNA, 334 bp, Zea mays
  Clone ID: MRT4577_44268C.1
aaaaaaagggtacaacgtttggccatgtttttttttgtaggtttttagatggaagctttttatacaggaacagagtgccggcagaagccacatctgtttggaaacccaaatttgaaagaaggaaaaaaaaagtctcggtaacatgatttttgtgcaagattcattttttcccccggcagcctggaagtccccgaagtctttttccacggttttttgctccattttttttgcagcagctggtagctttggagcaggttcgcctttggaggggagagcgctgttttttcttacggtttcaaaagggggttgcttttggggaggaaatttttctttt

SEQ ID NO: 123673 - DNA, 344 bp, Zea mays
  Clone ID: MRT4577_44269C.1
tgattgtattgcattgggaccaaacaagagctatgacaagtctcagatagcaccgtgacgattcatgctgtctgggccctgcagtatgcgcggaaaagactggaggtcgccaatgttgctgattgcccccccgatttaggacgacatgttaaggccactggagacgtttgggatggccactgcagcagcacataacgcgcggactgcagctcgcgagagatgaagtggagtcattgcacccagaggataggcacagtggtggtctcaagcacaatgcttggccctgctaaaggactggttcaggtttgtggatgactgcgaagatgcccactctgtgaacgcag

SEQ ID NO: 123674 - DNA, 2078 bp, Zea mays
  Clone ID: MRT4577_4426C.1
cattggtaccctcgaggccggccgggatccacagcgacaccgcgtggttcgttaggaaaggaaatcgattccccccgcatctgatctcttcggtgctagagaaatataggccgccgccgcctcctccttgttcggtgaaaggtgggcagttagggttgggagatctcttgactcacgacacgagcagcagaattcgtcgagggccgctggttgctgcgagaggtccgggccttcgtgggatcttgaaaattgaatgttctaatggagtccaagggtggcaagaagaagtctagcagtagtcgttcctccctgatgtacgaagctccccttggctacagcatcgaggatatccgccctgcaggcggcatcaagaagttctccgctgcttactcgaactgcgcgaggaagccatcctgatatctctgtcgtcatccccatcctagtagcgtagaaacctcctgcattttcattttgatctccctaatctctccggctagctgctttccagtgaccaaaagatatcagagaccacctcccgtggctgtctgccatctggctctgaaacgatggcagtcctacaagctgctgcccctccccctgtctctgtgattggattcgagggatttgagaagcgccttgagatcagcttctctgaggcacctgtcttggctgaccccagcggaaggggactgcgtgcgctctcgcgtgcccagatcgactctgttcttgaccttgctcggtgcaccattgtgtccgagctctcaaatgacgactttgactcttatgtcttatctgagtcgagcctgtttgtctacccgtacaagattgtgatcaagacctgtggaactacaaagcttctgctcgctattccgaggatccttgaacttgctgaagagctcctgttgccactcgctgcagttaaatactcccgtggaacgttcatattccctgaagcacaaccttccccacacaagaacttcgctgacgaggttgccttcctgaatcgcttcttcggtggcctcaagtccggtggcaatgcttatgtgattggtgactctgcgaagcccgggcagaagtggcacgtctactacgccgctgagcaccctgaggagcctgttgttactctagagatgtgcatgactgggctggacaagaagaaagcttctgtcttcttcaagaccactgctgatggttactcgctgtgcgccaaggagatgaccaagctctctggtatctcggacatcatcccagagatggagatctgtgacttcgacttcgagccctgtggctactccatgaatgctgttcatggccctgctttgtcgaccattcatgtgaccccagaggacggcttcagctatgcaagctacgaggtcatgggcttcaacccgggctctttctcttatggtgacctggttaagagggtgctgaggtgctttggtccaactgagttctctgtcaccgtgaccatcttcggtgatcgggacaatgcgaagacctgggggacgaaactggatgctgaggcctatgcttgcagcaacatggttgagcaggtgctgccgtttggtggcttgctcatctatcagagcttcactgttacggccgaaacgacccatgggtcgccgaggtcagtcctgcatgacttcgctggtgacattgtcaagaatcgctcagagagtgatgctccctgggaagctgatgctgtggatgagagcgaggaaagagatgtaaagaagatgaaatgctgatgtggtcgacgatagatcagattcagagttgctgccactggttatcttgtgaagcagccaagcctaattatttatgccacataaacctgtgctattgtaatgtgtcacatgcttatatttgcaataaacagctctaggtggtcagctttgtctgccgcaatgagcagtgtatcgatattgtggttttgaattgtttggatctaaataaagtccaatttcgatgccttttctattggcatctgcgtttcccaaaaaaaaaaaaaaaaaaaaaaaaaaaaaaaaaaaaaaaaaaaaaaaaaaaaaaaaaacggaaaaaaaaaaactcgaggg

SEQ ID NO: 123675 - DNA, 146 bp, Zea mays
  Clone ID: MRT4577_44270C.1
agtttatatcagcatagaaggccatttaggtccacacatttttgccgcgagcgtccagaaagccccattttttgcttaagattaacctaagacaaagcctggagggagaagctgcttccatctaatcacctcccatcctggctgat

SEQ ID NO: 123676 - DNA, 1373 bp, Zea mays
  unsure (1)..(1373): unsure at all n locations
  Clone ID: MRT4577_44271C.1
gtttgaaggttgtgacagctccttagcatggtaaacatgnacaaaatggagtgaatttcattgaaatccaccacataactgcaatttcttcaagttataaaaggtgaatggaagtgtataaggcatcttaacatcgancagcctgtgttaaaaagatatatgtaagaacatcgaaagtggataaacgccatatagggtctagaaatatggatgggatttctgcgttattttgaaaaaaaggaaccacaggcacatggaagtaaggcaggaatataaggattgtttcattttttattaataattagtgtaacttttcacgctatttcactagtataggagaccacgtttatatccctgaactatgcaatcagcttgagccaagcgctagcgtttcagccttgatttataacaaagcacataataaagagaacaaagtaaaaatgatgtaccggagagaagagaccgaacttttgaacgtgagcaaaccgagcaaggaaaactccaaaatcatgttcatgctgcggacagtggaacacatgaatgttggcatattcgagacacgacagctctccaaatcgccatcgatagtcatacggtgaatagattgacaggacacggagattgggcgcctcgatcaatgagtctgggtattcaccagggatgaacacgtcaaacatatgcagggtatgaagcaagggtgagcgacgaatgatagcctccaattgtttgaacccgttcgatgggaagataacataggcgaggactagcttctggagcgcggggaagccggggaatcctacggggaggggtgggatgtggcagccttccagcagcagggacacgagatcacctaatgagaagattgaggagtagagattgaagttgccgagtgatctgagtgtgccacacatgtcgatggactcgacacggtagcgggagagcgcgatgagccagtcgtcgatgcggccggcacatgcgtcgtcgacacagatgcggaagagggagacgcgggggcctatgtaggggaggaggacgctgtcgacgacggaagggtgcgtgccgacggggaaggagagggagatcaccgagagcgacttccagaggtcccgccaggtgcgggagagcgcggaggtgcgcacggcgtcccggaggtcgaggcggatgaggatctcgtcctgcagctccgctgggagggaggagagccggtcgggcgccgcctgctttgcctccatcacgcctccagtccaagagtctccgcctctccgtttcgcagcgactttttttttctaggcagaggctgccgccggtaaatgctccgcctccaactccgcctccctctctcatgagtcatcccggcccggccggcctcgagg

SEQ ID NO: 123677 - DNA, 297 bp, Zea mays
  Clone ID: MRT4577_44272C.1
ttactgttttttcttttgtttctgtttttcatttgggaacgcaaatatgaaatggctgatttaaaccccatgctgttcatgctgattcaaatgaggcacacccaaatgtttcaggttggcacataaaatttatttacaatggctgaaaggcctactgatcactgcatccgaatctaaaaaggaaaaaccaggaagtttgggggcatggatgaatctttcacacactaggcttcatgggtgtaggattgaccaatgaacttgcaatagctcgtaatttgtaatcatccactggcatgc

SEQ ID NO: 123678 - DNA, 487 bp, Zea mays
  Clone ID: MRT4577_44273C.1
ctctctttcgaagaaactccttcgcccggagctttccccccggccgcctccctctccgcctcccgtccccgaggacaatagatttcaagtggcaatgggagaacaggctaaccaacccgctgcccttcagaaggtcgagggacagctccacctgcgtcccatcatctctgaatgcgtaagggcccgtaacatatgccaagctgtctcatattatgaatagagatttgccagaaggaactacctgacccacatccttttggacccttcaatgccaggtagccatgccatcaatgtcccagagatgcggaccccgctctgcgctaatgctcctgctgacacagaaggcaagaacttcatgatggatttcgtgatgtacggcgttgcagctggtgtttccaagaatgatggtgctcacatcgagcataagtagttgcttattcataagcaacatgacatgcttaatctctgatcaggctatcagagcccg

SEQ ID NO: 123679 - DNA, 521 bp, Zea mays
  Clone ID: MRT4577_44274C.1
gaaacgatcagattcacaaggataaaaagcttactgaatgcaaacaagttagtgggttctgcacagggggcacatacaagtcgaattacaccaacgatgccaaaaccgcgcattcacgacacacactccacacttgtctgtctaaacctggactatcctggctgcccgaggacaggaaatagctaaaaagaactctgagtcatggacccccacgaaacgctgaacaccacgtgctaaaaacgctcattgtctatgttgcacccatgctatggccctactcattctaacatccgtttgccaatgaggatcatgaccctgatcacacagtactgatgccctttttggcctgcatattccactttacttgcgcgtgcgaatgagagatattaacatctagtttatacggtaagctagaaaggtttttagaatgaccatttactgacctctattggggggcacccaccagaaggtgaaccgcttttccgtggagcttatagaaatgctaccgccatgctccacct

SEQ ID NO: 123680 - DNA, 311 bp, Zea mays
  unsure (1)..(311): unsure at all n locations
  Clone ID: MRT4577_44275C.1
agactggaacggagccgatggcttgctacctagctcgctagtttactcatttagcggcgatgagtaacgtagtgtcacccatcaccatgggtggcagtgtgagcaatgacctgaatgaaccattgaaatggaagggagggggatataaggaaaaaagatgattggnaaaaaaaaaaaaaagaaaaaaaagttgtattttttgttttattggtttataagaaaaaaaaaaagttgggtcggtacctttttaagggcgatttttggggttttcctttaaattggcggcctttcgaccatgctctccccgtttt

SEQ ID NO: 123681 - DNA, 307 bp, Zea mays
  Clone ID: MRT4577_44276C.1
gggttgtgttttagagagagagggggaggggggtaaagatgtgttactttgttttacactttttacaactccaaaagctccaaagtgcatatacatgaaacttacagtatcttaactaacgctacacccaaacagggccttttttgccattttaaaataagcacatatggccttcgcatctttaacacacaatctattcctccttacccaaacccgtaatttgtgaaaaagaaaaatcactcaaaaacagtactttactgtatacaagcccggattagcaaacacattccatttcaagcctgaatct

SEQ ID NO: 123682 - DNA, 598 bp, Zea mays
  Clone ID: MRT4577_44277C.1
tcttctctctgtgttccttcggctcccgtgtcgcctgattcatccaagacagggatcgctatgtcggactgggaggagcacctcgtctaagctgaggcagatgtcggtggaccaaatacctaaccgcagcgcgttggtcccgcccgtctcaacggcttcagcgtcctccagaaccgcccctgccatgatgaggatgatgctacctccgagactgaaaaggatggacgcgacacatgtcctttgatcgcgtagacatattcaatgggtaaaagctcgaagatattgctcgttcatcatgcaactgaggtgttccgcatgcaatcagtcctgttataagctgactgctatttccgagtatggatttgtgaaactgcttacttcagatggccactctaaggaggatctcagcactgccatgctcgaagaggactcttgtaggcccgacattatgtggagggttccgaagtgaaaggatgttgatcagactgtccagtctgccaagaggcagcaaccgatctgctcgctgaatgatgttgaccccagataactttcttggatctggatactacaccctgctatatgactgcttaaatcggaa

SEQ ID NO: 123683 - DNA, 479 bp, Zea mays
  Clone ID: MRT4577_44278C.1
ggggggggggggttttttttttttttttttttgtggtgtttttttttttttttttttttttttttttttttttttttttttttacaaaagggtttaaataataataccaaacccccggaaagaagaaaaaattttttccatacccattttgggggggagtgggggaggcttgcattttcatccaccatccaactttttaatttaaaataagggtggcccaagagggcacttagagcacaggggcctatcaatgggcttggtcgggaacccaattaatccttttggggagcccattgggggagttttcgggggtaccgggatcaccgccctccaaaaagggggtcctttttttttttaggcctcccaggggggccttcaacttgaatgggcacaggaaggtgttcgcctccttgaagtgggggccaacagtcatgatttcgggaacaagatcctcaatgcaaaagaagttgtgcttgccc

SEQ ID NO: 123684 - DNA, 502 bp, Zea mays
  Clone ID: MRT4577_44279C.1
tttatttcatcgagcattgtcaagtttaattgattaaacaagttagcaagccaagaatggaggcgaaaattaagaattagaaaaaaggcatgagcgtgtactctgaacaaagtgcaaggcaaggccaccagaacgcacgagaattgtggactagcaacgaatcatccatcgcctcaagaatagtatccttctgcaactgcaaataaagacagacatggtctgattctgaaaggctatttaaagtctcaaactccccgtcacagctcaaaaagaaaaagaaagagtatcccagaactctttctaggagaatagaattatcaaacctcagacaacccaaattcccatgttgcattgcccaaaatataagagacattatggttcgtgacgtaacagccaaaggaaagggtacatttcgtttcaattccagagtctgattcgctctgctctgcactgctttaacagcatccctgttttgtctctgagtcctgagtcttgcttattt

SEQ ID NO: 123685 - DNA, 897 bp, Zea mays
  unsure (1)..(897): unsure at all n locations
  Clone ID: MRT4577_4427C.1
ccgggcgccgccgtcgtcgtgtacgtccgccccgtcgcgctcttcttcgtctcccggccgcgggcttcgggctctacatcttcctcatcatcctcccgttcatagtgctgtgccccctgtactactactaccagcgccacccggtgaacctgctgctgctcggcctcttcacggtcgccatcagcttcgccgtcggcctcacctgcgccttcaccaaaggcgaggtgatcctcgagtcggcggtcctcacggcggtggtggtgctgagcctcacggcgtacaccttctgggcggcgaagcgcggccacgacttcaacttcctgggcccgttcctgttcgccgccgtcatgatcctcatgttgttcgcgctcatccagctcttcttcccgctcggccgcatctcgctcatgatctacggggggctggcggcgctcgtcttctgcggctacatcatctacgacaccgacaacctcatcaagcgctactcctacgacgagtacgtctgggccgccgtcgcgctctacctcgacgtcatcaacctcttcctctccctcgtcacgctcttccgggcggcggattcgtgagcacggctacaggtacctgccagctgcctatggcgcggcggcaggatcttggaatgtgccttgccctaccccacctccggtgctgtctgctggaatatactctgtaaagcagacctaggaccttaaagagaaataattggtttgggttttgtgctttgcttcgcttgcgaagatagttcaacgaaacaattttttttctgtgaaactaactgtcgttttttgggacctatgtatgttttctgggatatttttttcttcttttgttatttttcctggaaaatttgattaatatatgtccaacagnatcggtgcg

SEQ ID NO: 123686 - DNA, 552 bp, Zea mays
  unsure (1)..(552): unsure at all n locations
  Clone ID: MRT4577_44280C.1
ggtgctgcaaacactaggtccataacatagtaaccgctaggtgacattcacatgcaaggagcatagcatgtacaacgctactgacacagctacactactgcttccacacatcaccaggacgcctcgtgaagactagatggaaacgacaattacagcccacacggcntgtccggcgtaaattgccaaccgattggtaaaagggatgcttgcaccagctcaacggacctatttcctgcacgtctcgggcagggatgcatcttgttgcaggttaggaaagaaacaagactttgaatcagtacaacacgcgccataagaggagaagtgatgggcattctttctttacacacaaagatctcagctctccaaacaattcctgatactaattttgcacccaccaattaaaaatcgtagctttacttgcttgacgacaagctgcttgtctgaaacctatccttgtgagcattcatattaaggagaccgtgattcgtgcactgcaaagccatgattccatcaaaccggactgtgtgcgaaacatctattacatccatatga

SEQ ID NO: 123687 - DNA, 367 bp, Zea mays
  Clone ID: MRT4577_44281C.1
cggaatacggctcgaggaagaaggagaagagagaaagggaatttagttttcaccccagggaaaccaagctgggggccgaggtgagacaaaggacccgctgaagcacaaagccaggcacaaaaacgcactagaaactgcagaagcagcaacgaagcaacacgaaagccgacaccgccacagaatggacagagacaacaaggcatctaacagccgaaaaacggaagactaccaaagcaacataacagaaacaggaccagcaaagagacacgaggaccaatcgacccaacatgcggagaagcccactgaaggcacaggcggagacaaggacccagaataccaccatgcatgggatcaaaaacgagaagac

SEQ ID NO: 123688 - DNA, 481 bp, Zea mays
  unsure (1)..(481): unsure at all n locations
  Clone ID: MRT4577_44282C.1
ggtgtttttgttttttttttttttttttttttttttttttttttttttttttttttttttttttttttttttttttttttttaaaagaaaaaaaccagggcattaatccgggggggggccaccaaattataccaaacactaacccgggcagggggggggacatggcttggtggggaaattgccatttgccaaagcctttttcaccaatttttttttaatncatttnctagggggcaaagcgnccagtcactgatcaaacacacatccaggggggggaggagcagcaaaaattcttgcggggatcaggaaaggcagacgaaaatgaaccttatgggcagggaacttcccaatacatttttaagggggggccttttttagggggttggccaccccccaaaagaaggggggggcgtcacgggcaaaggggccggttggggggntcttgatgaacctggtgncgccctttttaggggcgagggtg

SEQ ID NO: 123689 - DNA, 549 bp, Zea mays
  Clone ID: MRT4577_44283C.1
atgtaaataacagctctttacctccactataaatcaagccgtccattctccacccccaaaaaattctcactttaacacaaaattgtacacatcagcatgtgtctgaaattacaatgaggctgagagcactattatacaaaacaacaggacttcgagccctcctggcaaatccctttgccattccaattggatgccaaaatcacaccatacacccaccacctatccacccagctgagtatatacaagtgaagcctccaaggatcttaggatgagttctatttggactgctacttgggttcaatggaacgaattggagagcactgtcctagatcaagctcacttctaccgactttagtcctctctgctccctgtacatcaacctttcgtttccgtatgggtgtggaccaacccctctcccgaacacaaatgaaataacaagatcctgatcactcaggcttcatatggatcataccaaccaatgtgtaatgaatctactatatccaggcgagagagccccgttcattagctactgcttggggacgccccctg

SEQ ID NO: 123690 - DNA, 332 bp, Zea mays
  Clone ID: MRT4577_44284C.1
tgctattattcgtgtctatcgtcatggcgggaaggaggcaaagaggaaggaagcgcctggggagctccagacagacagacgaaccgcgcaccatggctacttgaaaacgacagacgaaaaccttagctacggcgcgcgaccgggcagatgaggcgcttctgggcgatgtcgaatgcggcagcaggagggtcaatgactaggcggagaatggaagacgaggaagcagcagcgatataagaggcagatgcagggcacagcggcaggtgcgaagctgatgatgacgaggtcaaaaacatctactacacattggacgaagaaggctcgaaagacta

SEQ ID NO: 123691 - DNA, 276 bp, Zea mays
  Clone ID: MRT4577_44285C.1
tttacacctgcctaaacgccaacatcttttattatgcatcatgtttactatctaatcgatgcggtaacaaacccagagacatgtttacgtcctgatatagcattcatcccattttctcattactttgacatctacacagtcacaactacagctatctgtgttccagatattgtacatattcatgtcatccatcttcactgtccacttaatagattaatactgaagctactatgcaaaatcttcattaatttctagccacactgactctaactatca

SEQ ID NO: 123692 - DNA, 662 bp, Zea mays
  Clone ID: MRT4577_44286C.1
caagcagtagctaatgaacggggctctctcgcctggatatagtagattcattacacattggttggtatgatccatatgaagcctgagtgatcaggatcttgttatttcatttgtgttcgggagaggggttggtccacagccatacggaaacgaaaggttgatgtacagggagcagagaggactaaagtcggtagaagtgagcttgatctaggacagtgctctccaattcgttccattgaacacaagtagcagtacaaatagaactcatcctaagatccttggaggcttcacttgtatatactcagctgggtggataggtggtgggtgtatggtgtgattttggcatccaattggaatggcaaaggtaatagtgttattgtactaggaattctttcccttttttttctttctcggggcctagaattctcatgttgcaaattatttttgagttgccacagagatttgccaggagggctcgaagtcatgttgttttgtataatagtgctctcagcctcattgtaatttcagacaaatgctgatgtgtacaattttgtgttaaagtttgagaatttttgggggtggtgaaaaaaaaggacacatataaaaaaaaaaccaaaaaaaaaaagagggcgcccgccgaattagagctgtcgcccggaatt

SEQ ID NO: 123693 - DNA, 296 bp, Zea mays
  Clone ID: MRT4577_44287C.1
ggcaaatgctgatctccatctggctggcggcgccggagttgggcatagcgcatcgccatgaagaccacacctcctccggtggtgggctgaatctaggctcgcgctcgaggaggtgaggcagaagactacctctgagcccccagggaagggcaacgacagacattgctgccggtagtgattttgtgaaggagccacagggccccctcgtgcggttgtgtcatcgtctccatcgcaggtatgatatgtcctctccactctcttgtgcaccctgaggcacacgcatgacacctttggga

SEQ ID NO: 123694 - DNA, 311 bp, Zea mays
  Clone ID: MRT4577_44288C.1
gtccaggccccgttcgttcctaccagtggcccgggcgtgcggccgccggcgccctgatcaatcaacccgcccctgggccggatggaggcgtaagcagcagaagaaggggggggaggaaccccccccacgcggagcatttctgttgggccgggcaggccaccaacaacaaccccggggccagaaagctgtcttgggttaccaaaggtaccttgaaggatgattttgcccggttttttgttaggcaaccaacaaaaagggctccaataatcaatcttggggtatgtatgcccgtgggcctgttctaagaaccc

SEQ ID NO: 123695 - DNA, 195 bp, Zea mays
  Clone ID: MRT4577_44289C.1
cgcacgcgtgggggcacacgtgggcgcagacgaaaatgtcccgtatgctgattctgatgaggagaataaggcggacgaggccgatgaggccttcgcgtacggatgaggcggctgatatcgatggctctgtgttgctcacggatgagagtatacctgatgtccgatcttccctgaccctgatcgcacatggctcgc

SEQ ID NO: 123696 - DNA, 2069 bp, Zea mays
  Clone ID: MRT4577_4428C.1
gataactgaatctatcttgggctgaaatgcaggtaattgtttttattttaaaaaaaaaaaaaaaaaaaatcacacagcgacaccgcgtggttcgttaggaaaggaaatcgattccccccgcatctgatctcttcggtgctagaggaatataggccgccgctgcctcctcgttcggtgaaaggtgggcagttagggttgggagatctcttgactcacgacacgagcagcagaattcgtcgagggccgctggttgctgcgagaggtccgggccttcgtgggatcttgaaaattgaatgttctaatggagtccaagggtggcaagaagaagtctagcagtagtcgttcctccctgatgtacgaagctccccttggctacagcatcgaggatatccgccctgcaggcggcatcaagaagttctccgctgcttactcgaactgcgcgaggaagccatcctgatatctctgtcgtcatccccatcctagtagcgtagaaaccacctgcattttcattttgatctccctaatccctccggctagctgctttccagtgaccaaaagatatcaaagaccacttcccgtcttcctcccgtggcctgtctgtcatctggctctgaaacgatgggcagtcctgcaagttgctgctgctgcccctccccctgtctctgtgattgggttcgagggatttgagaagcgccttgagatcagcttctctgaggcacctgtcttggctgaccccagcggaaggggactgcgtgcgctctcgcgtgcccagatcgactctgttcttgaccttgctcggtgcaccattgtgtccgagctctcaaacgaggacttcgactcttatgtcttatctgagtcgagcctgtttgtctacccatacaagattgtgatcaagacctgtggaactacaaagcttctgctcgctattccgaggatccttgaacttgctgaagagctcctgttgccactcgctgcagttaaatactcccgtggaacgttcatattccctgaagcacagccttccccacacaagaacttcgctgacgaggttgccttcctgaatcgcttcttcggtggcctcaagtccggtggcaatgcttatgtgattggtgactctgcgaagcccgggcagaagtggcacgtctactacgccgctgagcaccctgaggagcctgtcgttactctggagaatgactgggctggacaagaagaaagctctgtcttcttcaagaccactgctgatggttactcgctgtgcgccaagaagttaaccagctctcttggtatctcggacatcattccagagatggagatctgtgacttcgacttcgagccctgtggctactccatgaatgctgttcatggccctgctttgtcgaccattcatgtgaccccagaggacggcttcagctatgcaagctacgaggccatgggcttcaacccgggatctttctcttatggcgacctggttaagagggtgctgaggtgctttggtccagctgagttctctgttgccgtaaccatcttcggtgagcgggacgatgcgaagacctgggggaagaaactggatgctgaggcctatgcttgcagcaacatggttgagcaggtgctcccgtttggtggctttctcatctatcagagcttcactgttacgggcgaaacgacccatggatcgccgaggtcagtcctgcatgacttcgctggtgacattgtcaagaatcgctcagagagtgatgctccctgctgggaagctgatgcggtggatgagagcgaggaaagagaggtaaagaagatgaaatgctgatgcggtcgacgatagatcagatccatagttgctgccactggttatcttgtgagcagccaagcctaattatttatgccacgtaacctgtgctattgtaatgtgccacatgcttatatttgcaataaacagctctaggtggtcagctttgtctgccgcaatgagcagtgtatcgatattgtggttttgaattgtttggatctaaataaagtcttgtgttcgatacaatttggatgccttttctattggcatctgcgtttcatgattc

SEQ ID NO: 123697 - DNA, 444 bp, Zea mays
  unsure (1)..(444): unsure at all n locations
  Clone ID: MRT4577_44290C.1
natantttttcttctcattttttattttttcttggggttttttttaataaaaaatccgggggttacaagccataaggccaaaaaggggctccaggccctttgatccccctcccccctgggggaaaccagcaacacccttgcacagcaactttcaaaagttttgaatgaaaatcaatggccggggctggttttttttaaataaaaaacacagggggtggcatttggtctttggggggggggaataattaacccggggaatgaataaacaagtttttttttttcctacggtttttggacaggggaatcaattttttttcttgaaagttcccccaccggggggccttttaccattttccattccccccctctgtttgtttctgggaaaaaaaaaaaaagtccggaaggaaccccctttggcccttgtgaatccccccccctggttcc

SEQ ID NO: 123698 - DNA, 727 bp, Zea mays
  Clone ID: MRT4577_44291C.1
ttgggattctcgaggccggccgggatgactgaaacctgcgggatatatccctggagtacgtacagaagggttgtgcccgtcagtttggttcgactggagcacttgtcacaggagttgaagcaaagatcgttaatgcaaagacaatgaagcatcttcctccgagccaactaggagaaatctgtgttcgaggaccgaacataatggaaggctatttcaacaatgtgcaagcgactgagtctacaatcaagaatggatggttgcataccggtgatcttggatacttcgatgaaagaggccagcttcatgttgtcgatagacttaaagaactgattaagtacaaaggcttccaggtcgcgcactacaagaggctgaggaaggtaacgttcgtgggcagcgtaccgaaatctgctgcggggatgattttgaggagagagctcatcgcccaagtcagactgtccaagctgtagcagatttaatctcgatttcactgcagcccttgtcgtctgggttctgctggacacagaagtgcagaatctctgctgagcactgtacaagatttgtctatcaagtcactgtcaggaaccacacatttcagtctagacatgccagacactgatttcttttttttgttaaggaataaagcattctggcctcaaaaaaaaacggaagaatgatgtatcctatattgcttggattcttcaagaaagttaaagtaatatataatacc

SEQ ID NO: 123699 - DNA, 1804 bp, Zea mays
  unsure (1)..(1804): unsure at all n locations
  Clone ID: MRT4577_44292C.1
gcctggtagaggtagcacgccagatcaccagcgatccgcacgtcgcatcanagcaaagatatcgcggggagcaagagtagtcaacgcacgaatggtgggcacggtgtcgctagcggcgggctacggctccgatggcgtgtaccgctcgccgcgcctggtggctgcgtgctctacccggtctgctttctcgccgtcaccgcgctcggcgccgtcgcgaccacggctaacccgctctacaccccgcgggagatcgccaagcaggccgccgacgcccgcgccaggctcgtcgtcaccgtctccgatctcctgcccaagatctccggtctccgcctccctatcgtcctcctcgacggcgacggcgcccccgtgccttcgggctgccccagcagtaacgtcactctctactcggacctcgtcgccggggtgcaggaggcggagtaccgccacacgccgatcgggcagggcgacacagcggcgctgttctactcgtcgggcacgactggggagagcaagggcgtcgtgctcacgcaccgcaacttcatcgcggcagcgacgatggtgacgtcggaccaggacgagctgggggaaggccacaacgtgttcctctgcttcctgcccatgttccacatcttcggcatgtccgtgatcaccctcggccagctgcagcgcggcaacgccgtcgtcgtgatggcccggttcgacgtcgacgccgtgctggccgccatcgagcggcaccgcgtcacgtacctcttctgcgccccgccggcgatgatcgcgctcgccaagcacagcaggggcggcaggtacgacctcagctcgctcagatgcatcggctctggcgccgcgccgctcggcaaggacgtcatggtggctatggctgacaggttccccggtgtcgacattatccagggttatggtatgactgaaacctgcgggataatatccctggagtacgtacagaagggttgtgcccgtcagtttggttcgactggagcacttgtcacaggagttgaagcaaagatcgttaatgcaaagacaatgaagcatcttcctccgagccaactaggagaaatctgtgttcgaggaccgaacataatggaaggctatttcaacaatgtgcaagcgactgagtctacaatcaagaatggatggttgcataccggtgatcttggatacttcgatgaaagaggccagcttcatgttgtcgatagacttaaagaactgattaagtacaaaggcttccagattgctcctgctgagcttgaaggactgcttttgtctcatccagaaatccttgatgccgctgttatcccgtatcctgatgctgaagcgggggaagttcctatcgcctacgttgtactatcaccgaagagttcactggccgaagctgatgtccagaaatttatcgagaaacaggtcgcgcactacaagaggctgaggaaggtaacgttcgtgggcagcgtaccgaaatctgctgcggggaagattttgaggagagagctcatcgcccaagtcagactgtccaagctgtagcagatttaatctcgatttcactgcagcccttgtcgtctgggttctgctggacacagaagtgcagaatctctgctgagcactgtacaagatttgtctatcaagtcactgtcaggaaccacacatttcagtctagacatgccagacactgatttcttttttttgttaaggaataaagcattctggcctctagtatccacggatgaatgatgtatcctatattgcttggattcttcaagaaagttaaagtaatatataatactacatccgtctc

SEQ ID NO: 123700 - DNA, 238 bp, Zea mays
  Clone ID: MRT4577_44293C.1
gaacaactggtttctttttttaagaagatcaccccaactgcccttcttgggggtggtttgcccgggaactttaagcaaaacagagacccaagtttgaggggcccccttgggggaccgggccccatttccccccccagaccagacgacgcccacttttttttgcccatttttctttcagtccccaccgggcagttcaccccacagcccttttttttgtttccacacatttttccccccc

SEQ ID NO: 123701 - DNA, 157 bp, Zea mays
  Clone ID: MRT4577_44294C.1
aaaaaaaagaatcccaggagaatttaaacacaattgcctaaaacaaaaaaccaccctcatttattttctcacattttcgagtatggccttaccttctatattatcacccaaacttccattcctaaatataacttactgcttgtctgtctttttcccc

SEQ ID NO: 123702 - DNA, 447 bp, Zea mays
  Clone ID: MRT4577_44295C.1
gtggtaacaacgcagagtacttttttttttttttttttttttttttttattttttttatttttttttttttttttgatgacgagcgagcgagcgagaacgcatcggggagagagagagagagaggagagaccccgagtggagcgctggttttttatagtgtggcgcagggcgtggcatatagacacataatagcacgtacagcagtgggacgagacaaagcaccgcaccaagcgggcaggggacagttggcgagaagcgcccatgtgggcgcacggctctcctctcctgcgcgatgctgcgcgcctgggcgggccgtggaggacgaggagggcgatgacaccggtgcacgtgcgctggccggtgatcggcctggggggctggcccggctggccgtcgcccgtggtgctgcggcttcacattccacggcgctggcccgtgtggccccg

SEQ ID NO: 123703 - DNA, 175 bp, Zea mays
  unsure (1)..(175): unsure at all n locations
  Clone ID: MRT4577_44296C.1
catttacataanacttttttagaaacaaaaatgcactatataatctgcaaatttcttcaagaaacttccttcccctactaaaaaaccttcttcttaattaaaacctcatctccttcattttctctccctaacaattattattatccctagccatatttcttctactatttctctt

SEQ ID NO: 123704 - DNA, 898 bp, Zea mays
  Clone ID: MRT4577_44297C.1
gcacgaggaagtacacacctttgctttctaagattttgcaatgtgtcctccagaaaggaactgatggtgataagattagccatgaaaaagaggttattgctgcagccgatgaggttgtgggcagtattgataaagaggaactggctaagtatttatctctaaattcagatcctgaagatgaagaagcacagaaattcaagaaaaaaatagaagaaacgcgagatcagttggctgatgcactatatcaaaagtgtcttgcattggctgagattgaatcactgaagtctgatgagtcaattgaggtatctgctaaagatatttttgaggagaattacaaagaattgattaaatgggttgatgtcaaatctgcaaaatatggcacttcgactgttttgcgtgaaaaacgctgtggaagacctggtacagcattgaagattctaaatgatttgattcaaaatgaatctgaaccaaagaaaaagctttatgatttgaagatccagttgattgaggagatgggatggaaccatgtctcaacctacgaaaaacagtggatgcaagtccgctttcccccatgtctgccaccattttgattgtgaactcatttttacaatggctctatcatcctgggttcagtagttgtcattttcattgctgggtgcgtcagttcattatttcgatggcaaacagccaactaggcaagctactggatttgtgcgtttggggacacagttattccatagttattttgtggtacaatatcaggggagtcctttctccaaggagataagacggaacagagatattttgatggacttgaaggagattttatcctcttcaatccttataatgtctatcaaaccaaataaggtttaaaaaaaaaaaaaaaacccccccacac

SEQ ID NO: 123705 - DNA, 3022 bp, Zea mays
  Clone ID: MRT4577_44298C.1
ataaaccttatttgggtacatggggattataaggattgaagaggataaaatctacttcaagtccatcaaaatatctgtgctccgctttatctccttggagaaaggactcccctagatattgtaccacaaattaactatggaataactgtgtccccaaacgcacaaatccagtagcttgcctagttggctgttttatattattatttaagagaaaactgcagagtaagcaaatgccatcgaaataatgaactgacgcacccagcaatcaaaatgacaactactgaacccaggatgatagagccattgtaaaaatgagttcacaatcaaaatggtggcagacttgggggaaagcggacttgcatccactgtttttcgtaggttgagacatggttccatcccatctcctcaatcaactggatcttcaaatcataaagctttttctttggttcagattcattttgaatcaaatcatttagaatcttcaatgctgtaccaggtcttccacagcgtttttcacgcaaaacagtcgaagtgccatattttgcagatttgacatcaacccatttaatcaattctttgtaattctcctcaaaaatatctttagcagatacctcaattgactcatcagacttcagtgattcaatctcagccaatgcaagacacttttgatatagtgcatcagccaactgatcccgcgtttcttctatttttttcttgaatttctgtgcttcttcatcttcaggatctgaatttagagataaatacttagccagttcctctttatcaatactgcccacaacctcatcggctgcagcaataacctctttttcatggctaatcttatcaccatcagttcctttctggaggacacattgcaaaatcttagaaagcaaaggtgtgtacttcggatattctgacttcagagaaaccacaagttctgaccaggcagacttgtcctcctcagttagttgcttaacgctggaaagaaactttatcttggtgtctcgaacctcctcatctaactgttcaggtatgctctttgtaccaactaaaacccccttttctttatcatcaacctttgatggcaaaatggtatatgagatactataagatactggagcacggtggttttgttcatctttcttgttaaatgtgcttacagtaccataggttatggacccaaccaaaacagccccaggtggagcattctttgggagtttttcactagacggaggacccacatagaatgcttcaggttcgcctggaactagaacagtggatttgaaggtgccacttccaactataggaccatcaggttgggagtagaacatcaatggaacgaaatcctttttgtctagtttcctctcaataaacagaaccagttccttgagtttctctaagaattgcacattctcatgccttatgtacagttgcaacgtgtattctcctttggaaagtctgacataactagggtaaacgtctccggacgagtaaatacgcttgtttgaatctgatattctataaaactgagactcaaatttattgtcatatattctgttgttaagcagtggcacatggggctttatttcagcattgtcttctaatttgaacttgtaagttaaggtcagggcaataatttgcttgccagagggcaatttatcacggtcagtgggaagtgaagaaagattacactccacgggtcgataaggtatcctgatcttgttcagggtgccaacaggaacaagcttctctgacgctagaagtgatctagcaactataagcaagggtgactcaccatcaagggtacttactttctgatcaatggatattccatgcagcacaatctcaaaatcaacacaggtaggttcatggctagcaattccactagaccagaactgggctatggacaactccaaagttaagccaccttctacaggaaaactgaaattctttgaagatggagaagagaaagtaacaacagcctcccatttaacaggtcgcttcagtggacagatctgaacagtgtccaaaaagaatcttctaggagtatcaaaagctgatgttcgcatagtaacttccgcccatgaagctccaaaaggtacatttatgaacctcctttcaatatgaccagattgaaaacgaaggtttgaaattgacaatagtggtggctctcccaatagagcaataggctttattacagtaattggcacacggaaaataggcccacgccatggtgctttgtaatctatgccataaacttcaaaatagtgaaggccactgctcctattagcaggattgccaacaaaataatgaactgacgcaccgagcaataaaaatgacaactcctgaacctcaacgatgatagaaccattagaaaacagagttaacaatcaaaatggaggcaaaccaggggtgaaagcggacttgcccctcatgaaattttgggtcaagtagcacagtcccactcacttgtttggcagcatgcattgcccccgcggaggtatattcctcttagttttggaactgactttcccaccatttagaatctataatgttgtaccaggtcttccacagcgtttttcacgcaaaacagtcgaagtgccatattttgcagatttgacatcaacccatttaatcaattctttgtaattctcctcaaaaatatctttagcagatacctcaattgactcatcagacttcagtgattcaatctcagccaatgcaagacacttttgatatagtgcatcagccaactgatctcgcgtttcttctatttttttcttgaatttctgtgcttcttcatcttcaggatctgaatttagagataaatacttagccagttcctctttatcaatactgcccacaacctcatcggctgcagcaataacctctttttcatggctaatcctccattccctttgcaggtggttgtacaacacagtgggctccagcagccgtggctggtgaaacagtaggcaccaacaccaagaatgctggtactaggtccccctcgtgccgaatt

SEQ ID NO: 123706 - DNA, 299 bp, Zea mays
  Clone ID: MRT4577_44299C.1
ccctcgcgtccgcccacgcgtccgactagttcttagatcgtgagcggtcgctcgcccacgcgtacgcccacgcgtccgcccacgcgttcgtgtcgttgggcaaggtctagttcggtgttgtgtatggaacggtcgtcactgagtcatgcacgatttggtatccgtgttgtttatgttcaccggcttgagggactctaaaataaaaatcctctgcagaataccggatggcatattacaaaaaaaaagggtggatgttcaaaaggaatcaattcttaataaattgggggcggccgttctag

SEQ ID NO: 123707 - DNA, 269 bp, Zea mays
  Clone ID: MRT4577_4429C.1
agccttcggttaccccgcgggcgggggccttccgggttggaaaccgattttttttgggttttgggctttttctaatttctaactaacaacggaacggtacaatggcctaatctgaaaacctaccctcgtgccggggcatgcgaaacgtgacacaagtagtcttcaagcgtacggatttcaacgacttgacggatctgcggccaatggactgactggggtcacatacgcaacctctgcctcgttggctcactctgggaccgccttcgtca

SEQ ID NO: 123708 - DNA, 564 bp, Zea mays
  Clone ID: MRT4577_442C.1
cgttcgtttttttttttttttttttttttggattacaatagtattcacatacaacgtcatttttcttggtccgtacaaagatgtaagggtaaaatagtatcaaagtcattattgaaatctaccacttctccatcctccatctctagtgcaacgaactcttcactgatttgtgttcatccgttcttagtcgacaaatgaacttgcttcacattactgcttggcgataagaagacaccaatgcaaaggatgtatctagcttctttgccaatcatggcagtttcaagatgcagagtttctataagattgcctgcattctttacttccatcaattcatccatacattgctagttgtagtgctacctgagttattatatgtatccattcacataggagaaacaattagattaagtataaaccagatgtctacctcagtcaatgacaatctataatagtaaaaaatcgacttcaacagtagtcaaagcttctatgaaattctggttgtccaaaatttattttcaagggctagtgaccactactgttatctttaaggaatccaaccgaata

SEQ ID NO: 123709 - DNA, 324 bp, Zea mays
  Clone ID: MRT4577_44300C.1
ggtttacccacgcgtccgcgctggcgttcatgacctgtgggaccatgaaggcaggcatggcctcatactttccgatggtgcgcgctgcgacgaccaactgccagggaccacgaaaggccttgctcgccactgagaccgccatgtgccagagcgaggcgcgcccccgatgccaggtcaatctctggacatgacgcagctgaggaccaaggcccactgaaagtcgaacagaaccacgctggtagctcacggccgtcgagcacgcttaccaggtaacggggcagccgaacatcatgattcccaatggcgaacacctgacgggcgcgc

SEQ ID NO: 123710 - DNA, 154 bp, Zea mays
  Clone ID: MRT4577_44301C.1
gccacttgtacgcggagaccgacggacaccctcgggggacctatagggcggcagagcccacacgtctcattctagatgaccgtgaactaagggctggacggctgaaatgggttgcagatgcaccgcaaatagggcctgatagaccggaataact

SEQ ID NO: 123711 - DNA, 353 bp, Zea mays
  Clone ID: MRT4577_44302C.1
ggaaaaaaaacggaaacaaaagaccccgaaaaggggagccaaaaataaaaccgtttttacttttttttgaacacaattatacccccctgcaaaaaaaacaaaggggggccaggaaccccccttttttaaaggagccggccccacccccaccaacttttttccctaaggttcactcaccaaaagaaaaaggagttaccaagggccggggggggcctcatttttgggaaccattaaaatacccccccctgcagaaaaaaaataaaaaaggggggggttgggtgcccccgaaatagatttaacttggccggcccccggccggtactaaggtaaacaaaaagggggggggtcttttt

SEQ ID NO: 123712 - DNA, 248 bp, Zea mays
  unsure (1)..(248): unsure at all n locations
  Clone ID: MRT4577_44303C.1
gttccccccaaccctcaccgccatggcgaccaccgaggactccgccgccgcggtcaatgcccgactcctgttcgccctccttgagtcccagcagcaggtactctctgactgccacggggcctggtcgagcgccctcgcacactttgcctcgcgcgaggaggacctagcctcccgctccgttgcactcgacgaagccctagccngccgcgacgtttccacttccgagactttggcagcgctcgaggccc

SEQ ID NO: 123713 - DNA, 638 bp, Zea mays
  Clone ID: MRT4577_44304C.1
aggccggccggggaaaaaaaaaaaaaaaaaattcccctcataccttatcctctcggctgctcaccaccgcagacaagtccagtcctctccctcccctcaacctagcgccgccactcgcgcccaccacgccgccgcaccgccgctggtgaacggatccgtccatccgcaccacggttggctcttcctcgcttcctcctccattcctctccctctctctctcgtcggtgggaccgtgggatacgctgacggacggacgggctgaggcaaggccgcctgcgggcgggaggaagaaaaggaaactaactgcgccctcccctcccccatctccgcccccgcctcacccaccagacgagagagcgagcacagttcggccgccgcggcggacgccgccgaggttcggctcagccacggccgcctcctagctcgcctggtgccgcaaagggcttggattgaatgaagaggtttgacccaacatggattcgaagacaaagttcagtgatgtcaagggagttgacgaagctaaagctgaacttgaggaaattgttcactacctacgagcactaccggacatagctcctttgccgagtgtctcagacactcggcaaaggctactttacactcggcaaaggctttgccga

SEQ ID NO: 123714 - DNA, 474 bp, Zea mays
  Clone ID: MRT4577_44305C.1
gtcgaggatcgataagcttactaaattacacataataattcaattaataaaatttataaacattgtttccgacaataaagtcctcaacaggattcctggagataaggtttttaatagagttcttgtcaattagagcttacaataggtgagtaatgctcaaatcaatagtacaaatcaatttccacatttcaacaacattcagtaatcattaaagataatgcctaatgaacgttatacggatacgagtacacagttaaccatccaacacactagatgctcataagagccaataccatccaacacaccagatgctcataagaactagtaccatccaacacaccagatgcttagaagagctagtaccatctagcacaccaaataacattgtaaaataacatgatagtccacaacaaatataggaccttggtatatccagtgaacagagaatatacaaaaaaatcatctttatttctc

SEQ ID NO: 123715 - DNA, 412 bp, Zea mays
  Clone ID: MRT4577_44306C.1
ccatgttagattttgaaacgaaaaaaaaagggtcacgccccgggccaacgggccaaagtggcaagaaccacgacaacaaaccagaacgagagatacagggttgacagcccgccgatatcagaacagaagagggaggccgcctccgcccacacggccaaacaagacaagcctacgagccacaacacgcatgcatgactcaacagcaacagcacacaaagggacggagcacacgcctgtggctccccgcagcccctggtgaaacccctggcgccaccaagcaggcgggggcccggtggaagcgagtcggccccaaaaagcagctggagatgcggctgaagcttgccttaaggctatgcgaggcaaccccacagagagaaggaaggcacggtacccaccaaagcgggggccgcca

SEQ ID NO: 123716 - DNA, 442 bp, Zea mays
  Clone ID: MRT4577_44307C.1
cccactttttcttttgccattgccatctactgacctgtgacctccgcatgtgcaaacagcccgagcgagctagagctagcagagcggcaggcacctccctcctcaaggaacggggcccgcacgcagcagttggaagttgtggcgaccgccgaggaggccttggtgctgctggcggcggcggaaacctcagaggcgggcatcagctgcggacaggtggcgacgggcaaagcgccgtggatcccctactcacgcggccagagctcggggcccttcgccggctggtgcagaggaggaaggagcctcaacaacgccgccctcccaccggcgaccgacgcgcagtgtgcaactgactcaagaacgccgacgccggacttagcggcctggacgccggcaacgccgccagcatcccctccaagtgcggcgtcaggcattccctacacca

SEQ ID NO: 123717 - DNA, 331 bp, Zea mays
  Clone ID: MRT4577_44308C.1
tctagagtgaatcgtattcatcgcgctgtcgcgggggtaggggctggtgatcactatcgcttgccgctcggtgatccatggccggctccgcggtggccgtcgtacccctgtcagccgtcgccctgctctgcctgtagtacgtccttttgcgctccctgtgcgtcgcggaagcggcatcagcgtcagcagccgtcccccggcgcgccggtagccaccgtggcagcaacgttccgtctgggtcacgaaccgtccaactcgtcctccgcttcggcctgtccgggcagccgctccgcctctacgactccgtccgccgccgctggcctcccggaca

SEQ ID NO: 123718 - DNA, 212 bp, Zea mays
  Clone ID: MRT4577_44309C.1
aggggttaaagcccaaaacaccagtggtgccccctaccgggatacccacgtttttaacgagggaagtcacatgtgaccttcccaggcagtgttgctaacctgggctgttcctgaatggtatctaggtccatcagggcaaaccaatgagtgtgggacaccaacttattttttcctgaggccaattctgagcgtaggcttcacgttcatgcggc

SEQ ID NO: 123719 - DNA, 441 bp, Zea mays
  Clone ID: MRT4577_4430C.1
tgcctcgtactcgtctcggaattcctcgtgtcgactccacgtcgttccgctccacgacgtctcgaaaagaaaaataataatagaataataaataaaaagaaaaaaagaaaaatataaaataaaggagaacaataataaataagagtctataaattaatataatatataagtatgaagaaatatgaaaaggtatataatatacggtgttatggaatttgtaacttgatcgtgctatctttttgctgatatgtggtgtgtgctagaggtattcagtgtgttcttactgtacatgcatagtgtgcgcggtggacatggaggttgtggtggaaagctttatttgcttctggaacataggccttttatgtgttcctttactctatcaactacttggtgcaagatctgaaaagcttgaatggaccaggttctggtagtctatacatt

SEQ ID NO: 123720 - DNA, 295 bp, Zea mays
  Clone ID: MRT4577_44310C.1
acacaaatatacccaataccttaccaccccatgcatgccaacgtgacaactataaggcacatcaactaaaactaactagactaccctatcctagcattaaacgcaaaaatagacatattccaaacgataactgccccactgacaacacatgaaaaaataataacagctccttactactactcacgaacctcttttccataagcacataaccatacttaccgaccacataaaataatgacaaacgaaaccaccaccaattggaacggtgatgaaaaaacaaaccctaacccctacc

SEQ ID NO: 123721 - DNA, 441 bp, Zea mays
  Clone ID: MRT4577_44311C.1
ggccgcttttttttttttttttttgttttttttttttttttttttttttttttttttttttttttttttttttttttttttttttttttttggaagaaaatcacagctggggacatggttctcaaccccaagattggcccccaaattcaagggggcggacttataaaaatcccccccattccaagacccccagataaaaaggggttcccaacctacggccccaagctttgcaaaatatacggggcaaacagacccagggggcacggaagggcctctggagctggggtcgcaggcaaaaatgcatagacggcaacccctttattcaaattcttctaaaaatcaaaaaaaaaccgcttgatctcttgcgggggaggaggaaacagctcactggggccgtgggagggacgattttcaggatcatcaccccagacgggtattatc

SEQ ID NO: 123722 - DNA, 338 bp, Zea mays
  Clone ID: MRT4577_44312C.1
ctcatctgggtcaccctctccgacatgttcatcgacggggatgacccgtccaggatcgccttcaagacgcccaccgggctcggcaggacctaccccgtctccgccttcgccaaggaaggcgccaccgacacagaggccaagcccaaggacgcccccgcaactaccgtcgccgctaacggtgaggcagctgccagcaagtgaggcggcggcgacgtccggagcttttacttgtgggctactctccttactgtagtagctgtaattggtgatatttatagtgcctcctgaataacggtgtttgtacgtctactacctgcttgaatttagcgtgttttatg

SEQ ID NO: 123723 - DNA, 354 bp, Zea mays
  Clone ID: MRT4577_44313C.1
cactttgttataatatcctttactggaccgacaggggggcaaatatatatacgcgggggatcaccacacagctgtccataactgacctggccgagaacatataccttaaggggttgcatgccaatgtacataggcttaatacataccacgacaagccggacctagatcacattgggtgctacctaggatggttattactacattatcccagtggcaattacctacggcacggagcatcaatgatccttcctgctagataatgcatgcatgatgtgcgaccacatcgatgcgtctgatatatagaagcaaaattggactcttgccgaacaaatgctagagctcgtatggacacac

SEQ ID NO: 123724 - DNA, 319 bp, Zea mays
  Clone ID: MRT4577_44314C.1
gacacgcttagcctctggcacctccttctacaggactgcttttctcacatgccttaccaaaaagggtccgtaggaggagactgaatccaccaccctcacatagaggctccgactaacataacagttcctcagtcccctttaagcgcattagtcacactgcgatctatagcctattccagaccagagtcgtgatactccacatacatcaagacatatgctatcctcccactccctactctaatctactaattactcacatgcatgctgattactttgtgagtaacgcatgtctaacaccttacatgctatattttaactg

SEQ ID NO: 123725 - DNA, 719 bp, Zea mays
  unsure (1)..(719): unsure at all n locations
  Clone ID: MRT4577_44315C.1
ggggtaccctccgggctggccggggttgtgttcagttaattaattaagttgcagtagaatgtcctgacgctagttcgatccatcatgcgcatctagctatgtcccccgacgcatgtttatgcaattattctcttgcgagccgtcacatcccgccatcaacctctgacctgaccagccactagaaacggtggtggtgtgctgtctaaccgtgatcctgttaacccatgactcgcttgggtcaagatccagaacgctacaaaacgtggtgttccgtggtccacggcgaggattgtcccgctgcggcatcaagcatcacgtagtggactcggccgagtcgaaagcgaatgatcagtctttgttgactcacggggacgggaccagattttgaatctgcttggattcaactatggaattcgaggaaaaaacattgtattatatcatactagtaaattggtcacatcctgcccgactctttcaccgatatgtttttatattttaaaaatgttgttttatatatatatctctactacttattaaggctgcaataatagtcggtcattccgcgttctgccattccggttctgcattccttccgattcctcttccgccacttccattctatccccgtcagncgcgcctactaaattaaaaataacatgcccaagggatttgaccacacctctcaagcaatgctagcagtagctactactacaccacat

SEQ ID NO: 123726 - DNA, 652 bp, Zea mays
  Clone ID: MRT4577_44316C.1
cggccccatcggtctgctcatcggcggccccgaccatcgcatcaaatattttgactagagcagaggaagtgaccacggcgcaggtgctggatttgtcttccggttccgagggcgaggtgtcggcgcactcgcctgatcccaatcgcccctctcagaagccgggtgtagatcccaatcgccgggttggcgacaatggttctagcgccgtggacagcctcttcgaggaagcgggcgcggcgaggccaccgcgtcaccccaacaacgcgctgaacaaagggaaggagtctcgggtcgtcgatgtcgatgtggagagcagttatctcttctccacctctctctctaccaactaagcctatggctgtgggggataaccacgccggagaagacgacgaaccgcggctacaaccttcgtagctgaggaccccctgctctagacgcccaggcccttgacagtttgatttttgccaatgcgtgcttgtgggttaggtgggcatggatttcttagctttgaggaccgagccaaattggcctgcctttactagcaaggttttggttttcccattgtcaaggctaggcataatcttaggagttcataataaacctgatactgtagtgctttggctattaaattttaataaccatgattatagtg

SEQ ID NO: 123727 - DNA, 348 bp, Zea mays
  unsure (1)..(348): unsure at all n locations
  Clone ID: MRT4577_44317C.1
cgagagaatcgtgagcagatcgtgtgacctgtctcttattggcgtcttccgtaggcggttgcgganacggttgctgtggcctgggccggggccgttgctggctgtttgttcgttgcccatcgatacactcctcccttgccttacccgcatgcaatccgtgtgtgtgtgtgctctgcctctgctcgccggcgttggtttcgtgtgtcgcctgcctgtcgtcctcaccgcaacgctactcgttaccagctatcaactagcattgccttctccttccgctacaagaatctgacgagcccccctccctaccgtaccgcgctgttcccagctcgctcctttccaaagtgtact

SEQ ID NO: 123728 - DNA, 262 bp, Zea mays
  Clone ID: MRT4577_44318C.1
gccggccattgtggtgtaagtacaggttatcggttagcagcaccccacccttttaattctgaatgattgagtttattcgtgttgacttttatttgttcatactcgatattgaaataacaaacatgctcctcatgcccaatgtacagaatgaaatttcagatattcaacaacgactacagaagatggataccctagaaaaggagattgaatcacttcgctatgaactggacagcactgtatccgaagaagaatcttcaagtgg

SEQ ID NO: 123729 - DNA, 619 bp, Zea mays
  unsure (1)..(619): unsure at all n locations
  Clone ID: MRT4577_44319C.1
gcgagcgagtgagtcagtgaggctgggatagcagcagcagtgcgccgcactcaacttctcttcttgccgtgcggtgcggcgcggcgcggggaggcaccgcacggccgcaagcaatgccgcgccggcagaggacgcgcagcagcgaggagctcaaggcggaggacttcgtcgactcggtgctcaacttcggcggcgaggaggaggatggggaagaggagaagcaggaggccggcggggacggccagccggcggcggagttcaagtccaagaacctggaggccgagcggaagcggcgcggcaagctcaaccgcaacatcctcgcgctcagggccgtggtgccgaacatcaccaagatgagcaaggagtccaccctctcggacgctatcgacctcataaggaagctccagaaccaggtccttgagctgcagcgccagctcgccgactcgcccggagaggcctgggagaagcagggcagcgcgtcgtgctctgagtccttcactgccacggaaaacatgccgtatcagggtcagatcgagctggttcctctggggccatgcaagtaccacctcaggatcttctgcaagaaaggcnncggcnngtcttcacncaaggggtgctg

SEQ ID NO: 123730 - DNA, 260 bp, Zea mays
  Clone ID: MRT4577_4431C.1
tgagagatcgcatacgcctgcctgcccacccacctcaccttgtccttcctcgtcggaccagcgacgcggccgcccggagaccgagcgaggcatgcaacccagcaccgagaggcacggacaggaacaggaagccggagcatagatgtcgtcggtgttcagcggcgatgagacggcccccttcttcggcttcctcggcgccgccgtctccgtcgtcttctcatgcatgtgcgcctcgtacgggactgcgacgagcggcgtcg

SEQ ID NO: 123731 - DNA, 760 bp, Zea mays
  Clone ID: MRT4577_44320C.1
gccctccctcgagtttttttttttttttttttttttttttttttttttttttttttttttttttttttttttttttttttttttttttttttgggggaaaaattaacccgggaccttaaatttttttttttggggggccccccaaattttttgggggggggggccccccccccgggaaaaaaaaaacaggaaaaaccgggggaaaaccttggggggcccaattttttttaggggggaaacccaacccaaaccccgaccgaaggagggggggatttttccccctttcccggaagggggggaaacggggggggaaaaacgggaaacaaaaaggggggagggaaccccccggggctaaaaggggacccaaattttttgccctggggcggggcaccttccttggaaggcccaaaaccggtttggaccccccccccccgggtttggaagaattttccccggccaatttaagggaaaccccgggggggtttgttccccccgggggggccccaggggaaaaaaaatccccgggcccggccattgacgccccgggggggaaacccccggggggccgggttgccctgccccaagaacccggttttggcggggggaaaggcaccccccccccccgggggaaaggggcccggaaccggggagttgaaaacggaccccatccagtttttcccggggcccccaaggcaaaggtgggcccgggggggtgtgaaaaaaaggcccagggggccccccccggggccaaatttttttt

SEQ ID NO: 123732 - DNA, 217 bp, Zea mays
  Clone ID: MRT4577_44321C.1
tctgccacgcgtccgcccactcgtgctcggacgcgtggttcggatcccatacgctgtccttggttgccgactgctcgaaagccactccaaacgcccgctgccagaaccgcctaaaactgtacggctcctacagtactcgaactacggccaaggaaccaatgctacgcgctcctactggcgccgcagggcaaattggatatgctcttgagacatgatt

SEQ ID NO: 123733 - DNA, 432 bp, Zea mays
  Clone ID: MRT4577_44322C.1
tttttttttttttttttttttctggtgaatatgacaggcagacagctgtaaacactccttatggaaatggtgtgctcctcacgaagtcaaaactcatcgacggtgtatccgaaggatgatggatggattttattttgttggagttgtggccatttgcatgttcgtactgttttaatatttttaaagtggtccatgacattctttttcactgaattgtggttagcaagcaatctgcgccaccttccctagcacttcactctgtctccacacattcagtatgtaacttgtccagattcaaaacatcagcccctgtaacatatctcttaatgaagatgttgaaaaactaagtttagctcgtttgggcttcttcaatcatagctagcttgaaggagtgatacaccattttatgtgaacacaattttccctagactg

SEQ ID NO: 123734 - DNA, 963 bp, Zea mays
  Clone ID: MRT4577_44323C.1
tgccgctgctgcactgctggcgggtacccgcgcctcagagttactgatttattctcgagaatcttctactctcatctgtccccatggatgaactccaggatgttcaactcacagagattaaaccacttctaaatgataagactggtacacgaaacttccaggactttgactgtcaggaacatgacatagaaacaacacacggtgtggtccacgttaccatcagaggcctaccaaagggaaacagaccagttattctgacataccatgacattggcctcaatcataaatcctgtttcaatgcattctttaactttgaagatatgcaagagatcacccagcactttgctgtctgtcacgtggatgccccaggccagcaggaaggtgcaccctctttcccaaccgggtaccagtaccctacaatggatgagttagctgaaatgctgcctcctgttcttacccacttaagtctgaaaagcatcattgggattggagttggagctggagcttacatcctcagcagatttgcactcaatcatccggagctcgtggaaggccttgtgctcattaatgttgacccttgtgctaaaggctggattgactgggcagcttccaaactctcaggcttgacaaccaatgttgtggacattattttggctcatcacttcggtcaggaagagttgcaggccaacctggacctgattcaaacctacagactgcatattgcccaagatatcaatcaagaaaacttacagctcttcctgggttcttacaacggacgcagagacctagagattgaaagacccttgctgggccaaaatgataacaaatcgaagacattaaagtgttctactctcttggtggtaggggacagttcacctgcagttgaggctgtggttgaatgcaactctcgcctgaaccccataaatacaactttgctaaagaggcagactgtggtggactgcc

SEQ ID NO: 123735 - DNA, 223 bp, Zea mays
  Clone ID: MRT4577_44324C.1
agcagcccgcgccggctccgatcttagatccactagagactaaaatcctggtcctgggggggcgccttcatcggggagaccctcaccacctcgatcttcctctacattgccattctcaccgccacagtcgtctccaagtccacctccaactgcgccaccgatggcatccatggcatcgcctggtccttcatctgcatgatcttcgaacttgtctactgcacca

SEQ ID NO: 123736 - DNA, 622 bp, Zea mays
  Clone ID: MRT4577_44325C.1
tgaatattcagttgagccaaaaaggcaggaagaaggaggaaccatgatcagttccaagaggcttgttcagatggcgaagaagtggcaggcaacggctgccatggctaggaggcggctcacggcgacgctggcgaaagaggccgacggttcgtgcggcacgtcgatgccggtggccgtcaggggccactgcgtcgtgtactcctccgacgggacgaggttcgaggtcccgctggcgtacctcggcacggcggtgttcggcgagctcctgagcatgtcgcgggaggagttcggatttaccggcgacgatggcggcaggatcacgctgccctgcgatgccgcggtgatggagtacgcgatgtgtttgctcaggcgagacgcctccgaagaggttgtgagggcgttcttgagctccatggtcagaccctgccaccacagcgtcggtggctcggtgccaccgatgggactcgggcgccaaccagccatctgtgtatagctagctatatgattagctccatgatgtacaatattattaggtgtgtatgtatgtagccggatggaatcacaggaaatcgtacagaaggttattcgttttatatcaaaaaaaaaaaaaaaaaaactcttc

SEQ ID NO: 123737 - DNA, 372 bp, Zea mays
  Clone ID: MRT4577_44326C.1
ggtttccaatgggccactaaagaatctgtactttgcgaagaaaacatgcgtggtgtgcgtatcaatattcacgatgttacactgcacgctgatgctatccatcgtggtggtggacaaattattccaactgctcgtcgttgtttctatgcttgtttattgaccgctgctccacgtttgcttgagccagtgtacttggtcgaaattcaatgcccagacagtgctattggtggaatttacggtgtacttaatcgtcgtcgtggacacgttttcgaagaatcccaagtttctggtactccaatgttcattgtaaaggcttatttgcctgtcaacgaatcatttggttttaccgctgatttgcgaactaatactggt

SEQ ID NO: 123738 - DNA, 298 bp, Zea mays
  Clone ID: MRT4577_44327C.1
gacaagcgactttggtacaagacgcacccctagtttacggggcctcacatgactaaggcactattccgaaaataaaccacatgcctttcagaatcagcccgggggcagcattgcctgggggaccttaaacggcaggttcttgcggactaggtccggggccgttgcccgggaggggggaggtcccaacggcaaattttaacaataaaatgaaacggggaaaagccgggacatgacaattgggacccccgttttgggggttaaaccacccggttttaaggattcggcccagcgtttggga

SEQ ID NO: 123739 - DNA, 778 bp, Zea mays
  unsure (1)..(778): unsure at all n locations
  Clone ID: MRT4577_44328C.1
ctcgaggccggccgggcctggaaccgacccggcatcgtctcgcgagccgcgactcgtctcgtcgtttccatcgaacgcccagatcccacattcccacctagctctgcgcgattcatcccggccgccacgccaaggaggccctcgcctgacctcggatcaaagcctccatccgccttcatcccggccggtggttcgggccgtcacgggaggggtccgtcactggttactcggtggagagctcggggctcggctcccatctcacgattctcaccccacacgcgcaccgggtcacctcgattcggcagcctcgcgagtccttgttgcgtgggtcactgcctcactgggttctgaggcaaggaaaagaaggcttcagtagtcaggtctgggtcaagccatgatggagagatcgctgctggaggtgctggccacggcggcgcaaggagggaccgaggggacgtcagtgctgagcatgctcaagtacgccgtgctgcccatcgccaaggtggtcacagtctgcttcatggggttccttatggnctccaacttgtgttttcccttctgcttccatggcttatattttcccaattgggtagagnaatcactatcgagaagatgatacaatggtggtatattccagnaaatattgttgntggcgcagaatccggttctttgattggatttggtgtggnatctatcatcagacctccatatccatacttcaagntcactgttatccatataggaataggaaatattggaaatatacctcctggcctca

SEQ ID NO: 123740 - DNA, 264 bp, Zea mays
  unsure (1)..(264): unsure at all n locations
  Clone ID: MRT4577_44329C.1
tttgagcctgagatccttgttgatggccaggatgacattgatcgctgcgcgtgacccactganaccatgcttgctgccttctacaaggcgctcaacgagcaccatgtactactggagggtaccctactgaagcccaacaaggtgactacaggctccgactccaagaaggtgactactgaggtgattgctgagtacaccgtgcgtacccttcagaggacacttcctgctgatgatcctgccgaagtatttctctctgcaacacag

SEQ ID NO: 123741 - DNA, 253 bp, Zea mays
  Clone ID: MRT4577_4432C.1
agctttcgcctctaggtgttcattaacctgttgtatctagatttatcttgctagcatgtaggagaacgcattgacactgaagtgattaagtgagggtaactctgtttggtgccgtggtaatagttgaacattgaagcttcccggatgatatgacttcatctacccgcaactagaacattttctttttcttgaccttatttatgtgcccaccacaacttctcacaatacgatctttgtatgataacatctatag

SEQ ID NO: 123742 - DNA, 2253 bp, Zea mays
  Clone ID: MRT4577_44330C.1
cctcgaggccggccgggccggcaaaaaaaaaaaaaaaccgacccggcatcgtctcgcgagccgcgactcgtctcgtcgtttccatcgaacgcccagatcccacattcccacctagctctgcgcgattcatcccggccgccacgccaaggaggccctcgcctgacctcggatcaaagcctccatccgccttcatcccggccggtggttcgggccgtcacgggaggggtccgtcactggttactcggtggagagctcggggctcggctcccatctcacgattctcaccccacacgcgcaccgggtcacctcgattcggcagcctcgcgagtccttgttgcgtgggtcactgcctcactgggttctgaggcaaggaaaagaaggcttcagtagtcaggtctgggtcaagccatgatggagagatcgctgctggaggtgctggccacggcggcgcaaggagggaccgaggggacgtcagtgctgagcatgctcaagtacgccgtgctgcccatcgccaaggtgttcacagtctgcttcatggggttccttatggcctccaagtacgtcaacattctccagcccaacggccgcaagcttctcaatgggcttgtgttttcccttctgcttccatgccttatattttcccaattgggtagagcaatcactatcgagaagatgatacaatggtggtatattccagtaaatattgttgttggcgcagtatccggctctttgattggatttgttgtggcatctatcatcagacctccatatccatacttcaagttcactgttatccatataggaataggaaatattggaaatatacctctggtcctcattgcagcgttatgtcgtgatccttctaacccatttggcgactctgataaatgcaatcaagatgggaatgcatatatctcatttggccaatgggttggtgcaattattgtttacacatatgtattcaaaatgcttgctccaccaccaggacagacctttgatggttctgaagaggatggaatcccaatcaaggcatctggagagaatacagtgccccaagtaggaaaatatcctatgaacactaacagtagtactgtaccagagaatgaacctttgttatctgctggggaagttcaaaaggagcgtgccacttctgtaggaacaaagataatgggctatgttaaatgtgtggttaagtttctgaaagacaagcagcttctccagccaccaattattgcatctgcttttgcaattgcaatcggtgttatcccattcttgaagaattttgtacttacggatgatgctcctctgttctttttcacagacagctgcctcattcttggagaagctatgatcccatgcattttacttgctgttgggggcaatcttgtcgatggccctggtgaaggaagtaagaggcttggcgtgcgtaccactgttgctataatttttgcacggttggtcttggtccctcttgctggggttggcattaccatgttagttgataaacttggtttcattcccgaaggtgatagaatgttcaagtttgtcctgctactgcagcattctatgcccacatcagtgttgtcaggtgctgttgcaaatctgagaggttgtggaaaagaatcagctgcaattttgttctgggttcacatttttgctgtgttctccatggcgggatggattatattctatctgagtttgctcttctaagtatgtcacgccctgctaccacaacaatctgcaatttgtgcccgcattccagcctgtcagatgtaactgcattttcttgctagataatgttacttgatctgatttcagtcagctggttcagatgccttactgcgcaggaatatctttgagatcaaatatggtccaaaacgttgaggaagaaaccagtatcatgaactgtacagatatatcgttgcagaggtacaagtgtatctgtacagatatatggatacggtccctcctataatcccatattaccgtggtctcctgctgctacaagccgtgagcgatgggaacactttccctttccctccacgtatcaacaggttcacacccaaccctagattgggatgctggccttcttagttctccataatattatttcatttgtacttcctgtatattgtaaaccttgagatggctgtgttcaaatagtttcttattgggcgagggctgaagtagtagtatagatgtattatactacctatttgagtgttcggttatgccgcaaatgatgctttattt

SEQ ID NO: 123743 - DNA, 468 bp, Zea mays
  Clone ID: MRT4577_44331C.1
gtctgtgtatactgtgtaaaggtcctaaaggaaagagaagatgcacatattcaaagccaaaaaaaaaaaaaaaaaaaaaaaaaaaaaaaaaaaaaaaaaaaaaaaaaaaaaaaaaaaaaaaaaaaaaaaaaaaaaaaaacaaactttttctccgttgggatatctcccactaattaatcatcatgggggggggcccttttaagggtccaaattttcctcccgggggctgccaacaaattattttttttttgggggcccttaattcaattcaagggcccctattttaacacggttaggacgggaaaacccgggggttaccccaatttatccgctgggaaaaaatcccccttttccccagggggggaaaaagaaaaagggcccccccgaacggcccttccaaaaatttgcgccccttaaatggcattgggacccccccctttcagggccattttagccggggggtttggg

SEQ ID NO: 123744 - DNA, 306 bp, Zea mays
  Clone ID: MRT4577_44332C.1
gtcttttctgctctcacccccttgcaggcagcgattgtacaccgatcgagcgggtgcgtgctgcatggaaactgccgacgtctcccacgcacaagccggccgccatatcatgctggcccgagacaagggctagtagagcctgcacacagctcaactagggcctagacaatcgctgttccacggcaggaagcgacacactggtgctcgtacacgcccagacgccgagcccatgctacgccgccatggacagagcaaggaacatgatgacctcaaacgtgctggcaagagactagaggcacgcctact

SEQ ID NO: 123745 - DNA, 157 bp, Zea mays
  Clone ID: MRT4577_44333C.1
gacatcaaaccctttgcggaacaagggccaatgggacttttgtaagtttctgacttgatggactacacgacaagacacacggctgtttattatgtcacctgctaaagtgacacctggtacacggaaaaggcaaactccgagtgcctatggttcatta

SEQ ID NO: 123746 - DNA, 300 bp, Zea mays
  Clone ID: MRT4577_44334C.1
gtgatctaattcgacaaacgggacctattattaattaccgtgggtatcaatcacacttattccagatggccaccagggctccgatgaagttccttattgcccacggccacggccgggaactacttaatgtttgctccaccatgctatattaaacccctgtgcaaccacttcatccccaaaaatcaagtaaaacgcataattggtgtttcgtgtgtcttgaaactgtgggaacatctatcggagtgggccttgtactgttccatagacctcttaaatttggatccacggtttgccccatga

SEQ ID NO: 123747 - DNA, 452 bp, Zea mays
  Clone ID: MRT4577_44335C.1
cctcgaggccggccgggaaacccgttccccaatccaaaccagacaagaaaggaatcccccgatgggtcatcgagttctcctcctcctctctctcgcgtccgtcgccgcggttgccgccgccgtacgacgcggaggacccgatgattcggcaggtggatcccgatggagatcacatacgatctggagctgaacgcggagtcccacttcctgagcttcgtgcagcgattcggcaaggcctacatatggactgccgtacgagcacgcgttaccggttgtccgtgtttcaggacttccagcgaagcgcgcggcgtaaccagatggaggcgctcctgacgtggagaggaatcactgcagagggccaaggagtgaaggttgaatcctcagaagtatccttcagccccaactccagatgttgctgaagcacaggccccagttgctgaggaggaccacga

SEQ ID NO: 123748 - DNA, 760 bp, Zea mays
  Clone ID: MRT4577_44336C.1
gtccaaaaccctagccctcgcgccgccgcctccttcgccacccagcgctcgagctcctcgctccctgcgagcgcgcgccgcaacgccaccatgaagttcaacatcgcgaacccttccaccgggtgccaaaagaagctggaaatcgatgacgaccagaagctgcgtgccttttatgaccgaaggatatcccaggaggtcagtggtgatgctctgggtgaggagttcaagggttatgtcttcaagatcatgggtggatgtgacaagcaaggcttcccaatgaagcaaggagttttgacttctggtcgtgttcgtcttctgctccatagggggactccctgcttccgtggttatggcaggcgtaatggtgagcgcaggaggaagtctgtccgtggttgcatcgtgagccaagacctatctgttatcaacttggtgattgtgaagaagggtgagaatgatctgcctggtctgactgacactgagaagccaaggatgaggggtcccaagagggcctccaagatcagaaagctgttcaaccttaacaaggatgatgatgtacgcaagtacgtgaacacataccgcaggacattcactaccagaggctgaaggaacagagagaccgccggagcgagagcttggccaagaggaggtccaagctttctgccgccgccaaggcttctgctgccacctctgcttaagaatgttccagtgttttgggaatctttgaaaggcctatcttgtaacggcaaaaaaggtttttggg

SEQ ID NO: 123749 - DNA, 610 bp, Zea mays
  Clone ID: MRT4577_44337C.1
attatcctgtacactactagagctactatctagactataactttcgcatagacctatgtgatgctagacaatagatggtacctcaagcgttatgaagtcgtcgctgataggtcgatctacccgccgctagacacagatgtgatgggcagactgagggatagctccgctcgacggtgtctcgcccaagatacctccccaccagcacgtacgaaaaaacatcgaatgacctgaggccgtcttacaaggattttcacgtgaccatcagccgcaacaagagcagcgaagaggacaagatgatggccttcagcgagatccagctatccgacagccttcagcgacccactacgccggcgacctacacggtgccggactgtcacgctgacatactcctagccgactgtcaagatcacttggccatgtgaggaggcgaacgagatcgcggccggtggcaggacgtaccttcgtgggcgtgctgtcaagaaggctaccagtccgcgccgagcgcgtacgcgttcctctggtccgcgatcaagatgcacttgttagaccacttccaccacgcaccgctgtggatgccgcaacaccagccgatgcctcgagacagcaaggc

SEQ ID NO: 123750 - DNA, 545 bp, Zea mays
  Clone ID: MRT4577_44338C.1
ggaccctcgaggccggccgggggtagcgttgagacgagccgtttaaataggtgtcaagtggaagtgcagtgatgtatgcagctgaggcatcctaacgaacgaacgatttgaacctcgtccaaaaccctagccctcgcgccgccgcctccttcgccacccagcgctcgagctcctcgctccctgcgagcgcgcgccgcaacgccaccatgaagttcaacatcgcgaacccttccaccgggtgccaaaagaagctggaaatcgatgacgaccagaagctacgtgccttttatgaccgaaggatatcccaggaggtcagtggtgatgctctgggtgaggagttcaagggttatggcttccagatcatgggtggatgggacaagcaaggcttcccaatgaagcaaggaggtttgacttctgggcgtggtcggcttctggtccataagggcactccctgcttccgtgggtatggcaagcggaatggtgaacgcaagaagaaatctggccgtgggtggatcgtgaggcaagaactatctggtatccacttg

SEQ ID NO: 123751 - DNA, 1289 bp, Zea mays
  Clone ID: MRT4577_44339C.1
cattgggtacctcgaggccggccggggttcgtgcggcgcccgctcctcctagcctccccgcaacttatataaaaaccaatcgtctgtcctctctgccctctcgtccaaaaccctagccctcgcgccgccgcctccttcgccacccagcgctcgagctcctcgctccctgcgagcgcgcgccgcaacgccaccatgaagttcaacatcgcgaacccttccaccgggtgccaaaagaagctggaaatcgatgacgaccagaagctgcgtgccttttatgaccgaaggatatcccaggaggtcagtggtgatgctctgggtgaggagttcaagggttatgtcttcaagatcatgggtggatgtgacaagcaaggcttcccaatgaagcaaggagttttgacttctggtcgtgttcgtcttctgctccataggggcactccctgcttccgtggttatggcaggcgtaatggtgagcgcaggaggaagtctgtccgtggttgcatcgtgagccaagacctatctgttatcaacttggtgattgtgaagaagggtgagaatgatctgcctggtttgacggacactgagaagccaaggatgaggggtcccaagagggcctccaagatcagaaagctgttcaaccttaacaaggatgatgatgtacgcaagtacgtgaacacataccgcaggacattcactaccaagaacggcaagaaggtcagcaaggcacctaagatccaacggcttgtgacacccttgaccctccagaggaagcgtgctagaatcgctgacaagaagaagaggataactaagaagaagtctgaggctgctgagtaccagaagcttcttgcccagaggctgaaggaacagagggaccgccggagcgagagcttggccaagaggaggtccaagctttctgccgccgccaaggcttctgctgccacctctgcttaagaatgttcagtgttttgggatctttgtaaggtctatcttgtaacggcaaaagtgttttgggatctttgtaagctccatagttcacatcactcaagtgtttctgctagtagtggatccacaactatttgcttgcttggctctgagtcacacctgaccgatcaatgcaggtgtcactttgcttttaactgtttacatataaagagtcgagtttcgcacgtgaccacctgggtcctgattaatctacccaaatagctacgttgggtttagatgcttaggctttcttgtaaattgttttcttaaaacttgttttgtttcctaaaaaaaaaaaaaaaaaagcggcc

SEQ ID NO: 123752 - DNA, 232 bp, Zea mays
  Clone ID: MRT4577_4433C.1
cacgcttgccctgttgtttgctataagggttacgcatggtcgaaatcaccgctgatggactggagccacgagactagcgaaggacctgatgtacgcactggggtaggtgcacaggtcctctccgacgtgcactgtctcatggttcttctccaggatcaccgacccacgctcgtatttcgagaggaccagatcacctaaagtgcgacctctactattacaggacaaatgtatt

SEQ ID NO: 123753 - DNA, 190 bp, Zea mays
  Clone ID: MRT4577_44340C.1
attgtcatcaaatctacttttttttgttttctttttctttcttttcttggtggcaaaaagggaacccaagtcttccaaccattttgcccattaacgcctatttactggggttttttggataaaaacaggttttcttcatttatccaatgatgaccaacttgaccaaaattgggatttgatgtatgagggg

SEQ ID NO: 123754 - DNA, 1362 bp, Zea mays
  Clone ID: MRT4577_44341C.1
gcacgaggaacggtcaaggtcgatcctcgcaacagtgccgtgcggcgcccgctcctcctaccctcgcccgccctatataagcgctactcgtgttttccctcttccccctcgtccaaaaccctagccctcgcgccgccgccgccgtgcccagcgctcgagctcctcgcctgccgcgagctcgcgccgcaacgccaccatgaagttcaacatcgcgaacccgtctaccgggtgccagaagaagctggaaatcgatgacgaccagaaactacgtgccttttatgaccgaaggatctcccaggaggtcagtggtgatgctctgggtgaggagtttaagggttatgtcttcaagatcatgggtggatgtgacaaacaaggcttcccaatgaagcaaggagttctgacttctggtcgtgtccgccttctgctccacagaggcactccctgcttccgcggttatggcaggcgtaatggtgagcgcaggaggaagtctgtccgtggttgtattgtgagccaagacctatctgttatcaacttggtaattgttaagaagggtgagaacgatctgcctggtttaactgacactgagaagccaaggatgaggggtcccaaaagggcctccaagatcaggaagctgttcaatcttgcaaaggatgacgacgtgcgcaagtacgtgaacacgtaccgcaggacattcactaccaagaatggcaagaaggtgagcaaggcacctaagatccagcggcttgtgacccccttgaccctccagaggaagcgtgctagaattgctgacaagaagaagaggatcgctaagaagaagtctgaggctgctgagtaccagaagcttcttgcccagaggctgaaagaacagagggaccgccgcagtgagagcttggccaagaggaggtctaagctttctgccgccgccaaggcttctgctgccacctctgcctaagaatgatcagtgctttgagatgttttcaaggcctattttgttacagcttataagtaccttatgctgccctggctgtgttgcatcagtcgaccctccctacttagacttatgagtaattgttgcaattttgtatggacatggtactggcttgtcgggattttttgagtaccagaggtttgatatgttgttttattctgtgaacgtcagctagccttgttcttttgtctgcaaaaaaaaaaaaaaaaaatcacgatcacacaccactccacagcagtagcaagagggatagagcaaggccacacacacacacaccactagtaggctagcctagccttttagtcgtcgaggaggagcaagaagggcgcgcacgcaagcaggcaagcaaaaagagagccgatcgaccgagagct

SEQ ID NO: 123755 - DNA, 187 bp, Zea mays
  Clone ID: MRT4577_44342C.1
tctcggcgtggactgctcccacgatcctgcgtctcgctgagatcgagcgatcaccgcgttcttacccgatggacacctttttcaggacgaggtctcgcttatgggcatgcgcataggcagcgacctgtgagagtgccacctgcatgtacatacaggggggggggggagagagacaatgaaggtgcga

SEQ ID NO: 123756 - DNA, 1960 bp, Zea mays
  Clone ID: MRT4577_44343C.1
ccgggcttcgtaatactaatacctaaaaaaaaaaaaaaaaaaaaaaaaaaaaaaaaaaaaaaaaaaaaaaaaaaaaaaaaaaaaaaaaaaaaaagcctcgtccaaaaccctagcccttgcgccgccgcctcctccgccacccagcgctcgagctcctcgcgtcctgcgagcgcgcgccgcaacgccaccatgaagttcaacatcgcgaacccttccaccgggtgccaaaagaagctggaaatcgatgacgaccagaagctgcgtgccttttatgaccgaaggatatcccaggaggtcagtggtgatgctctgggtgaggagttcaagggttatgtcttcaagatcatgggtggatgtgacaagcaaggcttcccaatgaagcaaggagttttgacttctggtcgtgttcgtcttctgctccataggggcactccctgcttccgtggttatggcaggcgtaatggtgagcgcaggaggaagtctgtccgtggttgcatcgtgagccaagacctatctgttatcaacttggtgattgtgaagaagggtgagaatgatctgcctggtctgactgacactgagaagccaaggatgaggggtcccaagagggcctccaagatcagaaagctgttcaaccttaacaaggatgatgatgtacgcaagtacgtgaacacataccgcaggacattcactaccaagaacggcaagaaggtcagcaaggcacctaagatccaacggcttgtgacacccttgaccctccagaggaagcgtgctagaatcgctgacaagaagaagaggataactaagaagaagtctgaggctgctgagtaccagaagcttcttgcccagaggctgaaggaacagagggaccgccggagcgagagcttggccaagaggaggtccaagctttctgccgccgtcaaggcttctgctgccacctctgcttaagaatattcagtgttttgggatctttgtaaggtctatctcgttacagcgaaagtgcctctctacttagatttatgagtaattgttgcttttttgtatgaacatggtaatggcttgtcggggtaccagaggtttactatgttggtttatgctgtgaacgtaagcgagccatattctttggtatgcagtctgaaccaacatagtaaacctctggtaccccgacaagccattaccatgttcatacaaaaaagcaacaattactcataaatctaagtagagaggcactttcgctgtaaagagatagaccttacaaagatcccaaagcactgaatattcttaagcagaggtggcagcagaagccttgacggcggcagaaagcttggacctcctcttggccaagctctcgctccggcggtccctctgttccttcagcctctgggcaagaagcttctggtactcagcagcctcagacttcttcttagttatcctcttcttcttgtcagcgattctagcacgcttcctctggagggtcaagggtgtcacaagccgttggatcttaggtgccttgctgaccttcttgccgttcttggtagtgaatgtcctgcggtatgtgttcacgtacttgcgtacatcatcatccttgttaaggttgaacagctttctgatcttggaggccctcttgggacccctcatccttggcttctcagtgtcagtcagaccaggcagatcattctcacccttcttcacaatcaccaagttgataacagataggtcttggctcacgatgcaaccactgacctcctgggatatccttcggtcataaaaggcacgcagcttctggtcgtcatcgatttccagcttcttttggcacccggtggaagggttcgcgatgttgaacttcatggtggcgttgcggcgcgcgctcgcaggacgcgaggagctcgagcgctgggtggcggaggaggcggcggcgcaagggctagggattggaccccggccggcctcgagggtcccaatg

SEQ ID NO: 123757 - DNA, 438 bp, Zea mays
  Clone ID: MRT4577_44344C.1
cttactcctctcagtcgtggtctcgtgccctacttatcccttcgcgagccaacgaggccctgcgtccctgaactagggtttaggccccaggtccatggaattcagggcagatggcttcgggtggccgccaccgcaaggcaatgtcgccgaatcattgccgccgccgatgggagaccgcggggaggtcgcctcgtcccacttcgattcgtctcgcgccctaagattgatgagagaacttgacacaaatgtcacagaagatttgactacgttgatgccaaatttgttgtcatgtttgaagcatgatgatcctgcgattgttaagcaagctatagccaatggaacaaatttatttgttgttgtattgtaagagatgaaactacatgtggttatttgcaaacagatatttattaatgaataaatccgctattgttgtaacgt

SEQ ID NO: 123758 - DNA, 392 bp, Zea mays
  Clone ID: MRT4577_44345C.1
aaaaaacccaaccataatttggggtaaattgggggcaacataaaacacagggggtgggggttttttaaatccggggcctaaatgaacagattaaaaagggggcggaaaatctttccaaaaaataaccaaaataccccaggggctgggatttacgttttattagcttataactcgaccccgaattttacattaaaaccctttgggacatttattcacacccaataagggatttgagtaaagggggactagggcccagttttaaaagggtaaaaacggggccccatatttgggcgaccaattttggggaaggaaaaaacctgcccccgcaagggggggaaatagcgccttttttcagaaccagaaattaaaaaacccgaaagagagagagactt

SEQ ID NO: 123759 - DNA, 367 bp, Zea mays
  Clone ID: MRT4577_44346C.1
tctttgacgcgtgggcggacgcgcgcgctgacgcacacagaatcgaacgggcggtgagagaggaacgacaaaatagcaagacagagaaaaaggatcgggataccatgcccattctaaccgatcacaacttgtcaagtaaaagcgctagcctaggagggaaaaggcccattgtaacaagctctacacgtgagaaagagagagagagagaaacttaggcaactgctagcagagagggaggtcacagtaaacagcatacgctgctagaggaggaccagacatcatacccaagagatggtcaccacatgatatcagatgatacagacactcatgcgactatagatttatgtagatctacaggtataaatgc

SEQ ID NO: 123760 - DNA, 726 bp, Zea mays
  Clone ID: MRT4577_44347C.1
tccatgtctcactgtgaaatagaaagcattggatcttcccttgctgcatgtgtggaactgaaggaacttcggcttgctcacaataagatcactacgattccatcagacttggccaaaaataccaaaatcttgaaccttgacttgggaaataacttgattgagagggagtcagatctgaaggtcctttctgaactgcgctacttgaggaacctaaatttgcagggaaatcctattgctgagaaaggcaccctagctaaaaaggtcatgaaaattgtgccgaacttgcgcattttcaatgcaaagcccatagaagccatttcccagaatgagaactctggaaagggagtaagctgaagaaggatgaagagatgcctgatcgtgaccccatcgattctaatacgaaaaaggagaaaaggaaacggtcaaagcaacaagtgcaaagccctgaagaacctgctgccaaagacattcctccagctgccaccattgatgccccagttaaatccgcattgtcggatagtaagaaaaagaaaaaggagaaggtagtcacggagcaggacaagagcagcaaaacgaaaatcaaggattataaagcttctttcgatgataccgaattaaaggccaagaaggaatccaagaagaagaaatctgccaacaaagaagataaggatgcgggaggaatcgatgacacggaggtgtcgtttgcagagttgatgttttctggag

SEQ ID NO: 123761 - DNA, 494 bp, Zea mays
  Clone ID: MRT4577_44348C.1
tgggtccctcgagccgccggacactgcctcccgttcccaggcctattctcctccgtttgtcgtgttcttattcacgagccgtactgcaagaggttggtagagcgagcagaagaagggatgagacgccggagagcttcctgttacctcggagtccgtgaacgatggggcacccagacatgctgggcgaccaggtgtctgacgcggagctggacgcctggctgacgcaggacgccctcagaggagagcatccgctagatctgcaccatgactactatggccgtggcggtcgccctatagaaggaggagtgttagcgttgactatcagaatatctggcgcaacacctgccgctagatcgaaggttacgttctacgaccaagattcatgatgccgacctttgcaaggtggtgaggatattcgtggacattcgcaccgacatagggcgcccagcacttcagatctgaacagtacttttgattgtcctggccctacttag

SEQ ID NO: 123762 - DNA, 584 bp, Zea mays
  unsure (1)..(584): unsure at all n locations
  Clone ID: MRT4577_44349C.1
gtacntcctcgagcgccggcccgggaaaagttgatcgcatcctcgcttcgcgcgaaagcgacgcttcgacttgctgtcgcgggtcggaagtgacgtatgtggactgaacatgagtgccgcgcaggggtttgttgtttgtttgtttgcttgatcggtgaccgaatcgccagttgtacttctgcttaatacgcgcttatacatcgcctgagtaaacagcaataagaggcacatccgtaagcgtctttccgtgagtggctccccggacttccctccccttcttcccttcaatccccacaggcacataccaaaggactcaaatcaatgacgcaacctcatcaccccgagaacctttcgctgctcgcgaagatccaagtgatgcaccgacggcgaagccttattggccggcgaagctggctcctcacgacactacgccagtaccactatgcaggctttctccgcgtcgccttcggactactccgggaaatgctccgatataacgtgtgctcgcgcattgcaatcgtcttatgtcatcctgctctgctaaacgtgaataactttgagaacggtcttaaacaactttctat

SEQ ID NO: 123763 - DNA, 349 bp, Zea mays
  Clone ID: MRT4577_4434C.1
gaccaggcgtccgaaaaaacattaacaaataattttcatttttaccaacaatcaatcccaggggcgagcaagatattttccgtccttatgctccacgctacatctgcatgtgaagctaacccaacaattatagctcaatgctcacaagcttatatagaatcccttattcccccataccttgcatcaacgattgcttcaccctatgaaaacccacctcttaaaccctataggctccaacaagcaataccatcaggcaacatacctccatcaccttcgataaacaatcatcagtcctatccatcttgcaaccatagctacaaaacatcatggcacaacaaatgcaccaact

SEQ ID NO: 123764 - DNA, 177 bp, Zea mays
  Clone ID: MRT4577_44350C.1
gcggccactagcccacacgtagtccatgcaaataagaagacatcagccgacaacgcagaggcttcctatgccaacaaaatccaggacgacttctggtcgacgctacgcgatggcattaaagctacacacctccacacgtgcaacgagttctggcccctctctcaacatcccaacctg

SEQ ID NO: 123765 - DNA, 628 bp, Zea mays
  Clone ID: MRT4577_44351C.1
tctttttttactggtttctgatgagagggttcgcagtgaaatgccccaggccacttggatgttatttgaacaatctccagaaagcagcatctacttcacatcagaatatctacctgttgaaaaccaacacagcattgacagagccagagaatggcaccagcaaaagcttcagcaaaatacttcgagctcgttagagacagtgaagaaagctaaaaagaaaaggaagaacaagaaatcagcaatggcgagcaaagaaatacctgaacaaggtggtccgaatgttgaagatgtggttgttgctgtcagtatcagtgctgagcttcgaaatgaaggtcaaccaacaacaacaagggagatggacaatcctaaacaaggtggtctgaatgttgaagatgtggttgctgctgttagtgtcagtgatgaaccaacaagggagatatttaactaatcaaacttacaagacctaatgtagcagatcctcatcctaaatatttgtattttttgttcagcatttctgcagatttgaaggaagcggctgttaagtatctgacaatgaacggattggactctgttgatgttgagttgaaaataatcggtctccctgagccgaaaaaaaaaaaaaaaaaaa

SEQ ID NO: 123766 - DNA, 798 bp, Zea mays
  Clone ID: MRT4577_44352C.1
actcctatgggcgattgggttcctcgaggccggccgggatccacactttcaacactcaaacgatctattccacgtctttggctaacgccccttgttgtaaccactactacttttaactccttaatcaataacccacattcacaatggctggcggcgatatcaagaagggtgccaaccttttcaagacccgatgtgctcagtgccacaccgttgagaaggatggtggcaacaagatcggacctgctctgcacggtctctggggccgcaagaccggttccgtcgagggttactcttacaccgatgccaacaagcagaagggtattgagtggaacgacgacactctcttcgagtacctcgagaaccccaagaagtacatccccggtaccaagatggccttcggtggcctgaagaaggctaaggaccgcaacgacctcattgcctacctcaaggactccaccaaataagcgactacaaatcgcgtgtaatgttacgactttcgatagatgggaaccgccaaggggcgactgtactatagatttttacacagcacttgttaagacatgccacgtgctttatccattcctatctcctctttatgcgtcttccgttccatacacttttttggtctttttcacccccgaagaagagcctggcgttggtgacatgcggaaaaacaggaatgacatgagaccaaatttaaacgtgtccgcatcattggccaatttttgttagagatgaaaagcataacatattcttttttccccctaaaaaaaaaaaaaaaaaaaaaaacccgcggcc

SEQ ID NO: 123767 - DNA, 1501 bp, Zea mays
  Clone ID: MRT4577_44353C.1
tgggaccctcgaggccggccgggaaagaatttgccccgacctaccattggcatttttgtggatcaccgccacgggtacgtatgagtggcgacacggagcgtcgtcgctccgccactgggcgtaagtcaactgtgtcgaggtacaaggtggtgaagttcgaccttagcaagacgattcagtccgagaagttcgaagataggcgtacctggggcatcttcgttgaaggtcggaacgcggtttcgattttggtggccattaacaatgtatccacattcattcatggccgtaatttagattggcgatgtgtggatacatttgatgagcaatacatgaaagataagatccgtagtttgatcacagataggcagcgactatcacagatacacaaggaagtacaaagtatccctggagatgacatgaaagcattttttgatgtgattagtaacattcgcaaattcacactctgtccacgtttggctggcccatcagcttttgaagtgaatcaaccatatatgctactttgtcatctttttacccctgtgtttcatggttgggttgtaagccctgaattgagcagctatgatgcaattaaagggttcactcgtgatgagttgatacactattgcaacgctctgatagccttagagggtgagtcagacaatgtgagagtgattcgagacttattgaatgattcagatcagctgctgactgcttatggctttgattgcctggttcaggagatgagagatgacaagtttggattaattttttggcgtagcagatatgatgtagttcataagcatgacggagatctttttttactggtttctgatgagagggttcgcaatgaaatgccccaggccacttggatgttatttgaacaatctccagaaagcagcatctacttcacatcagaatatctacctgttgaaaaccaacacagcattgacagagccagagaatggccccagcaaaagcttcagcaaaagacttcgagctcgttagagacagtgaagaaagctaaaaagaaaaggaacaacattcatcatcaatcgactataaactcttggttttagattttagacagtgaagaaagctaaaaagaaaaggaagaacaagaaatcagcaatggcgagcaaagaaatacctgaacaaggtggtccgaatgttgaagatgtggttgttgctgtcagtatcagtgctgagcttcgaaatgaaggtcaaccaacaacaacaagggagatggacaatcctaaacaaggtggtctgaatgttgaagatgtggttgctgctgttagtgtcagtgatgaaccaacaagggagatatttaactaatcaaacttacaagacctaatgtagcagatcctcatcctaaatatttgtatttgttggtcagcatttctgcagatttgaaggaagcggctgttaagtatctgacaatgaacggattggactttgttgatgtcgagttgaaaataatcggtctccctaccgaaaagtt

SEQ ID NO: 123768 - DNA, 737 bp, Zea mays
  Clone ID: MRT4577_44354C.1
cattgggtacctcgaggccggccgggatcgcttccgtgaagctcgagccccatcgacccccgactaaccggcgcttgggcgtagcagttccgaccgctccccccgtgggccgccgtcgccccaccgtctccatgtcagttttcagcgctatccaccatgccctccttcgcccgtcagctcgctgagcagacctcccagataagcaagccctgccgccgtccccggaagccgttgctgcatcgccctcggcaaaggatgtgccgctcctacccgacgcgggaatgcggcactgggccgcgtgcgggcggtttgcgcagtgcagcgggtccttccgcggtgaagtcgaccgggccaccgccgaggccttcctcctcacgaggctcccagtgatcctcctccgctacctcgggttcgccatcctatatgatactgaaagcaatattggaattgcgtgatccggtaactcagcgtcatctggataatctactcaaatgtatttcttaagtcatgcaaattggaattgtttttttaatcttcttatatgtaggtaataaccttcatctcctaagtcaaattgaaggcgttgaccttgatacatacaaagaaattgtttttcttaagtaagatgattatgataaattagattgttcaatgtattgcaagaaaattaatgtatttaaactgtataaagcgatcacgactcgcgcaagccgcgagcacgacactagtgacacatg

SEQ ID NO: 123769 - DNA, 303 bp, Zea mays
  unsure (1)..(303): unsure at all n locations
  Clone ID: MRT4577_44355C.1
aacccggttcgacccacgcgcccgttactttgagccccccgnggaaaacnaaacaaccgggngtatgaagagacctaccccaggaacagcccaacattggggcattcaataaagagagctaaggaagccagcagaaacgcacaaggggaactgccccatagaaaaaaaggaagacaggcgaacattctgatgaccatgactgcgactagggatagcaggagaatcctgctggcctgaagacccggtgtaaacggctgctgaaaatcagaatcaacggagaaaaaaaggaaagaaaaaacaccc

SEQ ID NO: 123770 - DNA, 149 bp, Zea mays
  Clone ID: MRT4577_44356C.1
agcgcggtcgaagtacttttttttttttctggccctagggaaggcgaaatcttccatatctccacaaaacagtaatcgcgtttttgattcatcctgggtattggcaagcgtcagcatatgaataattctcgccttactacatcaacacc

SEQ ID NO: 123771 - DNA, 437 bp, Zea mays
  Clone ID: MRT4577_44357C.1
aaaaaaaatatgtcatcattattatagggggaccatttgtataaaagctagcaaaggggggggggaaacatttttggataaagcaaccaactgcaacatgggggaacaaaaaaaaaaagagggcccactgttacaatcacacttagggaagcgcaacaaaaatggacgggggcctaataatcctttaggtatgggagacgggggaccagtctaatttttttccactttttttaaaacccgagccccaaatggcgccctttggggcctgggcctaaagctccttaagggctttttcctaatttttttttttcggaaaatatgcaagatccgtctggtcgaactcctttttgggggcctggggcgccttaaggggttgggccttccctccttgtttaaacagggccgggggggggggataagcacgccgggaccgaaac

SEQ ID NO: 123772 - DNA, 400 bp, Zea mays
  Clone ID: MRT4577_44358C.1
gtacgtaagctcggaattcggctcgagacttgctcaagctcgatgtcttccgcaagaccaccagccaccggatcagggcgctcttgaacgacaccaagcgtgggaccgacaaccccatcagatacatgcacgggggagctcaacgagctcaagatcgagaactttcagaggctcaagaagagccagggctgctcaaagagggagaacgagcgccagatggagcacaccagggtatgcgcggaggaccatgatgggcgaggatcccgcggcttaagaggggtagcgtccgcgggggctgcgggaaacctgatagatgctggtggcgctacagacaacaacatgagcttatgaccactaatgtgcatggccatccacgcacgcaatggaggcagaaacaata

SEQ ID NO: 123773 - DNA, 247 bp, Zea mays
  Clone ID: MRT4577_44359C.1
cacatatgatttatctgaattcaaccctactggtgtaccatctataaatcctgtaacatccagattctgctgccataacttgaatttcttatttaatcctgattgactttctgcaatcaatacttgactgttttccaaaaggcattccccaagggtttttcctatgtttgccccgtttgattttttacgttagcaaaacccaaaggtctgggcttcaagttgactattactgcagttgtattcttat

SEQ ID NO: 123774 - DNA, 216 bp, Zea mays
  Clone ID: MRT4577_4435C.1
acgccaaggactctgatcatgcaccatcttcttctgcaaacaccaagagcaatgggtggtgagacatcatagttttgggatctaaattggtcacttgcccttgattccatcataatgacagacatctaaacaccatccaactaatatctcgaaactaacatcatccaaagaaataatatggatggagacatagatgtctcaaattataaaaaaaca

SEQ ID NO: 123775 - DNA, 792 bp, Zea mays
  Clone ID: MRT4577_44360C.1
gaaatcttcggtgagcaattcctccaggagctagtcctctcatgatcccaagaagcaggtttttcttggccagcagttcctctaacgagctggtcctctcatgttcgccaacaactactggtttggtgttttctgtggagaccgaggcttcttcatgctggttactcatatctctatttgctgagggaacatctggcctatctttcttgtcgaagttgctgttcctcgatgtcatggcgttttgagcattggagaatctattgtctgaatccatccgatcaaaggtacattgtccatggcccctgtgttccgagtctgtctccgcttcagagtccaccgtggttaatgcgtccacgtagacatccaattcggagttgtagcccttgctgcttccagctgaccgagcatctgaagaacgtgacagtgcttcttcagaaactggtctgttcttgcgaacggcgaccttgcctttgcccatgttgacggacgtgtctaccatggtatctctctcttcagtatccgattcaggtgaaccattcacagatatacgcacttttgagtggccacctgtgacgagtttctcctctgacgaaggcttttcatacagattcagcataagtggtctgaagctttggaatacagatccatttagttggcggtacttcagccgtctgcggtttgtgggcacttcatccatagcttcagcagatgggatcagtctccagcctacagagatggacagaataacgcttttaggataagcaagcagaacgacagcatactggtacaggc

SEQ ID NO: 123776 - DNA, 370 bp, Zea mays
  Clone ID: MRT4577_44361C.1
cccagcgtccgcggccgcgtgggcggacgcgtgggtaaaaaaaaaaaaaaaaaaaaaaaaaaaaaaaaaaaaaaaaggggggcgcgccgcttctgagagtgatccaattcttacgctccgtcgcttcatgacgacgataatatgttcttttaataggggccacactaaatatcaatttagctgcgccgtcttttttaacagacgtggatgactgagaaaacaaccctggtcgtctacccataattaatcgttcgttgcagaacactccctctttttcggcatggtggtcataatagacgaagaggccccccaccgatcgctcctctaccaacatgttgcgcatccattaatggaataatgaggaccccct

SEQ ID NO: 123777 - DNA, 351 bp, Zea mays
  Clone ID: MRT4577_44362C.1
tggttcgtgccctgctcgcgctcgcctgtatctgccattgctggcgtgttgctgttcctgacgacaccttctctttttcttctttactgctactgctacccgcgtgatacgcctcttgcctagctgatccacatggtttaactgatagacatcccgtatacgtcaccagacaacactgctgctagttaatttctccggggcatagggtgccaagccagtaacgccgggtaacttcaaccttgtacttgtcctgagcagctcacccttgccgtttaggcaatacacttcaacattactgtcaaggaaacaacaaaattaaaaaaagatggcgtatcggggcggtctgtttgc

SEQ ID NO: 123778 - DNA, 219 bp, Zea mays
  Clone ID: MRT4577_44363C.1
ttttcccgccgacggacggtcaaagacgcaaacctgcgacgaccgagccgaccccaccgaagctcacccgttaccacaggggtccgacacgctagtcgagccggactacgtacactccatggcctaagccacgggcttcgaagccttctaggccctaaccgtccccgcgaacgtacaccactgtcgtcaaagccgttccttacccaagactgtccccgc

SEQ ID NO: 123779 - DNA, 685 bp, Zea mays
  Clone ID: MRT4577_44364C.1
actctcagtcgaaaaccgccgccgctcccctcttcaccggagacccattttccggcgcggccgctgcttcccgcaacatcgagctccccgcctcgccaaaccaccccagcggcctcgttcgcgctttcctcctcgtgcagtaccggaggcaaccagcgcgcgatggaccctggttcttcccccgggacattccgccgtcctggcttgccgtcgccccagctcctcgtatgaactgggagagttcccgttttcccactcgtctacgtactgcagaatagatctgaggaggtatcaatgtctttgctaactgatgacctggttgtggagattttgtctcggtaccgctgaagtccttttgtcgcttcaaatgtgtctgcaagtcttggcatgccttgtcatctgatccacactaccgcaagaagttcccaagaactcccgttggtctcttctaccaaatacctgagtaccacactggtatcgatctcgttaggcttccctcaagtgacaaagaaattgacacaacacttagctttgtgccatgttatgaggacctacagcttatggattgcagcaatggcctacttctttgttatcaaggtggtattagaatgtattttgcagatatatcccacgttattgtgtgcaatccggcaactccaagagtggatgtcacttccaaatactg

SEQ ID NO: 123780 - DNA, 926 bp, Zea mays
  unsure (1)..(926): unsure at all n locations
  Clone ID: MRT4577_44365C.1
gtgtacggcgtcgactggccgctatccgggcagacaagnatcacgctgacgccggcgctggagtcccccgtcgggccgctgatcaacgcggcggagctcatgatggtcgtcccgctcggtgggaggacgcatcccagagacgtaatcggcatgcaggagctggcgagaggattcacgaacccgccgtcggactggagaggtgatccatgcttgccccaggggaactcgtggactggtgtcacctgcaaccaagatccactggcaagagtaactgggctcaacctcacaaatttcagagttggaggatcgatatctaacaacattgccaatctgactgcaatttccagcatttggcttgtcgggaacaatttgaccggcccgattccagatctgaaccacctcctgcatgtagtctctttgcacctggaggacaacggactgacaggcccgctccctgaatcgctcggaaaccttacaagacttgaggaactgtccgtgcagaacaacagcctacaaggaacaattccaagcagcatcaggaacagagcggcggtggacccaaggtttaggttccagtacacacctgggaacaaccttagctaacaagtgcattacaggaaggcaaaaatatctgactgctgttccttacccaatttcgggtgcttcggaccattttccttcccttttttgaatcacgattttttgttgtacttcggaatgtatacttatctcttcccctgtaaagatgcatttttgtcatagaaaaaaaacgaggactatattttattgaacgagaaaacgagaaggcttattgctttagacgnnnnnnnnnnnnnnnnnnnnnnnnnnnnnnnnnnnnnnnnnnnnnnnnnnnnnnnnnnnnnnnnnnnnnnnnnnnnnnnnnnnnnnnnnaaaaaaaaaaaaaa

SEQ ID NO: 123781 - DNA, 292 bp, Zea mays
  Clone ID: MRT4577_44366C.1
caatgagaatcattaacattaacactagcaaacagaccacagcaggcacaacgtttataattacccaaggcaatggttggctaatgtcgcactaaaactcgaatcctaaaaatggttcgccgattgctcacggggcataccaacataccttcccgattacagaaaggtgggcatcaccccaatggaatgcattgggccagaaactcctaacattagatccgatggcttacttgtgggttcagctgtggactagggcctcgtacttaaagggatcctggttgtacatgtgagc

SEQ ID NO: 123782 - DNA, 247 bp, Zea mays
  Clone ID: MRT4577_44367C.1
gtcggtgttcctcttattcaggatgaacatcagccgagataaaggtatcacagttcatcatggccgaaataagctgcagtaggactgccggccctaacccaagcctgaccagcatcagcagccctgttgggcgctgccatcgcggtgctgcagggcctcgccacgattcttgagggccttgtcttacctaacgaaccccatgaaccacaactcggggctatccctggccctgccctgaatgcaccct

SEQ ID NO: 123783 - DNA, 597 bp, Zea mays
  Clone ID: MRT4577_44368C.1
cgtctaaagcaataagccttctcgttttctcgttcaataaaatatagtcctcgttttttttctatgacaaaaatgcatctttacaggggaagagataagtatacattccgaagtacaacaaaaaatcgtgattcaaaaaagggaaggaaaatggtccgaagcacccgaaattgggtaaggaacagcagtcagatatttttgccttcctgtaatgcacttgttagctaaggttgttcccaggtgtgtactggaacctaaaccttgggtccaccgccgctctgttcctgatgctgcttggaattgttccttgtaggctgttgttctgcacggacagttcctcaagtcttgtaaggtttccgagcgattcagggagcgggcctgtcagtccgttgtcctccaggtgccttcaaatttccaatcaggaatggatgcaacgtattatccagatatatttagctgctggtgattatgttacccatcgttatatatattatacttacaaagagactacatgcaggaggtggttcagatctggaatcgggccggtcaaattgttcccgacaagccaaatgctggaaattgcagtcagattggcaa

SEQ ID NO: 123784 - DNA, 199 bp, Zea mays
  Clone ID: MRT4577_44369C.1
cccatcataattacaaaaccaattctttcaaaccttgccccttgatcgtataaaggacaaatcgagggggatttgggggtacaaaaaaaacgttgcttaccccataagctgggttgttttttatacaggcccaacgactggtccataaggacaaattttttacacgtttttggacacggagaacctccctccgtttctt

SEQ ID NO: 123785 - DNA, 293 bp, Zea mays
  Clone ID: MRT4577_4436C.1
aaataactcaaaggagagaccagatgtttggattgaaagtcctgataagtcaatcataatatctgtaacaagtgacattcgtacaatccagtctgaggtatttgctgctccatactgtttgaggttctcccgtattcagcgagtgagatatgatcagccatggcatgagtgccttgatgtgcaggcatttgtggacattgtgcattcaaataatggtacaatacaaagggtggcagatgataatagcctgaagaatgatgacacaaaacattcaagaacaaacataaaagtag

SEQ ID NO: 123786 - DNA, 229 bp, Zea mays
  Clone ID: MRT4577_44370C.1
cttccgattcacccgtgcacgcacgctttcatccactcatcatcatactttatgcgatcttatcatatcatcccacacagggaaacttgggccagctacccggcgtacaaaatatcaaacatccctaccaatgaaagacctcttattctccctaccatatttccaacacaatgttaatcattctctacataactacatcaccaccaacatcataccacatcgtaacctc

SEQ ID NO: 123787 - DNA, 701 bp, Zea mays
  Clone ID: MRT4577_44371C.1
gattacttcacaagcagatcaaagctctagttgtatctatatagctaagggggggaaaatggctccgcttctcgttgctgccatgaaccacgctgcagcccatcctggccttatgagccacctactaggacccaacaatgagagtgtctctcggcaccacctgccgtcttcttctccacacagcaacaagcgaaagggtaaccttacttttactacacgatctgcaagagaatgcagccaaaatggagtacgaatgttgagcccctcggaaatcccacatagggactggtacccctctgacttcaccttcagggccgtcacttcatcgtaccagattgaaggtgcttggaatgagtatgtaaatggggaaagcaactgggatcacttctgccacaatcatacggaaaggatactggacggcagcaattcagacattggagcgaattcgtatcatatgtacaaaacggacgtcagatagctcaaggaaatgggcatggacggatataggatctctatctcttggcccagaatactggcggatggaaccaaagaaggaggtattaacccggatggcatgaaggactacggaaacctcatcagcttgttgcgagaaaacggcatagaggcatatgcaacaattgtccactgtgatgtacctcaagtactagaagagtactacggcggcttcctacataagagtc

SEQ ID NO: 123788 - DNA, 757 bp, Zea mays
  unsure (1)..(757): unsure at all n locations
  Clone ID: MRT4577_44372C.1
ggtaccctcgggttcggccggggttcctggccttcctcccgtgcaactaccactcgcgtcaccgcggaaattaaccccgaaatccatcgccttcggcacgagcacgaccaggcctgcgcaggagatggggcggagaggggagccctactacgtcgaggcggtgccgccggtggacgtgaacaagaacacagagtggttcatgtacccgggcgtctggaccacctacatcctcatgctcttcttcgcctgttttctcgtcctctccgtctctggttgctccccgggggcagcctggaccgtcgtcaacctcgcgcacttcgccgtgagtccccaccctctatctcgtccccagtccctcgcccttctgattttgcgcatgtctatggatcgcttccgtccactgtatccctagatttggttgtgctggtacttggatttactaattatctccttcggtgtggattatttcttctccccaactgtttgtggccattcacttcccggcaggactttttgatttttgctctgcgtgtacgtgtttagccaaaaagattatgttcttggaattctagatttgccatgatgcaaaggcggaacctttctaaggaatagagtgacggatcatctgcaattaatcagtatatgcccatggattgctacaaatataggtaagccgtggaagaaatattttaagagatgaaatattagtgtaaactgtctttggcaggctggatgggctattctgtttncttgtcat

SEQ ID NO: 123789 - DNA, 520 bp, Zea mays
  Clone ID: MRT4577_44374C.1
tgtacctcgcctggtcggtcccaaggtcgccgggagtatccccgatccttattgcactcacctctgaccggcggtgccaggagccctgtcgcggacggtgcttggactgaccgcgtacccgcatggatcgcgcctagctaaccacctaccaggttctgaactgagataacccatgggagcattgcctgtgaactgagctcatctccggaacgtgccttcagtttttacggtgctatgaccacaaaccggggagccaacgcgctcctttgatagtaggaggatggaccagcatatatcacgagttatcctgaatatctcgtgcggagcatttgacgagaaggagacagcagacatacgggcttgcactcattgatgaatggcttgcaacatatcctaagcgtgacacactgttttatgaccaatcttatgagcgccagaagatatttatagaaccgttcttaatgctgccatggcaaggcagatggcctgtacaagaaaatggttgtgagatattgactgc

SEQ ID NO: 123790 - DNA, 579 bp, Zea mays
  Clone ID: MRT4577_44379C.1
aattcggcacgaggcaggcatctctcacccgccgccgaagccggccacagacctgcgcccgccgctcggccgcctttacggccgcagcccgcagcccggccgaccccggcgcctccgcgggttctctcatctgccctcccgcggtccgcccagacctccgccgaccgtctacccccgttcgggcgaccagtcaacgcctgaccttcgcctgcggccggtggctggccgcccgtacaggcggaggccgcattcccgcctgcggccgccagactccgcccctccacccggcgttctacgacacagagcccgaccaccccgcggcgtcgcatcataagcaggaaaatgccttgatagttgtgtctggacccgactacaatgatgactatgatgacgatgaacagtatgaagacggcgatgatgaagatgatgactatgaagaaaccagatctggactgaatactcgtgttatgacaggaaaagagacagtgtgaacttcctcatgtacagtgtgaagatcattggacatgtatgatgtgcacattcagttatcatgaccgcatggcgtactgagagacgtga

SEQ ID NO: 123791 - DNA, 360 bp, Zea mays
  Clone ID: MRT4577_4437C.1
ccatggaaccgggggaatttgcaacggggattccacattacagcttccattcccctccacattaaaaagaacaaaagttaaccaatgggggggtttttcccataaaacttttttttttaataaaatccgaaacataaaagggtttggcagaggcccccaacctttcccgacccaggggaatgaaggaaggctcacagggtaaaaagcccccccttgcctttcgtgggggaaggccattaggggatgtcccacggtttaggctcggggacaggaacaaccatgccatgcagttccggggtgaggacaacctggcaccccaggcccccttgctttttgagctcgcggttcctggaccccccc

SEQ ID NO: 123792 - DNA, 406 bp, Zea mays
  Clone ID: MRT4577_44380C.1
ccggcaagttccggcccttaaattgattgaaaatggaaaaatcaacacattggaccacataaccggcgcaatcgctgggcagggggacccagccagtgctgctgcggccgccgcaaccgccgctgccgtcatccctgccgtgtccacgccaccgcctttccagggtcgcccaataactccagtgtacacggtggctccaaatgttcagagaattcccactgccgggatctacggagccagttatgtgccatttgctgctccagccacagccacgatcgccacactacagaagaatgcagcggccgccgctgccatgtacggcggatacgcaggctacatacctaaggccttccccgccggtgctatccaagggcccatccacgacgtgtaccaaacttactgaaac

SEQ ID NO: 123793 - DNA, 228 bp, Zea mays
  Clone ID: MRT4577_44381C.1
atagaagaaaaacaaattaatggatttcaacaatttaccagcaggaaacaaaaaccaccactattgctcaaacatggttcattttagtgtacaacgcctactcatcatcttgacttgcctatgcaatgcatcgtgaaacaaaagacacactttgcatgtcgcatcattaattaattcatgttcgtacacccttttctatccgaaagaaaatgaagtcgcatagcataa

SEQ ID NO: 123794 - DNA, 183 bp, Zea mays
  unsure (1)..(183): unsure at all n locations
  Clone ID: MRT4577_44382C.1
tctcagtttttgcagccacaccccataccctagccgcccccctcaatctcctcctcccaangtgccaatccttgccgctcggatcatcgtctcgtggtgtgattctccaatcgttttggtggagggaagaagggaggaaggaaagggggagaatccaaggtggtggacttccgtatcgctcct

SEQ ID NO: 123795 - DNA, 430 bp, Zea mays
  Clone ID: MRT4577_44383C.1
cccacgcgtccgcccacgcgtccgcactgaagcagagcgagcgagctgtccggccaaaccctcacggccgcctccacaatgccgtgccatctcgcgctgatcctgccgctgctactgctgacctcgccggcggccacgcgcctggcgtccgccgcctgcgcggtcgagaagatcccggcagagcgtgcgctcgcgtcgtgcgaggacctgccgaagctgagcgcgtctctgcactgaacagacgaccctgtacatgagctcctattggttgcgttcgtggcgtggccctgggccgcgaccaaattgaccgacggtacatccgattactacaggagacatttatgttcccacacagctcgtgcattttatgtggaaaacctgggacatcaacatacattgctggggtacaagatgattgggctctctacct

SEQ ID NO: 123796 - DNA, 677 bp, Zea mays
  Clone ID: MRT4577_44384C.1
gatggccgtgtgcgccggaaaatcaaccgggcaatggatacgggccgcctgccggactcccggggccgtgaggtcagcctcggcaatgtcatcttcgttctcacaacggattggttgcctgaggaactcaggagaccgaagtttgacacaccgctccaagacgaaggaaagatgctcgaggcagcacactcggattggcagctagagctttctatcggggacaagcagcagctgaagcaccaagcggattggctgtgcaacgatgctcgcccagcgaaggtagctagagaactgtctggcgggcacggtctgtcgcttgacctcaatctagcggtaggggcgtcggacgacacagagggctcgcggaactccagtgacctctccgtggaacaagagcaggagaaagggcacgtcgcggtcaagtgttcgacgccagcccccgacagcgacctgttgaacctcgtcgacgatgccatcgtgttccggccagtcgacttcgcgccgttcaggaaggctgtcacagactgcgtatcagcgaaattcgactcggtcaccaggggcagcagctcgttcagagtcgacgaggacgccgtcgaccggatggctgccagcgtctggctcacggacgagagctcgagactggccgaggaagtgctacccccatcgacgctggcgca

SEQ ID NO: 123797 - DNA, 364 bp, Zea mays
  Clone ID: MRT4577_44385C.1
ggagcttgtcgtgttggacttgtacttagtgaggccgctacgtagctcagatgtcgctcgagagcgcggcgtgagaagccatgagcagcaaagtctctcgcgacaccctgtacgaggcggtgcgggaagtcctgcacgggaaccagcgcaactccgcaagttcctggagacggtggagttgcagatcagcttgaagaactatgatccccagaaggacaagcgcttctcgggcaccgtcaggcttaagtccactccccgccctaagttctctgtgtgtgtcctgggggaccagcagcactgtgacgaggctaaggccgtggatatcccccacatggacatcgaggcgctgaaaaaactcaacaag

SEQ ID NO: 123798 - DNA, 276 bp, Zea mays
  Clone ID: MRT4577_44386C.1
tatttgggaggtgttagctccttactaaggatctcaggccatgcaattggcccacataacccgagaggagtgatatccacaacaatctccctgacagaaactctgaacccatatgtgagattttatgtggcaaaatcttgcctatctcaagtgaccatcctgtattacaaggtctgaacgcctctctattcttcctgacaggaaaaccccacggtaacttgacacgtgcaccaacagtacaacgttgaagcacttttgaacattactctcaaaccc

SEQ ID NO: 123799 - DNA, 332 bp, Zea mays
  Clone ID: MRT4577_44387C.1
cggacgcgtgggcggacgcgtgggcggacgcgtgggcaacggtgccggcgctggtgacaacggcagtgcgtgcgggatcaagaacgtgaacctgccaccctacagcggcatgacggcgtgcggcaacgtccccatcttcaaggaccgcaagggctgtggctcatgctacgaagtgagatgcaagggaaaacctgaatgctcgggcaatcctgtcacggggttcatcacagacatgaactacgagcctatcggtccctaccacttcgacttgagcggcaagggccttcggcttccctgggcaaagcccgggctcaacgacaagcttcggcact

SEQ ID NO: 123800 - DNA, 358 bp, Zea mays
  Clone ID: MRT4577_44388C.1
aaacattcggtagggattttttcttttttggtttcaccacaaggaaacatttttttattacaaggaaaacattcataccatgtttgcccacagattttttgccctccctgaaacaacccacaaatttcccgggtcccaattgccaaatttttcttaccacccacatgccataaaatacaattttttcccgagggaattccaaaggcttgacaaactcatgccgggaattacactgttgcggtgttcaaagagcgaaaaacagatgcggaaaccatagctgttccacctagaaggctcgaacctcggttaaaccggcaggtggaggctttcaattgccggtccgctttaaggccccaag

SEQ ID NO: 123801 - DNA, 302 bp, Zea mays
  Clone ID: MRT4577_44389C.1
atccccaaaccctagctcccggtgctcgatggcgaaccctcgcgtcttcttcgacatgaccgtcggcggcagccccagcgggccggatcgtgatggagctgtacgcccacaaggtgcccaccaccgccgagaaatttctcgcgctgtgcacggacgagaagagcgtgggctagtccgggaagccactccactacattgggtggaccttccatccccgcattccttactgtatgtgccagggcggggacttcaccctcagcaacggcaccggcggcgagtgcatctacggctagaagttcccc

SEQ ID NO: 123802 - DNA, 1775 bp, Zea mays
  Clone ID: MRT4577_4438C.1
cccgtccggtccgccactgcggcctacagctgtaggcctgtagcctttgccttcctctgtgctgtggctctgcatctcatcgctgcggctcttcatcctcgccaccggacctctgtcgctcacctgttgcccccaagtccaaatgatgaagtccctcctcttctccgcccaccccacgtcgctgctcctccccgctccccgccttcgcaggctcctccgcctccgcgccgcctcctctgcctccgcttccgcgccgccccgagccgaccgccgctcccccgggacgccttcgcgccgaccatcctcctccctctacgcgcgccccagcctcctcgacatggagcgggatcgcgccacccgccgcgccgatgtcgacgccttcctcacctccctcggcgtcgacccgggcgaactcgcgggcctcgagctcccagtcaccgtcgacgtcatgcgggagcgcgcggagtttttgggttccctcgggctcacccaggaggacctcgctgcctaccctctcgctctcggctgcagcgtgcgcaagaacatggtccccgtcctcgactacctcggcaagctaggcgtacgccgcgatgcgctcccggacctgctgagacggtacccgcaggtactacacgccagcgtcgtcgtcgaccttgcccccgtcgtcaagtacctccagggtatggacgtgaggcccactgacgtgccgcgcgtgctcgagcgctacccggagctcctcggattcaagctcgagggcaccatgagcacttccgtcgcctacctcgtcggcattggagtggggaggcgtcaggtaggcagcgtcatcacccgttttccagaggtgcttggcatgcgcgtggggaagataataaagcctttcgtcgaacaccttgagggcatcgggctgcagaggttagctattgcaagaataatagagaagaagccatatgtgcttggatttgggctacaggagaaggtgaagcctaacattgaggctcttgtggacattggagtgaggaaggaggccctagcatccattgtgatgcagtaccccgacgttcttggacttgaactgagggacaagcttgttgcacaacagagcttatttgagtcgagcatattggttagtcgtgaagattttgggagagtgctggagaggatgccgcaagccattagtcttggacgagctgcggttctgaagcatgttaatttcctcacagcttgtggatttatgctatctcaagtgagcaaaatggttgtggcatgcccccaactgctcgcactaaatatagatataatgaggatgaattttgaatacttcaagaatgagatggagagggatttggaggagctggttgagtttcccgcattcttcacatatggcatcgagtcgactgtgaggcctcggcatgagatggtgtcccggaagggcctcacatgctcccttgcatggcttcttaactgttctgatgccaaatttgatgagcgcatgaagtatgatacaattggggttgaggaaatggagggtgaggattcttctgacatgaatgcatctgtggatgaggtagagagtgaggagtatgaagacagtgattatgatgactctgatgatgagtttgttcgataatttatttcaccagtcattagatttttaactttggagtatgtgcttggtatgcgaaatgtcaaagtatagcttaatgatgcatttctcatcttccttactgatgtatcccctcagttccaaattataagaggttttggcttttccagat

SEQ ID NO: 123803 - DNA, 259 bp, Zea mays
  Clone ID: MRT4577_44390C.1
cacgctcccgctcctagtctgataaccccttccccttcctttctaagtccctaccctacccccggcgaccgtcgtctttgaccgcaaacatagcagtcagctccaggacacatcatgtcgtaactctccttctacccttcctgccagagttccatagcccgctatataagacaccattcagagaaatagttatccacactatcattatcctcctcatccatctgcaatgccaccatctacaactacatgaacttgattc

SEQ ID NO: 123804 - DNA, 473 bp, Zea mays
  Clone ID: MRT4577_44391C.1
attcggctcgaggccacaccagcagcttcttcgagtcccgccgtcctagccagaagaacgaccgcgcgccgctgacggacgatgggggcacgctctgcagtgcacagccccgggttgcgcacgaacgagctctggttgaacaccaggaactagcagtgcatcggcactgtcagtactcgcagaggtcggcaggtatggcgcaatacagatccatgcgcagcttgaagaagagcgacatctcggtgaggatgccacaggtgagctggtggacggagaggtcgagcgattgtagcatctccgccagccgagataattgccattatggaagaaagaaggggattcgacgaaatggaggtgttgacgttggcttctctgttttggagacgtaggcgacagacaaacttcaaaatggatacgagacaacacttgaggctgcgtaaacaggtatcggtgtcttgtcaccgtttaccgtc

SEQ ID NO: 123805 - DNA, 624 bp, Zea mays
  Clone ID: MRT4577_44392C.1
gtaccggcgcccctttcgagtttttttttttttttttttttttttttttttttttttttttttttttttttttttttttttttttttttttttttttttggccaacaacggaaccccttgttaccttttgccaaccaccaggggtaatttcaaaacaaatttgcaagaaagaaaaaggggtttcacatataaaaagcccatggccccccgttgcatcccaaccccaatcccaatcggggggaaaggcaaaaataaccccccgtttccgggggaaaaccaacctgaaaccccgggggggaaaaaacaaccctcaggtttttttgggggaaattgccaaaaagggaggcccccccctcggttttcaggggggccccggccagccccccctgggaggagtccttgttgacaaaaaaaaacccccccccggagtccacctccacctcggggccgggggaaaacaaaaaaggaagggggggccccgggactttcttgaccccggtcatgttaaaccaggggtcgaggaaggaaaaccctgggccctgggggtactccgggagctggctaaaaaactcggccctgacggggttgaaaacccacggcccgaggggtgggaaacaccggggc

SEQ ID NO: 123806 - DNA, 285 bp, Zea mays
  Clone ID: MRT4577_44393C.1
cgcacgcgtccggggactgcgactaaaagggatgcccaaaataagaagtattgatcgagacttctgtgggagtgggagtgggagtcagcaatcgtcacacacattgtttttcccaaggttaacaaggtttgttttgaatgatatgccaaacctagaagattgggtcactaaggtgtcaggtgcaagtgatccgtatggccaggaggaattcatgtttcccaagcttgtcaagttgacaatttggaactgccccaagcttaagctgaagcctatccccccaagagc

SEQ ID NO: 123807 - DNA, 360 bp, Zea mays
  Clone ID: MRT4577_44394C.1
cggaatcgcagggtcggggtacgacctacgcgtacgcgtccgtgcgacctttaaggtgaggaatgagaaactctgtcacagaatcactgggctccaccatctagtttaggcttttggaaagacacatactgtatcaggttattgacgaggccatcgaatacatgaagttactggatgaccaacccacttctttgagctgttcctacctcaggggagggcgacccgtaatggatcagatacaaactccactgaatgcgactgtcgacggcaagaacgcgctttatgaagacctgctaaggcacgagctggtcctcaagctggttgcaagcactaaagcttatgccaaggccggtctagacg

SEQ ID NO: 123808 - DNA, 299 bp, Zea mays
  Clone ID: MRT4577_44395C.1
gttggagccccaacttggctatattgagctccaactatatacgaagctagaaacatgtcaccttccgaacaggtccagccttacattcacaagctgtatagtacatatggctgaaagagccacggagcaaaaaaaggaaaaaagccctttgatttgctttgaagcatgcaccaacagccaacagcttattttttagctatatgcatgactaccaacgactaccctgaactgggtaaatcaatctgaagggtatcatcatttgcgatgacaacttcgaacgacctgcctgacgtaacaat

SEQ ID NO: 123809 - DNA, 397 bp, Zea mays
  Clone ID: MRT4577_44396C.1
agcaggggtaacaacgcagagtactttttttttttttttttttttttttttttgggttttttttttttttttttttttttttttttttttttttttgggaaacccaaggcaagccacggctttcaataacttaatggggggaggggaggacacggaaattaagttttttattgggggggggggggccctaacaaaagatcaagcagccagcctttggaatgggaattgggaggggtccggggacgggaccccgggggaattacgggcctccactggggtccccgccttgccgacggcggggggccccacaaaggaaacggcgggcatgccggccggggacacccccccgcgacccgggcgttgtctccactgggcaggggcgacgccccgggcacgg

SEQ ID NO: 123810 - DNA, 376 bp, Zea mays
  Clone ID: MRT4577_44397C.1
atcgcatcaagcatctcacctttatcacccttgttcctccaacatcccgtcggggtattagagcattttccttcggcgcattctttttcacaaaacatcaaggcccaacacctactacaacttgtgctaggaaaccttgctgcctactctcagcaacagcagtttcttccattcaaccaactggctgcattgaactcaccttcttattcttcaacaacaactaccatctcagccatctagctgctgactacactcaacaatttttttcattcaaccaactgacattattgaactctgatgattatttacaacagtacacagctaccaccattcatccagctaggttatgtgagacctgctgccttcttgacacaac

SEQ ID NO: 123811 - DNA, 489 bp, Zea mays
  Clone ID: MRT4577_44398C.1
atgactaggaagggggatctaaaagaattgagtgaacctaatgccatgttctttatgctcctgtacaaggacaaccttctttctactaacaactttccctctactttgccaagtattgtctttgatgcattacaggaatatgaggatgtgtttcctgatgaagtgccaccagggctaccacctaagagagggattgaacatcaaatagaccttgtgtctggcgcttccctcccaaatcgtgctgcctaccgcaccaacccagaagaaacaaaggagattcagcaacaagtaaaagaattggttaaaaagggtgtggaggtagatgaagaaaagatcaaaaatgtacgcgactggatgcctccacagaatgaacgggtaaactttgacgctatcaagcgagatgagttaatcaagaaccttcttgaaaaagctcgagcaaacattgagaagatgactaagaaatatgaaaagcgtgccaacaagggttga

SEQ ID NO: 123812 - DNA, 743 bp, Zea mays
  unsure (1)..(743): unsure at all n locations
  Clone ID: MRT4577_44399C.1
ggccgcttttttttttttttttttccatagtcatacctaaattttttttttttttttttttttttttttttttttttttttttttgacaaaccctttttgcaaacaattccaatttgcaatgatatatatctatatacaggggttggcccaaacaactaataaggagttaaagggcccttttgttatttttgcttaggacaccaaacgggaagcacatcaaaagaactgatgccctctcccagggcgctgagtaaaaaaaacgctgcaaacgtatatcctaggtagagggaaaagcacaggcccacagagcacgcaaaggttgctttttagttgggggtatcaggcaggtttacacaaagagacccatcaagacgtggagcggtttgctagggagctccattggttgtaccatggacactgctaatggagccccagggagattttgcggtccccatttgcgcagcaaggctatccatggaggccgaggtcccacttttgtgaccccagcttgatcgccttgaatgcgtaccagccctcccttccacaagctcaggaagggcttttttgctcaggtccggggatgcatgggctaccctgccttccttttngtccagtaggctgcctaaaccaacctccaagtttttgatatcagctgctgaccgaggttcatcccatgatattggcttcctgcccaattcaagttccccaataggtttacccatgtttgggctcatgaaacccc

SEQ ID NO: 123813 - DNA, 1085 bp, Zea mays
  Clone ID: MRT4577_4439C.1
tatttttgctctttatagtctagctttctgttgattactatgagcatggtgttttggtgttgtattcaaagttctgagctatccttaactaactggtgctgtccgaagtggggtgcacaaaagcttttggatttgatattacagctgcttgtagtgggtttttagtcggcttaatcacagctactcgctttatcaaaggcggaggttttcagaatgtcttagtagttggtgcagatgctctttcaaaatacgtggattggacagacagaggcaggattgaggctgtttcatcctcctctgctgcgggatgggtggggtcgtcaccgtggcgtcactcgtggcgtatcgtgcagtagggacgacaacggggagctgtcaagatgggttacctcaagacggatgagttcctcaagaggggcgagagcggtggcacgtgctgtgtcatagcccttctccgaaagggtagactggttgtctccaatattggagactgtcatgtggtgctcagccgagcagggaaggcagaggtgctcacctctgaccatcgggcctcccaggaggatgagaagcagagaattgagaatttgggtggatttgtggtgaattaccatgggacatggcgagtccagggctccctagcagtgtctaggggcaatggggatggacatctaaagcagtgggttgtggctgaccgagagactaggacgctcctcgtcgaccaccagtgcgagttcttgatacttgcttctgatggcctatggggtaagattgataatcaggatgcagttgaccaaaaatctaggcattagcactaacagagaccggtggaaggcaggactttgctgcctaaagtttccatgagtcagcgctatttttgggtgtttaacattcattctttgtcatagaaccatttgttatattattagatgtaattagatctatttgattcattcttcggcaatatttattgagataatgcggggtgatctctcgcttcatgatccattgactgtaaaaggcgatttgcctacgtcaatacaatgatatattctatttatagaaaacttactgtgttttcgttttgt

SEQ ID NO: 123814 - DNA, 279 bp, Zea mays
  Clone ID: MRT4577_443C.1
tttttctcctttttttttttttataaacaaatttatggtgttatttggggtgggacattaagtactaccccacaattcaccactttaaccgacacgaacacactcatatagaaccattgacccacagtcggaaataccagactagtacgtaccacaaatatccaaacgggagcacaaaccgaccaacatgcatacacatgcagccctatcacatatgattccaccaatcaaaaaatattattcctgcgtaaaaagcaaacctcataaaacataaacaca

SEQ ID NO: 123815 - DNA, 274 bp, Zea mays
  unsure (1)..(274): unsure at all n locations
  Clone ID: MRT4577_44400C.1
ccgtccatgcgttcggngcaactgnggctccagttgttgctgcggtagctcatgcaactgcatgtcccctaacgnggagaccgccgccgccagcagcatcaagaccatggttatcgccgcaccgaccaccaaggccagcgccggcggcttcgaggcggccaccgagggcggcggctgcgactgcaacacctgcaagtgcggcaccagctgcggctgctcctgctgcagctgcaactgaaccggcccggcgatggcgcacgagtcgagaggacga

SEQ ID NO: 123816 - DNA, 1121 bp, Zea mays
  Clone ID: MRT4577_44401C.1
cccacgcgtccgatctacatcgaacacttcgttcagacggcggcggcggccatggcctctgctgcagggtccgaggaggcgtgcagggagatccgcggcacgtgcggcgcgccgcggcgcctgggcctcctgctggctccgcggagccccgccgagaggcagcagatcagggcggcgtaccgtgccaggttcggcgaggacctcgccgcgaccctggcggcccccaacaccaacccactcctccagctctccaagctgctctacctgtgggcgctggagccggcggaacgggacgcggtcgtggcgcgggaggcggtcgagggcggcgtgactgcggccggctaccgcgccctcgtcgaggtgttcacgcgccggaagcaggaccagctcttcttcaccaagcaggcctacgcggccaggttcaggaggagcctggaccaggaaatggccaccgagccgtctcacccttaccacaggctgctgctggctctcgcggcctcccgcaggtcgcaccacgacgacctcagccagcacgtggcgaaatgcgacgcgaggaggctgcacgacaccaagaacagcggcgctggtgctggttctggttccgtcgtcgacgaggctgtgatcctcgagatgttcagcaagaggagcatcccgcagctcaggctggccttctgcaggtacaaacacatatacgggcatgactacaccaaggcactgaagataaacgggtctggcgaattcgaaggacctctcagagtcgttgtcaagtgcatctacaacccttccaagtactactccaagttactgcacagaagtatgctacccgcagcgactgatacgaggatggtaacgagggctatcttgggcagcgatgatgtcggtatagacgagatcagatcagcgttccagagtagttacgggaagagcctcgcagaatacatccaagaaaacttgcctgggagtgactacagggatttcctcgtggctgtggcgagtgcgtcagtggcacaatgaggttgtccatgcttgtagttgtagcagaggtatccctgagttgtccatggaagaaaagaagaaaaaaaaacactgttttgcacgctgcaaaagtaagtcgaacaagg

SEQ ID NO: 123817 - DNA, 176 bp, Zea mays
  Clone ID: MRT4577_44402C.1
atcatcgctaaatgggaggcaatagagcgaagcatgccaaccaaattccccttaccgtctcgtgccttcgcgacattgatagagaccgcgtcggctcaatatccaagcctttccggcgcagccgcctcataatcgatccgcaggcctacaaccaaacatactctagggtttccgca

SEQ ID NO: 123818 - DNA, 1249 bp, Zea mays
  Clone ID: MRT4577_44403C.1
cacgttttcattgttatttttcttttacccagactctgctatctgtatcctgtcctgtaacttctaaaccctcccttctatctttgaaagggtaacacctttttttactttaataaaaaactttttactatttgtaatattttgttttttctcgtccaactgcatttgtatttataaatacttcacgtgccacatagtctatcagctaagtgctaaggcaactaggcaagtatggatatttttaaatatacgattttagcttaacaggattttgtgccacttctgtgcctatgtctatgttagtctaaagggcattttcgtcatctcagtgtttgacaactatgcaatatgacctcttgcaaataatccagtagagtacatactgccggtcttgcaataatttagcactatcacataataatgattagagatgtagttaggccctgctgcaagggacgcttttctggattcttatggacttagtttggagttgaaacgttccttgcaatattcctgcaatttctttttcatccaagttccaagcatgccctattaactcctgttctggatatttattgacatgtacttaacccaacataggtgccatgtcgtgttgattctccagaagagtgtgccaaaataatatatgcaaacaagaacctacgtcttggttctgggattcttattgcagtaccgatccccaagcagcatgcaacttcagggaaaattatagagtctgcaatacagacagctctaaaagaggcaggggataaaaggataataggaaatgcgatcactcccttcatgcttgaaagagtaaaagaactaaccggaggatcttccttggaagctaatattgcacttgttaagaacaatgctcttattggtgcgaacattgctgttgccctttctaaccttcagcagagagaaataagcagaatgggaagatccgcgttgtagggttacgctcgcggatggagtagcacaggaagcaaaccatttacgaggatggaagctagctgcaggttgggaactggatgtgattgagatgtgtctgagtctgacaagaataggttgcctgccactttggcaccgtaatgagatgtaggccatcaatgtactataattagatgttttttgggatgtaatctgaatttggatggttctctatactgaaatcatctgctttgtgagcggaattatggaatggttttggcacttccatttgatacatgtagtatgtgcatgc

SEQ ID NO: 123819 - DNA, 299 bp, Zea mays
  unsure (1)..(299): unsure at all n locations
  Clone ID: MRT4577_44404C.1
cantcagtcacagctcagagcagacaccgcgtaccgtatccgctcccaaacccgactgagcaaagcgctaatcccctcaaccgcggatcggtccgcggtatcgatgacgctcatcgcggttgctaatccggatgccatgaagcgcgcggaggtatcaacccgcgagcgagaatgtgtaccgggctccgtcatgtaattcgccgtagcgatgaaactagtcctcgctgtcaagtcatgcgccgctgatggctattacggcctaagcaattcacgaatatgctagtgagctacaagatcta

SEQ ID NO: 123820 - DNA, 961 bp, Zea mays
  Clone ID: MRT4577_44405C.1
tcgaggccggccgggactcccttctcctacccacactcgagagccatctcccagcacacgagcgggatggcttccaccaccaccaccttcctcgactccgtggacctctccagcaaccggctgacgggcggcatcccggcggcgttcgccgacctgcccagcctccggtcgctgacctccggcacaaccagctgacgggccccatcccggcggggctggtgcaggggcagttccggtcgctggtcctgtcctacaaccagctcacgggccccatcccgcgcgacgacgcgcgcgacgagatcaacaccgtcgacctctcccacaacaggctcaccggcgacccctcccacctgttcgccgccggccggcccatcggcaaggtggacctgtcgtggaactacctcaacttcgacctcagcaggctggtgttcccgccggagctcacgtacctggacctgtcccacaacctcatccgcggcaccgtgccgctgtcgctggagcgcctgtccacgctgcagaagctggacctcagctacaaccgcctgtgcggcccgctccccaaggggcacggcgtcatcaagcacgggtgcaagccgtacgcgcacaaccagtgcagcaaagggaccccgctcgcgggatgccaggacctggagtgagtgagtgagccggtggccatggttttctatactctgctatgctctccctcgccggcgttccaatcgtgggtgtgtgtgaaggacgacggtacggtgcctggtttagttatagacaaaaaaggtacggccgcgtggtggcggtgctaatatgcttagccacgcccacgcgcggttgatctttgagcagttaagcgtgtacgaaatgacagctgtgtacgtgtactgtctggtggagtgtgctgtgtatctggtctcgatccgatcggcctaatgtatgaaaaaaaaaaaaaaaaaaatttgcggcc

SEQ ID NO: 123821 - DNA, 850 bp, Zea mays
  Clone ID: MRT4577_44406C.1
cagattccagcccgtctcctccagcgcgccgtctcctcccgagccctgcgctacacgcccgcgccgcctcctcccgagcgtcgtctcctcccgagccccgcgatacacgcccgcgccgtctcctcccgagcgtcgcaagcccgcctgcgtcgagcgccgcccgagcgcctgcctgcgtcgagcgcctgcctgcggtggacggaggagctgcacccgcgatatgatagactgtacgtgcagtaatggtatagggagaggagaccatgagagactggagactacagagaatgtggtggactgctagttttctgttttatgggtacagcatgttttctgtttatgtcctcaaaaaaaaatcaactttcaatgttatcctgaatctttgtcaattaagtagatgtgtgttttctgttttctaccctaatgatgtgttctggtctttttggaaggtgtgttttcagtggctctttgagaacagcatgttttctcttttctgttttctgaacctttaataagtttgtcgatctgatacctcaaattgttttctgcagaaaaataaagaagctaatgggtacagacacaagacagtcttatattgggactcgatcaacttggtgtttgggaaagatcatgcaaccggtgaagcggcaaagaccccaactgatggtgcgagaggtatgagtaaggaagagggaaccggtaaagagcttacttcatcaacaacctcaggaagcttgaagaggcaacggtccagtgattccttcacctcaatgatggcagagaaattagacaagttcactgaagctattagggatgaagcaccaaaaggcccgacatcaaaagaaatttt

SEQ ID NO: 123822 - DNA, 1515 bp, Zea mays
  Clone ID: MRT4577_44407C.1
ccgagccctgcgctacacgcccgcgccgcctactcccgagcgtcgtctcctcccgagccccgcgatacacgcccgcgccgtcttctcccgagcgtagtaagcccgcctgcgtcgagcgccggccgagcgcctgcctgcgtctagcgcctgcctgcggtggacggatgagctgtacccgcgatatgatagactgtacgtgcagtaatggtatacggagaggagaccatgagagactggagactacagagaatgtggtggactgctaggtttttgtttattggagcagaagctgaccagaagattgcagtatttcaggttacttcgacgctcgggccggggctacatttcttggaaaaaataaagaagctaatgggtacagacacaagacagttttatattgggactcgatcaacttggtgtttgggaaagatcatgcaaccggtgaagcggcaaagaccccagctgatggtgcgagagatatgagtaaggaagagggaaccggtaaagagcttacttcatcaacaacctcaggaagcttgaagaggcaacgttccagtgattccttcacctcaatgatggcggagaaattagacaagttcactgaagctattagggatgaagcaccaaaagggccgacatcaaaagaaatttttagcacattggaggagatagatgggttagatgaagacacatttttagacttgtttgatatcttaacaggtgatgcgcgcaagtacgagtccttattggcacttccattgattctgaggaagagatggctattgaagcaacttaaaaagtgaaccgagttgtggttgggtgaattgaactagtgttgggtgtgttgatgttgctgtcttagtttatgttgggtgaattgaacatcacattgagtagcaagtaatgtgttccaatgatatgtggacatttgagacaaatctacattattattaatattctcgtgatgcatgctgcttgataaattgtagggtgaaaactagtgtattttatcgtgtgcaagtcgcagcggttactgcctcacgtaatgccccgcaatatatgcagacacttattcctccccgagcgccgcaacgtccgctccctcctcccgagatctgttgcggggacatggcgggaagaggcatcgcctccgccgccccagctggtctacattgccgtcgccgacggggggggccgcccggggttccggtacacgcgccccgtggtgcagagcaccctgcatctcatgggatgcaagcctcgccatgcctccaagggggttgggcgggaatcacctcctgcggctgcatgtctgttgtgtgcgctgacatgtgtggtttgtgatcgccgattttgacaagaaaaagaaaaaataaaagaagctaatgggtacagacaccagacgatcttatattgggacttgatcaacttggggggtgggaaagatcatgcaaccggtgaaggggcaaagacccccgctgatggggcgagagatatgagtaaggaagagggaac

SEQ ID NO: 123823 - DNA, 1449 bp, Zea mays
  Clone ID: MRT4577_44408C.1
ttgggtccctcgaggccggccgggccgggatggaattgggctcctctcaccctccccacacatctcctctcacccacccgacacatctccgctagtcctgacgcccgacatacggcgccggcgatctgcgcatgcatcgctcccatcgatcctccctaggatatggagaagggtaagaagtcaggctcgggcaggggctacatttcttggaatgatgatatggacaaggcacttcttgacacattcgtggagtactacaacaagggtgacagatgccaaaatgggtggaagtctcatgtctacacggctgctatcaagaatgtccgagaaaagtgcaatgtggaaatcacaaaagacaacatcatgtcaaggaacaagacatttgacaagcaccacactatcatcaatggtatgctacaaacaagtggctttggttgggattggaacaagaacaagatatccgtcgatagtgattctgtatgggaggcttatgtggcgaaaaataaagaagctaatgggtacagacacaagacagttttatattgggactcgatcaacttggtgtttgggaaagatcatgcaaccggtgaagcggcaaagaccccagctgatggtgcgagagatatgagtaaggaagagggaaccggtaaagagcttacttcatcaacaacctcaggaagcttgaagaggcaacgttccagtgattccttcacctcaatgatggcggagaaattagacaagttcactgaagctattagggatgaagcaccaaaaggcccgacatcaaaagaaatttttagcacattggaggagatagatgggttagatgaagacacatttttagacttgtttgatatcttaacaggtgatgcgcgcaagtacgagtccttattggcacttccattgattctgaggaagagatggctattgaagcaacttaaaaagtgaaccgagttgtggttgggtgaattgaactggtgttgggtgtgttgatgttgttgtcttagtttatgttgggtgaattgaacatcacattgagtagcaagtaatgtgttccaatgatatgtggacatttgagacaaatatgcatcattattactattcccgtgatgcattctgcttgataaattgtagggtgaaaacttgtgtattttgttgtgtgcaagttgatgtggttacttccctccaaatatgtaaattcatatataactatccaaacaagatattgaatttgattcatggaaaagaattccattggcatccaaacaaaaaaattgaattgaatcaaattctaaggaattactttctttaggaatctaatatctagaatgttattcatggaatgagtttcatttccaaggaaacaaacgggcccagagatattttataggatgaggaattgtaatcagatagatgttttgattctgaaaatatactagaatctacttt

SEQ ID NO: 123824 - DNA, 207 bp, Zea mays
  Clone ID: MRT4577_44409C.1
aaaaaaccaaaagagccagcaagctagctttttatttagaaaaatcgttcacccgccggcccccaatttttttatttttacacatttgcccttttgaggcttttgcccttttcctgaaggctcacgagttggttgaaaaagtcttttttgaaggagtccaaacctttcagtcaaagtgtgtttcccacctcggcccagtaaatgcca

SEQ ID NO: 123825 - DNA, 307 bp, Zea mays
  unsure (1)..(307): unsure at all n locations
  Clone ID: MRT4577_4440C.1
agttgaactgtggcagtctgtcgttccgcggtggatgggaaatcttggaagattaagttcggaatgcaaacttgctcaaatttgatgttgttgtctttgtgggctgntttttgggggggggttggtggtctttggtgttgagttctactgtctctcagtgtgcttgaaggttggaatgttgctgtggagggtgcttggaaacttgattcagtggagatgtgaatcggaacctggtggcgggctggggacagttgggaaagttgtgtgtgtgatgctggtggggataagatttttcaggaaaccttgg

SEQ ID NO: 123826 - DNA, 329 bp, Zea mays
  Clone ID: MRT4577_44410C.1
cgccgtccgccttaagccatgtgctcaggcctggcacttggaaattctccgctgacgagtagctaacagacagatggttggggtctttctagaactgtatcctgtcgaggcattaccggctttcttgccagaagtacagactgctgacacgacactaccctccacagagcacgagacctacacggacattactctcttcaattcactggcctgcatgcacatccccctcgacgccatccactcaactactggccttgaccctttctactggatgcgtgccattctcgcatcaaaccgtgtcactgtcatggtcaccgtggatccactcc

SEQ ID NO: 123827 - DNA, 806 bp, Zea mays
  unsure (1)..(806): unsure at all n locations
  Clone ID: MRT4577_44411C.1
gcgggggctctttctctggctgtcctgttgtggggggggggcgctccttgggctgtctgggcttggctctttgcgccctgcgctttccgctcncggtggcctgcgctccctgggcnccnctgtccgtggcggngctgtgatcaccctttcaggccgggggtgcgggncggcctccttggtgcttgtcgcggtggggctcggcctgcgcgctggcgccgaagccgtggttggcggccttctcggcggtggggcccgcgttcctgcccgggcgggcggttcggggggcgggttgtggcggtgtccgtgccgctggcgggcggttcggcctgcctcttggggggccccctccccctttggtggggccggtttcggtgcctgggcgggggtttgccgcggtgggggctgggggggcccctgggggtccgcgctgtttgcggctgtgggggcgctgccccctttgggcggggtggggggggtgggggggggggcgcgggcgcgtgcggggccttgcccgggggggcgggcggggggggggggggggggggcccccccccggggggggggggcgtggcgccccggggggggggggcggggccgcgcgcccgggggccggggtcgccggggcggcgggccggggggccgggggctttggggtgcctcgcggcgccctggccgggcgcggcccgcgcgcgccccgcccgggcgcggtggggggcggggggggggccgtggggggtgggggggggggggggggcgggggggcgggggggcgggggggggcggggggggggggggggggggggggg

SEQ ID NO: 123828 - DNA, 344 bp, Zea mays
  Clone ID: MRT4577_44412C.1
gggggcagaatttaaaacccaaaatacaaaatactaaaaaatttctggtgcaaaacaaatgggtccccgccaatgtttacccaaaaaaaacagcccccgttttaatatccatgacacaccaccttgattaatcgggggagggccaccggataaaaccaacaaccttaatggaaaaagggcttgtttattacaggcctaaaaatactaccaaccccgctcaaacaaatgggggggatactttcgctccctcaatcatcattattccaagctgcgaggaataggactggcctctaagaacagagctcctttggcatcaacgacgacaataaaaaatactccccacc

SEQ ID NO: 123829 - DNA, 255 bp, Zea mays
  unsure (1)..(255): unsure at all n locations
  Clone ID: MRT4577_44413C.1
aaaagctggcggttcttggggctggagcgctcaaggttttgtgtagtggcgncannnctggttctgcctattctaacaggaatacgcacgggccaagatatgcatgtgcaactgctaacggcaacgagggtggcacgagaaacagccagaatcgcggaccccgcggcccttaatgatctggaatttggatcagagccccccctccctgggttttggaaaaaaccaaaccaaaaccgggagcccagggccccaaaa

SEQ ID NO: 123830 - DNA, 309 bp, Zea mays
  Clone ID: MRT4577_44414C.1
gcagcatttcatggcctccgtagtaactcacaatgcttcctggggtatttaaattctactctctcatcagcactgagcacctactttgggccctttcccgtgctagccatttgggggaaatataggtgaagagtggctggggtttgaacctttaggatttcacagccatgctggatgggataaaaccagctcacatggagaatcagagaatgggacagtgccacaaaacagtctactgaggcacaagttctgagtgcctgggaagtggtagagagactccagagagggctgctgcagtctggaacagct

SEQ ID NO: 123831 - DNA, 572 bp, Zea mays
  Clone ID: MRT4577_44415C.1
tacagaaagagctcgagggccgcttttttcttttttttttcttttcttttttttttttttttttttttttttttttttttttttttttttttaaaactaaaacagggcgtatatttctatttccctcgtcaaaacccaatgcaaataattcatgacattgtttccttgtcacttattacataacattagctacctggaaaaaacacaaacccatgcaaaaacccttttttttttttttttttttttttttttttttttttttggcccctttcccaaaaaaaatattggttggaaaaatgttctctttcttggtacatggaacaacccagggcccttccccccaaggaaatgcttgctaaaaactctggaacaccatccccataattacaggacttgttggtggataccacagggataaaaaaaactggaccgggctaaaaggatcaggggcagggtcaaaaacccggacattttggtgttaaaaaaatatattttcccatgaaaatgctcctctcggggaaagggccaccctaaaaattttttgtcaaggggaaatttgccttatgacttgc

SEQ ID NO: 123832 - DNA, 825 bp, Zea mays
  unsure (1)..(825): unsure at all n locations
  Clone ID: MRT4577_44416C.1
ttcgggtttccgtcagatgatgggcctcccacctatgcccgtatggtttgagactggtattcctcagtcgtggcaatggacctaccttgccccctacatcagctcttgccctcagaacaccactcgtctggcatggcagaacttcccggctctgttcatcgacaaccagcccaaccccaaccgcttctcgcccaacgacacccagccaaacgaggttgctggccgccgcccttctgacccctccgactctactatccccgccgatgagagctgtgtaaacgtcaacgctactgagcaccctggctactcttgctcccctggtatcgcacgcaaccgcagtgagcccctctccttccccggcaggctcgtcaacctgacctgggagaaccccggtaagcctgttggccccaacatgtcatacatcaccgataccgttgctggcgcccccgctttcgtcgcctgggtctcgcagctcaaccttacctacactcctctggagattaccggcaacaacactggatacacctaccagcctgccggcgaagtctacgagggagaccctgccgccaacgacaccatgtttattgctctcaccgactctgacccgtaccttactcccttcaaccttagcatgatcaaccctcatgttgttgcccttggtctttaccaggctggttaaagtgggaacgtattggaaatgtaatgcatcanaggcttattagccggttttaatctgacaattgtatgattattagatgggaagtggaaagagtagcttattgagttgtaatgatacccatctacgaaccaagcattctatcattg

SEQ ID NO: 123833 - DNA, 198 bp, Zea mays
  Clone ID: MRT4577_44417C.1
ccaaggaaactcgagggagttctcactcgtgtgagaaggaagaacctgaatggacatggtgattgttagctaatagaatacggttacgaatactactgacccttgactgcgggggattaataagggtgaccgaataaagtactacaggggggggcactgttaggctggtatttctgctgtgtcgaatcatggtgggcg

SEQ ID NO: 123834 - DNA, 459 bp, Zea mays
  Clone ID: MRT4577_44418C.1
ggggccccccaaacattatccaaaaacttcatttttgaactttaacccataagcaatctaaaaggggccccccccatgatgggttgttggtaaaacactgttgggtttgtcaaaacaaggtggttgaatggcaacaattgttgcagttgtaaaagggggcccccgttaggcataacgtgcaggtaaaacggcccaactgttgttgtgtcaaaaaggcaacagggctcacatcaactaactggctgaatgggaaaaattgttgctgctgtaaaaaaacagcaaagttcaatgctgctagttggttgaaaggaaaaaaatgctgggggtaggcaacaactaactggctgaatgggaattgttgttgcaaataaacagcaaagttcaatgccccccgttggttgaatggaaaaaactgattttgcttgaaaatattcaacaagggttgctaacacaaattgt

SEQ ID NO: 123835 - DNA, 285 bp, Zea mays
  Clone ID: MRT4577_44419C.1
ggaaaaaccaatgttggaattataaaaaaacgaccgcctaaagagtcaacccggaaaaggcgggcgggcaccaacagggataccagatggggaaaaaggggggaaaaaaggagggggatgcgaagggggaaaaaggttccccctatggggagcaattggggggaccacaaaaaaaaaaacctgtcggggtccaaagccaaaaaaggacatcggggggagtctaaaggaaaaagtgcggggcgatgaaagggggaaaaagaggggggaattaagggggggaaaacc

SEQ ID NO: 123836 - DNA, 1769 bp, Zea mays
  Clone ID: MRT4577_4441C.1
gttgcaagtaataaaatacgtaacaaaccatcctgacaacaggtgggttggtgtaggtgatgctacaggggattatccatttagtcaccacaagcttaccgttcaattttcagaggcgtctgctgcccaagataggaaattggagggattagtccataaggccatccgggagctttggaggccgaatcccagtcaattaattctcctacaaacaaggggaattggtgctttgcataaagagcttccaaaagcgtgtgctttgactggcagcagtgatccgtgctacatcgaagcatatcatttggcagatccaactgatggcagaattaccctacatctaaagattttaaatttgactgagctggaactcaacagggtggacatccgtgttggcctgtctggagcactgtattatatggatggtttctctcgcactgttcgtcaccttcggaatcttgtttcccaggatccagtccaaagtagtgtgactgttggagtttcacattttgagagatgctcgctctgggttcaagttttgtattacccgttttatggaagtagtggatcaacagactatgaaggagattatgcagaagaggattcacagatgatgaggcagaagcgctcacatcggcctgaacttggggaaccggttgttttgcggtgccaaccatacaagtttcctctcgctgagctcctcctaccattagagtgttctccagttgagtatttccggctatggcctagcctaccagccatggtggagtgcactggcacatacacatatgaaggcagtggtttcaaggccaccgctgctcagcagtatgacagctctcccttcctcagtggattgaagtcgatttcttctaagcccttccatcaagtctgctcacatttcatccggacagtagctggattccagttatgttatgcagcaaagacatggtttggtggatttgtgggcatgatgatatttggggcaagtgaagtcagccggaatgttgatttgggtgatgagaccaccacaatgatctgcaaattcgtcatgcgcgcatccgatgaatccatcacgagagagatcaaatccgacctccagggctggctggatgatatcaccgacggcgctgtggaatacatgcctgaggatgaggtgaagagtgtggccgccgagcagctgaagatctccatggagaggattgccctgctcaaggcagccaggccaaaggtcccacccgcaaagaccgatcaagaggaggaagaggagcgaaagcagagcgaggaactagatgggtttggaaaccccaagggcccctcgacgctctccaagctcaccgcggaggaggctgagcaccgcgctctccaggctgccgtgcttcaggagtggcaccagctatgcaaagagagagccatgaaagcgcagtgaggtcgatttggaccgtgtggatcttacgcgcatgtataattttgtatttttccttcgtctcccattctttgcgtgtctatactgctggtttcactcactgtataccgtcgccgatttgttcattgtattctcaaatacttgtgcacgaaaaaacctgttttgtaacatactactgttagggcgtttttaagcttcggtgtgaagatcgattgtacaagagaatccaaatgtcattgttgccttcccagttttatgaaaatgcattctaaaaaaaaaaaaaaaaaaaaaaaaccgactaatgagctcgtcgacccgggaattaattccggaccggtacctgcaggcg

SEQ ID NO: 123837 - DNA, 227 bp, Zea mays
  Clone ID: MRT4577_44420C.1
ggaaaaccatcatgaaaatgcaatttttcattaaagggtgacagggaaacgggaccaacagcatgttgaatcaactttgcgctttgtttatcatcaaccaatgaatattacagaagggtgcaacacacttttaaaaagggtgcaacaaggtaaatgtgaacataacccctggtaggattggacattaaaaatccagggaccgaaaatccattttaggcaaacaagag

SEQ ID NO: 123838 - DNA, 1023 bp, Zea mays
  Clone ID: MRT4577_44421C.1
aattcggcacgagggagagattgagggcggagcgtgattttcgcggtgattttcctgctcccatatcgttggcggccggttgatagcgagttgtgctggagggggaggtgcctgtgacaggatctgtggttgctttccgtgggcaacaagctgtgtcgaaggaggtcgaactcccaacgcgatgtgtggtggcggggatagttcaatgacgttttcagttccaacctgtagcgatggtgctccagctcgtgttgacacggtcgatctggtatcgcacctcttcactttccccatccccttatggaaggcgtgagatagagtgtcgaacggagcttcccacgacgatgctgctgtttgccggcgagctctcccccctacccatttcttctactcctttgtaaggctcagagagctgcctacagagagaaggtgctaattgaagcagagaaacagtttcaggacgatttcaattttttgaaggaaaaggtattagttgattttggccaattagtggatgtccaacgtattgacagtatttgccaagttatgtgcgccaagttcaagggttgttgttcggtttgcaagacaaggtgcattgaagctgtagtcgattctgtgaaaattatggttgaagcaatgtctatcaagcatcaggagattttgattccatggcccctctagtgaaaccgatggctgttaagtcaaatgagaaatacccccatactgatatcaatgtgcacccagctattgttaagtcagatgataaagtcgttgttgcggaaattgttgagtcatctgatgggaaaggtcttggtgtgggtactagcaatcccctggtaccagtgcccatacatctgaaaacaccagtcattcggtagttacttacttttttttttgtacggcaatgctgtcatccctcctgtcagataagccaatatagcaatctttttcgagtaggtatgttgttgtggttcaatgtttgtataactccttttccattttagtcatgtatttatgtccgct

SEQ ID NO: 123839 - DNA, 372 bp, Zea mays
  unsure (1)..(372): unsure at all n locations
  Clone ID: MRT4577_44422C.1
atggggcattttaacccatatgccatattcgatcgcctaggattttatttaaaagtgaacattctactttttttaccactaattattaccatattagactacggtaatacaactgatttcacatagggggcgcaaaaagcgatgagctgtgctggaaaatattgtttaattaaaaagctattcctttttaacatatgcgaagactactaaaaagaactgcttttaaatgccaataaactacattttttgcattcatactaaacgccctcatgaatacataaagagggtgggccccnctgagttgaaattgaaaattgatcacacaaagggggggggggggatgccatatgaagacttcttgagttctttctg

SEQ ID NO: 123840 - DNA, 616 bp, Zea mays
  Clone ID: MRT4577_44423C.1
cgccgggctgcgggcgacatgttccggggcccggagaccgagggcggccgggccggctccagggccatgaagcccccaggaggagaggccagcaatctttttggaagtccagaagaagctgctccttcaagcaggcccaataggatggcatctaatatttttggaccaactgaagaacctcagaacatccctaagaggaccaatcccccaggggggaaaggaagtggtatctttgacgaatccacacctgtgcagactcgacagcgtctgaacccacctggtgggaagaccagtgacatttttgggtcccccgtggctgccacctcaccgttggcacacccaaacaaacccaaggaccacgtgctcttgtgtgaaggagaagaccccaaatcggcccctacagccgcaacgagcacgtcacccagagaagagcctggtgagaagggaggccctggagaaggaggccgcgcccagcagcccatgcccacaggtgacagccacgagcccaggctgggcccaaggcctcgttctcacaacaaagtcctcaacccacctggaggcaaatccagtatctccttctactaggagaggctgctgcttcccctgtagccagtcg

SEQ ID NO: 123841 - DNA, 242 bp, Zea mays
  Clone ID: MRT4577_44424C.1
gattcccgtcgacccacctcggtgccgtacctcgccatgggcgttacctaccctgccatgttcccggggggacaccaagagtgcagcaatatcaactccaacagaactgtctacttcgggaggatccacaactaagtcacgtggcaatccgccaggcctgtcatggctcactcatgcaactgcctcatcagagatgttccgagtggcagcattcatgcagtcagagagcttctgcctgtaca

SEQ ID NO: 123842 - DNA, 314 bp, Zea mays
  unsure (1)..(314): unsure at all n locations
  Clone ID: MRT4577_44425C.1
aattcccctttcgacccacacgtcctcctgatcatccaaaaatggactccacccccctcgccgtcnccttttaacataatgacgtgttcttaancctccccctnctcacccataactaacacatccacctctacacatanccccctaaccttcaacatcctccactctatacttctaccactcacctctataatcaactcaatccccacaaactcccctctctatacctattcccccacttcaccctttccctcattggaaactcaatcatactactttttttctcacatgctccaaaattctaccctggactc

SEQ ID NO: 123843 - DNA, 363 bp, Zea mays
  Clone ID: MRT4577_44426C.1
gggtcgactcaagcgtcagcataccagacgaaaccagaccaatggacctgctcctaccaggctcatcgtcccacgggctggcctccacgccggagctaatctccacgaggacttgccggccggccgtcttggataagggcgccgtccagaagaggagcctgctgctggcgacgggctccgacacgaggggagtcgctcaggttaggtccagcgggatcgagaggaacagggtgggtctgggatgtgaagccgtcaccgggcaagtcagtgaggtcaacacggacaccttctggcctatcgtcgatgccaccggcgactaggtcgtcgtcctccaaatgtgcaccgaatgtgtgcgggccttgc

SEQ ID NO: 123844 - DNA, 303 bp, Zea mays
  Clone ID: MRT4577_44427C.1
cgcacgcataggctcgggtgagcgctggttcctctgctcggcgctgtccctgctcgccggtgaagctcactacctggagcggctcagcctttaaggatgcttcctaagcccagcccaaagtgctctacatgagctacgaaacgcccgcgtgatgcgcgcagccgcattcctcgagatcagcccatctcggcaccacctacagactccctggaaccagcgccctgctccctgctgccatgagctccaactcggattcatcccagctgacccttacccatagaccgcgtgtttctctaatcccag

SEQ ID NO: 123845 - DNA, 712 bp, Zea mays
  Clone ID: MRT4577_44428C.1
aattcggcacgaggctaatatataaaaacagagggagaacaactttaattgtttatttatttaccatatggacatattgttgggcaataagttatatcattacttggtttggtgaactgcataaatgctgcttacttggccgtatatgataagatccttgattctatcgcagttgtgaagtgcatgtgaatgtgagattggagttcagtgttggatttttttactttggtaaggcgacgtgatggcatgggtgtagagcagcggcgtgataacgagcgagggagagacagaacgcgtaggacaagcccttgtggcctagaaagatgtttgtcttgcttccttcgtctggttacatcgcccctgtatttatagtccctagaggaattggttcagaagcaaactagaggaggaactcctaacaaactaattctatttcctaaacgagtactgttcacaccggatgtaattctggcccaacacccgcgtggcccgtttccgttgcacataggggatattggtcataacatctctccccgtctcttcaaacaattcgataaatgttcgggtagaggtctttgaagttgtgcagtagctcccaagtagcgtcatcgggggtcagaccctgccactgtatcagcacatgccaaggcccatgatgtgaatgggtgagtagcacactctttgggagagggcacaaccgaccatcctaata

SEQ ID NO: 123846 - DNA, 322 bp, Zea mays
  unsure (1)..(322): unsure at all n locations
  Clone ID: MRT4577_44429C.1
aaaaaaaactttcttttgccttggttgcagtttgtttttcatgggggccatttcaacaaggttgggtttttttggaaaagggccccataaagaggggggggaactttnttggttccaaatgttttgttacaaatgtgggagacatgttttcctctgccaaaatttgttttatgggttttgagactggtggatgaccttttacaaagaaggggtcctttttcttttggggggattgggacccttcttgggccaggaacttatttcagggccatttaaaaaaaaccttttttcttcttaaatttttttgggcaataaaaagggc

SEQ ID NO: 123847 - DNA, 381 bp, Zea mays
  Clone ID: MRT4577_4442C.1
caaacagccaaacaaacgcatctcgaggctccggaaaagcttggaaagctctcaattcaaaatggccatcgctccgatcaccggcatactgcgacgacagctcatccttgacctcggcattggtctcggagctggatttatcatgggaaactggttctggtacggctaccacatgccccgaaccaacggccgagacgagtactacgccaagaaggaggccagccgagccgccgagcgaacccaggcgcagtaaagcgatgcgccatctagaggggtagacggagagggatgcgacatggactatcaattagaggtcaaaatacgagggcaatagtgtgtttccttggctgtcattacatggctgccaagtgtatatcatag

SEQ ID NO: 123848 - DNA, 449 bp, Zea mays
  Clone ID: MRT4577_44430C.1
ggcaattcccccatattttcaggaacgtttcgcagcttttaccaagcaatacacaaaggggccgcctcaacatgacatgggttgagcaagcagtttgtacaaaaaacctacgggcatccacaagcttttttttttgaatattagggcaaaaaaatttttcctcatgcgtacaaagggcccatataaaaaattactttgggcatcatccccaaatgtcactttgaccttaaaggggggaagctaacatcctttatcgccgttctgcccatttaaattgctaaatgttggttggaggacaacctgggggcccgaaaacagggttccccgaggcggaagggactccatggtttttttgaaaacaaactggttttgctcaaaaatgccaacctttaccacgggaataattgcgggaattccaaagggcacgggcatgtttgacttttttgaaa

SEQ ID NO: 123849 - DNA, 140 bp, Zea mays
  Clone ID: MRT4577_44431C.1
aattaaaattggggggggtaatgattgacaattctacaccacaacaacaaggttcaagccccttttcctgcctcaaggatgcaaaaaagaattattgataaacaacataatgtcaaacactcagaaatacaatttaaaca

SEQ ID NO: 123850 - DNA, 331 bp, Zea mays
  Clone ID: MRT4577_44432C.1
gggtgttttttttttttttttttttttttttttttttttttttttttttggtcgcttgccgcttttatttatttattggggacgttcttcgttctagcaagtagcttagctgcgcttcttttatttatttatttaacaagtagctgaggtgggctaattggtttaactgatccatggggtgcacttgggaccaggatagccgtggaagaccttttggcattggtagggaagagggtccgacttcacaaacttgcaccctttggaattgctggggcacgacttcaccaagttgtctcactggcagttggggatgttgtccctttttcagacg

SEQ ID NO: 123851 - DNA, 295 bp, Zea mays
  Clone ID: MRT4577_44433C.1
gggaaaactgggtttttaatttttggttataaccaaagcccacacatccccccaaaaacatttcccaaagggaaacaccccttccaaacttaaaaccctttttggaacggggtttccccccaatgggggggtaacctaacacttaccccgtgggaccggggggacccccccaattttttaaaacaaactgggttttttccggctattaaaccatgggggtttaaaacgacctttttttcccttgaaaacttgggggggatgaccttgggggcccaaacccttttggttaaggggg

SEQ ID NO: 123852 - DNA, 533 bp, Zea mays
  Clone ID: MRT4577_44434C.1
agacaaaaaaacatcaggaccggtgtttttaagataaatgtatattgaaaaaaactggcaccactcaacaataaactcaaaccaagatgtttataatagcactcagctccgaacaacgttagtgtaggtagactagaagggataaatttgtttcccaacacaaacttgacgagctgacccgatgccggtgcccaaactcaaaaactgaactttatatcgtgttgaaagccacagtgtctcaactatggacgtacttattgatgggctcttgcttaaggaggccctcaattactagtgtcaatggacacaatatcgtctacaattgtgcaacatgatacaacatcttcttgatgccgtatccaacaagaacaagctttgatgctccccaaggcagaccctgcatgtgcacactgatgacagactgctacagcttcttcatataagtctcatcgacccatggttttacatccataaggacctgagataaaccactttctttatttttacaaaaggccttggcagcgtgagctcgc

SEQ ID NO: 123853 - DNA, 339 bp, Zea mays
  Clone ID: MRT4577_44435C.1
ggagagaaaaaaataacgatgaccggtttgcattataatttattaggagactgcacaccggtgccaaaatgtgccacggcccacgagcaacaaacatgttatagtatttaagcacaagatgctactggagcttaagtttcacaactggcgccaataaatgctgatgaagtgtgctgacatcccaaatgcgggtgcctgaattctttccgcacggcattcacgtttgcagaaaacaccgtaatccacgcgcaacattagttggggattaaccaaaattgatttcctgggctagagagagcgttgctcccataacaagggaaacactgtagtgccagcctg

SEQ ID NO: 123854 - DNA, 394 bp, Zea mays
  Clone ID: MRT4577_44436C.1
agtgctagagataattatgaagccagacatgaaagtttgtttttcgacaaatttatctaagctcaatgaaaatacagcagaaggaatatctcaaaatcttttccagatgacctgccaaacattcgatcttcaagctataattaagtatggtagtcataatctggatacctatttccagtaccaacaccaacatatgcaaccttgaaaacataaagcagagacagtgctcagtcatcatcatcttcaatgcagatgtcactcgttgacatagccttccttgcgcccctcaaaaccagggcgcataagcttcttctcgcgcttctctattttgcgtgccttcttctcctgcgcccggccctggatgttctccttccgcttattctgcttttgcttc

SEQ ID NO: 123855 - DNA, 474 bp, Zea mays
  Clone ID: MRT4577_44437C.1
gggcaacatcggggggcccacaaaaaaaagggatataatcggagcagggcccaggcccaaaaacaggttgatagtatgaaggaaaaaacaaccctcgggaaaaattgggaggcatgggttttgggatcaccggccctgcctttccaaaaattgaacttggggcattttaaccccgttccatagggggggatatcatcacccaatagctagaaaaaccacaggggcaggcttgcagggagggctgcaacaggttggggatcccccaaaaggtgctgccccattttttgggaaaataaacataaaagccaaaggtgatcaggcggcttttgaaaaaaaccataaaagggctaaacctgtttcaacccacgagtgggaaaaaaccatccttcaggccttaatatgttcagctggtggtagaaaaaattctttaaactcatccctgttctcagaatacaacccaaatataacccgaac

SEQ ID NO: 123856 - DNA, 662 bp, Zea mays
  Clone ID: MRT4577_44438C.1
aaaagcaaagcaatgcctattctttcctttgaaggcagcacatggatggacgaccctaggggtacctcaaggcaaaaaagaaaaaaaaaaacatcaccttgttttgaagatatagcaacaacaacatatatacatggtgtctgcctgtctggagtcccaaactgcttcgagacaaatgcatttgctctttgctgttgcagcactacactgatagcatgctatttttttgttttgtttttgcaggtgcaaggatcaggtgaacccactgaagaagggctacaagtttacgaaccaacctctgaaggaccttggcgtcaagttcacgccagtgcatgggtacctgtacgaagcagtgaagtccctgcaagacaaggggttcatcccgaagacctctggcgccaaggtaataacatgttgcctttttttgttgttccaggtgcctgaacgacgcagctgcatgcctcaaacgacatcacagccaccgcccgaaatcgtttcgaaactttgaggtggatctgcacacgtgctcaaaatagcaaaaatgtcttctctgtggtgcatcctgttgctcttgcactacaagtacaaatccttgtctgggtagtctgttctttacatagcacaatgcgaagtctgcagggcgatttcagcggacgcgtggg

SEQ ID NO: 123857 - DNA, 1713 bp, Zea mays
  Clone ID: MRT4577_44439C.1
agcgtccgccagcgtcattggcaccctgcgcggcggccgtgcgcggggcaccaccaccacccgtcccgctcgacaggaggaggaagaagaagggaccgggcgacagcgcgcgatggccgccgtcgtgtgcgtcaccggcgccggcggcttcatcggctcgtggatcgtcaagatcctcctcgcccgcgggtacgccgtccggggcacctcccgccgcgaagctgctgaccccaagaacgggcacctgtgggcgctcgacggcgcggcggagcgtctcaccatgctgcaggtggacctgctcgaccgcgccagcctccgcgccgccttccgcggctgcgacggcgtcatccacaccgcctcgccgatgcacgacaaccccgaggagatcatcgagccgattatcgcagggacgcggaacgtcgtggaggcggcggcggacgccggcgtgcggcgcctggtgctgtcctccaccatcggcaccatgtacatggacccgcgccgcgaccccgacgccccgctcggcgactctagctggagcgacctcgagtactgcaagagcaccgagaactggtactgctacgcaaagacggtggcggagcagggcgcgtgggaggcggcgcgggcgcgggggctggacctggcggtggtcatcccggtggtggtgctcggcgagctgctgcagcccagtatgaacaccagcaccctgcacatcctcaagtacctcacgggacagacaaaggagtacgtcaacgagtcgcacgcctacgtgcacgtcagggacgccgccgaggcgcacgtcagggtgctggaggcgcccggagccggcggccggcggtacgtctgcgccgagcgcaccctgcaccgcggcgagctctgccgcatcctcgccggactcttcccggagtaccctattccgacaaggtgcaaggatcaggtgaacccaccgaagaagggctacaagtttacgaaccaacatctgaaggaccttggcgtcaagttcactccagtgcatgggtacctgtacgaagcagtgaagtccctgcaagacaagggcttcctcccgaagacctctggcgccaaggtgcctgaacgacgcagctacctgcctcaaacgacatcacagccaccacccgaaatcgtttcgaaactttgaggtggatctgcacacgtgctcaaactggcctttttttcagaacaagccgttcatttgattggttattaaaagattttgggcagtctgttcttacatagcaaaaatgtcttgtctctgtctatggtgcatcctgttgcttttgcactacaactatacacatccttgtctgggtagtctgttctttacatagcaaaatgcgaagtctgcagggtgatttcagcgatgatggaagcatgcccgcccacctcttgactgcatgcgctggtcagctgcggcttattctacacatcttgcttgtctgtactagcctttgcatcgtgccttcgtattatgcttttctcctttcatagtacttattgacctttgcggccatcatcatcattttcatgataggccaccttgcccaatcttgggtatggacttaaaccttccttgctaaatatggctcgtctccgtgctccattttcgacccaacaacaagaacttgatcgaccccacccaccaccatgagtcgtcctcgtccatgacttctcagtgttgcagtgtacgttgcagtgtac

SEQ ID NO: 123858 - DNA, 288 bp, Zea mays
  Clone ID: MRT4577_4443C.1
atttatatttttttttttattatttggcagacagggggcgaattttcaaaaggagaagactatctccatgtaattattacaagagaaacttgtttgcttgaaataaaaaatgagaaattagaaagcccgttaaactattagctaaactgttcggatgttttcagttaattttagccacagctaactattagcttaaacaccccataattcaaagggcgactgtaggacatggaccctacacactgctatttacccgtttaaaaacataatatcctgctactggaggcc

SEQ ID NO: 123859 - DNA, 764 bp, Zea mays
  Clone ID: MRT4577_44440C.1
tgctctcccatctgctgatcctgtgaagcgatagatcacttctcgatttcgattccggttccgctcaaagaattccccacgcgagctgagcgagatgacgaccgccggtaaggtgatcaagtgcaaagccgcggtgcagcgagatgaggctaagccgctgtccatgcatgaggagcaggagctgccaccgcaagacatggaggtgcgcgtacagatcctcttctcctccctctgacacaccgacgtctacttcatggcagggcaaagggtacacatcgccatgttccctcgaatcttcggacatgaaacctcgcaggcatatcgttagacgatcggatagggcgcgatgtgacacatgccctcgtgcctgcacacatgtgcctccctagagtgcactgtaacagccattggtgtgaccacctctcctgtcacgttcacacaaacatatgcgaactgcatctcgatgagccacgacttattatcctggacgaccccatggactgatcaccatcctaactggagagtctgcacttgtaaacatccccaccattgtcttctgtgacactgactctcgctatgcgatacggtgatattggcattcctgctaactacaaggcgaattagagcattggctgcctatattggctgctcgccagtatgcttctgcagatgcttggtaccattctcccaggacacgagtggaaaatcatgattgatctgctcttctacagggacccagaggaagctaaagagcttgaggaaga

SEQ ID NO: 123860 - DNA, 1842 bp, Zea mays
  Clone ID: MRT4577_44441C.1
ggctaaaaaacttttctattagaattagctaactaataaatagctagctaactattaactaatttactaaaaatagttaatagttgaactgttagctatagggtttggatatctctagctaattttagctactaactattagctatagtacatttaaacacattcaaacacctcgtagtcatagatactgtccttactgtaagcctttttgttgttccagcaggggtaccctcgaggccggccggggattccgcggataaatgcttgcccctatttgctcagcccgctctcggacgaacccattcacccgtccggccgtccgtgcgcggcgcacccacccggcaccggcaccagcaccaccgcccgcccggcgcccgtcacgctcgagaggaggaggaagaagaagggactgggcgacagcgcgcgatggccgccgtcgtgtgcgtcaccggcgccggcggcttcatcggctcgtggatcgtcaagatcctcctcgcccgcgggtacgccgtccggggcacctcccgccgcgaagctgctgaccccaagaacgcgcacctgtgggcgctcgacggcgcggcggagcgcctcaccatgctgcaggtggacctgctcgaccgcgccagcctccgcgccgccttccgcggctgcgacggcgtcatccacaccgcctcgccgatgcacgacaaccccgaggagatcatcgagccgattatcgccgggacgcggaacgtcgtggaggcggcggcggacgccggcgtgcggcgcctggtgctgtcctccaccatcggcaccatgtacatggacccgcgccgcgaccccgacgccccgctcggcgactccagctggagcgacctcgagtactgcaagagcaccgagaactggtactgctacgcaaagacggtggcggagcagggcgcgtgggatgcggcgcgggcgcgggggctggacctggcggtggtcatcccggtggtggtgctcggcgagctgctgcagcccagtatgaacacccatgcaccctgcaccgcggccagctctgccgcatcctcgccggactcttcccggagtaccctattccgacaaggtgcaaggatcaggtgaacccactgaagaagggctacaagtttacgaaccaacctctgaaggaccttggcgtcaagttcacgccagtgcatgggtacctgtacgaagcagtgaagtcccttcaagacaaggggttcctcccgaagacatctggcgccaaggtgcctgaacgacgcagctgcctgcctcaaacgacatcacagccaccacccgaaatcgtttcgaaactttgaggtggatctgcacacgtgctcaaactggccatgtgtttttttgtcagaacaagccgttcatttgattggttattaaaagattttgggcagtctgttcttacatagcaaaaatgtcttgtctctgtctatggtgcatcctgttgcttttgcactacaactatacacatccttgtctgggtagtctgttctttacatagcaaaatgcgaagtctgcagggtgatttcagcgatgatggaagcatgcccgcccacctcttgactgcatgcgctggtcagctgcggcttattctacacatcttgcttgtctgtactagcctgagttcaacaaggaacaagtcagtctacgcatcggttcagcagaaaacccgtttctacgtgtcctgtttcttggaatacaaacgagatagaaaacggtattgtacatgacatcagggctagttcaagagccacaaaaccagatagattggaggggctagaattctctttttattcaaatttaaataaaaaggggattttaattctgtca

SEQ ID NO: 123861 - DNA, 357 bp, Zea mays
  Clone ID: MRT4577_44442C.1
tcacagtcatacttgaacagctaccttcttcttgaggagcttgccctggccatcgcggacatcactcaaacttttcaaggatggcacggttgtctgcaaaacatcctctctccattatctaaaaaatacttctattacatcaatgccccattcgtctttagcgcgcgcaacactgagtgcactgtcccgttcatgagacacgatgccagcattgtctacgaacgtgtgtaggcccaagcccctgatggtcgcctatctgatcttcaaggtgaccaagatcaagcttacaggaaaatcaagctccgtgcttaagatgtgcaaggcaggaatgtgctcacaaacttcttgggcatgaat

SEQ ID NO: 123862 - DNA, 777 bp, Zea mays
  unsure (1)..(777): unsure at all n locations
  Clone ID: MRT4577_44443C.1
ctcttaatttaggacggaaggatattatatatcattgtatatctctgcgcttggcttgcaattgcaaatgttatgctgataaactgaagaggtaggtgtgaccgactgaccggtgccttggacgattccttaaaagcaaagcaatgcctattctttcctttgaaggcagcacatggatggaccaccctaggggtacctcaaggcaaaaaaaaaaaaaaaaacatcaccttgttttgaagatatagcaacaacaacatatatacatggtgtctgcctgtctggagtcccaaactgcttcgagacaaatgcatttgctctttgctgttgcagcactacactgatagcatgctacttttttgttttgtttttgcaggtgcaaggatcaggtgaacccaccgaagaagggctacaagtttacgaaccaacctctgaaggaccttggcgtcaagttcacgccagtgcatgggtacctgtacgaagcagtgaagtccctgcaagacaaggggttcatcccgaagacctctggcgccaaggtgcctgaacgacgcagctgcatgcctcaaacgacatcacagccaccgcccgaaatcgtttcgaaactttgaggtggatctgcacacgtgctcaaactggccatgttttttttttgtcagaacaagccgttcatttgattggttattaaaagattttgggcagtctgttcttacatagcaaaaatgtcttctctgtggtgcatcctgttgctcttgcactacaagtacaaatnctgttctgggt

SEQ ID NO: 123863 - DNA, 460 bp, Zea mays
  unsure (1)..(460): unsure at all n locations
  Clone ID: MRT4577_44444C.1
ttanatttttttttaataacattaaaatgatttggtttgcattcatctatgcaagatgtgactcccacatacaaacaaacataatctaaaataaagtcaacgcatgtggttatctaagatgagatggtgtagataaccaatcaggcggtaggtgaagccgcacatgcaatgattttgctaatcatggcacgtttattaattaacgagttgtgttttccttgcgagagtttgtgaggcaatcagggctaatgcagttgatgcgctctttttctgcgcttatgcttgttgagagggtatacaaatcactagctagctagcatgcgcgaaaaaagaacagtagtgtgtatatgtatggaacatggacgaacacacacgcagctgaaacataacaaaactcaagcgacgcgtggcgaacttgtagctgacgacggcgtgcagcagaagcagcagctgcgaggcg

SEQ ID NO: 123864 - DNA, 511 bp, Zea mays
  Clone ID: MRT4577_44445C.1
ggccctaggggccttttttttttttttttttcgattttttttttttttttttttttttttttttttttgtttgtttttttttttttttttttagtagtgaaacggggaaacccctccctttatttattggttggacgacaaagcctcactggattggaacaaagggttattttccccgggggtggaaaaaatgcctccaaaacctctgggggcggaaaaaaaagaaaaatttttcgatccaaaccacacaacctttttttttgggttgcacccccatcatgagggcccccatttctaaggtggggtaaaaatcgttcttggtggggtttttgccggggttgaactggttcaaccccttgggaaactccttcatggagagcgggtcaatattgttggggtcaaaccaaacaaaggcataatgttcggtggatcccgggaacctttataagttgtccagaaaaaaccaacgcaagatgccttgcacatttgatcccaaatttattgaatcctt

SEQ ID NO: 123865 - DNA, 265 bp, Zea mays
  Clone ID: MRT4577_44446C.1
ttatgatgaacttgagcttggaactggcctgtgagaggtgaaaagcactggggcatgactccaggcagtataagacgtcaggcttggggttggcagggatactgcactgggacagaattcatgatctgcttgcagctagaacaaaggtcacaggcttttctgatgctggagatttttttcgtgggaaggagtactcctggaacttttacgcctggtcaagctataagagcggtgtgaatttacatggatcagccaaaaagttacc

SEQ ID NO: 123866 - DNA, 2011 bp, Zea mays
  Clone ID: MRT4577_44447C.1
acgtcctttgagctagttgcaaggttctgctatggtgtgaaaatagagctttcacctgcaaatgttgtctacctacggtgtgcctcagagcatctagaaatgactgaagaagtagctgaggaaaacctacgagcacagtcagaaatgttcctcaaccaagtggttctccgtaactggaaagattccttggcagcattggaaacatgtgatgacctactcccccatgctgaagacctccagattgtgaacagatgcatcgagtcattggcatcaaaagctactagtaatccaaacctctttggatggccgataagggaacatggcatgatgcaaagtcctggtggcagtgtactatggaatgggatcagcacgggtgcaaggcccagaaatttcaattcagactggtggtatggtgatgcttcatcattgagttttcccatgtataagaggttaatctccaccatggagtctcgaggcatccggcctgaaataattgctggttccttaacctactatgccaagaagtatcttccaggacttaggcgtcatagtcatagcatgggcacaatgcctcttactgctactctatctgaggttgaacaaaaaaatttacttgaggagatcgacaggcttttgcctcttcacaggggtatagcatcgacaaagttctgcttgggctccttcgcactgccatgattctgaaagccagccccacgtgcatttctaactgggagaaacgaattggcatgcaactagaccaggccactttggaggatctactgctgccaaatttctcctacacaatggaaacactgtacaatgtggagtgtgtgcacaggattcttgatcatttcttggcaatggaccaagcaaatggtggcgagtccccatgcttggatgatgttatggcatccccatccttgacaccgatcacaagtgttgccaagctaattgacggctatcttgcagaaattgcaccagatatcaatttgaagcctcctaagttccaagctctggcctctgctattcctgaatatgcccggccactggatgatggcctttatcgtgccattgacatatacttgaaggctcattcctggctgtcagaagctgaaagggagcagttctgccggctgttggactgccagaagctctccctggaagcatgcacccacgccgcccagaacgagaggctgccgttgcgcgtggtggtgcaagtcctcttcttcgagcaactccagctaagaacctcgatcgcagggtgcctgctggtctcggacaacctcgaaggctccaggcctctgcggagcggcattgccacatccggcgaggctggaggctgggccacggctgtccgagagaaccaggtcctgaaggtcggcatggacaacatgcggacgcggctggccgagctggagaaggagtgctcgagcatgcggcaggagatcgagaagctgggcgggcgcgctggtaagggcggcggtggcgggtgggcctcccgcgtcgtgccccggcgactgggcctgaaggtgaggtcgcagatgtgcagcgcccaggagggctccgtcagtgagcagcacaggagcatgagcgccaagctcgacaagctgcaggctaaggtgtcgaagcagaagaagcagctggccgcggatgcctgaagttgaggtttcgagactccggcttcatggcctgaccttgtaattttagcccggtatcaattgtttttgcctctcttttgttgcctgtgtagctgttaggcgaaacgtccgagtgcagtgtgtcggttcattcttgaaccgtggatggtaccaagaagaatgggagagtgtcctagctaagaacacgaacctgatgtgatcagttaatagtttgtgaccggtaaggaaaatgtcgcttgcttggttacttttgtgatctgtgacataacacgttcccaaccaattaaacttttctgtcaaaggggggggggggggggggggggggggacctcgcggggagggcccgggtaccc

SEQ ID NO: 123867 - DNA, 525 bp, Zea mays
  Clone ID: MRT4577_44448C.1
gctgcatgatgagtcaacttcttaacaaccgggatgtcactgaaattacaagggaggaagaaggataaagaaaggagctaataagctaatgacatcgtctgatcctcccgcattactctgcgactactcggtactcactcatgcatatcatgctgctgctcctgctgcggcggcggcggcgggtggtggtgatggtggatgtggtgcggcggaggtggaggtgggtggtggttgtggtggcgatgctgctgcggcggcggcgggggctgggcctgggcctgggcctgggaggatgggggcgagggcgggaccttggcgaggtgcttgttgttgtgcatccacaccttgaggacgcgccgggagacgccgacctgggctcagaatacgtccacggcgtcggcgcccggcttgtggatgcgccagccgacgcggtgcgccaactcgcgcatgcgggccttctgttccgccgggaacttggtccgaaaacgcttcttgcttggcgccggggaagcccaagcccacccc

SEQ ID NO: 123868 - DNA, 478 bp, Zea mays
  unsure (1)..(478): unsure at all n locations
  Clone ID: MRT4577_44449C.1
tggctcggaacctttgggctgatttatgtgcttgtttatgtgcttgggaggttgtggtggtggcctgggggttgtagggtgctgggatttaggtggggccgtgcttttgtggtcgttgtggtggagtagtctgttgttggccggttattgcggtctgccgtagctgtcggggaggtttcttgtggtcgggtgttgtgttgtgttgatatgcctgagaagtccaacaagacaggactgggtatgcatagtaatgcgcattgggtgagggatattgctctcggttggactgctgtctccaaaaaggcttgtcctgacaattctgagttagaaagtgctaagcccacggtttgggaaacatcgacttcaaggagatctgattattttaatactactaaaccagagggtccggctattcntaggacgctacgtaattccccattccgtcctgagcatacggagtacgactccgtcggctccg

SEQ ID NO: 123869 - DNA, 389 bp, Zea mays
  unsure (1)..(389): unsure at all n locations
  Clone ID: MRT4577_4444C.1
ggccacgcgtccggtgggtgtgcacacacaaacgccattcgcnactcattttctttctctaatactattatactaagctcaattctcagaagancacgccganaccacccccaaaaatgcacatgcatacaaataaaaaatacacactccaacattaaacatacaaatcaatgaacgaaaacccacaaaccgaagaccacaataaaaaaaataaccataaaatcaaacaataagccaccaataaaggataagacaacaacatcattaaaaaccaatatactaaaccactacaacaaccctatctaatctttaaacaaaaaaaatttcacaaggacacaattcagagaggacgacccctattaattacccaaaaataaaccacaaaaaca

SEQ ID NO: 123870 - DNA, 222 bp, Zea mays
  Clone ID: MRT4577_44450C.1
tttttatttttttttttttttttttttaaacgggggcatttaagaaaataacggtttgtaaattatgaccaattgttgcattttaaacggaggctccacttggtggaacccttgcacaaaacaaatatgcattaaaatggctcaaaagccaaactgaatcccttccaatgagccacacactgtcggttaacaaatagcggctgctttgggctctggaggcag

SEQ ID NO: 123871 - DNA, 152 bp, Zea mays
  unsure (1)..(152): unsure at all n locations
  Clone ID: MRT4577_44451C.1
cggctcaaactcgtctcccatctacatcttccacacaacatacaactctannnnncaaatnnaannnnangacncantaaaaaaccagnanaagcaataaaaggaacgagccaggccgtagtcatacacctactggttctgttaatgaagta

SEQ ID NO: 123872 - DNA, 487 bp, Zea mays
  Clone ID: MRT4577_44452C.1
gggaccctcgaggccggccgggccggggaatcaaaaaagagacggagaaaaaaaaaaaaaataacaaaaaaaaaaaaaaaaaaaaaaaaccccccggggcaaaaaacacagaacccgcctgcctcgccgccgaaagggccgccgccgcctccgttgcaagatccttcctccggtccaggggttcatcgtctctccgaagggggggggccaaagccgcctcggggggggaaccggaaccggttccgttgccgagggggatgcccacctctgccccccgggaactcctaaggtcgccgggggaaatgagaagggggggtcgggagtccttgatgcccatgcacagggccacggtttcagggttcatgacgtcgtttctcgccgccccggtttgaaaggaattcggttggttatcaaaaggtcaagttgaaactaaaggaacttcttggaacccaaaaggggaaaattttttataaaatcccaccaaaaa

SEQ ID NO: 123873 - DNA, 317 bp, Zea mays
  Clone ID: MRT4577_44453C.1
gagacaatgatatctcgcgagtatcatttcattctatctcgacgagcgatactattgagagtgtggtacgagaggatgttcatggagactactgggttcagtgatccggtaagacagcggatctactatgtagcttcagtgaagctgtgagtccatatcactggtcaaatccttgcgagcctcgtcatgactcaagtaaaggttcgagacgagtcatatgctgcccatgaagcagaggctgactgactccaacattctgcagcacgtcgtgcatatgcactgggctatgcattcaacacgcttgaaggattttcata

SEQ ID NO: 123874 - DNA, 191 bp, Zea mays
  Clone ID: MRT4577_44454C.1
cgaacgcgagtggtggtgaactctcatttttacctacaacagcaacacagggggggatttagacctactgctgtggccaaagcaccaacataccttaaacaacagttgctgaaacagattgaactaagtctcatcttaatagctcagatcaacattcctgccaaattgcaacagactgatacattcaacca

SEQ ID NO: 123875 - DNA, 322 bp, Zea mays
  Clone ID: MRT4577_44455C.1
actcggcaaacatatagatccaggtagtgatatgcgtacgcaagtttccattagggtactcgcacttacacaaaataacaaagtaggtacaaagtacatacagagccaacgccaacactagatggcttactattattatgcagctttttccaaatatagaagaccaccaggagccttaagaaagccttcaacgtcatgtgctcaaatgcatgggcatccatgaataccgtaagcacacccaccctctttatttatgacatagtcacgccaagccaagcatggttcccacacacatacatatatggatgacaatatatatcgt

SEQ ID NO: 123876 - DNA, 343 bp, Zea mays
  Clone ID: MRT4577_44456C.1
gcggccggggcctgaatttcccccttaagggggccggggccagggaccaagtcaaggcaatgaccctctatagccgcatttatatatagaggatgctattaggatatagaccctctataaccaggattatataggatcggataatccacacaaggatacgaatgatgatacaacgtagaatctccagggtatccccaacgatgaatggacactatgtacctcttttctatgagaatcgagggtaacctctgcctacattatatattaaagggcactgcatataggagctaatgaataggtccgcttgttcgttgaaagacatagcgaccccgtgagtaaaaga

SEQ ID NO: 123877 - DNA, 104 bp, Zea mays
  Clone ID: MRT4577_44457C.1
gttacaaggatcacgcctaggtctgtctgctatgaccagaatacagagttcgtggcggtcttgataatatcgatcgacggctgcagtcccggcctaaaattgaa

SEQ ID NO: 123878 - DNA, 766 bp, Zea mays
  Clone ID: MRT4577_44458C.1
aaaaaaaacaaaaaaaaaaaaaaaaaaatgattttattgagaccggaaactgtgaaaaaaaaaaaaaaaaaaaaaaaaaaaaaaaaaaaaaaaaaaaaaaaaggttgtccccgtccggtttgctatcctccactgtcatcttccatggcacgattacaaggttggctctcaagtctggggcacatggagcgaaccgagcaagtccgcgcctccacgggggtcctttcgaagcataagcaggtaaaatccatcctgctcttgagttcttctaaccctttttactcgtttcctgaatgcaaatttggctcacgtcggccaggggcaaaccaaaaataaaattggagtgagagcatacttgtaaggatgaacatcaaaataccagagcatgggcatctaagttggactgactaggggaccgtatggcaaaatctgaactatactacttgcatcaaaaaagtgagcgagggcctgggccctcacacctatgtatgtaggtccagggtttcccatggtgacacttaaactaaattccgtgcttcagagagttgaaaaaggccctgggaacatattggaacacattaaaaaagttggaaaggtcagatatgcaatatgatgttctaggagctaagtttgagtgaaattcagtgaaagggttgagaaggtctaaaatatgaagaactatgactcggtgtggttgtatggactaaggataagtttatctaagtcatataagtgctcaagagtatatacaaatgaagagaacata

SEQ ID NO: 123879 - DNA, 453 bp, Zea mays
  Clone ID: MRT4577_44459C.1
cctcgaggtcctgtgccgggtcggaaaatgcaaaagatttagttcgacacatgttggagcctgatccaaagctcaggctaactgcaaagcaggttcttgaacatcattggcttcaaaatgcgaaggctcctaatgtccctcttggagatattataaagtcaaggctcaaacaattttctaggatgaatagataagattaggtgtatgtgtttaaataggtcattgctgatcatttgtctgctgaggaagttgaggatataaaggatatgttcaagacaattgtatcttatgaagaactgaagactggaatagcagaactccgagaacagcttctaggctgaatcaaggaggagctctgccaagtaggtttttttacagagaccttaacttttgctgattccatgaacagcttctaggcgtgaatttgggctctgatcatatatcactgggctt

SEQ ID NO: 123880 - DNA, 599 bp, Zea mays
  Clone ID: MRT4577_4445C.1
gttgaagcaccctaccggcaagaagaattctttctgaacattgctcttatggaactccagtgtacctcgagcctgatcaaacgtttgtccctatctggttccactaaaacaactttatttggctcattggtttgtcagctgtgatatattcatctcctacttgctgtaggccttgtagtcaggagagcattgcatgtataaatgatcaatctggtatttcaggtcagtgcaaatcgtcttttctataccatttgataatcatttttccatttaattttgcaactcagcttccaacatttccattaatatttgttcttaagctctcacgagatatctgagaagggcattttagtttcctcttttccttcacagttatggtctatttgtagttgctgcaatgtactattataaccagcaaccatgagaagggcattttagtttcctcttttccttcacagttatggtctatttgcagttgctgcaatgtactattataaccagcaaccatgatgttttagtgccttcctagcatcgtggttttgtattgaggtccacaacttacctattatttctatatgcctacaggaacaagtgagact

SEQ ID NO: 123881 - DNA, 308 bp, Zea mays
  Clone ID: MRT4577_44460C.1
gactaattggcacaaaacatcggggaacactatctacaccatctagcgctagcggacatcgctaggtactctcagcatcagcagcttgttccatttaaccgactagctgaatcgaactttgcttcttattggtaacaacatcatctaccattcattctgctatcagctgtctaatcacagatagttcttgcatgcgaccaaccgactgtatagaactatacggtttatctacagcatggacaacgtctaccatttatacaactcgctggtgagagatctgctaccttattgacacaaccacaattggt

SEQ ID NO: 123882 - DNA, 315 bp, Zea mays
  Clone ID: MRT4577_44461C.1
ggggacgaaggatcttatttttttcccattggcataaaaaatcaataattcaatacaaacacacttcccttagtcctcagaaaggggaaaaagattaacaaaaaagaggggtaaaaaaatgcaggctttactcttggtcatctcctagggttttacccctgcatttgcatggaccccaggaagcaaagctctggggctcttccctcctctggtctgttccagtttcaagaagcggagtccccaggaagcaaagccagagggcttggtcacatactacgccacaacgggtggtttgatttgattccctacccttgg

SEQ ID NO: 123883 - DNA, 154 bp, Zea mays
  Clone ID: MRT4577_44462C.1
ctagcgggcaccgcgttcattgccatagccaagaagggcgaggagtagaaatagggcggggcgggcattatttacatgcattttcagaaggtcaagtgcaagtttggttctaagtttacacctcacttggagaatgggtgcaacctttactacc

SEQ ID NO: 123884 - DNA, 411 bp, Zea mays
  unsure (1)..(411): unsure at all n locations
  Clone ID: MRT4577_44463C.1
ggcgattgggtcccttgaggccggccgngggaaaaaaattacaaaaaaaaaaaaaaaaaaaaaaaaaaaaaaaaaaaaaaaaaaaaaaaaaaaaaaaaaccccccccgcacttgggcctcgccaaattttcccctcggcctccgcccagtcccgaatttccaccatcgcacctcgaaaatgccccagaaggctccaaaaatccaaagttgtcccttcccaaccctcccttcaatccctggggggggggccgggaccatgacgaccggatccaatggggacggagggggcgcggggtcctggaacccgaagggccgcccgaattacgggtacgggggggggtccgcctccttcaggggttgtggctgatgccttttcctgttgctccccttcctggcgctcctcgccctggc

SEQ ID NO: 123885 - DNA, 249 bp, Zea mays
  Clone ID: MRT4577_44464C.1
gtgttggcccccaaaagtgggggggggtaaagggaaaacatttccacgttatgcaccgggcaccccccagtttttttaaaaagaagggtcaccctcccggccgcaggaatgacaaaaaaaaaatttggatccggggcccaaatccaagtttaccggccgggggaggaaaaggttaagattgttaaaagggccaccaaactcaaattcaggggggggggaaaaaaacccctgggaaaggaaaaaccctgg

SEQ ID NO: 123886 - DNA, 731 bp, Zea mays
  Clone ID: MRT4577_44465C.1
ccggccgggaacacagtctacctcaacagcctttgacatacatactactctctacatctttcttcaaacttgattctatttcgcaaacatggctcccatctctgttctcctcaacagcaacgtcacagacgacaaaggcctccaagtcttctacgttaccagccaggataacctgggtgttgccctcagaaactctgctgccaaaggcgttgactcgcaggacttttacgaggcagctgccgatgcgcatgtcggtctcatccccgtcaagtccgagattggcagtgccgtcatgaacggtctcaatctcgtcgtggccatcaccaagcacaagctgaaggatgaatgcgagaagcccactcttaacgatgtctccatcgtgagccctgtctaccaggttctcgataccactggtatcaccaacaccaccgctgccatcgtctctaacgaggacaacagtaacgcatgggtctactacttgaagggctccgatcctaaggagatccaaatctgcgaatatgagttgaccaccggcaacatcggtcccatttcgaaccttaatattgatcctgactgctcgctcggggctttctatgatacaaacggcaacgggagatccatcatctaccaggattaggatcagggccacatcaaggaataccaaatagagtccggtcagaccatcgacattggcgacctctgccggtgccaactaacccttagtctcgctg

SEQ ID NO: 123887 - DNA, 340 bp, Zea mays
  Clone ID: MRT4577_44466C.1
actgaatagagccttattacaacagtcctcacgtagcgaaataaataaaaaaaaaaaaaaagaacgaaaaaaaaacaaaaaaaaaaaaaaaaagcaaaacaaaaaaaacaaaaaaaaaaaaaaaaaaaaaaaaaaaactataaaaaaataaaaaaaaggaaaaccggggaaaaaaaaggggagggacaaaaaaagaaaaaaaaaagacgacaaaggacccccaaatttcagaaacacccaccggaagcaagcaatggaaaaaataaggacccggcgaaaaaaaaaaacaagggacagggcttgagcccctaaacaggccaaaaaaccgctttttagggaa

SEQ ID NO: 123888 - DNA, 826 bp, Zea mays
  Clone ID: MRT4577_44467C.1
atactcttcagaggagctcacagctcaatgtctagttagctacgcacaggggggcgaaaatggatccgcttctcgctgctgccatgaaccacatctccagcccactcctgatgcttacggaggcacctagtaggacccaacaatgacagcatctcacgtgaccaactgccgtcttcttctccacagagtagcaagagataggtagcaagcttagatttactacaccatctgctagagaagagagccaaaatggagtccaaatgttgagcccctctcagagcccacaaagggattgcgtttcctctgacttcaccttcggcgacgacacttcaatgtaccagagttgaaggtgcttggaatgaacatgcaaagggtgaaagctattgtcgatcacttctgccagaatcatccggaaaggatactggagcggcagcaattcagagattgcagcgaattcataccatatggacaaaacgaacgtcagattgctctggggaatggacatggacacatataggttctctatctcttggaccaaaatactgcctaagggaagcaaagaaggaggtattagcccgtatggcatcgagtactacagatacctcatcaacttgttgctagaaaacggcatagagccatatgtaacaagtctccactgggatggacctcaagcactacaagagaagtacggtggcttcctagataagagtcataagagcattgtagaagattacacatactttgctacggtgcgctttgataacttcggcgacaagtgaaagattggttgacctttaatgagccccagacatttacttccttttcc

SEQ ID NO: 123889 - DNA, 352 bp, Zea mays
  unsure (1)..(352): unsure at all n locations
  Clone ID: MRT4577_44468C.1
ccgggnncgacccacgcgnccggcnatgttagtttgcggngnagacgagcanncaccngacagggaacaancnccagangcagcaccaagngccaagcaaaagncaagccnnnagaaaaccagaccggcnncgangaacaagncaacaccaccaccnggggnncggnagcaccanagagcagnngnggnagcagcagaaacgggaggagccnnaggnggcaaggnaagacagcncncgagggaccagnnngagaaagaaggaagaagggncannganggcaccccagagaaagcaacngccgcaaggaaanngccggaacgacaaangncnnacaacagcgggcccaaaaag

SEQ ID NO: 123890 - DNA, 383 bp, Zea mays
  Clone ID: MRT4577_44469C.1
tagacacatatttcatttattcatagattttctccaatcttacagcactcaacaatctagctgtatgaacaaatatctggcgaaaaagaacaaccatacaatgctgtcaaagcaaagcttatattaagcacctcacaattgccactatcaccattaacaccatacatcccaaatataccataaaaaatattcaaccctacatgaccagtacacaccattgataacagcacacacacacatcacatcaatactctaaacattacaaccaaacacaccgtacaagtccacagactctccagcaccatcatcatctgtcagttgacttataactgtgatagtacagagctgtcaatggatcaccaacacctgcaacagttaaacta

SEQ ID NO: 123891 - DNA, 352 bp, Zea mays
  Clone ID: MRT4577_4446C.1
ctctttctatgcatttgctcctgcgcgtactgccattgtggaacgtagcaggtaggtgcacttcttctgtggtacgctgcatgggggagcgagttactctgatcccgacatggtgggccgtttgtggacttagcgcgtcacgtacagggctccttgaaagatgcaggattatggtctccgcgcttctcttgttgccctaaggttattcgttgaccatgccacgggcttcacgaccagcaagtgatataccgtctgggaccgaaaatgtgttctactagtgcaaagggacttctgaactcgaaattgccctctgacatacagctgtagaaaactgggcgttggcgccccacct

SEQ ID NO: 123892 - DNA, 280 bp, Zea mays
  Clone ID: MRT4577_44470C.1
tttcgtcagtaccgagcactcaccgtcctctgtctgtattcatcagatatgagactccattaactttatctgctcctctaacgattttcaagtgctttcttttcttgttaaccttcatgttatttgttatgattcttaatactattgccttttattctgtttttggtctttcttactatttatcttgcccattaagttttttcttattttctttttaaattcatttcatttctctttttttatgttgtctttaattcttttcaattttttttcttttgtt

SEQ ID NO: 123893 - DNA, 253 bp, Zea mays
  Clone ID: MRT4577_44471C.1
ccccctctcgagtttttttttttttttttttttttttttttttttttttttttgaggggaaccgactctagttgggccatcgaacaataataatagggactgaatgactgactgactgacgagggagtctccgactctcggataggctcaggggatacatacccatatatatatactggcccgtcgaggacactggaatttataccagaaaaaaacaacacagagagagagatgcacccctgggcatcctacc

SEQ ID NO: 123894 - DNA, 327 bp, Zea mays
  unsure (1)..(327): unsure at all n locations
  Clone ID: MRT4577_44472C.1
ggggtgaggnatatgatctgctggtgcanncagatggntgccactacccccaagtcctccatggctcggtccgacgagatcgncaggaangggttcctacctttttttttttttttncnncccnnncannatccggtggggggggggggtgtgggttcggggtgccccctgntcgngnggggggggggcctggcctggcccccgggcccccccctccttgnggcgctggccccgntcaccgagcccaagcggccctcggccccgcccctgcggcttcctctgcnggacccgtccccntcggcggcntcngccccgncccngtcggcc

SEQ ID NO: 123895 - DNA, 347 bp, Zea mays
  unsure (1)..(347): unsure at all n locations
  Clone ID: MRT4577_44473C.1
cgggtcgacttagcgnccgcggatcttggggcagccccaaaccacccccagcctcggaaggaacctnccagaagcgcaagactctaaaggccgncgcctncccattctncctcgccgcgggggncgccngagaccacataaacaatggtgaaggctgttgctgtgcttggtagcagcttttttttcaagggcacggggtttttcacccaagagggtgatggcccttccgctgtcaccggaagtgtctctggcctcaagcctggcctccatgggttccatgtacatgcacttggggacacccccaatgggtgcctgtcaactggaccacactacaatccngcgagcaa

SEQ ID NO: 123896 - DNA, 144 bp, Zea mays
  Clone ID: MRT4577_44474C.1
ccgcaagcatcccctatcgcatcactgcacatacttgctgcgggcacacaccctagacatgccaccggaccgacccccctctactgcttaccactcaccctatgaatcgccaaccttcgcagcccatacaccgcttatccaacg

SEQ ID NO: 123897 - DNA, 2718 bp, Zea mays
  Clone ID: MRT4577_44475C.1
atggaggccacgatgcagagtattctggacgcactagcgcgcacggaggcacgcttgaccgatgcgctggctggtcgctgcggcgagcagtccgcacgcgagcgcgcttcctccttcgacggatccgtgcctcagtaccgcgacgaggcaagccttccacctctcatccacgacaacgctgcgaaggtggcgtccttggattcgggaaacgacgttggcctgcagcagatcgccacggtgcttgcgttcctgggatccgacgagttgccttcgtcgaccacgctcctcgccggctcggtattcgaccgctacatcccaccactctacgacgacgacctcctccaggagttcgacgtgttggacgaggacgccgcgagcgccaacgcggttgacgatgattcaggcgctatccccgtccatgcgccgctcgatcccgatgcgatgctcgactcgaatgtcgaccgcagcggatcaccgcgctacccgtgcctccccgagggcgcgacgctgttccgttgggacctggacgagaaggtccacgacgggctcatcggcggaactgagttgtccggcgaagtccgacacctctgtttctccttgccgtcaccagaccagacgatgaaccccgcgctcgtccccaacactgacgcagaggaggacggggttctcaccactgttcgagaatgggcctcaaccgcggcacctactctgtccccaacctccccgtggtctgcatcctgggtgggcccaactccgacgcctacggctccaaccgctccatgctcccggacatccatgttgtcggcggcggcctctccaaccccgacccgtacgaccccaagtgccaacaggcgtcctcgcgcgacacgcgggccatggccaccatgtcgaagaagagcgtcaggggacctcacggaggacacgatcatcgcgagttgcaaggactctgtggaggtgacgcacgacaggcatctgctcggagtgacatacactgggctagagcagcatgagcaggcgctggagcagaatgagatctcatcgaaggggaccaagggctggggtgcggctggcttggacctcctgcaagctgagatcgatgcagcgaacatcaagatcgtgttgggaaaatttgatgatgcagtactgcatagaccaccatggcctccacctacacaatacggtcagtttgagaagattcttagggtgatgatggattgtaagggtcacatggtggagtcttgtttcattgtctggagtaatgtagcagatggccgaaagttagacatactagtggatggagtaggctacaatcatctgggcatatctgtggaggaagcagattgtagtcgaatggtcagatcagtgggtgaagggagttcaatgttcccttctatggaacattcagaagcatttcagggagctgtcccacataaggttgagcaaagtctttgttctgaagatgctgatctagggagtttagctgcacgtttgattggcttgtgcacccatgcaatgttggttaaacacggatggattgtcgtgaggtcagtactgttgttaaccccggaagaagtgaaggtcgtttctaaaaccactgatcatctcctgttggtgttgttatcttcagcatggtctggcactgagatagctaccacattgcgtttacaagatcaaattcagcatcaagatattatggtgctcattgattccggatcctctcacacttttctcattaattctggactaaagcaactattcatgtctgtatactgctcggcctggtcagggacaactagtcatcagactctgaaacttaaagggagcatacaggagcagcctctgaatatcttactggacggtggcagtaaacacacatttgtcaatgacaaattaattccattgctctctagggttcagtccatctcttatcctacgaaagttcaagtggtcaatggcctcattgtttcaggtcgatatcagtggttgcaggcccactggcagattcaggaatacgagtttgtgtctgatctgctctttttaccacttcccagtttagatatggttgtagacatagattggctggccacatttagttctatgcgtgtggattgggttcagaaatggttggctattccctacaaaggctcaagcatagtcttatatggtcagtcccatacaataccgagtggcacagttgtggagttatggtcgttggactcggaggcccagcagtcttcccagccatcttatcctccacagactcagtcgttgctattacagtttgcttatgtgttacggactccttttgaggctatggcaaatgaggcggcaacatggaaggaaatcaagattgtctcttctcctacaagcaggaagcgaccggtaaacgagatcaacaggagcagcacgaagaaacaaggacctggttcggttgaaataagcagagaagggatgagtgcttcaaaagcaagagctgaactagtgtccattcatggcagtagagcaaaagcatcatcagttcttatgcaatgggcacaagtttgtgtcaggtcaattctgttgctagtgagccaaggcaatttctcggtctttatttgggatcctgggggtcatgcaaagaacagcttggggacaagctgtatttcaaggagtggggaatgtcagcaacaatacaagaaagacgtcagaagctcaccagcactgaagatggagcactga

SEQ ID NO: 123898 - DNA, 2805 bp, Zea mays
  Clone ID: MRT4577_44476C.1
atggaggccacgatgcagagtattctggacgcactagcgcgcacggaggcacgcttgaccgatgcgctggctggtcgctgcggcgagcagtccgcacgcgagcgcgcttcctccttcgacggatccgtgcctcagtaccgcgacgaggcaagccttccacctctcatccacgacaacgctgcgaaggtggcgtccttggattcgggaaacgacgttggcctgcagcagatcgccacggtgcttgcgttcctgggatccgacgagttgccttcgtcgaccacgctcctcgccggctcggtattcgaccgctacatcccaccactctacgacgacgacctcctccaggagttcgacgtgttggacgaggacgccgcgagcgccaacgcggttgacgatgattcaggcgctatccccgtccatgcgccgctcgatcccgatgcgatgctcgactcgaatgtcgaccgcagcggatcaccgcgctacccgtgcctccccgagggcgcgacgctgttccgttgggacctggacgagaaggtccacgacgggctcatcggcggaactgagttaggaggacggggttctcaccactgttcgagaatgggcctcaaccgcggcacctactctgtccccaacctccccgtggtctgcatcctgggtgggcccaactccgacgcctacggctccaaccgctccatgctcccggacatccatgttgtcggcggcggcctctccaaccccgacccgtacgaccccaaggtcatgggactcgaggcccgcgaacagatgcggtacatcgggaagctgaagcatgcgcactatgactggcaactgccctgtgagaggggagtccttgccgcgacgtggcagcaggcacggtcgctggcgttcgcggtgggcaacgagcagcttgcagtccacgtcgcttcgcagtgccaacaggcgtcctcgcgcgacacgcgggccatggccaccatgtcgaagaagagcgtcagggacctcacggaggacacgatcatcgcgagttgcaaggactctgtggaggtgacgcacgacaggcatctgctcggagtgacatacactgggctagagcagcatgagcaggcgctggagcagaatgagatctcatcgaaggggaccaagggctggggtgcggctggcttggacctcctgcaagctgagatcgatgcagcgaacatcaagatcgtgttgggaaaatttgatgatgcagtactgcatagaccaccatggcctccacctacacaatacggtcagtttgagaagattcttagggtgatgatggattgtaagggtcacatggtggagtcttgtttcattgtctggagtaatgtagcagatggccgaaagttagacatactagtggatggagtaggctacaatcatctgggcatatctgtggaggaagcagattgtagtcgaatggtcagatcagtgggtgaagggagttcaatgttcccttctatggaacattcagaagcatttcagggagctgtcccacataaggttgagcaaagtctttgttctgaagatgctgatctagggagtttagctgcacgtttgattggcttgtgcacccatgcaatgttggttaaacacggatggattgtcgtgaggtcagtactgttgttaaccccggaagaagtgaaggtcgtttctaaaaccactgatcatctcctgttggtgttgttatcttcagcatggtctggcactgagatagctaccacattgcgtttacaagatcaaattcagcatcaagatattatggtgctcattgattccggatcctctcacacttttctcattaattctggactaaagcaactattcatgtctgtatactgctcggcctggtcagggacaactagtcatcagactctgaaacttaaagggagcatacaggagcagcctctgaatatcttactggacggtggcagtaaacacacatttgtcaatgacaaattaattccattgctctctagggttcagtccatctcttatcctacgaaagttcaagtggtcaatggcctcattgtttcaggtcgatatcagtggttgcaggcccactggcagattcaggaatacgagtttgtgtctgatctgctctttttaccacttcccagtttagatatggttgtagacatagattggctggccacatttagttctatgcgtgtggattgggttcagaaatggttggctattccctacaaaggctcaagcatagtcttatatggtcagtcccatacaataccgagtggcacagttgtggagttatggtcgttggactcggaggcccagcagtcttcccagccatcttatcctccacagactcagtcgttgctattacagtttgcttatgtgttacggactccttttgaggctatggcaaatgaggcggcaacatggaaggaaatcaagattgtctcttctcctacaagcaggaagcgaccggtaaacgagatcaacaggagcagcacgaagaaacaaggacctggttcggttgaaataagcagagaagggatgagtgcttcaaaagcaagagctgaactagtgtccattcatggcagtagagcaaaagcatcatcagttcttatgcaatgggcacaagtttgtgtcaggtcaattctgttgctagtgagccaaggcaatttctcggtctttatttgggatcctgggggtcatgcaaagaacagcttggggacaagctgtatttcaaggagtggggaatgtcagcaacaatacaagaaagacgtcagaagctcaccagcactgaagatggagcactga

SEQ ID NO: 123899 - DNA, 1028 bp, Zea mays
  unsure (1)..(1028): unsure at all n locations
  Clone ID: MRT4577_44477C.1
tcgagtcggcaagaaaggaatagataccagagaaattcctggcgtgaaccacgggtgttgttcacatttggtaccagagccaatactggatcctccacacgggtactggacgagatcgcaatcgaagttgggcggcatggcgccagcgaagacggacgatcctttgtcccagcttctggcgaagatcgaggagggaaacaaggagactcaccgacgcatggaggcgattcagggggcggtgggaaatatggaggcggcggtcaaggtggcgtgcaggtgacattaccagccggcgctgtcaccgaacttttgctcttgtcagtggaatcacaggctacacccgctggacaatcggtcgatccaaaagtccaagcagttctggatcagttcgtggaggtatttgaggatccagtcggcttaccaccaagcagaacatgcgaccacactataccattggttccagggacaaatgtgtgtgtactaccactgtccagtaaggtattcagagactgctcctgtattctccctttaagtttcaaggtctgatgacaagttgtccctgaccaggccgagtagtcagaatatcttgatgctgaatttgatcttgtaaatgccatgtggtagctgtcgcagtgccagaccatgctgaagatgacaacaccatcaggggctgctctataggttcgggcacaacttcagactcgtcatctgttccctgactgaacatctcacggaaaagctcttccggattgtgagtactagagcagatgaaaatgaagtgagcagagtggaatatgtaataaaaaatagattgcagccacaaccagtttgccctcggttgcttgatgcatatgtgtgaccagaccaatctgatatccaaaaacttcttgccataataaatgaggctatcctagnnnnnngacaacaaacctttatcctgcacaacgctctaaacattanacctggngaacataaatggccaatcaaccattctggattatcttgtaacacatcgaacttactgacgg

SEQ ID NO: 123900 - DNA, 357 bp, Zea mays
  Clone ID: MRT4577_44478C.1
aaaaaatgctgcacccttttttttttttttaatggaaccaacccgtttttttgttccccgccctaaccggggaagctcccgacggggccttccacagaaaattcccgggcaaaacaaacttttaaaacccaggtgggccgaaaaccaaaattttttttttacccgaaataatttcccgcgcccattcccttttttgccaacaggaaaaatcctgggacttgttttggcccaggggaaagtcccacatttttttttggggcccaaaaaactattttggttggttttaattggaaaggtatttaaggaaagttttgggttcttttaaaacccccctttcacccggcccctttgggaaaa

SEQ ID NO: 123901 - DNA, 878 bp, Zea mays
  Clone ID: MRT4577_44479C.1
gttattgtcgagtcggcaagaaaggaatagataccagagaaattcctggcgtgaccacgggtgttgttcacatttggtaccagagccaatactggatcctccacacgggtactggacgagatcgcaatcgaagttgggcggcatggcgccagcgaagacggacgatcctttgtcccagcttctggcgaagatcgaggagggaaacaaggagactcaccgacgcatggaggcgattcagggggcggtgggaaatatggaggcggcggtcaaggtggtgatgacggagcagggagatcttcagaagtggaaaccggaggtggaagcgaaagtgacggagatttctgatgctctaaaggcgatccagatccagatgggaaagatggagaagaagccgctcggtttcgggtcgagacaggaagaagaaggagaagacggatttctgaagccgccaccatctgattcttcgaatttggagtttcgtcgtgaagaagggcggacccaattctcgcatggagtattgggcatgaactggatccagcaatacagtccgatgaaggtggattgggcgaacaagtgggcagtcattccatataatggatcgccagcatacttgcaaggtgtgcaggtgacattaccagccggcgctgtcaccgaacttttgctcttgtcagtggaatcacaggctacacccgctggacaatcggtcgatccaaaagtccaagcagttctggatcagttcgtggaggtatttgaggatccagtcggcttaccaccaagcagaacatgcgaccacactataccattggttccagggacaaatgtgtgtgtactaccactgtccagtaagctattcagagactgctccttgctgctccctt

SEQ ID NO: 123902 - DNA, 320 bp, Zea mays
  Clone ID: MRT4577_4447C.1
taaaaaaaaaaaaaaaaaaaaaaaaaaaaagaaaaaaaaaaaaaaaaaaaaaaaaggggcggccgttcgggaccaacgcgtccggggacgcgtgggaaaaactttatagttcgatgaatgggcagtttgccggggttttggaataattgggactttgtcttctttcgcttctgttggcgaaccattgtcttaatcgatttggggatttcgaagtctccttttattgccaaaagttcgcgaaaactaagtacttactccgtttgaaaatagtattagttttagctctaattttttatgtctaaatttaaatttataatgat

SEQ ID NO: 123903 - DNA, 673 bp, Zea mays
  Clone ID: MRT4577_44480C.1
atcgagctctaggctctagctagcgcgctgcatatgtgaggcaacttttcatttatctgacacacgtacttacggcccacgatggccgccgccgccggcctcccgtggtggctgctgctcctcgccgtggtcccggccgtcaccgctgcggccaccgccggcggagaggggagggcgcgcggcgctgttcgtgttcggcgactcgctcatcgacagcggcaacaacaacaacctcgcatcgcttgccaaggccaactacttcccctacggcatcgacttcgccggcggccccaccggccgcttctgcaacggctacaccatcgtcgacgagctcgccgagctgcttggactgcccctggtgccaccctactctgaagcctcgtccgtgcagcatgtcctgcagggcgtcaactacgcctctgccgccgccgggatcctcgacgacagtggcggcaactttgtcgggcggatcccattcaaccagcagatccagaacttcgagacgaccgtggcgcggatcgccggcgcggcgggcgcggcggcggcggcggacctggtggcgcgctccgtcctgttcgtggggatgggcagcaacgactacctcaacactacctgatgcccactacgacacgcggcggcggtacggcccgcagcagttcgcggacctgctcga

SEQ ID NO: 123904 - DNA, 359 bp, Zea mays
  Clone ID: MRT4577_44481C.1
tggacccacgcgtgcgacattctcaaaaactagtgcacttcatatccaaggacctttacataactgctgtaagtcccatggatacgttacatccaggatcgcaagcatcattcgaggaatctaatgttcgaccggctccgctcgattctgcttcgataccacgcgggtgctactaaatctgggcggatatggcgctcaccttcactaatctgctcaagcagctattcgccaaaaaagagatgaagattctcatggtagagcccgatgcatctggtaagaccaatatgctgtacaagctcaagctcatcgaaaacgcaccaccatccccaccattgaatttaacgttgaaactgtcgagt

SEQ ID NO: 123905 - DNA, 303 bp, Zea mays
  unsure (1)..(303): unsure at all n locations
  Clone ID: MRT4577_44482C.1
cgtctcgcttctctttctcgcctttgggagtcgttgtccttctgcnttgttttgatcatgnnaaaaaaaacgtgacgtgaggcttgnnctctgttctnnggtcccggccggnnaacgcaatgggcagggcaccctacatccnncgcagctcgcggnagggcccatggtgtgagtttcaacaagnaaggnacannggatcttcaacgctggggagggcgtggtctctggtgtctaacccggtgctggnagnnttcgcgaacggactttnnaacgcccgcgcccgagtactttnntggtcgnacg

SEQ ID NO: 123906 - DNA, 819 bp, Zea mays
  Clone ID: MRT4577_44483C.1
cattgggtgactcgaggccggccgggattttttttttgctcgttcctttcggtcaggttgtcgggggggttactaccgaggaagaggatgaggctgggaggggggcatggagacttggagaggagcagccaagaagagtagtagtagtactttccttccacttccacgcctctcagtacactgagaaaaccacttagttcggagcgcgagttcgtggttggttttgcggtacactgaaaaatgattgctatttttattcgccgtttatttattttatctatatttttgctcgcatgctcgcaagatttccttctcttccgctccactcccgggtctctcttgctgcctcagctcacctcgcctcaccttggtgggatgctggcagtacactgcggcactgtaaggatttaacagaacgaagactagtgctgcatcatctctcgctctcgctctcgctctcgctctctttctctttcctttctccctccctcgtggtgcaggttcagctcatctttgaacactgtagccattattccagctagctcgcgctgtttctgctcttgcttgctcgggggttctcttctcgctctctcgagttcttgctcagttcctcctgcggccatggcggtccgggtggttgcgcgcgccggcgctagcaagctcctgtttgcacaaaaatggagcgtggggggcaccatgtgatgacccaaatttggcaaagaccgtggactcgccttgccctttgccagatctggtctgcatctgagggtaggattgggtactttcttgtctctctcgctgcgcacagtcaaacacatc

SEQ ID NO: 123907 - DNA, 1353 bp, Zea mays
  unsure (1)..(1353): unsure at all n locations
  Clone ID: MRT4577_44484C.1
ttgaggggaaaaaaaacctcgctcacagaattgacctgacacaaacttgtgcccattgcataaganccgatgatgctttgctctacacccatgaatggacactggttcagctcttgcttttgaagcactcatcccttctctgcttctttcaaccgaaccaggtccttgtttcttcgtgctgctcttgttgatctcgtttaccggttgctccctgcttgtaggagaagagacgatcttgatttccttccatgttgccgcctcatctgccatagcctcaaaaggagtccgtaacacagaagcaaactgtaacagcaacgactgagtctggaggataagatggctgggaagactgttgggcctccgaggataagatggctgggaagactgttgggcctccgagtccaacgaccataactccacaactgtgccagtcggtattgtataggactgaccatataagactatgcttgagcctttgtagggaatagccaaccatttctgagcccaatccacacgcatagaactaaatgtggccagccaatctatgtctataaccatatcattatatcaaaactgggaagtggtaaaaagagcagatcagacacaaactcatattcctgaatctgccagtgggcctgcaaccactgatatcgacctgaaacaatggggccattggccacttgaacttccgtaggataagagatggatcgaatcccagagagcaatggaattaatttgtcattgacaaatgtgtgtgtactaccactgtccagtaagatattcagagactgctcctgtattctccctttaagtttcagggtctgatgacaagttgtccctgaccaggccgagtagtcagaatatcttgatgctgaatttgatcttgtaaatgccatgtggtagctgtcgcagtgccagaccatgctgaagatgacaacaccatcaggggctgctctataggttcgggcacaacttcagactcgtcatctgttccctgactgaacatctcacggaaaagctcttccggattgtgagtactagagcagatgaaaatgaagtgagcagagtggaatatgtaataaaaaatagattgcagccacaaccagtttgccctcggttgcttgatgcatatgtgtgaccagaccaatctgatatccaaaaacttcttgccataataaatgaggctatcctagaaaaaagacaacaaacctttatcctgcacaacgctctaaacattagacctggtgaacataaatggccaatcaaccattctggattatcttgtaacacatcgaacttactgacaggaaaccacgttgtgtttggtcagagacggcaccaacatcatatgac

SEQ ID NO: 123908 - DNA, 1447 bp, Zea mays
  Clone ID: MRT4577_44485C.1
cccacgcgtccgccaccgatcgatcgagctctaggctctagctagcgcgctgcatatgtgaggcaacttttcatttatctgacacacgtacttacggcccacgatggccgccgccgccggcctcccgtggtggctgctgctcctcgccgtggtcccggccgtcaccgctgcggccaccgccggcggagaggggagggcgccggcgctgttcgtgttcggcgactcgctcatcgacagcggcaacaacaacaaccttgcgtcgcttgccaaggccaactacttcccctacggcatcgacttcgccggcggccccaccggccgcttctgcaacggctacaccatcgtcgacgagctcgccgagctgcttggactgcccctggtgccaccctactctgaagcctcgtccgtgcagcatgtcctacagggcgtcaactacgcctctgccgccgccgggatcctcgacgacagtggcggcaactttgtaagcagccatgcatgctcagagacatgactgactgactgactgactgacaaaaaagcatctctccaaatccaatgcaggtcgggcggatcccattcaaccagcagatccagaacttcgagacgaccgtggcacggatcgccggcgcggtgggcgcggcggcggcggcggacctggtggcgcgctccgtcctgttcgtggggatgggcagcaacgactacctcaacaactacctgatgcccaactacgacacgcggcggcggtacgacccgcagcagttcgcggacctgctcgcgcggcagctggccgcgcagctggccaggctgcacggcgccgggggcaggcggttcgtggtggccggcgtggggtccgtgggctgcatcccgagcgtgcgcgcgcagagcctcgcggggcggtgctcgcgcgcggtggacgacctcgtgctccccttcaacgccaacgtgcgggcgctggtcgaccgcctcaacggcaacgctgccgccggccttcccggcgccagcctcacgtacctcgacaacttcgcggtgttcagggccatcctcgccgacccggccgcgttcggcttcgccgtcgtcgaccgcgggtgctgcggcatcggcaggaacgccgggcaggtcacctgcctgcccttcatgccgccgtgcgaccacagggagcgctacgtgttctgggacgcataccaccccacggcggccgtcaacgtcatcgtcgccaggctggcgttccacggcggcgcggacgtcgtctcgcccgtcaacgtccgtgagcttgccggcatgtgacaagatgatcggagcggacatatattctcctatatatagcaataataatttgtttggtgaattattgtatcagtagattttgtgctacaagcctccatccacaaaccatgcatgtagtagttatttgttactccgatctatttataaattcgctttgcactgt

SEQ ID NO: 123909 - DNA, 312 bp, Zea mays
  Clone ID: MRT4577_44486C.1
tggaccgacgcgttcgtgacagcgcacgtaccaacgtcgccagcatccggttgatggcacttttgctctgcctttccgggaccggcatcctgcaaatgaggtggaggggcagaggccctcgaccactgggggaggaacgaccagctctggggcattataggcgtgtgggcggcatctgttcagcggagttccagggcctgctaaaagtgttcgcccgcctcgacacgtagcttaccgtaacgtccaaggccagggacgacgaggagttcttagacctgttcaccttcaataggaaccatcctgcttgcgacg

SEQ ID NO: 123910 - DNA, 349 bp, Zea mays
  Clone ID: MRT4577_44487C.1
cctttttcttttttttttttttggtttttcagggctttaaaaccaatcacggtaattgcatccaccatattctgagccacacactgggcgatcaatgcaccatttttattaaaactaatcaactgaccatgcgattaggaacatcgcaaacgtacttttgccattaccgaattaagcctttgattggccgttttaaacttgtggccttaacaattttaaactctccacattggttttcctggggccaaacaatttgcagacttttttcccttaaataaaagcccacccagctccttttaaagctgttttgaaaaaggggaaacggaatccaaaacaattagggcctttt

SEQ ID NO: 123911 - DNA, 558 bp, Zea mays
  Clone ID: MRT4577_44489C.1
cggtcgcgtggggggcaggtctccccgccctggggacctcgcagagaaggtgaccgagcctgggggtcctagggcaggtctccccgcccggctccacccctcctcactgttgacaccggcctcgccgtcgccctgcttctccaacagctgctccatgttcgtcgttccgggggccgctgggtctaactggccgcccccgcagggtgcagacgctgtctggtcaaagagtgccggaaggctgctgatgggggacatggaagacagactctcctggggggaggtcccccgacaccggaagctgcagtcctccaggtctggctcttggaaggagaaggggagcagggatcagcgggggaggggtgccatcggcctcacggtccccgcctgggaagtgggtgagggatctgggactttaccgcagactccttgcccccaggatctcccccaaccccaggctggcagttctagctggtaaggctctgggagcccggtcttggaaacctcgccccgtgggaggcagttatggatctggtctcttctcctttctttaggccgaga

SEQ ID NO: 123912 - DNA, 432 bp, Zea mays
  Clone ID: MRT4577_4448C.1
cacagaagaaagggaatcttggaatggctttctctctgcaagaaatggaacacaaaagggaatctgggaaaaaaaaaaaaaaaaaaaaaaaaaaaaaaaaaaaaaaaaaaaaaaaaaaaaaaaaaaaaaaaaaaaaaaaaaaaaaaaaaaaaaaaaaaaaaaaaaaaaaaaaaaaaaaaaagggcccccctttttaaagaatccaactttacttccccttccttccaacgtaatattttttttttagggccccctaaattaaattcactgccccccttttaacaacctctgaactggaaaacccctgcctttccccaatttaatccctttgcaaaaaatccccttttccccagttggcttaataccaaaaaggcccccaccaatcccctttccaaacatttgcccaccctaattgccaaatggaaccccccc

SEQ ID NO: 123913 - DNA, 400 bp, Zea mays
  Clone ID: MRT4577_44490C.1
cgtcatactctcaagcaacgttcgcacgtgctatctacacctggccgctgcacatgcagtatccgtagcatgagcaccggctctgcacgtcgacgagcgagccagagcgatggctgctcctaatctcgcgacgactgccgctggccgtgctcgtggcgcagaccgtggtgcatcccccgggcgctctgggggtacggatgccccgctcgaccgaggaccgaaagctgatgccacggctggctgtccaccaaatgggcgcgcgactgccaccgcctgctcgtcgtcacctcctaggccgctagcgagggcgccgagggaagaccctacaacgtggcgctacgtcggcgagaaccagagaaggtaccacaagggatgccagaagggagacgtgaccatacat

SEQ ID NO: 123914 - DNA, 580 bp, Zea mays
  Clone ID: MRT4577_44491C.1
ggccgcttgttttttttttttttttagtgtgccctgttttttctcatttctacatgaattacattgtctgaaatatctttaaaacgaatgtgtggggcatctcggctcatgtggaatgaaaggaatgacaacttgtttttcacgtgactgaagagagctatacagctggggtggagaaggagggggggggtaaacagattgtttaacaaccctccggcactggttgattttacctgaggattcttccacaatttcctttcttttagactcctgatgaagtcgaatcttgttatcccccaaaacagcctgactgaccacctcattatatctttcagcccaactggttgccatcaagccctgaagcttcttgttgaggccacgtaagaagtagaaccttgtcttctcattggtatttacaaaatccaagacgtactgatacaggcgagtgaacctctcaaaatattccattacactctcttgttcgccttgctacaaatctaagaactcattgaatttaatctccatcagggctttcggaatataatgcgtgcgaaataccgtacggaactcagcccaagaa

SEQ ID NO: 123915 - DNA, 305 bp, Zea mays
  Clone ID: MRT4577_44492C.1
gtgaccatgcagaacctcactgaccgcttggccacctacctggataaggtgcgtgccctggaagaggccaacagtgacctggaggtgaagatccgtgactggtaccagaggcagcgccccactgagatcaaagactacagcccctacttcaagaccatcgaggacctgaagaccaagatcctggcagccactgtggacaatgccaatggcctcctgcagattgacaatgcccgcctggcggctgatgacttccgtaccaagtttgaggcagagcagagcctgcgcataaatgtggagtctgacat

SEQ ID NO: 123916 - DNA, 113 bp, Zea mays
  Clone ID: MRT4577_44493C.1
acgacatggatcttcccatcatcacaagcgacaactcgctgtatcaccacaatctgctctctctgtgacgtgaaggtgtcacatactaggccacgcattctgacccctgtgat

SEQ ID NO: 123917 - DNA, 720 bp, Zea mays
  Clone ID: MRT4577_44494C.1
ttgggaccctcgaggccggccgagaatgattgcgtctcgcgcatcctattgccctagagtaaccgacaacggctatgccaagagccaacgccctgccgacggctgaagcacatccaagccaccggcatgcggatcatggacactccgcggaaattatatctctgcatccgcgctgccgcgacaatatgactcctccgagctgactctcgaccgctactcaccgaggtgaaaggacatgattaccaccgtgtggatataaaggccagatgccgttccagattgtggttgtgctccacgaccagcacgggatgccgcttgcgaagagcgtgactgcgatctagatccctccggatcctcaaggcccatggggtagggcccaagatcccatgaggatctctacttcctcattaccaacgtcgagatgaatatcaaccatcaggacatcaacaggaacgacaacgactccaaagtcacagtcattcttgatgatcagcatcatctgcgaccttgtccgctactgacaagctcaccaagaagctgccacccacctgcaagtacgagacattcacttccagcactctggtgcactaagtgacatcctctgatggctcgaacattaccacctatgagcttgtaacttacatgaatgtatgtgattctatgtatgacaggagctggctagatgaacaaggaacctatgataatgctatgctgacttgg

SEQ ID NO: 123918 - DNA, 417 bp, Zea mays
  unsure (1)..(417): unsure at all n locations
  Clone ID: MRT4577_44495C.1
aaaaaaaaaaaaaaaaaaaagtggntagtgggtgtttgttatatcttacaaagaatacctattttgttggccttcttaaaaaaaaaaaaaaaaaaaaaaggtggtagttggtgtttgttatatcttacaaagaatacctattttgttggccttcttaaaaaaaaaaaaaaaaaaaaaggggggtggttggtgtttgttatatcttacaaagaatacctattttgttggccttcttaaaaaaaaaaaaaaaaaaaaaagggtggtggttggggtttgttatattttacaaagaatacctattttgttggccttcttaaaaaaaaaaaaaaaaaaaaaaaggtggaggtggggtttgttaattctaacaaagaatacctattttgttggtctccttaaaaaaaaaaaaaaaaataaagg

SEQ ID NO: 123919 - DNA, 1220 bp, Zea mays
  Clone ID: MRT4577_44496C.1
cattgggtacctcgaggccggccggggacgcccaagcggtggcactccccttggcctgcctgcctgcctgcctcgccgtagcccgccgcccttcctctacaagaggccgacatatcagccaagtggccagtgaccgcctcgtcccctcccgcgccgaccgccccacgcgccgccgctccgctccgcaccgacattccctcgggagtcgcgggtaccacggcgccgacttccacaccgcgttaagcttaaaccccgcgcaggcgcgccattgtagttgcaaaaagaaggaacagtaacagatagagcaaccgcctccccggttctcgctcctcgtccccgctcccgccggcgtcgcgagggactgagccggcgcggcggcaaccgcgagaaccccggtaccaaagttctagtgcatcacaaaggatactgaaatgggtgccaaagagaatggggaagagagagatgatcattcaagtgatgtggaaagagatggtaaacaagggaaggtaactgaatcagactatgaaccagctagaaattccctttcatcaccgggtgaggctaccagtaacgaagacactaaagtgaaaagagtctcaagggttccaaagaagctatcaaggaaagagtctaaagaaaacagcccacgctcagcaagaagcatttccaaaagtcaaatccacagtaaactgcagtatatatcggcaaacagtaaccagaacaaatcacccaaaacaaacaaagcggctaatggtgctaaaactgttgaaattaagaggccagagactccgaaagctccttcttgttcttcatctgagatgtctgaggaaacagatgacaaaactattgaggatagacccacagatgacaaagcaattgagggcagaatcaaggatgatagcgctgttgaaggcagagccaccaatgataaagccgttgatgacaaagcaaagaatgataaagacattgaggatggaatgaaggatgataatgccattgaatgtgaagtcactgatgataagcctattgacagcaaagtaactgatgatattaccgttgagggaagagagattgaaggtaaagccattgaagaggcaaaggagattgatatattggatgaagctccaaaatctgatcagagtactggcactgatgatgaaattgttgatactgaagaaaacatagctgataatggaaactcagtttcttataaaattaac

SEQ ID NO: 123920 - DNA, 225 bp, Zea mays
  Clone ID: MRT4577_44497C.1
aatattcgaaaacaaggtaataatttagaaacagtttgaaacggacaaaacccaaaaaaatacatgcatagccaggtcgccgacggctgggtgctcacctgcgttgcgtaccccacctccgacgtcgtcgtggggggcggcgcaagagatgaccttatctcctaagcaaattggggaggcgggggcgattatcacgtcggctggcaggcgcaggacagggtaata

SEQ ID NO: 123921 - DNA, 518 bp, Zea mays
  Clone ID: MRT4577_44498C.1
cgagtacaagctttttttttttttttttttttttttttttttttttttttttttttttttttttatcattcaaaggcaagaaaaccaggcgatggaaaaaaaagggggagattttgagaaaaaggccagaccgggccgccaggccccccccggagggccagcccaaggggcgaagggcccaacactggcggccccgaccccgggacccggggacgcaaccaaacgggccctaaccgggggcgaaaagggggatcccggggcggaaaccgggaaaaccagcccaaaccgccacccaaaaaacaaaccccaaggccgcgggggaaaaccgggggcccccaaggagggaaataacctaactgacccgggtcaagcccaaagccccgattcccccggggaaaccgggaaaccccccccccccaaggaaagggacaaaccgccgggagagggggtacgcgtactgggccccttaccccctccccccgcactgacccgttgggccaggggggtcgggttcctca

SEQ ID NO: 123922 - DNA, 423 bp, Zea mays
  Clone ID: MRT4577_44499C.1
ggcaaaaagggggggggcaacaaacatcccggcgggaaaccaccagggaaaacccccaaaaaaaaaactcgcgggggaaaattattacggggggacgggatcatacggccccaacccatgagggccccaaaccccccaaaatgctgggcagccccttagggatcgaccccatgcagttttttatttcccccccccttggccaaggggtgaccacaaaggattcttaggccccccgaccaaactttgccgggggggggggaggaccgcaaaaaaaaaggctgggggggggccaaccctccccccttgttggccccccggatccccccccccccggccgaaaggaccccctcggggtcccccttgccgaaaacaagggggggggcgcccttgggaaaaggcgccctttctttgtttttgcccaaa

SEQ ID NO: 123923 - DNA, 240 bp, Zea mays
  Clone ID: MRT4577_4449C.1
tgtcttttcttacaaggcccatcctgggggaagctaattacggggtgggggagtcccatcacacagatcagatagacctatacatcacttcttcactcaaaaatacttacttgaatattgtacattctacatagtacaaatcagacactacaaatgagcatcttttaccatctctagctgaggagacataaaaactgttgaaaaaagatacagccattgaaacacctgttttgacaaaat

SEQ ID NO: 123924 - DNA, 392 bp, Zea mays
  Clone ID: MRT4577_444C.1
attgagaccaacttgcatcatagagggcgcattagtgcaccaacaatggctgacaaaatcttacgtttccttatgctccttggactttatgcaggtgttgataccgcaaccatttcaccacattgctcatacgcttctatagctactgttttgtaaccatacatttcacaaactgatgatctaatgtgtgaaaaccgaattgttcaacatctacacgatccaacatgcaatcggaacacgcatcttaccattatcagtgttgttactgcaacaactgatagacctattacagcagatacattcgttgcatttcgtgtgacatatcatgaaggcacaacaacttcaacaactcgggctagaatatcttgctgcatactctaagcaacatgagt

SEQ ID NO: 123925 - DNA, 311 bp, Zea mays
  unsure (1)..(311): unsure at all n locations
  Clone ID: MRT4577_44500C.1
ctgctacctggtcgaccacgcgtccgacccaacccattgcatttgcaagcccttttaccatgcagagcgccagaccctcgctcgctctcggaccagaggtagaccgctaacagacgaagaagaagccagacaagcagaattgagagagaggcgaggacgtggcgacgacggcagccgcgatggcgacgacgacggacctggggttcgaggcgacggagctccgcctgggcctgcccggccgcgcacgtcgangggagccggcgctgggcggcgaggcgaggagctcttcctgcgcctccggcaagacgggc

SEQ ID NO: 123926 - DNA, 226 bp, Zea mays
  Clone ID: MRT4577_44501C.1
tttgttattggtccaaatcattggttggttgtttcggcgggagaaaaacatgacatcctaatacactcgcaacactaacaaagcccggcactgagaaaacagcacatgactacaagcacttgtaactatagtgtgaactatgcactatctacacaatgccaacactatgtcgcaatgatggacttactatgattctgaaacagcggggagaccttatttgaaacca

SEQ ID NO: 123927 - DNA, 870 bp, Zea mays
  unsure (1)..(870): unsure at all n locations
  Clone ID: MRT4577_44502C.1
naggggccggccgggaaggagtgaatactgaacagtccagtcagtcgtctctacctcatccgcctgacgaatcttgattcttgagcaagacgcggtcactccagtagagctatggacaacctgttcgtcgcctcctcccagtgcctggccaaagactgattggtttaagcttcaccaaaaaaagaagagactgattgacttcccaacttatgtttcactagattttagttcattactaagcaagtgctcagctcttttgttggcaatgaagcaaccataacattgcttctatggccaattgaaatggctagttccattcactgtcatagtgcaatacaagcgccaggaagagtatctgtgatataaataacagttgttgattttaggacacccgtgttgattttgtgctgccgagcaggcttggaactggatgccttggttttccagatctggtagtttggtcattttggcctactctgcaccgctattgagatcctctctttctattaagaaatttaactgatgggccaaagtttcagcagcacactacatatatttttttctttgaagcaacatctcactaaagtcatctatctactcattggatgactttggagatctgttgatataatatcaattggtatgctgagaagaaactaaccatagtcctgtgttgttatgctccagcttgattgngtgtcatctcttttagctgcaactgcagctggctgtgatcatggcatcgctgagtgctgacctcttttacgacatactcaagcgtctcgatgctgcagctctggcaagagcaggctgtgcctgcgctgattttcgtgccatatcaaatgaagaggatctgtggggaaatgcctg

SEQ ID NO: 123928 - DNA, 1013 bp, Zea mays
  Clone ID: MRT4577_44503C.1
tgccagatgaagccattaggatattcaatgacatgattgcagcaggtgtggagccgattgatgctacacttgtgagtgttctgtcagcatgcgctcagctgtgttctttggatgttggtacatggttatatgacacttacattgtcagtcataaggttgagcttacaccgaatctaagcaatgcattcattgatatgtttgcaaaatgtggagatgtcggtgcagcatcaaggttatttagcaatatggaggacaagaatgtagtaagttggaacacaatgatcatggcacatggtttgcatggtcagcctgaagaagcccttcatctctttcaagaattcaaaggaaacggtattttgcctgatgaggccacatatattggggtactttctgcgtgcagtcatggtggtttagtatcagaaggacggtgccatttcaaagagatgaagatagtttatgggattgaacccagggccgaacattatgcatgcatgattgaccttttgggtaaagttgggcttcttgaagaggcgtttgaagttgcaaggagtatgccagtaggagctgacgaggctggttggggtgctcttttaaatgcttgcagaatgcatggtaatgtagagattggcaaatgtgcagcgaataagctagcagggctggatccttcagatagtggaatctatgtacttatgagtcaaatatatgcaagtaaaagtaaatggggccaggtaaagatgctgagaacagtgatgagagatagaagagtaaagaagaatcctggatgtagttctatcgaagttgatgggaaatgtcatgagtttttggtggcagatgtttcacatgttcactcagaagatatatatgctgcactggggaatatttaccttcattcaaaggcagaaggttatatttctcatgcttcatgtgtctgctataaatcaattcttagcattgtatttactggtttacgaaatattcaggatgaaataagaggccaagggccacccattgcc

SEQ ID NO: 123929 - DNA, 283 bp, Zea mays
  Clone ID: MRT4577_44504C.1
gtgacgtcctcatcgcgctcccgagccagcttccattacgactacgccggcccaccagtgccgcggacgacgtgcttgtgcagctcgcccaacaagtcccggaagcttgcagcttcgactttcttccttgccgtccatatgtgctagacgaagcttctctccgcatttcttcggctattctgggcagcttcagctgaaggctagcttcgttcgccgttatcaatatactatctgctgggggcatactctggccaaggtcctcatgccgcttttcgtgtctggg

SEQ ID NO: 123930 - DNA, 801 bp, Zea mays
  Clone ID: MRT4577_44505C.1
atggcgcctcaccaaggatctccgcgatcaatttttacggagaaatcgcgcctccccagggtgcctttccatccatggcgtcgttgctgcaagtgcccctacggtccccttgcaccgacggcactccatcgacaaaacggctcttcctccattccaccgtccaccgccaagcgcagacgcaaggcggtgtcttccatgaagaagcccaagccaatgcccaagcaggccaaaccggccgtggtggggatgaagaagaagagggagaccgagaggatggagctcgttgtggacgacgtgtgcgccgaggagcccgacaaggaggagcgaatctctggctggaagcgctccgccatggccaaggagatccaccagaaccaggaggaggaggttgtggctgtgtccaccgccaagcgcagacgcaaggcagcgtcttccgggaagaagcccaagccaacacccaagaaggccaaaccgaccatggtggggatgaagaagaagggggagaccgagagggtggagctcgttgtggacgacgtgtgcgccgaggagcccaacgaggaggagcgtgtctccggccggaagtgctctaccatggctgaggagattcatcagaatcaggaggaggaggaggaggaggttgtggcggtgtctttcgggcagaagaaaaaactaccaagagatttctgccttggagagcattggtgctctatcagccggcaggtattgtgttacgacaagaaagatgttaaagtttatagcctgataaattataccatagagaatgttaactgggccatctaa

SEQ ID NO: 123931 - DNA, 456 bp, Zea mays
  Clone ID: MRT4577_44506C.1
ctggcagaagatggatctgttgacgagggtgtggcttattttgttgagtgggctatcttgattgtttcagccgttatgatcctccagagttctctggactatctctttgcatttacaactctagtattatgtggaatcatcaaagtgattgcaagaattgagggaaagtcaaaagttttacgctatatattcgggggactttctgatggtacctctcgtaattcatcccgttatggagattttgatgaagactattctagcatgaatgaagatcgccaagatggatttggcaatcttcatggtggataccagagacatgcaccgagaagaaactcacctcttgcaggctcagcaaagacattatcgcaaggtgttgctatggatagcttctattctacatttcacactaccccagagaggatggaattcacaaaagaggaatatgaagcattcacc

SEQ ID NO: 123932 - DNA, 464 bp, Zea mays
  Clone ID: MRT4577_44507C.1
agcgtcggtcagtgcattgccgtgtggcgggtagcgaccgggagcgcgcacgatggcgtgcggcggccgtggcgactgtggcctccccatccctcacctccaggcgagttgccaccctccgacagcccggttttctgcggctcccagggccaaccagagcggctcacgcgcgccctgcgggtcgccgatgcggcggatgaaacaaacctgctgcctgggccgggggccaacggggatgccagagttgccggggaggctggaggagcatcggcactagcagctgggcggaagccagctcaacataagagggctcgccttacatggcgacgtgagcaggggctagaccggcggccgagcgagctccgaggccttcggccgagagaggggtttcaagatgctggaccggggcattaacacggacatggcgctaggggccagaacctactctatcagcaagctgggga

SEQ ID NO: 123933 - DNA, 301 bp, Zea mays
  Clone ID: MRT4577_44508C.1
cggactttttgggtttctggacagataatggagaatgacgaatcctatgctatggaaggagatgttcacttttcacaccaaagttgtactgaatatcttatattatctggacgatgatttgatcacaatcaggcatgggcacgggttggttttgatacacgatagcgtcattctgctgactttgagctctgaaaggtgtaaaaggagggcgagcctttttgcgatagccattgatgccgtgtacgaccccgattgcgtattggactcattttattgagagctctctggttatgacaagtat

SEQ ID NO: 123934 - DNA, 361 bp, Zea mays
  Clone ID: MRT4577_44509C.1
tttgtgtttttttttttttttttttttttttttttgggtggtttttttttaattttttttgggggttctaaccggacccgggggggaacccggaaaaccccgacagaaaccggagggggacccaggggtccaaaaaaggggctaaaaaagggcgaggagaaaccagggccacaacgggtacctgggggaaagtgggataaaataaaaaaccccaaaaaaaaatccgccccacgaagcaaaactgggtaacaaacagggggtaccaaagggggggccccaaaaaaaaaaaaaaaaacgtatataacaaaaacaccccccgttgaaaaaaccgggaacaacccaatagaagcctggggggaat

SEQ ID NO: 123935 - DNA, 308 bp, Zea mays
  Clone ID: MRT4577_4450C.1
cgtactcttgggtcgaaattaaaatttataaaaaaaaaaaaaaaaaaaaagcaaatgttaaatttaaaaaaaaccaaacccaaacacaaaaaaaaaaaaaaaaaaaaaaaaacgccccctccccctaacaaaaaccagccttcccccctctaacattcctcaactttaccctcccttcataccaaccctaaattcattcttttgcccccccttatacaaattcttttccctatattccccatcttctccccttttaaaccctttgctacccctaccttttttcccctcctccctttaccccatttacc

SEQ ID NO: 123936 - DNA, 402 bp, Zea mays
  Clone ID: MRT4577_44510C.1
aatcggttttttttttttttttttacgtgttcagggcgtaattcattatcaaatcgtaggatcaatatacatttttgatgatttttcttgttttgtctgctcccagacacgcaacccatttagttctaatccttcgccacagcctccaattgactggattcgggggtgactggcgtcggcgagtcctgcagctcatacaggcgcttcgctgtggaccctgtcccacatgtcagtggtctggcggttggacacttccatgtgggctccgcatgtcggtgagatttcgggttgtatagagtgccaactccagcagctgaatcgatccccgaataccctagtgacggcggcggagatggacgaccgaggcggcggcggggacgccaatatgtggccgtggtgggc

SEQ ID NO: 123937 - DNA, 342 bp, Zea mays
  Clone ID: MRT4577_44511C.1
tttctcgttattggcactgcccctgttgggcgtgttgagactgtggtcattaagcccgccctggaccacactttctagtctactggtcttactactgaggttaacatcgtcgagatgcaccataacagctctccaggaggcccatcctgttgacaacggtggcttaaacgtgaagaatgctgctgcgaaagatctctaaagctggtctgcagccttgaactccaaggatgacccttacaactaggctgatagcttaacattgcatgccatcataatgaatcatcttggccagattggcaatcgctattccccaattctggactgacacacaccacacattgc

SEQ ID NO: 123938 - DNA, 365 bp, Zea mays
  Clone ID: MRT4577_44512C.1
catgttgtttaattgttgtagacctgtagaggatgttttcacatttacccgcctgaaaccaagataaaatttttgttggtcttggctctcagatatactgctcacccagaagttggcacagttctcagttttttattggacaaggattatattaagtttagaggccaaataacactactgtttggtttgagcagctattatttgttttttggtaggtttgtgcattttggagagaaagtgaagtgccattgcgaagcagtgaactgccagggatacctgggcagccaaataaagaacccaattcaaagcattcttgccactgtagcaccgcaagtgcagttgcgagagtattcgcccatgcacca

SEQ ID NO: 123939 - DNA, 328 bp, Zea mays
  Clone ID: MRT4577_44513C.1
ccgtaaatccgctcccctacctctccagcgtgctcccatctacggcgcgtcaggtacgctcctcacctggccaggcatgggcaagatcaagatgagaagcaacggatgctgaaggatcggcgggctcgtggccagggacggcctgcagagtgaggatgtacagctcggagccgataacgacccttttattaccacgggttacatgacgttcatgttcaagctcgacaccgtgcacggacaatggaagcacagagacatcggcctcaaggactacaagacgcttactcttcagcgagaagccggtcaccgcctttggcatcaggaaccc

SEQ ID NO: 123940 - DNA, 277 bp, Zea mays
  Clone ID: MRT4577_44514C.1
cgggtccggggaaaatcccaacgcggcaaacggcttcctcatccccctcccctcgccatggccgtccccacctccacctcctccccgctccccctcctcttcctccatcgctgcaccgcaaactctaacccctcggttctctccttcccgtcctccctccgcggcgcgtccctccgctcccgggccgcggtcgcaccgcccgcatagaccctctctgacgacggcatccccgacgcgccaccgaaagggacaggaaagcgaatatccgctgccatcg

SEQ ID NO: 123941 - DNA, 121 bp, Zea mays
  Clone ID: MRT4577_44515C.1
cattgcgaggacagcgtatggcgaggcgaggcgacgacgtgttgcgcgcacgacgtacagcacgagcaacagcgaggccgctgctacgccatgggcgagcctcgcgacgaggccgagccgg

SEQ ID NO: 123942 - DNA, 930 bp, Zea mays
  Clone ID: MRT4577_44516C.1
ccggccggggtttcttcgtagtttttccggcccggtgtcaaaaatgtcgggtcctaaaaatcaattttctcctcggggactccactcggttgccggccatggcggagaatttggcccccgagaagcgccacaccttcgtgcacaacgggcagaaggtgttcgagtgggaccagacgctagaggaggtgaacatgtacatcgagctccccaagggcgtgcccaccaagctcttccactgcaccatccaggccagccacgtcgaggtcggcatccgcggcaacccgccatatctcaaccatgacctgatgcaccccgtgaagaccgactcgtcgttctggacaatagaggatgctgagatgcatataacactgcaaaaaagagagaaggggaaaacatggtcatccccaatacaagggcaagggattttggatccatatgctgcagatcaagagcaaaagcggcttatgctccaaaggtttcaggaagagaacccagggttcgacttttcgcaggctcagttcagtggaacctgccctgacccaagaaccttcatgggaggaatacgctctgagtgaagctccctacctgcccatgttggtgttgtattcccggttggtgtctatcatggaaataatcgtgatgtgtaaccattttgtgtgcaagctcattaattggctgtaaacccttttggcaacctttgcgtgctaaattctagttatagttgtgatcgtcattcagtgttcgtttttagatgtatattaataatatttaggaagagttgatggcaacctctgcatgctaaattctagttatagttgtgatcatcattcagtgctagactgctcgttttttgatgtatttatatttgggggtgagctcatgactaaggctatcttcaaccattctccctccaaaaatcccccatttgtt

SEQ ID NO: 123943 - DNA, 827 bp, Zea mays
  Clone ID: MRT4577_44517C.1
cattgggtacctcggcccctcgaggcgattatatcgaactctttacgtctgctacaattatggttccctttacttatcttgcacctgcgttgttcttcaatgctactgtcaagacggttaaacctttgggtcatgattcattcggcgctgctctaaacatgttcgaattcgagagcgccatgctatacaccgagcctgagtttgaaatccaattcagcgcttcagtgacagctggagtcaacttcgcaaccaccaacgaggctgctggcatcagcgggccggactttcgtggaacggttgtgccgaatgatggtgctgcccccttccagatgagaatgggcggagtccaactaggcaatgaagcagtattaccaatcatctctggaaacacgtcgtccggacttgaggtcccttacggaactgtatacagagttttgacccctgttttcagaggaggcgaagcacattacaagactttggaaaactcagtttttgttgcatcagagacagtctctgattctggcgttcctggaaagtttatcttaggggtcaagatctcgaaggtattcgccagcaaaacaaatatcactattggtgaggagttttgatagatggatcaacacacgagtttaagatgaactggcattgcgtaatgctgtggtttgtttctgtcaatattaccgtatatgggagtgctgggggaacgtctaagagaaacgaagaatgtaattaaattagtacctggaaaagataggaacgggcaccggatagcacagtgttcaaaatgtcggcttcctatgtagtaacatctaaaactcatttttccc

SEQ ID NO: 123944 - DNA, 276 bp, Zea mays
  Clone ID: MRT4577_44518C.1
tttttttttttttttttttttttttttttggcttaagccctggttccaagtttaaaccttaaggcagcaattttatttttttttgcatacgatcccacataaaaagggttctcctagtaagacccccacccaatgggcgtgttcctccacgaccaccttatgcaaggggtgtaccgaccaaagtccagatctaccgcaatggttaatggaggggcttggccgatctttccggctcaggccgagctcacgcaaggagaacaaacctgtttcggaatg

SEQ ID NO: 123945 - DNA, 1883 bp, Zea mays
  Clone ID: MRT4577_44519C.1
caaaaatgtcgggtcctaaaaatcaattttctcctcggggactccactcggttgccggccatggcggagaatttggcccccgagaagcgccacaccttcgtgcacaacggtgagccgcttcccctccctggtatcctccacagcctgccttccccgggcacccgacccctctgccttaggtttcgatctccatccccgccatgagcagggcagaaggtgttcgagtgggaccagacgctagaggaggtgaacatgtacatcgagctccccaagggcgtgcccaccaagctcttccactgcaccatccaggccagccacgtcgaggtcggcatccgcggcaacccgccatatctcaaccatgacctgatgaaccccgtaaagaatgattcgtcgttctgcacaataggtggagccgaactcacctatgctgaacacctcatcatattttttcttctgatccacaccttttctttttctgagcctgtactgtagatattgatttctgtagtatttctgacatcttcgtgacaagtgaacttgaaattgctgttcggttggtacaagctgtttgcgcttataattgttaaactggcacgatgctcttaccatttatttcaatcgagaggtgttgaaagcaattctccttcttcgctgatgcaaataaactacttagcagccatactgataatcattggatagtattgggtggctttagtttttgccagggttagttgagagctagatagcagacattgttgatgagtacaactgtacagctgctcctgatttggtacccttttgtgttttactagtcactttagacaacaaaatatgtctccagcacacatctttgacctttatagtcttacttttgctgtatagttatcaacttatcataattataatgatatggatatatctttcatggcgaatgcgatattagttccattccgatgatcttatcaagttatcagtctgtatagtttattgtagaaacttgctagcatcaagtattcgttgttgttgactgtttttttatataatctgagttagtgcagaactagagcaaaagtaacattgaattgtgcagccaacttagggctgtaggaaaatacgtagtttctgccaatctacagatcaagtgaatttgacaacatgctttgctagaatcaacaattaggatgcttctgaggtgtgatgattttttgaacagccagtaaaaacttagtgtgaggctgtgagctagtgataacatgagattatgcataagggcattctagcatgtgctactcacatgaaatttagtactatggatattgggatatgtctgtaacgatatctgagtcatatacatcttattcaactataatttttaacatgggcaatggtgatgacaatacagaggatgctgagatgcatataacactgcaaaaaagagagaaggggaaaacatggtcatccccaatacaagggcaagggattttggatccatatgctgcagatcaagagcaaaagcggcttatgctccaaaggtttcaggaagagaacccagggttcgacttttcgcaggctcagttcagtggaacctgccctgacccaagaaccttcatgggaggaatacgctctgagtgaagctccctacctgcccatgttggtgttgtattcccggttggtgtctatcatggaaataatcgtgatgtgtaaccattttgtgtgcaagctcattaattggctgtaaacccttttggcaacctttgcgtgctaaattctagttatagttgtgatcgtcattcagtgttcgtttttagatgtatattaataatatttaggaagagttgatggcaacctctgcatgctaaattctagttatagttgtgatcatc

SEQ ID NO: 123946 - DNA, 205 bp, Zea mays
  Clone ID: MRT4577_4451C.1
cacttcatactggcgccctcatagcggcatgcgttttctagaaataatcaatattattgattgagatttatctcagaaaaaaaaaaaaacgtgggtgtgcacacacccccaataatataaaagccgtggctttcaattctaaaaacgcaggctttattccacatactactataaaaaccagcccggacgaaacaatcaaaagggg

SEQ ID NO: 123947 - DNA, 314 bp, Zea mays
  Clone ID: MRT4577_44520C.1
ccccaaaaacatcccccaactagggctgggggggtgtaataacctacctaccagtcccagttaagtacaaaacgtaacggggccacaatttaattaatttaacatcgcccgggacttcccaataatgagggaggacttgcttggggggggctgggttctaaaaaataatgggggttttttcgaaataaaatcaccctgtataatgccctggtaatgttctacaaattgccaccccaattagttttttttccagttttaaaaccccattttagggggggcagtttactggcccttataaaaattttccccctttt

SEQ ID NO: 123948 - DNA, 329 bp, Zea mays
  Clone ID: MRT4577_44521C.1
cagcgcaacaaacgcgtccataatttcacaatgctcactcagctcctagttccattattccacagttcctcccaccaattactttcaatggccttcaaacacccagctgagcaagcctatatgcttcaacaagctattgcggctagcgtcttacaacaaccaattgcccaattgcaacaaccaatccttggcacatctaacaatacaaaccatcgcaacgcaacatcaacaacagttactaccatcactgaaccacttatccattgtaaaccctgtctcctaccatcaacatcagcttcttgcatacaatccacttgctctatcaaacc

SEQ ID NO: 123949 - DNA, 283 bp, Zea mays
  Clone ID: MRT4577_44522C.1
gtctagtccacccgccgttctcctagctcctctactcgccagtcgccatgggcacgggtaagatcggaatcaacggcttcagaacgatcggcacgctcgtggccagggtcgccctccaaagcgaggatgtcgagctcgtcgccgtcaacgaccctttcatgaccacagactacatgacctacatgttcaagtacgacaccgtgcacggacactggacgcacaacgacatgacactcaacgactacaagacccttctattcagagacaagccagtcaccgtctt

SEQ ID NO: 123950 - DNA, 3463 bp, Zea mays
  Clone ID: MRT4577_44523C.1
gccggccgggcctggatacagagcccacactgcagagagccccctcttgttcgcgtccgaaccggattccccgtcccgtctagggttacgcccactctcccccgccgctccagcgatgtcgtcggagcctctacccgcggagtcccccgaggcgcccgcttcctcctctggctccccttcgaaggacgccgtcggcactgaggtcggcgccgctgcgggggccccggaaacgaacacgctctgggtgggcaacctgccctcgcacgtgaccgagggcgatttgttggcgctgttcgggccgcacggcgcgctcgattgcgcccttgcacgagccggatctcgcagctacgcgttcgtcctcttccgttccccagccgaggctcgcgcagccgtcgaggccacccggggtgaaaaggtcaagggggccgccatgcgcaccgagttcgcgcggccggctagagctgttagaaatctgtgggttggtggcattagcccatccatttcaaaggaggagcttgagggggagtttctaaagttcggaaaagttgaaggtgttgcgttctcccaagatcagacttcagcatacatagattttgagaagcttgaagacgcaatttctgctcacagatccttgaatggaaaaatgctaggtggcaaggaattgtgtgttgatttccagaggtccaagggaagagcggaatggtcagaagctagcagcttcaatggtagagtaccagggccagtgggtgataagagaggcagtggccctctgaagagttctgctggagtgcggatgcgagaggcacaacctaccaatgttctctgggttggttttccaggttcttatagagtcattgatgaggaggcacttaagcatgccatgtcagtattcggtgtcgttacgaagataaaagttttccagacaaggcagtatgcttttgttgagtttgcaaatgttgcggaagcttgtaatgctaagatgaatctagatggtcatcttttcaatgatcccaggattcagattcttttctcaaacagtgggcttgcaccaaacaaattggacaacccaacatcggttgctggatttcctagttcagatatctattccagtgatggtcgtctaggccctggtattggcagtggaactttgcaagggtatgatccaccaagaggaggaagaacaagatattacgattatgcgggtatgcctactccaggtggtatcctttcgcaacctgaaccatttgatccaagagaagcaaaaagaatgaggcttgctgctggtgctgacccttacgatgtaagggcaggcagcacaggtctttattctgctggataccgtcatcagggcagttctgtgcacgctgagggaagctcaagtcctgttattcgagtccggggcacagtgcatcgtacatcatacattgagcactgttggcgtggcagtattgccaaaggtggatcccctgtttgtcgtgctcgttgtttgcctataacaaagggcagtgacatacctttaccggatgttatgaattgctcagctcggactggattggatatgctggcgaagcactacgcggatgccactggatttgacattgtctttttcttgccagatagtgaagatgactttgtttcttatactgagttcttgcgttacctgggctcaaaaagtcgggcaggggttgtaaaagttgatgcagggactacattatttttggttccaccatcagatttcctaacaaatgtgttacaagttgatggtccagagcgcctttatggtgtggtattacacattccacaaatctctgctgctgctgcactgaggccacagttaactgggaccgaacaacaaccttactatgatgaaaggggaactctgcctacttcacaaagaaagtatagtatcatttctcctaatgacagtggccaccttgatgctgattatcggacatctttgcatgaggattcaatgcatcggttggggcatattcctggaaggcctcgggtggatgaaggccaagcagttcaaccagctcttgcaggttttcctgctaatcaagcagctgggctgcaagtacaatcttcactcaagcctgacattatggctacattggcaaaaccttctgcctagtgtgcaatcgtcaccgctggtaagtggtcagatgaatgccatagacagaacatcgcagatacaggatccatccatgctttcaaaagtatggaatcctgaaaaccaagttactgcttcaaattcatcctttgggcaaatggctaatgttcagcatccaggacagcagtttagtggccaagcttcagctgctcatttgacaaactatgggaacatggtgagtgctcaggagcgctcaatacaacatactgcttacaaccctgaagttactttgaacttgccaccaccacctccacttccaacaataccacacagttctgctacattacagtctcaaggtggccacagtttgccctcacagacaaaccagcaactgtatcagccagagcagtattatgtgccccaaaacaactatggtccattagttccagttagccattctaaccttcaaatcagcaacactaacaaccccacccttaccatcccacaagtgaaccctggacctccaacaaataatcagattgggaatttggcccagccacagcattctatgccactgcatgttgatagagcaagtcaggatttctcttctcaggggcaacaacaaaatcgtggtcctggtgctgcacaagctcccgaggaggataaaagcaagaagtaccaggcgacactccagttagctcaaaacctactgcttcagttacagcagcgtggatctggaaatcaatcctgagacctaattattgcttcaggtaccctcgtctcgtctggtcgcaaacaactgaaaatatatatcccaactcgacggcttcgcctccactctacaatcgaagcggcccatggtgtgtctagctcgttggcctacacctacctgccccagttctcccttttcaaggacagacattaccagaaaacgatttatttttctcctttttattttatcgggtgtttgatatggataatccggcctgaattttgtactcgtttgttagtatggcctcgtgttatgttgttatttaatctgaaaccatatgttattgtgtacggtgccgtggttccaacacaagggaagcttgttcagagacccgtttctcatttgccagtgtatgcgcaatgatatgcccatatctgtgtattctagcttgactgtcttgctagatctgatctgcaaacagttccttgatagtctagtgagagtttcagcattacagtaaaacagtagataaagtcgttgctaaaacaccacgttgcttatatgaggcaatattagatctttaattgataaatgtatggacatctttaatgtaatggttattatgatatctatacttg

SEQ ID NO: 123951 - DNA, 137 bp, Zea mays
  Clone ID: MRT4577_44524C.1
cattgagggctggggaagcgcagacggacggcaggacagggaccgccgctctgtacagacgtgatagcgacaacctggccgcacccgtggtcctaggactccgtgcattgcctctgtaacagtggactgacacacac

SEQ ID NO: 123952 - DNA, 433 bp, Zea mays
  Clone ID: MRT4577_44525C.1
aaccggaacacggtttttttttcctaataaaaaacatgacatcaaaactggaaatatggggcaggcggaaaacccccctttccgttaaaagagagacccaaacagaaaatagtccggcactgaattggaggcccccaaacaaaagctggcccacaaaaagaaaaacaaaaaaacaattagttaaagttttggggggaaccaaaattttacgggagggtacgaaaaaaaacccacccctttaaagggccatatcccccccccccggcaggggttaaaggaggccccccccccggccccttcaaggggggtttttttttaaaaacccctgcccctggtcaatggggggctgggctgaatccttgatgtcgggggcctggaaccccaccctccctttgggggggccaacttggtcggcccccggggggggcttgcc

SEQ ID NO: 123953 - DNA, 235 bp, Zea mays
  Clone ID: MRT4577_44526C.1
cccaggcacactggaaaagcaaaggccggggggattcatttaacacccccccaccattttccgttgtccctcaaaaacaaaaaccccgcccccctccattttctaatctagcgggggctaacaaactatcccccgtctttatttcttcttttctaatgaaaaccatgcgaacacaggcctatttttttttttttttctcccttacacgcctttaaagggggttttttcgttcttg

SEQ ID NO: 123954 - DNA, 151 bp, Zea mays
  Clone ID: MRT4577_44527C.1
aatcaacaagaatcttgattatgtagcgcgtataacacttacatttccacaactgccttgaagtcattgcatctttatactcgatatgacactactgcattaatggccacttcactacgcatgaggctagtgcctcactaagcgtgactga

SEQ ID NO: 123955 - DNA, 429 bp, Zea mays
  Clone ID: MRT4577_44528C.1
ctcgtcacttcgctaccagctcgtttccatccacgcggatttgattgctcctgttcgttcctttgcgatcttgctctgctctgctctgctcccgggctctgctgattgctggtacttcttgtggaagaaccccgctttggaaagaaccatgctgtatgtccctgtccaccaaactgaccaccagcttccgtatcggtatgcatcttcagtgcttctctgcagaagaaacaacaactccggtccagagtcttatattgcgctgccttcagatgtacatggaccagaaagaagtggtcgatgccctctgccaccactcgaagatagagccctgcattactgaacttgcttggcgacaacttgagcatcaaaatcctctgtttttcaaggcgtactatatgagactaatgcttaagaatcaaataatggtct

SEQ ID NO: 123956 - DNA, 522 bp, Zea mays
  Clone ID: MRT4577_44529C.1
aaaaaattttattattataaaaaaaaaaaataaaaaaaaaaaaaaaaaaaaaaaaataatggtcgaaatttttaaaagaatcaaggctttcaaataatagggatccatgcttgcgttctcttttagggtaccttatatttttattctgggccgtctattatttatttcctgtccggtaaaatcctgggttttccttgttaaaacctttgttttccctatcttgtttgccctgttggctttccaccttttaggcctgggcgtattacccttttgacctgttgcgttgcctgttttggaaaaggtgacctacttttttttgtgaatgttacgccctgtttttttgttttttacgcccagtgttttgtgtttattttggccatgttgacggttcctttttttagctttttttccttgcttttttgcggtttttttactttttttttcgcaaagtttttgacttgaccctcttatgatttttaccggttatcgcttttggggtccttttttctttgtttattttgg

SEQ ID NO: 123957 - DNA, 610 bp, Zea mays
  Clone ID: MRT4577_4452C.1
ggcgcaggcggtggcgagcctgatggggtgccccgcgaacgcgagggacgtcaagaaggacgagaagagcgtgcccaacctggtgcagctgctggacccgagcccccagaacacggccaagaagtacgccatctcctgcctgctggcgctttcggcgagcaagcggtgcaagaagctgatggtctctcacggcgccatcgggtacctgaagaagctctcggagaaggacgtggccggcgcgaggaagctgctcgagaagctggaccgcggtaggcttcgcagcctgttcagcaggaagtagcgtgatgattgatgatctctgaagcagctagcggtgaagcgatagtgtgaaggtgcacggtaacctgtacaaagatatcgtcctgtttcatagcctctatgaagtgaagtgcggcagagcggtggacaaagttgcgtgatgcggcagagcgatcgtgtgaagtgttgtaatttcggtggctaatatgtgtgtaaggcccagttcgttcgttagctccctaaccagtaaccatggctgagtgaattcccaggcagcggtccctcccgtcgtaatgctaataaaatctctttagggaaagatggtttgctc

SEQ ID NO: 123958 - DNA, 1102 bp, Zea mays
  Clone ID: MRT4577_44530C.1
gagtaataaaatcataatataacacctcatcttaaaatattcctcaaaccaaatactctttcgtctacgagtcgccctatatatggcgattaacctactcgaggccggccgggaccaaaaccacagcaccatcgtcttccttgtctctgccttcccgctagctcggttcttgctgtgctagcctctgttcatccacacccgcgcgcgtcaatgggggagtacaacggcggcgtgagcacatcgtggaccattgggtcggcgcacggggggatggcgccacccacgcggcccaaaataaagatcatccacatcatcgcgccggagatcatcaagaccgacgtcgcgcacttccgggacctcgtgcagcggctcaccggcaagcctgcttcctgtgccgccagcagcacgggcgacgacgacgtcgcgtcgacgctgccgccggtagaagacgaggacatggagacgacgaccaagaagaggccgaggccgaggccggcaccgcctccggcggccggtgatgagaggagcgacttcaccaaggcacaagaggagccggtcaagaagaggaagatcaagtgcgaggtgaaggtggaggagcaaggagctggcttcggcgattacgacctcggccgcggcgacctgtggatggatctcaacccgggagggttcctgagcttcttggaggaggagggcgtgttccagggcctggctgctgctgaccacgacttctttcagccctttggctcgtccaggatggatttggttggtgaaatgcacgcgtcttgacaatggagaagcaagtgtaagcaagtgtgcttatatttcagacagtggagaaagtaagtgtaagcaacaccaatataaggggaagaaatcggaaatttgcatgccaacaatttaattatatgtttgtaaggaacactggtgaaatcatagaaggaactgaaaatcagtttggggaggtgtagtggtccaacttgtaaggaactgaaaatcagtttgtgtaaaatatctgccgagctttgtgagctggaagggatcagaacggtgtgaccctcgcggcgatcggatgatatcagcatggttaacctgttgctcgcgc

SEQ ID NO: 123959 - DNA, 406 bp, Zea mays
  Clone ID: MRT4577_44531C.1
aatctgctcatcaaaaagttggacgtttgttgcgctctgtttgactttacggatgcgtcaaagaacatgaaggagaaggaaataaagacgctgatgttgttggagatagatgagtatgtaaggactgctaacgtgaagttccctgagatcgttgtggaggcaatcacaaaaatgatttcggtgaacttgttcaggacactaatttccccacctagggagaagaaggcgcttcaagcttttgatctagaagaggacgaaccgttgatggaccctgcgtggccacatttgtaccatgtgtatgagttgctcttgacatttgtccagtctccacaaaatgatgctaagctggctaagagatatattgactattcctttattctgaggctgcttgacctctttgactcgg

SEQ ID NO: 123960 - DNA, 201 bp, Zea mays
  Clone ID: MRT4577_44532C.1
atggccgaaaacgaggaagaagttgaagtagaagaagaaaagacttcaccaccaccaccacctgaggaacatcaggcaggctgctattttatttttgacatctgcgggtccgagcctgattcaccagtaaaacaaggcaagccccgatgcaatataaagaatttaaacgataaacctcttgagtacgactttcctccatga

SEQ ID NO: 123961 - DNA, 424 bp, Zea mays
  Clone ID: MRT4577_44533C.1
gtggggggggttttacgcccaattacttccaccagcatataatatcgttgcggctacaaacacatagggcaacactatatactacacacagacatcgtggttgatatcaaaagcgcgcgtatcaggttgcaattccaaattttctggtgacatacatgcgggggggggggcaagaccaactctactacgctcaatcctatttcaagtgtatgctcgcatgggttcctgacccaaaacctaccatctggggcacttgtccataggctcacgtaccgagcgtgatagataagcagcttaacgccactaacagcttgaaccacaggggatataacagggctatgaactccatcatgcccttgacagagagcacggtcctgaatttagctaggcactcagtcgagcacaggtgcctctctgcggggcc

SEQ ID NO: 123962 - DNA, 343 bp, Zea mays
  Clone ID: MRT4577_44534C.1
ggaatgcacaatatctatttttgtaaaatgagtgctttgagtaaaaaaaggaaggaaaatagttccaaaagggaaaaggaaggaaaagaattccaaaagggaaaatgtgagaggtgcggaggggatagaggacatgaagaatctatacacttcatttctgaagaaacatgaaacacgttgctacttgattttcagggcaacagatttgcatataggacaccagttcttctgtcgaagccagtgctctatgcaggaaaggtggtagtagtgtttacatgccatcttgcccacatcctcacccaataaatactcctcctggcatatgctgcattttgtttcacaa

SEQ ID NO: 123963 - DNA, 323 bp, Zea mays
  Clone ID: MRT4577_44535C.1
tgacgccatgccgctcgtaagctgattcggctcggagccccaccgggtcataccgacagtgcccgggggtctgctgcaaggcggtactcgacatgagcggcacctcatgggcgccatggcaacccggcatggccacaggcttgcgccgcgcatctaagatcctacagagggtgccggcagcaggcggaacatgcttcgtggaccagggatccaacccgttactgagtgctatggtcaggacgcacggactacgcgccactatgaggccggtgcggacggaccgagtcaaactgggcgcgcttgcctcactcacaccgcaggcg

SEQ ID NO: 123964 - DNA, 432 bp, Zea mays
  Clone ID: MRT4577_44536C.1
ttacctatcaaacgcgcggctggcctcagggccgggcgtggtgaggcacgagctcgatgcagcccatccggcggagggaccgaggctttgcactcactctgtgtgtccggccgcctcctcgctgccgacactgtgctccccggggcccgcgaggacgaaggggtcacgccctacgaggcgcgccgggtgcacgacgaggtgaaagacatggtctataacagcgccagaatggatacatgaagtatgctgtcccactcgatgagcatgccgaccttaagatggcagggggtaaacaccctaggagagatatgcgcgcactatgatcgatgactgggatacgcaggctgtactgggtgataaggagcaactgtggagctctgctgactgagctagatagaacgaccactgcggtatgaaacaaagcgcttgtgc

SEQ ID NO: 123965 - DNA, 550 bp, Zea mays
  Clone ID: MRT4577_44537C.1
ggggtgggggttttttaacgaatatcatgtgctagaccagcctgcggctcgtgccacactacgtgcaagctgagagcgggatagctaaaatgtgctaataacatcgtcacgagactagactatagaatccttggacacaccaacaggcacggcggcgcatcataccatttatcattgggtaggcacaagccgtagccatccatgagaagcagggggaaaaaaccgggagacggggtcttgaacatgaggtggaacaagccatcgacgcgccagctgccatcctactaatagcggctccacatagaatagctggactaactaggcgcaccaagctagccataccatggcagccaatactctactcgtgcacgcaccaatggaccaaagacaaaccagatactcttccagataacccaaaagcccctaagcaaggaccctttgaagcagcatgaaacgagccattgagaccctgatatgaggccaaccactgcaaattgacgaggaggggaacatccgacacaactacaggtggaacactgaaggacatacc

SEQ ID NO: 123966 - DNA, 331 bp, Zea mays
  Clone ID: MRT4577_44538C.1
caatggatgttatcttctctggcgagcttactatttttctgtttgatattgctgctgtaaatctttagctgttggaggaacaccacacgcccccctattcaaacaaccaaaaccttctatgccatgcatggagccccccgaacgcggagaagagccccaaactgcacaccaaagaacgaatggctcgttcaactaagacgaattgcaaaaaggcgtcaaagttggactctcgtgcgtgcaccagaacccagacgaccgtccgctcatgtcaaatgtgcttctgatgctggctagtaccaatgccaccttactgccaactcctaaacaacct

SEQ ID NO: 123967 - DNA, 303 bp, Zea mays
  Clone ID: MRT4577_44539C.1
accagatgtgctaactcatccaagcttggagggagtaaaagcgtgggtgtgaaatatttgaaatctggtgtatcaagagatgcattaaagcctaatggaaatgctatttttctttttttttatgttttttttttttatattattattattattttgtttttattaaaatatttattaatattacttttatagttatttgttttttttttttttatattttatattatattttatctttattataattttttatatttttattgttatattaatttttaacattaatatttattattaattatt

SEQ ID NO: 123968 - DNA, 792 bp, Zea mays
  Clone ID: MRT4577_4453C.1
cctcgagccggccgggaacgacttcacgccagaagaggaggagctttgtcggggggcggctacaagaggcggtggtgctcgcgccactctgcctctggttgggctccgcgctgcggcgagcggctgccgggaggaggaggtggaggccgccgggaagtggcggtgggcgaggaggggtggcgggcggcgacacgaccggcatcggtgagagaggtttaccagcttctggtgtcgtagctgccaagaaatgagctttgggagctgtccggccgtggccgggggcgcgacggcagaggagctgcttgaacaggcgcgggggctggtgccaccagccctggccgctgcgcgcgcggccactggctttggtgggcggtggaaggctatcgcagcgaggctggggaggctgccgcagtgcctgtcggacctgtctagccacccctgcttctccaagaactcgctctgtcgggagctgttgcagtcggtggctgcaacgctagcggaggccgccgagctcggtgcgcgctgccacgagcctccgaaggcggggaagctgcagatgcagagcgacctcgacgcgctggccgggaagctggatctccacctcagggattgctctcttcttgtcaagactggtgtgttgtctgacgcgacggttcccgcggccccggctgggacagcgtcggcttctggcgcacaggtggacgtgcgggagctgcttgccaggctgcagattgggcacgcagaggcgaagcaccgggctgtggatgggctgctcgatgctctgcgcgagga

SEQ ID NO: 123969 - DNA, 355 bp, Zea mays
  unsure (1)..(355): unsure at all n locations
  Clone ID: MRT4577_44540C.1
atgtcggcacgaggcctaggggcgaggtggtgtctctctctctctctccctccctccctccctctcgagggtttcgggttcgatccggcaagcgggcgagatcttcatggggacgtcgttcgaccgctgggagaaggaccccttcttcctcgccgccgaggaggggcaggaatccggggtgggggggaatcgggttatcgggtatgggggcangagaggagcgggggcgattccnaggcgggaagcggcactggaggccctacagctgcgcagcttcgccgggagcgggacacggggctcgggaccggcaaggggcagcttgatgaactggggcgggcaggcagatcgaacgatc

SEQ ID NO: 123970 - DNA, 391 bp, Zea mays
  Clone ID: MRT4577_44541C.1
ccaggagtcagccctaggatctactactgcgtcgagttcgcggtccaccaccaccacggttaccatcagcagtctcatgcggccgtggaggccatctcgaggcggatgatccacatggcgtcccatctgtacagcgtggaggtgtcctacttggacttcctgaaccgggtcaggatggaggaggtgagcctgcggagcgccgggatgtgggaggaggtgcaccacccgtggctcaacatgttcgtgcccaaggccggggtcgctggcttcagggatctgctcatggacaacgtctcgccggatagcttccagggcctcatcctcatctacccactcctcagagacaagtgggacaccaacgcgtcgggcgtgatcccggactccgggccca

SEQ ID NO: 123971 - DNA, 503 bp, Zea mays
  Clone ID: MRT4577_44542C.1
ggtttttgtttttttatttttttttttttttttttttttttttttttttttttttttttttttttttttttttttttttttttttttttttttttttttttttacataaaaaaaacttcaaaataaaaaaaaatgacaagaaaaatggggggtttgaaggcaggcctttttttttccaaaaaaaataaatttctaaaaaattttaattgggccctgaaaaccaaaaccggtttttgggttaaaaaaactttaaaaattggtaaaaaaggaaccgttaccattgccaaaaaaataaaattttccagcgcaaagggcaccaggaaaaaaacttcgttaaaaggttggctttggaaaaaccccaaaattggtctttttttttgatggggtaactgttggaaaaacccttggaaaggttaataaattaatttgcaagggacttggaaatggttttaatgttccaaaaagaactcttcctgggaccaaggggaaagaagtaaatggcc

SEQ ID NO: 123972 - DNA, 202 bp, Zea mays
  Clone ID: MRT4577_44543C.1
gcaggactctcttctcgctcctcatctcacgcaaaggggtcgcctgggatcacatatacgatggcctctgcagatggtcgactagctggcactcatgtcaatggcaccatctgctgtgcgcaggaataggattgtccgatcacagtcactggtattaactctggtctcaacccaggactccatggggaccatatgcgcccgc

SEQ ID NO: 123973 - DNA, 533 bp, Zea mays
  Clone ID: MRT4577_44544C.1
aattcggcacgagggccaagcggggattctggcatctgcgctctgacattcgcctcggcctctctcggccggcctcttcgtttcctcctcccagccgaccggccggccagccagacccacccaccgccgatccccacgcaaggggaacaggagaggaatcaaacccagcctcgcacgcggaaggcctgcctggtgatcgacgatcgtcgtgctcgtggtggcgggtccggcgtgcgagcgagcgagcgcggcgcgcatggcgagcgacggcgaccacggcggcgcgctgcagaagccgctcttgccgaaggcgcccaggagcgggggctggttccggaaaggtacgagcacggcgcgcctcggcgccgccgctgccggcacctcgtccaaggccgcagcgctgcggccgccgcaccacgtgcccgcgctactctgcacgctcgtcgtcgcgctaggaaccgtccagttcggctttaccagcgggtactcgtcgccggcgcaggacggcgtcacgcgggacctcgacctctcca

SEQ ID NO: 123974 - DNA, 532 bp, Zea mays
  Clone ID: MRT4577_44545C.1
cgacgagaagcgccacgagaccgcatacacccgcatcgtcgccaagctcttcgaggtcgacccggacgcggccgtgcgcgcgctcggctacatgatgcgccaccggatcaccatgccggcagcgctcatgaccgacggccgcgacgcccacctctacgcccactacgccgccgccgcgcagcagaccggcgtgtacactgcgtctgactaccgaagcatcctggagcacctcatacggcagtggcgcgtggaggagctcgcggcggggctctccggcgaggggaggcgcgcgcgggactacgtgtgcgggctgccgcacaagatccggaggatggaggagaaggcccatgacagggcggcccagacccagaaaaagcccacgtctgtcccgtttagctggatcttcgatagatccgtcaatgtcgtgattccgtaattttcctcaaaaaaaattgagaatcaggttatgcttagaggtgcattcactgttgtgtggattatccttgcaataaaaaaacaacgccttgcgggg

SEQ ID NO: 123975 - DNA, 360 bp, Zea mays
  Clone ID: MRT4577_44546C.1
ggtgttggtttttttgggggggttttttttttttttttttttttttttttttttggcaaacaaaatattcccatatatataccggggctttattggccccccactgaaccatggaatttttacataatctggggatggccccctggtgattttgggcctatgctcggccggtggccacacaattaatggttaaaccccccgataatgaatattggcactatttttttttttgctacataaggggggcccctaccatgtcatgttttcaaatcgagggcgtgaccccaaataagcccggacggcagtaacaaatttcaaaagatgcaagggcccacatataaacctaactgggggggccct

SEQ ID NO: 123976 - DNA, 149 bp, Zea mays
  Clone ID: MRT4577_44547C.1
gtaattctggcaagccacgaaaggcggactgcctgtggattaccgtgccccacgtctgagcatgaagtcattgagggggacgccttttatcagccacactgaccttgctgattctggtgctgcatctgtctgactcaatcatacaggct

SEQ ID NO: 123977 - DNA, 2016 bp, Zea mays
  unsure (1)..(2016): unsure at all n locations
  Clone ID: MRT4577_44548C.1
ccgggccggtttacgtctatatcacgtgcttttggagatggttaaagtactgccgaagacccatgttgactggcttcgctagtggttctaagaagccacgaagtcaagtttcatactcaggttctcctagaagtgaggaacttggcttaaaaaacaaagatcatttccgcaagatacaatctcatgtcagtgttaagacaagtgatgcaaaaaaacttcctgatagttctagaagtgggcatagcagtccagagctattgacttgcattgcaaatgttcttgttacagtgggtgatagaggttggagggagtatgatacccagatcacaatggattctgatgttcacagtgaacagaggatatgcgtgaaacttgctgaagggaccaagtatgctcacaaggtctgtcaagttttgcagcctggggccacaaaccgctatacacatgccatgatgtggaagggtggggctgagtggtgcctggaatttcctgacagaagccagtggttgattttcaagcaaatgcatgatgagtgctatagccataacatcagagctgcttctgtgaggaacattccaacccctggtgtccatttggttggaatccatgatgataatgatatggtatcctttgtgcgatctgaagattatcttgtccacatcggaacagatgttgaaattgctcttgatgaggcccgtgtgttatataacatggacagtgatgatgaagagtggatatcaagccggcagaaattcttagtaagagacaacaacgccacacttgagttggcagaagatttgtttgagagggtcatggacaaactagagaagtttgcatatagccacgactctaatgaactcagcattgttcagatgaaggaactggagactgatgacctacctctggacattattgaagtgatacatgcatattggcaagctaagaggcagaaaaagggaatgccacttattcgacatttccagttcgctatgtggaaggtctacgagcaacagttacatgaatgggaatcgaaagtatgcagaatgcagggttcatcaaatgggtaccaaggaaaaaaaatgcctcccaagcctgcattgtttgccttctgtttgaggcctcgtggactcgatgtaccatacaagggaccaaagcagcgttctcataagaagcttatgtctacaggctgccatagcttttcaagacagcatgatggcttttaccggcaagggtactctcccaggttctctacaagaacaggttctcttcgggcatttgagtcctcggaaagttctacaccaagatttttcaggacaaatattgtcaaaaggagtgcaaccgttgctttctctgatgatcaccagccgtcgccttccttccgccctcagagagttaaacggagcgcatctgaccattggaacactgtcattcatgactggcagaactcaaagcatctctttccgggctcgccccctgttgatattgaggagctcaaactgcgggatgctgcaagcgcagcacagcacgctgctgccatggcgaagctcaagagggaaaaggctcactgcctgatgcagaaggctgaccttgccctccataaggccacggtagccctcatgattgctgatgcaatcaaatcttccagcaggaacaagtctcgggattgccgaaggggatttgatgaatgaggaacgctgactttttttttgccttttgccgcgagcccttggcgtatacacacaacttgaactcgatgcttttgctgatgatgggagcgtgtttgcttatctaatgatcgagtcattagatagcaatatttcctctcttcctccaaaaaaaaaaaaaaagcgtctcctgtacataggtttcttttcatcattcttttgtgctcttttacctcccgattncatattgcccggtgatgaatgggccaggtcaccaggatgtaggttagcaatctggcgtgttgtctgaacagcggctagggaagtggcgctttacggagggttatggtcc

SEQ ID NO: 123978 - DNA, 153 bp, Zea mays
  Clone ID: MRT4577_44549C.1
ttttctagcaaataggttttggaatacacgaacatggagctgaactgtatatagttccatcaccatgcttatggaaagtgtgaacagggtcggtgggtatatattagggacaaacaagaagtctaccttggccaacatgcaaaaacgagatat

SEQ ID NO: 123979 - DNA, 217 bp, Zea mays
  Clone ID: MRT4577_4454C.1
gattagtatatccaaagccaattctaaggttaaatttaaaggtcctactggtattaccggggaccgggtccttttggttccaccgggccttgcctttttcagacttggcctattttttaaggaggcattcccaaagtttaaactaacatacaaggttggccgccaacttcctaaaaaatacagcatggtcctaattccgtggaaccttccaaggaaa

SEQ ID NO: 123980 - DNA, 1138 bp, Zea mays
  Clone ID: MRT4577_44550C.1
gggaatgccacttattcgacatttccagttcgctatgtggaaggtctacgagcaacagttacatgaatgggaatcgaaagtatgcagaatgcagggttcatcaaatgggtaccaaggaaaaaaaatgcctcccaagcctgcattgtttgccttctgtttgaggcctcgtggactcgatgtaccatacaagggaccaaagcagcgttctcataagaagcttatgtctacaggctgccatagcttttcaagacagcatgatggcttttaccggcaagtatcaggtaggagatacaatgaatgcactgtggatgggcggatatgcgaattatatgacattggttctctttattccctaacagggtactctcccaggttctctacaagaacaggttctcttcgggcatttgagtcctcggaaagttctacaccaagatttttcaggacaaatattgtcaaaaggagtgcaaccgttgctttctctgatgatcaccagccgtcgccttccttccgccctcagagagttaaacggagcgcatctgaccattggaacactgtcattcatgactggcagaactcaaagcatctctttccgggctcgccccctgttgatattgaggagctcaaactgcgggatgctgcaagcgcagcacagcacgctgctgccatggcgaagctcaagagggaaaaggctcactgcctgatgcagaaggctgaccttgccctccataaggccacggtagccctcatgattgctgatgcaatcaaatcttccagcaggaacaagtctcgggattgccgaaggggatttgatgaatgaggaacgctgacttttttttgccttttgccgcgagcccttggcgtatacacacaacttgaactcgatgcttttgctgatgatgggagcgtgtttgcttatctaatgatcgagtcattagatagcatcccttccccccttctcccccctccccctcctttgcgtctcctgtacataggtttcttttcatcattcttttgtgctcttttacctcccgattaacatattgcccggtgatgaatgggccaggtcaccaggatgtaggttagcaatctggcgtgttgtctgaacagcggctagggaagtggcgctttacggagggtt

SEQ ID NO: 123981 - DNA, 195 bp, Zea mays
  Clone ID: MRT4577_44551C.1
ctcggtaccctggggagctctacagtcgacctgcagagggttctgagaggcgctgtttcgctgcccgaggagcgggtatgtctcagtcgcaaaagcgaggccgatctacctagaaagatcgggggatcaatacgcgatactgggtgtgttgaactacgccctaggaaacaagccgttggtaaagacagcgaactt

SEQ ID NO: 123982 - DNA, 342 bp, Zea mays
  Clone ID: MRT4577_44552C.1
ggctttctcgcacaatcaccatgaagaggcgccgtttgatcgctgatgggaacacccagccccctgcccccatgtctcatgatcatccggtcctgtgatcggcttggaaggatgatggaactactgagttctctccaggctgtgacaagcacgacaaacagtggcctcttctgacaggtgcgcagccatcgactgaacctggattccattgccctatcaaggaggtcgcctggaattcctcagatgaaccttcttgtatccgaaagctgggacactacttcaggtcccgctgtctcatgacattcaaaggctcgtgtgatccaaaaacttcctgaacgttgc

SEQ ID NO: 123983 - DNA, 470 bp, Zea mays
  Clone ID: MRT4577_44553C.1
gagatccaggcttcctatcacctacttacgaggacaaaaccatcaatgagttgttttgaaattgatctacatatattccatgaaggtagatggtggttcccatcttgcactaaatgcaacaagtcttcaattcagacctctactgaatatcgctgcataccctgtgattggacagaaactaaatttaggtaacctttcacacaaacaatcactttgtcgttattcgtctgagataaaacacctcttacttatcaaatcactgccacacaacattaacggttcataattcacagatacaaactcggcttcattggtactgatggaacattcgaagcagaattcttttgttctgacaatatagctaaacgaatagtaggaaaaccttgtgaaacccttgttagtatccttctctagatttagttgccattgtttttctcggattcacctttgcagataccattaatatgttc

SEQ ID NO: 123984 - DNA, 288 bp, Zea mays
  Clone ID: MRT4577_44554C.1
aggacgtttttttggacacctcctcctcgcgcccggacggatgttccttgttcagagcctggtggtgctcgtcaactcagactctgtgtgcacggatataacgatatttgcaagcacagtgcttgtgttactatgcagtctcacgaaataggatgtggccaacatctatgaagtcgatgctatgatccagttgatcaacgactctcaaatttcgatgaagcgactgacttacgaggacctgtgcaagatgaacatagacgacccattataaattgacaagataggctg

SEQ ID NO: 123985 - DNA, 246 bp, Zea mays
  Clone ID: MRT4577_44555C.1
atggtgggattttttttatgcttgtccttaattcccttaacaataatatccacaaacatgaagggaggaagtctgggggttctgggaaccaaaacaaacccggaaaaaaccaaagggaagaacaaagaaaggcacggacggaaaacccctaaagaaaccctaccggagcaccaaaagaggccaagcaaagccggaaaaatcagacccaagaagaaaaaaaaacaattttactacacagcatacaca

SEQ ID NO: 123986 - DNA, 1101 bp, Zea mays
  Clone ID: MRT4577_44556C.1
ttgggtacctcgaggccggccgggagtcacactcggcccgtttcagattcgtgacgtactccctccctccaaccacgcccggccagccaaacttgccatggcgctgccgtcgtcctcgacccccaccgcgtcggctccggcctccctcggcgagcggtggccgccgctggagtctacccccgcagttttcaaccagttcgtgtggtcgctaggtgtcccagaggacgacgtggagttccacgacgtgtacgggctcgacgccgacgcgttggatatggttccccagcctgtgctcgccgttgttctctgcttccccgatccaccacaggatgcaagttacccttcagaacaactcttaatttctggagaaaaggaaacacaggaccaggtttactttataaaacagatcgaatcattgggaaatgcttgtggaactattgctctactccatgctgttggaaatgcatcttccaaagtcaatttagtggagaattcatgcttggacttgttcttcaaatcaactgctaccatggacccatatgagcgtgctgtgtgtctggagaaggatgatacaatggcaagggctcatttacttgctgccaatgatggtgccactgagctcagtgatcttatagaagagcactacatttgttttgtgtatgtcaatggaacactttatgagcttgatggaatgaaggatggacctataaagcacggaccctgttcttctataagtttgctgcaggatgttgttcctgttatttagggcatcatgtgcaatatccccaactcatcaacttcaatcttatggtgctgtcaaggaaagaaaaataatggtggtgctattccttgagctggtaagcggtggaatgcaaaacgcaagggttcaagggaaggggattaaacggatgcctgtttggactgcagctgcgtcactaataagttcagtgaatgcaaacattttttcctgatgtgttcgctatcatatctagtcgagtgcgtgactacattcatctttagtgttcgcaaagcatctgaaaacttgtcttaggctctatttgtttccttccagtattatataatccagcttatacattatat

SEQ ID NO: 123987 - DNA, 614 bp, Zea mays
  Clone ID: MRT4577_44557C.1
actcggcccgtttcagattcgtgtcgtgacgtactccctccctccctccaaccacgcccggccaaacttgccatggcgctgccgtcgtcctcgacccccaccgcgtcggctccggcctccctcggcgagcggtggcctccgctggagtctacccccgcagttttcaaccaggtaccctcggtcaccttcctctgaccatcaattcgacgctctgctctgctgatttccccctgacctctccgcggcgtcggtgcgcgggcgcagttcgtgtggtcgctaggtgtcccggaggacgacgtggagttccacgacgtgtacgggctcgacgccgacgcgttggatatggttccccagcctgtgctcgccgttgttctctgcttccccgatccaccacaggatgcaagttacccttcagaacaactcttaatttctggagaaaaggtgaacaattacggtccttgtagatgcctccccctcctcatgaaacacaggaccaggtttactttataaaacagatcgaatcattgggaaatgcttgtggaactattgctctactccacgctgttggaaatgcatcttccaaaatcaatttagtggagaattcatgcttggac

SEQ ID NO: 123988 - DNA, 277 bp, Zea mays
  Clone ID: MRT4577_44558C.1
ccttgatagcatggggccctggccagagttgctgtgccgtgtccaagggccgtgccttgcccttggagctgccgtgcctgtgtcctgatggcccaaatgtcagggttctgctcggcttcttggaccttggcgcttagtccccatcccgggtttggctgagcctggctggagagctgctatgctaaacctcctgcctcccaataccagcaggaggttctgggcctctgaaccccctttccccacacctccccctgctgctgctgccccagcgtcttga

SEQ ID NO: 123989 - DNA, 539 bp, Zea mays
  unsure (1)..(539): unsure at all n locations
  Clone ID: MRT4577_44559C.1
cgggccgggttctacacccgctcccccagtcagaaaatttagccgcccccgcatcggcctcccagggaagnagaagcgnccaccccagccgccgccatgaagtgcaatccccgcgtcatgagctcccgacggaagtgccgcaagggggacttcacggacccgtcctccgtccgccgcgtgctcatgtccgcggagctatcgacggagctccgccacaagtacaatgtgcgctccatcccgatccgaaaggacgaccaggtgcaggtcgtgcgccgtacctacaatgctcgtgatggaaaagtggtgcaggagtaccgccatcactgccccatccacttttagcgcatcacccgcgagaaggcgaacgtctccaccgagaacgtggacatccacccttccaaggtcatgaatagcaagctgaaccttgacaaggaccgaaaggcgctcctcgaccgcaaggcccttgagactgccgccaacaatgctaatcgagagattattgccctacgacgcaacctcatgtgctggtggtgccacca

SEQ ID NO: 123990 - DNA, 2146 bp, Zea mays
  Clone ID: MRT4577_4455C.1
gtgtcagaaggcgcgctgccaccgctcatccggctggctgagtccggcagccttgttgggcgggagaaggccgtcatcacgctgcagcggctgtccatgtcggccgacattgcccgtgcgatcgtcggccacagcggcttccgcgctctcgtcgacatgttccatgctattcttttctgcttcggtgccaagaagctgagtagtgagcactgcaggtctgtgttgtagctgccaagaaatgagcttggggacctgcccggccgcggccggcgacgcgacggcagaggagctgcttcaacgggcgcgggggctggtgccacccgcccttgccgctgcgcgcgcggccactggcttcggtgggcggtggaaggctatcgcagcgaggctggagaaggtgccaccgtgcctgtcggacctgtccagccacccctgcttttccaagaactcgctgtgtcgggagctgctgcagtcggtggctgcgactctagcagaggccgccgagctcggtgcgcgctgccacgagcctccgaaggcagggaagctgcagatgcagagcgacctcgacgctctggccgggaagctggacctcaacctcagggactgctcccttcttgtcaagactggcgtgctgtctgacgcgacggttccggcggccccggctgcgtgcgcacaggctgacgtgcgggagctgcttgccaggctgcagattgggcacgcagaggcgaagcaccgggctgtggatggcctgctcgatgctctgcgcgaggacgagaagagcgtactgtcggcgctcggccgtggcaacgtggccgccctggtgcagctgctcacggcgacggcgcccaaggtcagggagaaggccgccactgttctgtgcttgcttgccgagtctggcagctgcgagggcctactcatgtcagaaggcgcgctgccgccgctcgtccggctggccgagtccggcagcctcgttgggcgggagaaggctgtcatcacgctgcagcggctgtccatgtcggccgacatcgcccgcgcaatcgtcggccacagcggcgtccgcgctctgatcgacatgtgccagaccggggactccatcacacagtccgccgcggccggagcgctcaagaacatctccgcagtgccggaagtccggcaggcgctggccgaagaaggcgtcgtgcgagtcatggtgagcctgctggactccggcgtcgttctcggctccaaggagtacgccgcggagtgcctgcagaacctgacgtcaagcaacgacagcctgcggcgcgccgttgtgtccgagggcggcctccggagcctgctcgcctacctggacgggccactgccgcaggaaccacccgtggccgcgctccggaacctggtgagcgttgtctcagcggacagcctggtgtcactttgcgtgctcccgcgcctcgtccacgtgctccgtgacggttccgtgggtgctcagcaggctgccgcggcgaccatctgcaagatgtcgagctccatggacatgaagcggctggtgggcgagcacgggtgcatcccgctgctggtgcggctgctggaggccaagtcgaacggcgcacgtgaggcggcggcgcaggcggtggcgagcctgatggggtgccccccgaacgcgagggacatgaagaaggacgagaagagcgtggccaacctggtgcagctgctggacccgagcccccagaacacggccaagaagtacgccatctcctgcctgctggcgctttcgacgagcaagcggtgcaagaagctgatgatctcccacggcgctatcgggtacctgaagaagctctcggagtcggagaaggacgtggccggcgcgaagaagctgctcgagaagctggaccgaggaaggctacgcagcctgttcggcaggaagtagccaccaggcgatcgatcgttcttcatgtacaaagatcccgtccgtcctgtttgtgtcatagcctctatgactatgatgaagtgaagtgcggcaggcagctgttcgttcatgtgaagtccctaacaatggccaaacgaatttctttctagcggtcccctcgcaatgctaatataaaatctcttcatggtgtcgtgggcctaaaaaaaaaaaaaaaaagggcggccgctcgcgatctagaactag

SEQ ID NO: 123991 - DNA, 242 bp, Zea mays
  Clone ID: MRT4577_44560C.1
cactattcatacctaccagacgccatccatggttgacatgctgcagcgctctcagatcctcgtgccacccattgctgacatgctgaacagctccccaactgtggcgcctccaaatagattcagccggccatccaggtccaggacaataaaatccttctctgagcaactcctgtgatgcatcctgatcatgacacatgtctagctataattgtcaaaatattaggtgaatgtaagctgtccat

SEQ ID NO: 123992 - DNA, 358 bp, Zea mays
  Clone ID: MRT4577_44561C.1
attatgacagtgcaaaacatgcttttggtgtttttttagaatttttggggcaaaacattccttgccccccaggaacaaccagggcaaacatccaaagaaactaacaggcaaaaatccatctacagttcaatgctccaactgcagccatggagccgccctccaggacgagataggaaaacctgcgagggggctcacacaaggcgggagacagaacgatgcgtcctgtgcaccattgcaaaaacaacctgctgtccacccagctgaggaggcccttgtggcagcacccgaccttctagcaagtatgaataatgggggggtggataatcgggggggggcaaaaccaagggatcggacccct

SEQ ID NO: 123993 - DNA, 257 bp, Zea mays
  Clone ID: MRT4577_44562C.1
ggcaggaccggcccggaattaattcctgggacgacgaggttactagccggcggccgcccaccaccacccggggacattgaaaagagctgccggaagttccccgccccaccagcgaacacccgctgggacgaccacagggccgaggagaagaacacaacacaaagccgcaaacccaaaaggggagccggcaggacatcgaggcacggagagcgaggaaccacaccggcggcccgacgcgagcaaaagggagggggagc

SEQ ID NO: 123994 - DNA, 464 bp, Zea mays
  Clone ID: MRT4577_44563C.1
gttgaattcggatgttgatttttgcgaggaaagatcacaaacatgcaaggtcctacagagcctagaccctccagtctgcctacacgcgctagttcaacttctcaatgatggggccgttcaggccgacaaccatggtcatctcgaacgacatgtacacacaattgcttatgtctgtgagcacttgagtcttaatgattctttcattggggactgtctggacgtcctagacagtctccaggcagaaggggaagtacaccacgcgattagagaactgaaactttttgacctcagatgtcagcaccttctgagtcataatgcaaaggctccaggacgaactcttacattcaggctgtcaatacttatgctccttactctcatatagctacatgacctacttggtggtcctataccaaattcttgccctagaactaattaagctgacaaatactagactaacgtatggg

SEQ ID NO: 123995 - DNA, 338 bp, Zea mays
  unsure (1)..(338): unsure at all n locations
  Clone ID: MRT4577_44564C.1
accctgcttccgcgccaantgcttacgacgtttgacttttatgcgctgcggaaccgcaagagcgcggggcgcgcagaggcagtggcgcgcgcgcttgccgccgcgtcgtggatctgtctggacttgacagacatgctcctcgccgacgccgtgttcctggacgtcgccagacttctgccccggcgggcgccgagccccattgccggccccaccgacgaagtggacagcgacaatgaggaggccggctgcagcgtatgctaccccatggtgctcgggcaaatcaccatgtacaacgaacgggaggcgtacaaactttacattgaacagcatgcgggatg

SEQ ID NO: 123996 - DNA, 335 bp, Zea mays
  unsure (1)..(335): unsure at all n locations
  Clone ID: MRT4577_44565C.1
tggaaagccaatataacgcacgatttagtgcgtttgtccataaatccatggactatgcccaaaaggcattttagcggaattatccgccgtatactctctcgagtagngctgggtggccagcctggatctttaagtcctgatcccgtantgcgttgggacaacgctaagtactaatcctatgctcacgcatagagtttaccgacctgtcgatcggagagagcttgcaaaagctcagtatggtgttaaacacctacccaaagatttgggtctagcagtaatgctaagaaacatgtgatgtgttcgcgcgctaacgnacncnnnnttacacggcacgg

SEQ ID NO: 123997 - DNA, 296 bp, Zea mays
  Clone ID: MRT4577_44566C.1
gtctgaggccctcaccaagtgtgagtgacagtataaaagattcactgtggcatcgtttccagaatgttcttgctgtcgttctgttgcagctcttagtctgaggtcctctgacctctagactctgagctcactccagcctgtgaggagaaacggcctccgctgcgagctggctggtgcactcccaggctcaggctggggagctgctgcgtctgtggtcaggcctcctgctcctgccagggagcacgcgtggtcttcgggttgagctcggccgtgcgtggaggtgcgcatggctgctc

SEQ ID NO: 123998 - DNA, 169 bp, Zea mays
  unsure (1)..(169): unsure at all n locations
  Clone ID: MRT4577_44567C.1
gtttcagcgagtagctcgatcgctcagcgcgctcagttgctcacactctgctgctagcncgatctggtatcgtgcgtcgtcgtcatcgacgcacgcgtagcaactccgctctcatctcgctgagagacacgctgagcgcgtcatgcaaggcaccgcacacatcgtctcg

SEQ ID NO: 123999 - DNA, 205 bp, Zea mays
  Clone ID: MRT4577_44568C.1
tttattttttgcaactacatggggagccaaagccaacttgaggaacaggtggggagtgcgttgggatcctctagcgaacctacaagaaatatggagaaaggagaagtggcagaatccactctgcctttacattgcccaaaacagcattgaagcgccgggggagctcgttcacaacacgatcgccaaaatctgtcttcaccttccc

SEQ ID NO: 124000 - DNA, 166 bp, Zea mays
  Clone ID: MRT4577_44569C.1
atcttaggagcaaagaagacaaacgggacctatttttaactaccgtgcgtactaactacacttatttaagaaggccaacagggctctgatgaactactttaatccacacggacacggcaggaaacaacttactgcttgctcaaacacgataaccgaacccctgtgc

SEQ ID NO: 124001 - DNA, 1445 bp, Zea mays
  unsure (1)..(1445): unsure at all n locations
  Clone ID: MRT4577_4456C.1
gccgtgtctagtgtcttccgtctcgatcccgcgggtgggactcgccggcgacaaaaacgaaaagcgacttgccctccgcggcctccggccttcccactccactcgccctcctctcctagcgtcggtgagccggtgcgctgcagtccccgctccccttccgcgtcgccgcgatggaggtcttccgggagcacggggacgacggagtgccctaggattccatcacgccgccaagcatcagtcccgcagccagggatttcttctccgaccccgaccttcatgtgagtcgcggccttcctcctcgaagcggatccggcggattggaggggcccaaccatagcaggtacttcttgcgggtgtaagcatttcgctgcacttggagacgcttatttggagtatttgaagtatgagttggctctctgtcctgtcagttatgtgcctgtgcttcataaaaaagagctacattttcttctactagggctttggagactgcccagatgaagagtagatttcttgttctctgtgccattgtctgcgtcatggctcagatgggagatgccaatgtcgtgctattggggaataatctgaccttgtcctttgctgatattgaggcaagcttttctccaggagtgaaaggatcaggagtcaatggcatagtttatgcttctgaacctttgaatgcctgcagcccgttaacaatcaaggcagtcaagggcccgccatctccctttgcattaattgtaagaggcggatgcacgtttgatgagaaagtgaaaatgcacaggatgctggattcaaagctgcaattgtgtatgacaatgaaaatagtggggtcctggtttcaatggctgngagctcaagtggcatacacatatacgctgttttcgtttcgaaggcctcaggagaggtgtntgaagaaatcttcaggacatactgatgtagagctacgtgtttctttgtgagaaggcatcgaataaggagagaccaccctagaatcccagaagctagagagttccatggaatgagcagtcagttagttaaggctatgccaagtcttattttcacgaaagtgcaagaagataactgcacatcatcgatgtgtgccatttgtttggaagactacagtgtcggagaaaagctaagagtgctgccttgtcgtcacaagtttcatgcagcttgtgtggacttgtggctaacttcttggagaacattctgtcctgtatgcaagcgagacgcgacgagtggagtatcagaacttcccgccacagaggctacccccttgctttcttctgctgtccggttaccttctcagccatcttcattcaggtcgagcgtggcagcctccccacccaggccgataagccggcatccttcattgcactcggtttctcgtgcttactctgtctctagtaccccccactcccccaaccccttcagatctcacacaa

SEQ ID NO: 124002 - DNA, 775 bp, Zea mays
  Clone ID: MRT4577_44570C.1
gcaccggcctacagtattccaccacccccggtcaatagctaaagaaattgggcggcaagtgaaagtctccgggatgggaatgtgcatgagtcatgacgcgcctccgccctccggcctcagcagttgtttattcgcagcgcgcgggtggcggcccgcccgtccgtgttctctgctccctgtgttcggcacatcgtcacccccaccgtttcctgtgcctctctctcctatcttcctcggtctcctcccgtaatcctttgcctgataccccgctctaccaggccgctaccaccttcctccaggctccagcagcctataaatacgcccgcgtcgcccaccaccgcacaccacttgaatactccatctcaacttcccttcctctcccgtgctgagctatatagctgctcctcgacctccaagaagcacgcgggcggagcccggagcgagtgattagtgaaaggcatagcataaggccgcccggccgggaagtggtggcaatgacgcggtgcctcatgttcacgctgctgttcctcgtctcctccctcatctccaccgtggggctccccgtcgagccgcccgcggagctcctgcagctgggcggcggggacgtcggcggcgggcgcctgagcgtcgacgcgtccgacatcgcggaggcgtcgcgcgacttcgggggcgtcgcccgcgccgagcccatggcggtgttccatccgcgcgcggccggcgacgtggcgggcctggtcggcgccgcgttccggtcggcgcgcggctttcgcgtctc

SEQ ID NO: 124003 - DNA, 418 bp, Zea mays
  Clone ID: MRT4577_44571C.1
ctccggaacgaaactgaatctgcactttgctgacacaccatatcctgaggaagcgatactgcccctgtgcctcgccttgtggcctgcagtgacccattcgtaggtacctgcgtatggagctgtagacactgcacaccaccgtcggcgacaagcagcgagggagtggctaccactcgcacgaacctgatggaaggagaggatactactctgctccaataaacgaaggcggaagaccctagccaggcggaggagcctgtatcaaaaatcctgaatgtataaaggctcatcggatgacaactgagtgtgaattctgtaatgtcatgtgtgtagtaatatgatgctttgaccgccgtaattaatgaaaggggcggacgatacacatgtctggttgcgcctcaaaacaaaaatgataaaggga

SEQ ID NO: 124004 - DNA, 776 bp, Zea mays
  Clone ID: MRT4577_44572C.1
cgtgccttgtcgtggaggccccggggacgtacgccgcacagggcacacctgctccctccggcctgctctgctcactgctttgattccgcttcggcgcttcgccgcctccggttttctctccgcgcctccagtctccagggacgcaccacctctcccaagtcccaatctcccatggcggcgctgggcacggcgatcacccccgcagcagctaccgcggcgccgtgctgctataatcggcatccgcggagccacatcacggcgcgccgtaaccgggttgcctccgcgaggaggcttgacctgtgcgccagctcctcacctgccgtcaccgctcccgacataccagacgaggcgctggtggaacccttggtggcgccggcgccggagacgaagctcaggaagctggcgtgtccaatctgctactaccccctggcgagctcgagcgatcagttggatgatgctaccagtctcgaatgttcaacgtgcaagaaatgctaccccaacaagcaagattactgggatcttacagtgtcagttggttcgacagagtactccgagtccatgccagtggcaacagagttgtttaggactccactggtatcttttctttacgaaagaggatggcgccaaaatttcatatggggtggtttcccaggcctagaaagagagtttgaaatggcaaaaacttatttgaagccaacaattggagggactattgttgatgcaagttgtggaagtggcctgttctcaagattatttattaagagtgggctatattc

SEQ ID NO: 124005 - DNA, 292 bp, Zea mays
  Clone ID: MRT4577_44573C.1
gcgtccgcccatgcgtccgtaaccacttactctcgagcgcttttcgtggaagcgaggactcacggacggcggcaggggcaagttctgctagatcttcggcatcataattaacaaatgggtggcggtgaggacattcagcccctatggtgtaacaatggaactgggatggacaaggctggttttgttggtgacaatgctccaagggctgttttcccaagcattgtatgacgcccccgtaaaactggtgtgatgtgtggcatggggcaaaaatgattcttaatataggggacaa

SEQ ID NO: 124006 - DNA, 454 bp, Zea mays
  Clone ID: MRT4577_44574C.1
aaaacaaaaggaaagcctttcgattggggcacctttggaaccccaatttcaaaaccccctaccccccaaaacgggggggccccccccccaaaggaaaaaagaaaccccccccaaaaggggggggcccccccggggggaaaaagggccccaaggacccccgcccagggtacttaaaaaacaaggtaacctcttttccccccccaaaagggggcaaaacctttaaaaccccaaagggccttcccaataaggcccccccccccaccccccgtttaaaggggcggggcccaaaggcggccattcaccattaggggaacccccgatattcttcccggtgaaaaaaaacccccccctctggaaaccgggccccccggggggcctcgggacaaaaaaacggggggattcgccacccccccccccctggaaaaacggggggcccccccacctcccctcgggg

SEQ ID NO: 124007 - DNA, 142 bp, Zea mays
  unsure (1)..(142): unsure at all n locations
  Clone ID: MRT4577_44575C.1
cggaannnanggccgggccgacgcgttcactaatgcgcgggcgacctatgtttttctgttttttctagagaagactcattggcatggggtaattagaccagatcctcatctggctctaatacagaaaattccttctagaagg

SEQ ID NO: 124008 - DNA, 414 bp, Zea mays
  Clone ID: MRT4577_44576C.1
ccagcccaaagaagcgggggggatttggtcactaaccattcattgggtggtaaaacaacccaattgcaaatgggggaggacatatgccccataattggcttttaacattaaaagggccaaaaacccaaatagcaaaactttgaaaatgcaccccgagacaggcccccttgttgttttgtttgggaatgatcggccaggggcagtttccaaacaccccacaagctttttaacggtagggggggagggaaagggtttggttgcccttccagggggctttccttgagggcctgtttttgggggggggggggcccttgccacccaaacacacggactttttttctgttgaggggaggccacggagctcacggggcttgtgcacagggttgcataaccagttaatcctcgggtcggttt

SEQ ID NO: 124009 - DNA, 279 bp, Zea mays
  Clone ID: MRT4577_44577C.1
cgtacgtaacttggaccttagagggcgcctttttttttttttttcctttctttttgcgactgtctcaaaagccgcttactaaaagcaaaattatccccaagaccaaaagtttacaaaacacagacatcatcccaaaacaaataacaagggaaaaactaagggatggtggggtaagcgctaaaaacccgttaaactaaggggatgctaggatcggaactaaagacctggtggtggaggtaactcaccacaatacgctaaactcgaggcacaaaggaaaaa

SEQ ID NO: 124010 - DNA, 757 bp, Zea mays
  unsure (1)..(757): unsure at all n locations
  Clone ID: MRT4577_44578C.1
ggcgggtggccntgcaaaggagtggtgaagcgtgaccaggaggtgtatgtgaaggtagtctcggtgaaggggcagaagttgagtttgtcgatgcgggatgtcgatcaggattactgggaaagacctcctgccgatgcagcgaggtggggatgatgcaccaagggtgaacccatctggtggcaggggcagtggcatgggatctggcaagaggttgggtttgtcaggtattgtgatcacggaggaggatgaggcagccccaacatcaagacgaccactcaagagaatgagctcgccagagaggtgggaagcaaaacagcttattgcctcgggtgtgctggatgtgagggattatccaatgtttgatgaggatggggatggtatgatgtaccaggaggaaggtgcagaagaagaacttgaaattgagctaaatgaggatgaaccagcattcttgcaggggcagagcagattttcaatagacatgtcacctgtaaagatctttaagaatcctgagggttcattgagccgagcagcagccctacagactgctctcataaaggaacgtcgtgaggttcgagaacaggagcagagagccatgttagattcaatccccaaggatctgaatcgaccatgggaggacccaatgcctgatacaggtgagcggcaccttgcacaggagctgcgaggtgttggcctttcagcttatgacatgcctgaatggaagaaggaggcctatggaaaagctttaacttttgggcaa

SEQ ID NO: 124011 - DNA, 1539 bp, Zea mays
  Clone ID: MRT4577_44579C.1
cgcctccctttcctttctcctccctcactactcacacccctcacttttggcggcgccgactgggcacccgcgtcgttttccttcgtggcgccgactgcgcaaccggcaccaaccttcgccaggttttcgtgggctctttcaccgatacaaccatcctccagaagaacgcaagggatgctcgattgactctagttacttagcagaaccaaaagtggaaggccatcaaagatacgaggcttttttctcgccatgtctcggtcaccccacctcccaccccgctgcccaccgctgggtcctcagatcactcgaagggatgacggcatgttcacgcaaagctgcaggtttccatctggggatacgttcattggtgaaccaccgtgctggctggatgatctccttgaagattctgggaaagctcccaagctccctcctctcagaagggcctgcagcgattctgatgccatcttagatgcgctgtcgacattccagagcccaatttatccaatcgaggaatgtgatctaaactcaggtggtgaagctgaggacttgttgggtggagtcgaaggtgatgaaagtggttctgtggtcgaggctagctgtttctatggtccgaattcgccaagacagaagagtaggcttacaacttcagagagttccatggtaaatgctgtgcttgagaatgtccccggcaaccccttgcagtacctgaccatcgatgcctgcagtgatgtgaatggtaatgtggccaatgtaactgctgatgcctgtgatgcttttggccatcctgatcaagacaagtcatttaaaaggcgctcagggcaaagatctagggtccgaaaacttcaatacatcgctgaacttgaaagaactgttgaatcgcttcagaacattggtgctgatttggctgtcagagtgtcatcacttttccagcttcataatgctctatctatggaaaacaagcaactgagggtacagatttccagtcttcagcgtgcaaaactgattaaggatggtcagacgcaggccctaaagaacgaagccgaaaggttgaagcggatgtccgcccgccggagcagaagcgccacggcctcctgttacgacccgggctcgttctcgttcggagcagatgcttcgtcagtcagctggcagatgcctgacatggcaaggctcagcctgaacggcggctccccaagaggcagctatggcctgtgacagcagccggccctaacccccacccccaccgtcagaagaaaggccgaggcggttaccctagataacttttcgctaaccttacccaggcacagattttgaggggcccatctttgagtaggagagagtagggtgtttcggtctttcgctttcgcgggaattttaccgaggttgtcagcttattagtagttacaagtagagtggtgagtagggtgtttggtctttgctgtgtagcggcctgcggtctactcgtttgtttgacgctccatcataattgcagtgaagttgcagaccataccatcacacaaaaaaaaaaaaaaaaaagcggcc

SEQ ID NO: 124012 - DNA, 779 bp, Zea mays
  Clone ID: MRT4577_4457C.1
ccggccggaaaaaaagaaaagtgtcttccgtctcgatcccgcgggtgggactcgccggcgacaaaaacgaaaagcgacttgccctccgcggcctccggccttcccactccactcgccctcctctcctagcgtcggtgagccggtgcgctgcagtccccgctccccttccgcgtcgccgcgatggaggtcttccgggagcacggggacgacggagtgccctaggattccatcacgccgccaagcaccagtcccgcagccagggatttcttctccgaccccgaccttcatgtgagtcgcggccttcctcctcgaagcggatccggcggattggaggggcccaaccatagcaggtacttcttgcgggtgtaagcatttcgctgcacttggagacgcttatttggagtatttgaaggctttggagactgcccagatgaagagtagatttcttgttctctgtgccattgtctgcgtcatggctcagatgggagatgccaatgtcgtgctattggggaataatctgaccttgtcctttgctgatattgaggcaagcttttctccaggagtgaaaggatcaggagtcaatggcatagtttatgcttctgaacctttgaatgcctgcagcccgttaacaatcaaggcagtcaagggcccgccatctccctttgcattaattataagaggcggatgcacgtttgatgagaaagtgaaaaatgcacaggatgctggattcaaagctgcaattgtgtatgacaatggaattaggggggtcctggtttcaa

SEQ ID NO: 124013 - DNA, 1537 bp, Zea mays
  Clone ID: MRT4577_44580C.1
tctcccacgcgtccgggcgccgactgcgcaaccggcaccaaccttcgccaggttttcgtgggctctttcaccgatacaaccatcctccaggctacttatattcggatctaacccaaagttgctgttttttccatatatgaaaagaagaacgcaagggatgctcgattgactctagttacttagcagaaccaaaagtggaaggccatcaaagatacgaggctattttctctccatgtctcggtcaccccacctcccaccccgctgcccaccgctgggtcctcagatcactcgaagggatgacggcatgttcacgcaaagctgcaggtttccatctggggatacgttcattggtgaaccaccgtgctggctggatgatctccttgaagattctgggaaagctcccaagctccctcctctcagaagggcctgcagcgattctgatgccatcttagatgcgctgtcgacattccagagcccaatttatccaatcgaggaatgtgatctaaactcaggtggtgaagctgaggacttgttgggtgcagtcgaaggtgatgaaagtggttctgtggtcgaggctagctgtttctatggtccgaattcaccaagacagaagagtaggcttacaactttagagagttccatggtaaatgctgtgcttgagaatgtccccggcaaccccttgcagtacttgagcatcgatgcctgcagcgatatgaatggtaatgtggccaatgtaactgctgatgcctgtgatgcttttggccaccctgatcaagacaagtcatttaaaaggcgctcaggccaaagatctagggtccggaaacttcaatacatcgctgaacttgaaagaactgtcgaatcgcttcagaacattggagctgatttggccgtcagaatgtcatcacttttccatcttcataatgctctatcaatggaaaacaagcaactgaggatacatatttccagtcttcagcaagcaaaactgattaaggatggtcagacgcaggccctaaagaatgaagctgaaaggttgaagcggatgtctgcccgtcaccgccggagcagaagcgtcacttcctgttatgacctgagctcattcggagcagatgctacgtcagtcaattggcagatgcctgacatggcaaggctcagcctgaatggaagctcctctgtctccccaagaagcggctatggtatatgacagcagccggccctaacctccctcagaagataagtcgaggcattaccctagataacttttcgctaaccttacccaggcatatatttgagggcccatctttgactaggatatcagttggattcgctgaattttgcagaggctatcagcttaggcccggtttggttggggttttaggctgtttttgctttccaaaagccaaaagatcaaccaaaagacttttttcagaagcagttgcttttcgtaattttttttaaaacaccttagaccttgtttttggcttttggttttctgcttttctaaatgggttgaataaataacacagttgtttcgagagag

SEQ ID NO: 124014 - DNA, 236 bp, Zea mays
  Clone ID: MRT4577_44581C.1
ggtacctcgcagccggccgggcccggaacgtctcccgcctccagcactctaactcaggtggaacaatcgccatggccgccacatctatcgcctccgccgtgctgtccccgacactttgatgtttgacttctaactgttgccttgcccttattgataaccatgcacaaactaactaaagccaccatgatcattttcgaccggagctaccgcgcataccgcaagcatatgagctcatg

SEQ ID NO: 124015 - DNA, 543 bp, Zea mays
  Clone ID: MRT4577_44582C.1
agagactgcgagattcttttcactattggggatcaatctgagaaaccacaagggcgttttaacaaaatagtcatggatgtataaagcgcttcttctcctgaccgtcagatcttgatccgagtgaccagtgccattgaatgaccggtacgctacgctaatcgtagccgtccatctacgatcaacggaactggacgctcccttcctctggcacccccggtcggcggtgtcgcctacgctccggcgatgttgtcggcgcaaagccccatgaatcgcacgcgttgaagtacatgctgatggtgagatgcgtctcgaccgcagctgggttgcttcggtgagcaattggaggcgctctagtggatatcaccgtccaagaaggcaacgactacgtgcaaggtgcccccgtggaccccctcgatcactctccggggcccgaacaacggcgactatgatctatccacacgacgatggagatccctcattctttctctctcctaaccctcggcgacaagctctcttggtggtttttcttcccgggcatcttgc

SEQ ID NO: 124016 - DNA, 279 bp, Zea mays
  Clone ID: MRT4577_44583C.1
agcagtcatcatctttttgtgtgcaggctgtctcatttatttttagccattgtcgtttcattcattttgtgtaatataaaccgtgtgtcatgtcaaagtgaaagacatttcaaatctgtagcataggctagtgggcaggtccgcacagtcgaagccacacctggtctgttttctgtgcactgtagccttagtgtcacctttcttcttgtgtactccttatggtacactccagcggttgccttttttatcatttctactgaagttgggaaattcaacccc

SEQ ID NO: 124017 - DNA, 332 bp, Zea mays
  unsure (1)..(332): unsure at all n locations
  Clone ID: MRT4577_44584C.1
atagaataaagcccnggnaccccncaccgccggggcgggggcaagggagctaccaggcgcgcacaccaacaacgagagcaagcagcggtagcggccgccaccaagacgcacccgcacccgaccgagaacccaagtcccagcctagaagccgcagacggagggggccacagaacagatcgccgccggctggttcgcaaaggagccggctcccgagcggcccgagggcaagccgaggaccggcacaaccagacgccacaacgcgcaggcgccggagaacgagccgcgggggccgccgccaccggcgccggcggaagagcagccgcctccgccgc

SEQ ID NO: 124018 - DNA, 430 bp, Zea mays
  Clone ID: MRT4577_44585C.1
ccgttctacggcaccggactcgccgactcatctcccactcccagccttatcctcttcctcgatcgcatgcatggtcctcattcacatacaaagagatagagaaaaaagagaaaagcttgcgagcgatggtgactatgtctggcacccgcaccgccctggcgcacgagggcttggattatggtcccaggctggtggcgccgcgccgcagcaggctaagcgtcgtcgccgttgcggtgcggaccaggccggccagcctcgcagtcccgggcctcccgcccccgacgccggagcccgtgctgccgtcgccgcccgtggccgcaggcgtcgcggcggtgctgctcgaggcgggcgtgccgcccgcggacctccggcgcgcggcggggatgtgcccggagctgctgtccgtgcccgcggaggccgtcaccggcgt

SEQ ID NO: 124019 - DNA, 528 bp, Zea mays
  Clone ID: MRT4577_44586C.1
cggagctcccgcccaacgggccaacccaacagatgggggattaaaaagcggttggaaaacaaccccgggttttctttttttctcaaaattatttagggaaaaaaaaccaaaaatttttcccattcaactatcaacaggaccaaagggctcccaaagctttgaaattaaccccccccaagctttgaaattaacagttggggggcaaacccggggggcggccctggctggccccaattaacagttgggggcaaagcttgggccccggggggggcccaatcgctatcccgggggaaaaccccggcaagggggaaaacccccagccaaaaaaaaggaggaccaggccccccgggatattcacgagcttaaacatggtttaatttttggccccctggatcgaaatctcacccgaccttgggccccgggaccctccttcgggcagggggccccagccctccccggggaccccttggagggggcagccaaaaccccatccgccggagccacagggccccccaaatccccattttt

SEQ ID NO: 124020 - DNA, 944 bp, Zea mays
  Clone ID: MRT4577_44587C.1
ggggtcacacccttttggacaccagagcaagagcaggttgacgtgctcctcggccggcggcgggatttcttcttcctccccaagaagtacctgtaccgccgccaccaagcgccgcatcccatcgccccccatactaccttccgagcgacctcacctcgcacagacggcaatggcgtcccccgagcccgccgtggatcccagcctcgcgcaagagacccccaccactcccacacccaccacggcgcactcgtccgcggcggagcaagaagggccgccgcagccgcaagagcctgccccagcagcggagggggagagtgaggaagttgaggaggaaggagagtgcgggttctgcctcttcatgaaggccggcggctgcagagacaccttcgtggcgtgggaggagtgcgtggaggcggcgcagaaggagggcgccgacatggtcgagcgttgccacgaggccaccgccaacctcaagaagtgcatggacgcgcacgccgactactacgcgcccgtgctcatggccgaggaggccgtcaacgagcgcgccgaggccgaggccgctgcagctgcagctgcagctgctgctgagactgcgaaggccaagggatgggagccagcgaccgaaggagagattaaggaagaggccgtgccccagcgggctgcttccaccctaccggccgccggcgaggagaagaaagaagaaacaattgctcagaaggagaagaaagaagaagcggtttctgagaaggtttgaccgtttgagtgtaactaacaattgctcggttggttattaggttcatattagttcgtgaggttaattttggccccctttgtgggggggaaataatgctgttctgctcgtaattgttgggtgtcacgctcaatttatactagaaaattttgatactgttaaaaaaaaaaaaaaaaaaccgagagtactctaa

SEQ ID NO: 124021 - DNA, 229 bp, Zea mays
  Clone ID: MRT4577_44588C.1
attgtaaaggtttttatgttttttttgtgaaaaaaagtctatctgccccaattgtggggagtaattttgcgattttggtgtgtgaaaaaatgacttgtgggttgaggggagcaagctgcggtttacttatttgaaaggctcccacagggggatagagttttttcctcctgtgaaatgttggaggtgtttacaggtggtttgtggggacgaaggatggaaataaatgggg

SEQ ID NO: 124022 - DNA, 343 bp, Zea mays
  Clone ID: MRT4577_44589C.1
gccaattatttcccggggccagaacctgcacaataaacttaccaagtgccggccttgcagcggatggcccggttggaaatggatggcttcgttgttctttaatcaaacaatccacccactcattaaacaatcattaaccacccagaatttgggggtaaaggtcccggtccaagttaagggtttgaaaccggcggttaacaaactttggggtccgggataagggatggggtgtgtggtgagtgaacatgctttagtagagaatgtgcgtggttgtacttgattctcgtcttaacagaagtcatgcatacataatgctatgttcttccatagatgatggctccca

SEQ ID NO: 124023 - DNA, 255 bp, Zea mays
  Clone ID: MRT4577_4458C.1
cccacacgtcctcaatcgcatctttctggttctcctttttagcgacaaactcagggctatgcaacaattagtccagtccatgcacaaagctctcatacctaatttcaaatcaatgcttccagaaagtaaacatataacttcaactatccgatcggcaaaagttaaagaaaatctccatactgatccaacgtacaaacccatgaagcatgactacaacgacactatatttaatcaatacatactgcaactaacatc

SEQ ID NO: 124024 - DNA, 581 bp, Zea mays
  Clone ID: MRT4577_44590C.1
aaggcaggcttcttccaccttttattacccaggcctcaagggcaaaaaggaaaaaaaaaactttgttctccagaaaagaaaaactataaaattttcagccccttaagggaaaaaaacttgcaaattcaaactactcaaaaggacaaaccgattttagcctggcaaacgttttttcctgactcgggacccatcagcaaaaggaaagaaaactagttcctcctgctatgggaagaaacgttgggggtagggaccctgaaaaaaaactttgggttcttgaaatcggcgaaaagcggattatacccggttttgggcctcgttttcagggggatgccaaactcctccatgaagggggcagaaacaaggatgaacggtcccctttttttcacgggtttgaaggccccgggatttttctgctcctttgaaaacccagcccatttatgggcgatctgctccaggagccggaagtcggttgggaaaaaaaagtccccgtcaccctgagcataaaaggagttgcgaagatctgatgcctccccatccttctttgaagaaaccaagggagccctgtcaccaggtatgctaac

SEQ ID NO: 124025 - DNA, 203 bp, Zea mays
  Clone ID: MRT4577_44591C.1
gtcaaatcatctagtcccaacaatgtgtcttatgtttcttgttacaccatccttataaaagggcaattctgttgcagatattcctcaatgttgcctgctgttttattgagcctcaaaaaaaaaaaaaaaaaaaaaaaaaaaaaaaaaaaaaaaaaaaaaaaaaggacaaaagatataaaaaatccaaagatacatacgataaa

SEQ ID NO: 124026 - DNA, 482 bp, Zea mays
  Clone ID: MRT4577_44592C.1
ctcgccctcggcctcaccttcaggccgcaacgccatcggctcctcgtccggctttaacttcgtcgtggccaacagcttcaaatccttgtagcgtgtctccgcactctgcgtcatcgccgtcatggtttttggagttcatcgtgacacgctgtcgatgatctacgtatggcggaagatcttcgcgagttcacgcagcttcgtggtaattaattttgatggcgatctgcgttatttagcgctatgtttgtttcctttgtgtgtttttgtgtgcgatcgtagagggagatttgatgctgaagccgaagccagcgtgatgcttctcggttgttcgatgaaatggtcgagttaagtattagtgaactatattctctacctctgttagcagagtcattagatagattggctaagtatgttgatttgattatcttgtttgccatatacccattgtggcggtgttagatattggttaaactgcttcaatg

SEQ ID NO: 124027 - DNA, 407 bp, Zea mays
  Clone ID: MRT4577_44593C.1
gaagaaattgacagtatgagggcttaagatctataattgtagccaatttgacctgccgggtggatcaccatgaaaattgtgatgacaagctaattgagttcctcaaaaagacgtattatgtagacgccggacatgacaaccaagaagggatggttagattaaattctaggatggcacaaatagagggcattggtgctgcaaacagaatattctaccttgctgttccacaataggcactccttgatgtagcattgccactggctgacggtgcctgttagaataggaacccataccctaaacaggggttgggagtgatattaatagagagaatatctgggccaggcccattaaaaaaaaaaaaaaaaaaaaaaaaaaaaaaataaaaaaaaaaaaaaaaaaaaaaaaaa

SEQ ID NO: 124028 - DNA, 280 bp, Zea mays
  Clone ID: MRT4577_44594C.1
cacgcacgcgtgcgcaagctcggaattctggatggagctcggtcaacaccatttttttaccgaggacgctctttttgtttggagggggacggagcagaacaatcgctgagccaaaccaaaccctggactgagccgccgtctcctacttctgctgcaaccaagcctacgagtacagggcaagggctctatccagccgcgtgctagcccgaccgcccactaagacgatgagccgctccctcagtatcatggtaaatctgctgaatgaggcggcggaccacgt

SEQ ID NO: 124029 - DNA, 291 bp, Zea mays
  Clone ID: MRT4577_44595C.1
gagcattgcgggaaaatggtcacaagctcctatagcttctcttcttcccccatacctctcaccagcgtgggcgctacggtgacgaaaaaccgaagggcagaatgtacggagaggcgcagcagcagcagaagcagggcgccatgatgacggcgctcaagggcgagacggacgcgaccttaggagggtcgatgctggtgctgtccgggctgatcctggccggcaccgtgatcgcgctcacagtggtcaccctcgtggtggtgatcgtcaacccggtgctggggccggacgata

SEQ ID NO: 124030 - DNA, 164 bp, Zea mays
  Clone ID: MRT4577_44596C.1
cccacgcgtgcgtccacccatatcggaccttctcgctcacccactcataccaaacttacggggcctgaccatttctcacgtccatcccatcttccatctacacttcatgcaacattattacacttgcgatcaacgtctaccacttataccacacctctttcatc

SEQ ID NO: 124031 - DNA, 595 bp, Zea mays
  unsure (1)..(595): unsure at all n locations
  Clone ID: MRT4577_44597C.1
ctgtgctaccgccgccgtcgccgcaagacttcgtcgggcactttgccggcgacgatttcccaccaggtgcttgctatggaacttttgaggcgttcagatacaagatccctggattgctaaagatcagatacattgggcaaaccaccgttggcagcgctgcgatttttgggcttttcttgggggctgggagcttgattcactgtggaaaatcctactagtttgtttccctttttttttctgaagtctgaacacacctttgtcgatgggcttcagtgaaaactattcaatgcctgtttcatgtaacagctaatagctcagggttggaaaagaacaatcaagttatgtcctagttttggtgtggatggaaatagaatcaacgttcatctgcacgagaatcgtcaatttctcatctagcgtcttatgttctcatctcattttctttaaaaacgtaaggaattctttactcaccatatactttagctcggcagggcgccgcgaagcgcgcaactttttgtttactagtacttattagcagccggtgaagtaataaaagtgcgtacagctttgctttaaaaaaaaaananaaananaaaaa

SEQ ID NO: 124032 - DNA, 604 bp, Zea mays
  Clone ID: MRT4577_44598C.1
cattgggtacctcgagccggcgggccgggtcttcacccgtccacctcgtcttgcgctcctctgtctcggcgacgactgtgctaccgccgccgccgccgcaagacttcgtcgggcactttgccggcgacgatttcccaccagcccaacaggatcagaggaggtgatggcgaggagtgacagctgcctggcgcgcgtgggtgccggaattgctatcggtggcgcggtcggcggagccgtcggtgcttgctatggaacttttgaggcgttcagatacaagatccctggattgctaaagatcagatacattgggcaaaccaccgttggcagcgctgcgatttttgggcttttcttgggggctgggagcttgattcactgtggaaaatcctactagtttgtttcccttttttttctgaagtctgaacacacctttgtcgatgggcttcagtgaaaactattcaatgcctgtttcatgtaacagctaatagctcagggttggaaaagaacaatcaagttatgtcctagttttggtgtggatggaaatagaatcaacgttcatctgcacgagaatcgtcaatttctcaaaaaaaaaaaaaaaaaagcggcc

SEQ ID NO: 124033 - DNA, 559 bp, Zea mays
  Clone ID: MRT4577_44599C.1
cggccgggaattttttcttacaccgtgcccctcgtcttgcgctcctctgtctcggcgacgactgtgctaccgccgccgccgccgcaagacttcgtcgggcactttgccggcgacgatttcccaccaggatcagaggaggtgatggcgaggagtgacaactgcctggcgcgcgtgggtgccggaattgctatcggtggcgcggtcggcggagccgtcggtgcttgctatggaacttttgaggcgttcagatacaagatccctggattgctaaagatcagatacattgggcaaaccaccgttggcagcgctgcgatttttgggcttttcttgggggctgggagcttgattcactgtggaaaatcctactagtttgtttccctttttttttctgaagtctgaacacacctttgtcgatgggcttcagtgaaaactattcaatgcctgtttcatgtaacagctaatagctcagggttggaaaagaacaatcaagttatgtcataaaaaaaaaaaaaaagaagatagcatcaacgttcatctgcacgagaatcgtcaatttctc

SEQ ID NO: 124034 - DNA, 2373 bp, Zea mays
  Clone ID: MRT4577_4459C.1
gcccttccccctccgctcgccctcccccccttcccggcatgaatcgcccagtccacacgtcagttcgccctacacctcaaagcgctgcgtcccttcctccagctactactaccttggcggctccagccagcacgggtcgtacctgcggcggtgtggagagccagggacaagcctgtctaccatgatccctctgtcctcccagcagcagttcgagtcaggcgcaaccgtggccacggcgcgtcgtccgcccagtcacgggagtcctacctgacccgccaattctgtgcgggtgcacgcctgcttcatcatgggagccgacgtccgaccctggccgctgctacccccaggtacggagcaagcctaagccagtagctgcacccgaagacacagatttggagtattgagctggctctctgttttgtcggttgtgtgcttctacttcatagaaaagagctgcattttcttcttagtgctttggatgctggccagatgaagagtagtagatttctgttcctttgtgcaatgttctgtcttatggctcggctgggagctgccaatgtcgtgctaatggggaataatctgaccctgtcctttgctgatattgaggcaagcttttctccaggagtgaaaggatcaggagtcaatggcatagtttatgcttctgaacctttgaatgcctgcagcccgttaacaatcaaggcagtcaagggcccgccatctccctttgcattaattgtaagaggcggatgcacgtttgatgagaaagtgaaaaatgcacaggatgctggattcaaagctgcaattgtgtatgacaatgaaaatagtggggtcctggtttcaatggctggaagctcaagtggcatacacatatacgctgttttcgtttcgaaggcctcaggagaggtgttgaagaaatcttcaggacatactgatgtagaggtgtggatactacctacattcgacaactcagcctggtcgatcatggcaatctcattcatatcgctgcttgccatgtctgctgtattagctacgtgtttctttgtgagaaggcatcgaataaggagagaccaccctagaatcccagaagctagagagttccatggaatgagcagtcagttagttaaggctatgccaagtcttattttcacgaaagtgcaagaagataactgcacatcatcgatgtgtgccatttgtttggaagactacagtgtcggagaaaagctcagagtgctgccttgtcgtcacaagttccatgcagcttgtgtggacttgtggctaacttcttggagaacattctgccctgtatgcaagcgagacgcgacgagtggagtatcagaacttcccgccacagaggctacccccttgctttcttctgctgtccggttaccttctcagccatcttcattcaggtcgagcgtggcagcctccccacccaggccgataagccggcatccttcatcgcactcggtttctcgtgcttactctgtctctagtaccccccactcccccaaccccttcagatctcacacaaacttacctggggtcatccatgcaagcagaagcaccacagaccttgcaaacatgtcgtctccccaccctcgcatctcacacttgtcgtcgtcgacacactccctcgtcggcagccacctatctccaccaatcagcataaggtatccattgccccattctcggcatgaatcgcccagtccacacgtcagttcgccctacatctcaaattctggctacggttcttcaagctactactaccttggcggctcgagccagcacgggtcgtacctgcggcggtgtggagagtcagggccaagcctgtctaccatggtccctcggtcatcgcagcagcagttccagtcagaggcaaacgtggccgcaggcgcgtcgtctgcccagtcctcacggcagtcctacctgcgacgctgtggcgattcagacgccagcttgtctgacatggcgtcagcccagtcgttgccggggtgctgaggcagatgtgcactacaagatgcggcttgacctgtgcatacaatgaggcttgcagcgtcacataggtggggaacatgtatagcatagactttatgatcctgttcttgtctgtgagtggtatatggttctttttttgtgccttttattgtgtgcatctgacgtgacaggagcctgttgaagttgattctgttaacattttagtccgcaccatgcgtccatgccagtttctccctagatttgctactctactaccatgcacacatttgaacgaggcagtgctcagctgcatgcatctgatgttaatgttgtgctgctcgctcagtgagcatgaagagatggtcgtctgagcaaattcagaaaacagccctttgtctg

SEQ ID NO: 124035 - DNA, 236 bp, Zea mays
  Clone ID: MRT4577_445C.1
caaagagtgcctctgtacattgggagcgtggaggaagtggacaaggcggagagattgctgtctagaatgtacttgcttcatcccatacctctcttatcagatggactccccaagacaccaagtttagggcggtaatatgttctctctctgttccactccaaattagtttcctttctcccatatttttataaatcaaacattccttaccttttttccagttttatttcctcaacaat

SEQ ID NO: 124036 - DNA, 649 bp, Zea mays
  Clone ID: MRT4577_44600C.1
tgctacctcgggcggttgggtacctcgaggcctgcctttcttcacccgtccacctcgtcttgcgctcctctgtctcggcgacgactgtgctaccgccgccgccgccgcaagacttcgtcgggcactttgccggcgacgatttcccaccagctatttctactcggatccgatctatttacaagcccaacaggatcagaggaggtgatggcgaggagtgacagctgcctggcgcgcgtgggtgccggaattgctatcggtggcgcggtcggcggagccgtcggtgcttgctatggaacttttgaggcgttcagatacaagatccctggattgctaaagatcagatacattgggcaaaccaccgttggcagcgctgcgatttttgggcttttcttgggggctgggagcttgattcactgtggaaaatcctactagtttgtttccctttttttttctgaagtctgaacacacctttgtcgatgggcttcagtgaaaactattcaatgcctgtttcatgtaacagctaatagctcagggttggaaaagaacaatcaagttatgtcctagttttggtgtggatggaaatagaatcaacgttcatctgcacgagaatcgtcaatttcgccaaaaaaaaaaaaaaaaaggggcggcc

SEQ ID NO: 124037 - DNA, 534 bp, Zea mays
  unsure (1)..(534): unsure at all n locations
  Clone ID: MRT4577_44601C.1
accggttccggaattcccgggntctacccacgtcgtccgcctagttccatgtatgccacagtgttctcctcaccagttatcttcatatggcctgtcgaacaccgcgagctgtgtcaagtcctatgaggctacatacaaggcgattggcggcgagcgtcgttacaacaactcaattagcccaattgacaacaactaatccattggcacatgctaacaatacagaaccatgcgcaacgacatcagcaactaacagttgcctactcagctactgagccatcctagccatggntgaactcctgtcgtcctacgttgcaacagtcagctgcttgctatccaaccgcactttgcttctagcaagacgtagattgcaaaaccagtcaacaaccaacatactgcaacgagtttctggccagcgcttagtcaacttagccatgtgtgaaccactggccgcctgacctacatacagcaacaacatggctttcatnctagtcccgcttcgcttgtgtgccaatgctacctacatactctgcaaca

SEQ ID NO: 124038 - DNA, 629 bp, Zea mays
  Clone ID: MRT4577_44602C.1
atctaaactccatttggtttccaaaaaatgataaatgtacatggtactcgtatctaacagcgggccccaaaaaatgaattcgaacttgtggttgaatcaactgataaatgtatactgctaaggggcgcgtaatgacatggacaaaaaagtgaaacaaactctaaaaagtgatcaggcaacttgttgcgtttgcaaacatatgtcccggtaaataagtttccacccaactgaaactgttctccaggcaaaatataccttatcgagtaaaatgcaatagattatctataaacaattgatgatgatttattagcaataaaaaataaaagtaaacatgtgatgcaattcttcataattaacagtttcttcaattatttctgatgttaagttatcatcgaccatatcccttctatgttgtgtatggcgattttgcattatcgaatggaaatgttgatccattgaaccttcaaggatatccgctgacatatttaaggcatcaacacatacgttcaagttttcctggtgccaaatagaattatatataatgcatactataaatagcagaaacagaatggggcattaggacataacagcagacatatcagtggttttgtggtgttcgctaacttgac

SEQ ID NO: 124039 - DNA, 252 bp, Zea mays
  Clone ID: MRT4577_44603C.1
aaacaggggagcacgttatttaccactacactaaaattttcttacaatattacactgaaacccgaacttgtaatgctaatacagaatcattcacaaaaatttttacacgctctttatattgcacatggatttatgttctatccaagaccgaagactctacaacttcaaccgattagtatacaggaaagaaccatgcaaggttcttaaatatttgaacccttttacgaccagcaataaatgagcaacattttc

SEQ ID NO: 124040 - DNA, 351 bp, Zea mays
  Clone ID: MRT4577_44604C.1
actgaggccaatgcgcaaattttacagaagcgaacgggtccggaattgacggttgcaagctgttcagtctgacggcgacgactgctggtccaaggaagccaactatgcaagcggggccggtgcaacggcggcctgagacatgtcgctatgcatgcacctgcgcgagaggaaactaaacggccgtcagcggggagagagagctggatgcgcttgctgcgctgcgcacccctaggtgggccggtttcggcttttactacccagcggaggggagctcttcatctgcctgggagaataacagcaacttttttgtgacgccggggaggcccccgtctttgtaggtgtcccccccat

SEQ ID NO: 124041 - DNA, 1767 bp, Zea mays
  Clone ID: MRT4577_44605C.1
cggacgcgtggggccggggcggccgtcgctgccgcctacggtgcccaggtcttcctgcctgtcgttcgccggcgccgagcacgagaagaattgtagttgcatcctaagcatggactgtaatagtgatgatcttgataagcagaatgaagtgacgggatctcgagtattcattcctcaagatgcccaaggggttatccttgcttttcttcctggcagggatgttgtcaagctccgcagtgtgtgcaagttctggctagagtgcgttgaagaacatagttttatggaccgtcacctgaataatgcttgccgctaccaccagtccattgcttgtttcacctcgcttgatcatggcctagtccacatgtacacattcgatcctgccacaatgaatttcagaagtgtggagctcgtgttctcaagtaggtttaacatgtcagccccctgcaacggcttggtgtgtgcctatgatataaaaggcgatgctgaggtcttgaatcccacaacaaggaagcatttgaggctcccagattcagcactcaagtcacggtctctttactctgaatattttgttggattcgtgcactccacaaaacagtacaaggtggtctctatccgtcaccatgtgcggttcttgacatttgaaatctgcactattggcgcaccgtcgtggaggacaatacatgaatctgcagagctcctagtggcaacgaaggcagtcattgttaaagatggcatgtattggctacttctcgatgaggcttcctcctattcgtctcgagaaatcctgacgctcaacctgacagacgagaggttctcaaaaattgccatcccagatgctgtaaaaagccacaagttggaactattcgagggggaaggaaagctccgtttgttgtcgacacattccgatggatctagcaatatagtgtcagatatttgggtagcggacttggctcgtgaagactgggtccacttgcagactatcatccccctgacgcatctgggcataagcccgtttttccagctcaagacgaaggtcttcttcggcaaccagaagagactcctctgcgtagatcttcaggacggtacggtttcatacatcaacatgccttccggtgagactttgatatcctgtggcatgtttgtggagagctttgcgcctgccgcgacaggcctggtgagctcgactgcgtcatatggtgaccgctctcgtctggctgaaccgtccatggcggaccctgggccatctttccgtggcgcagggtcatcctcggcaagccgcggacggtcttctggtctcaccggatggtcctcagctgaccttgagcagtccttcaagagaacgaagaggacgacaaacatgcagtggaagatatcgaaacatagagcaatctaggagcgcctggcatggcctatggattaccctctagactgtacagcagctgtaattttttctgtaggtgggtgcaatgctgtacttgctcattgctatggtaccactggaagcaaccatggcaatggggcggggaatacaagaggaaatcaatcaataaatgtcaagatcaaggggtggctttgactataacccctcttttggtaaatgtctggtggtagtttgcttcgtacttgtataaactgtatctgtatgtgtgcgtcgcaatttgtaaacaaacaggacgagtataagtgttgcccagacatgttagaccatacaaactgaaggctctgaagttgaaccaaagaaaaatggggaaagaggggcggccggat

SEQ ID NO: 124042 - DNA, 538 bp, Zea mays
  Clone ID: MRT4577_44606C.1
gaacttgcatcgaagaggggcccatgttttccaaatctttttccaaggtgcaaacttaactgaacccaaaaagaaggcgttgtaagcagattgactagtgtacagccctgaatttgtaagattccatatgtgctgatctgaaactgcaggctgcaaggtaaaatcaactacttcctagagcttcaggtattcgacaagcacctgtacagtgagggcaccctggatatcagcagtccaagacccgctggccaaagcttgagaaacagtgtgttgtctccttgctcgtttaggaattacctgaataagattaggggccagctcacctacagtgcaaccgtgcagccaacgatctgtccagaatttagtggcctcaccatccccaaccttggtctccagggcaacatcaaagagagcatgggaattacggggtacctgaaaaggcagcccttcccaaggtcgagaagaatcccttttttgtagccacagccaacagatgcgcaaggcccatcccattgattcaaggttgaatattccatga

SEQ ID NO: 124043 - DNA, 261 bp, Zea mays
  Clone ID: MRT4577_44607C.1
ccggccgacgaccttacttgaacaggatctgttctataggatcgtaccgttgtatccttgattgataaggaggtggttgatgatccatgacctgtgggtcagagcgtgattaacggccgccaccggctctgatgcctgtgtccggtgctgtagatgatcgttcctccgccagttctacctggctggggtggcccatgggttatctgacgggttgtcttttgtagacccatagtatagtaaaaaaaaaaaaaaaaagcggcc

SEQ ID NO: 124044 - DNA, 932 bp, Zea mays
  Clone ID: MRT4577_44608C.1
ggccgctttttttttttttttttttcggtaggtagagtcgaggtcgtgttgaaatctcagacgggaaataaaatccccagatgcactggttttacaaagaacaaaccggtgtacaatcacactcttcacaccctgtacgagcaaaggttagcgcgtccaagatggccatgggtgcgcgtgcatagcgggcgattcatcacagtagccaaagccacaggcaagcagatttcagtgactgaaagttcttctccaggcgatgtggtcccttcgccctcgggccatcggcgcagtgctcaggcaggacaacagtgacggagaaatcgaagtcctatatgtcctgccggctccatcgacgtttcctcaggcgcaggcgcagaaatctcgtgtacacgagagagacatctcgtggtcttgaggaccaggaccaggaccaggctccggccgttcatcatgtcgccacggatacctccatggtctcctggtgcctggattccgttctggaggagtactgctgctgctgctgccgcctccgtccggcggacctggcggcctgcctggcgcggacggcgtcgagccgcatctgctcgccgcggcactcctcgctgcagaagggcgtgtcccctctgtacatgaagatgtcgcagtcgcgtcccagcggcttggcgcagagcgcgcaggcgtccatcgttggcagcaggctaggctcgtagtcgtagaccggctcggcgtcgaagaagaagaaggaggaggaggaggccatggcgagcgtttaggcgttggtgtggctctggctagcctaggacggcctgatgccttgagctaagcaagctttgcctgtcgttggctatttgcctggtgctgctacagctacaggtggtcggacttcggagactcggcggagggcgatgtgatgtgatgtgaggtgggcactg

SEQ ID NO: 124045 - DNA, 303 bp, Zea mays
  Clone ID: MRT4577_44609C.1
aataacaaccattgtcttttttcatcaccaaaacaaacggaagggccagagcgtataatttatttcccccctccaaaaaaacactaaaaaaatcgtccagcgcaaacacacatatatttggcacatacattcttacacaaccattaaatcaacctgtctatgaataaaatcaatactactaccgctttcaatgcattcatccaaagcggaaatggactgcttaataaataaggcgaactacctggtccctcacctactggtaggagcccccaatgaaaaccttgccgtaaaccatgccaatta

SEQ ID NO: 124046 - DNA, 799 bp, Zea mays
  unsure (1)..(799): unsure at all n locations
  Clone ID: MRT4577_4460C.1
ccggggtctagtgtcttccgtctcgatcccgcgggtgggactcgccggcgacaaaaacgaaaagcgacgttggcctccgcggcctccggccttcccactccactcgccctcctctcctagcgtcggtgagccggtgcgctgcagtccccgctccccttccgcgtcgccgcgatggaggtcttccgggagcacggggacgacggagtgccctaggattccatcagcgccgccaagcatcagtcccgcagccagggatttcttctccgaccccgaccttcatgtgagtcgcggccttcctcctcgaagcggatccggcggattggaggggcccaaccatagcaggtgctcctgtcgcaaccaactcaggtgtgaccgtgtgagtgtgactgtgtgagtgtgagtggaagtggtccaaccgtcgaaggcctctggtctccggcaacgcaccagtggtggcactccatgcccagctgatgcggctgctggtctggggaaagtggacgtaccttttcggttttcgccatgtagcttctgtacttcttgcgggtgtaagcatttcgctgcacttggagacgcttatttggagtatttgaagtatgagttggctctctgtcctgtcagttatgtgcctgtgcttcataaaaaagagctacattntcttctaccaggggctttggagactgcccagatgaagagtagatttcttgttctctgtgccattgtctgcgtcatggctcanatgggagatgccaatgtcgtgctattggggaataatctgaccttgccctttgctgatatt

SEQ ID NO: 124047 - DNA, 285 bp, Zea mays
  Clone ID: MRT4577_44610C.1
gggaataggaagacctatagggacgggtttggattggtgtgtatacgaagactatgcatttttttttgcactcggtactggacaagggaagtagggacaaaaattaaacaataggggttctgggaccattcgaaatgaatgaacgaatagggggttccaatttcaccggtgaacttgggaggtggggaccaaaattttggacgggggatgagatgaaatcccgcgcccgggcgcgcaggggttttaaccggggatgagggggggggggtttttgaaggggagggg

SEQ ID NO: 124048 - DNA, 362 bp, Zea mays
  Clone ID: MRT4577_44611C.1
acagttcaaaccattcttgtgatgatttcttatttttattattatttgcattttttaatcatcttactttttttttttgggggggaagctaaaaccccaggggcacttctaaaattggcaagaaaaaccgcaaaaagggggaaaacgggcaatacccgttggtttaaccccccatatatcggggaattaaatgtaaagataccaaactgaaaccagaatcactatttccatggcaaggctatagttgttgatcaaaacttcccgtggggggaaccaggggattatcttttgaggttcaaaaaaaccacctcaaagaaagtcatttctgctgctccccctgttttaaaaacctctttaggggg

SEQ ID NO: 124049 - DNA, 153 bp, Zea mays
  Clone ID: MRT4577_44612C.1
tttgcccggtaggggtaacccttctcgcacagggagaaggatcatgggccgacatggtatagtgcatatggcatggagaaatgacccagaagcaacgtggcagtaccatgatgacggaaggagattttcaagcactcatcatagatttgaaag

SEQ ID NO: 124050 - DNA, 213 bp, Zea mays
  Clone ID: MRT4577_44613C.1
taaaaaaaaaaaaaaacaaaaaaacaaagcttgcacataaataagagattcactcttaagggcgagaccacgcatatgtccaaaacccgggaaatatccataacattggcatctagtacgaccatacttgcagtagggccagatttccatataacgagggagattacttttaactgggggacattgttaaacctctggacttgcaaaaccttg

SEQ ID NO: 124051 - DNA, 229 bp, Zea mays
  Clone ID: MRT4577_44614C.1
ggggggaaaatgtaagggccaccttgaataaatgaatgcccatgaaataaagctgtttttatcttttacaatggaaaatttccccttctgtttgagggcctttaaccccttcttatttttaaaaaaattttttttttcaatctcaccttttggaatttaataacacttataatttttaaaacagggttttttctttacttgccctttcaggtaataaaagggttttttc

SEQ ID NO: 124052 - DNA, 350 bp, Zea mays
  Clone ID: MRT4577_44615C.1
tgcgacctgcccgccattgcattacaagcacattagcacgacttagaaatcaggcttatttgctaccgatcatctgcatcccttgcttacgcgacgctcgacgcagcaccaccaccagttttcggtcgcagagtgtttcttcgcccgctacagtgcatcaataatctaaggatcatcttccgccggtgtcacgctccttctacaccaacttaacttcgaatattaatctgagcaaagtctctggtttatcacgagatttgctgtcgatactttgatacgtctggaaagataaagaacgcatcttggaaaatacattttcagatgcgaagtctaaattctttcacgggtcg

SEQ ID NO: 124053 - DNA, 209 bp, Zea mays
  Clone ID: MRT4577_44616C.1
aattcccggctggacgccactcgtcctagaatgtgactgatgtcgcttactacttttacacggacaccagtatcggtcccgtggtattaaacgccagggttagcctcaccactttactgtcgcccaacgacctgcttaacatgttccttatgtcataatgcaatagaatactcacatgaacacttctactcattagcacatatatcact

SEQ ID NO: 124054 - DNA, 463 bp, Zea mays
  Clone ID: MRT4577_44617C.1
aggcaggccaagcaagcgaataaaagggcgaagggggggggggggccaaaaaaagccccccaagcccacgcacccagccggccccccccaacaaaaaaacccaaccccccccccccccccccgaacaccacaaacaactacaaagggcaccaacggcccccacctttcacagatgaatcggacgaaaaacacgggccccccgaacgcccgggaaaacccggaaacgccccaccgggcccaccaggcgaaccaaaaaccagaaaagggagacccagccgaacagagggaaaaaacggccaaaggggggaccggggaaaaaggggaaaccgccaaaaaaaacacaaaacagacgaacaaaaagcaaaaccgggaaagccggaggagccaaaaaagcgaccaaaccaacattaaacgcccggcccccactgcccgctgaaaacccggaaaaccaggcgggccaacg

SEQ ID NO: 124055 - DNA, 804 bp, Zea mays
  Clone ID: MRT4577_44619C.1
cgaggccggccgggccggggacgaataactcacagacccgaattcttcatacaattcacctttgagcgttcctgttcctatcccttcccacctctcccgtctccggtgtcgccgccgcccgctcgccctcatcccccaaacctctagctccccacctcccacgctcgctcccttccaggagctaccataccggggacggctcccaactttgctcctgtcagatctccctccacatctcgccttctcccccttcctctcctggcaccgccttgatcccgcccccaagatctcctagccactgcgtccgcccccacccttgttgccctgatccggtagtccctccatgtctgtccgcccctttcccgctctctccctggccggctcactcccgcttgcaaccacccacaccctgttctgctccagatacagtcctgacggcgctgaaggaggagatgcagcagcggatggatgacgcatcgactgcaggtcgttggtggccactcatgcctcctcagagctcaccctcatttagtcgttagtgcgggttcggccaatggcccctggctcgatcgcaggtcctcctcacggcgacgcgcagtcgagccggacatcacagccacaaccatgaggcgtcatcatagagcagtcggagtcgtttttgctgccccctcccggttatatagcaaataaggaaaaagacgcttgaggagatcagacaagatctttgcctggtcagcaggaaatgtttgagcgggtgaatggtcgcctctgatcacatatctgtagcacaatagcaccatcact

SEQ ID NO: 124056 - DNA, 293 bp, Zea mays
  Clone ID: MRT4577_4461C.1
taggtattgaagaagcggtcaacaactagtaacttcatgatgtcacgaaggcaagcaatgtgaactagactgctatgaaagatgtaatgggttgagatgcagtatatggcattttcttgttggtgtcagatagcactgccaaggaaagtgtaaagcaccacctgacttgttttggggaccaagggatgtattactatggggactgttatagccggttccagagagggcgtgacgttacaggcgggcctgcacttcgagcaccacgagcacacgctcatggttgctgtactcgc

SEQ ID NO: 124057 - DNA, 358 bp, Zea mays
  Clone ID: MRT4577_44620C.1
ctaaaccgcgaggtgcaccggctgatcgcgcatgacgggggtaagcaatgggggccggaacacaccaagacagtttccagtcggcgtgcccggaaaaaaaaacccaaaacaacgctccctcggtttcaagaatgtcaggggacgggactaccctagaacgcaccacccctgtccaacgaaatgttgcctgaccaaaggcgcgggctatattgaaaaaaaccccctttttggagtctagcccaaccagggcatatgtccccccgtttcccactctaactatggaagcagctccagaggcgtccccatccaccttaggtacacgcctccaacaaaaaagttgtgggccccagatccgaac

SEQ ID NO: 124058 - DNA, 421 bp, Zea mays
  Clone ID: MRT4577_44621C.1
tgggaggggagatatgctgccgtgcatggatccaagggagccgtcgacggggaagccatacgcgccgactaagctgcagtcccaacacctacccattgactatgcaggcttgctcgtcgctgccgtcgctgtactgggcttcatggggggagacaaggaaggctattggctacaactaatgttctgggctaaggcgttggcacacatgattaactttgagcaccatctgaaccaagttcatatgaccttacatgccatctgatcgggatctggtcacgaactatttcggccccgctggtcagacagtacagagtgctaggctcagcaagaacatcgttcgcttcattcttcataggatatcgagccgatattcctgctgcttccgctggcttttgcagctgacattatggatgagctatct

SEQ ID NO: 124059 - DNA, 2060 bp, Zea mays
  Clone ID: MRT4577_44622C.1
attggggccctcggggccgggcgtaacataacatctcggcaagaggagacaggaggtcggtagtttagttttcagaagccaaattaaattaaaggctgtctgtctcactcactcactcactcccagaagagagaagaccacaccacacaaacaaacacctctttggtttctacaaatagaggacgcactgactgagctacaccggtaaaagctgccaaggatatatatcccaccagtcaggaatgcccgcaaccagacatttcagtacataacaggagctgaacaactaacgtacaggctgacagcagcagatgtatcatcagcaacagctccacacccataaccagcacctgtcctcgtcaaggccgggcttacctcctgagaagcagttcctcctgcacggagcaggaggcggcggcggcggagatgcagggctcgtcctctccaccgatgctaagcctcgcctgaaatggacacccgagctgcacgagcgttttgttgaggcggtgcatcagctcggaggcccagacaaggccacgccgaaaaccatcatgaggctcatggggatccctggactcaccctgtaccatctcaagagccatctccagaaatacagactcagcaagaatctccaggcccaagctcatactgccagcgcaaagaatgcgttggtaggctgccggacgggagcagacaacgccctatgccaagggagtgcttcaccgccgccaccaccgccgccgccgcacctgaacctagatccgccgcagataaacaggtcaatgcacataagtgaagccctccagatgcagatcgaagtccagagacggctgcatgagcagctagaggttcagagacacctgcagctgcggatcgaagcgcagggcaagtacctgcagtccgtgctggagaaggcgcaggaggcgctggccaagcagagcggcggcgctgacgagacaacgacgacgcagcagcagatgctgccggatctcatctcgagagccacggcgacgaggcgcggccatgtccagcaggagcacctccacctgcagcaccacctcggaggcgacgggtcggtggacagctgcctgaccgcgtgcgaggggtctcggtgccagagggagagggaccaggacctgctgtccatcggcctctcgtccgctccgcctcccactcccactcccagcagaggctacaacgacagaggaggcggcggcagcgccagctgcgaggagttcctgcagtttcttgacgagcccagcagaagaggagcaggaggaggaggaggtcctcggatgagcagcaggagcttgacctcagcatcagcggcggcaggagcaatccaaggcctcgcggcagccaaagccaaaggatcgacctcaacggatccagctggaactgaatggtcgtccttttagcaatggtctccttcctcgtagctttagctgcagtagggaaaatggccagggtcacagcaggtgccctgtgtgtgggtgcacttccatgccctgcagccatttgcagcaaataactaagcagtgactgatgatgatggtgaattggcatgcgagaaagagaacccagatgcacgttctcctttgacgtctgattgattagttaactctatagatctgtattccagacatggaaaagtacacggctgagatcctctcatcagtttcatctttcaggaatgtacagaactcgcagcggatgcacacgaatccatgctgctgctttgcaatccgtgctgccgccgccgccttggcccaccagtcagtaagctattcctcgctcggccaagccaacacaagcgatggaaatatccagctcggagctcgctattccactgtagcatgcttcttgtttcgtttgtctgtgcgtggccatcttcgtcccactagtcgctttctgtattcttttcttcctcttttcaactgcccattgctggtttgacacacaacgttgctcatgtatttcatgaaataataaaatggaaaacaaaaaaaaaaaaaaaaaaaaaaaaaaaaaaaatataaaaaaaaaaaaaaaaagcggcc

SEQ ID NO: 124060 - DNA, 292 bp, Zea mays
  Clone ID: MRT4577_44623C.1
gccatggcgtctcgtgtcctttcagcctatgtcagccgcctgcacgcggcctttgcgccgctgccccgggtccggatgctggccgtggcccggcctctcagcaccgctctctgctccgcggggacccagacgaggctcgggactttgcagccggccttagtgctcgcgcaggttcctggtagagttacacagttgtgccgccagtatagcgacatgcctcctttgacgttagagggcatccaggaccgtgttctttacgtattgaaactctatgacaagattgacccagaga

SEQ ID NO: 124061 - DNA, 504 bp, Zea mays
  Clone ID: MRT4577_44624C.1
cccagcgtccgcgcactcgatgctgcgacacttttgttgaatgaacaatcaaccaaatgaactcgatcactggaagcccaactaatagcaactgtctctctctccttctctaatacagcctagccatgggacatgggatatatgctaacggatcgacattgattcacaagccgacgaggctactagatgtggagacacccccgcccacgacaaggataaggccctatatatacctggcctcgtagctggacaggaagagcaccaactgggcgacgtacctgggcctgagcgcggcgcccttgagacgaggcaggcccctgaccacctccttcatcttatgcacctcctggacgctaggcacggtgacaacttagacgaggtcatatgtactaggcacactctgcggtgacgctgtaaactccctggctccaggacatgatgatcatgaccatgacaacaccaaagggcaaaactcaaaagaaccggacccagcgctcgcccaaa

SEQ ID NO: 124062 - DNA, 113 bp, Zea mays
  Clone ID: MRT4577_44625C.1
ctcccgaatcgccttgccatctctctcgatttgggagactgcgaattttaagtgaatcattggtcttgttgcagtagcggctggattgcgaccgttgtgtgggaaaaaaaaca

SEQ ID NO: 124063 - DNA, 263 bp, Zea mays
  Clone ID: MRT4577_44626C.1
atcgagccgttttttttttgattttaaaccgtgcacacaaatttgtttcgtagatctgcaatcagagagcagtctttacaataccacaagtttgtagtctgacaagagactctaaacaggggttttaagctaaacaacacaaaacaaacaacagtaaattaaaggctcatgaggtactcaagcagctctttcttcttcctttcgtagtaaggtcgacgaatttccttgagttccatctctgcattacgacgttcttggctttt

SEQ ID NO: 124064 - DNA, 428 bp, Zea mays
  Clone ID: MRT4577_44627C.1
ttttttttttttttttttttttttttttttttttttttttttttttttttttttttttttttaacactggaaatgtttgttgtttgtaccattgtttttgcaaatgtagttgggcaattttgcaaacaatgttttgttacaaataatcaagtccaaaagttggggaaaattataagcccttgggatacactcctccagggggggttttttttttgtcccaattggagcaaattttatagccttataggcctaaccacttatactacagtcgggcaaaaactgatttagtcacccccgttgcaaaacatccattttccatactgggtagcccaataagggctgaaactggaattaattgtcccaacaggggggtttttattggaacaaattcactgaccgggggttgacaacggggtaagtaacatttg

SEQ ID NO: 124065 - DNA, 348 bp, Zea mays
  Clone ID: MRT4577_44628C.1
cctctcctcactctcgccgccgccgcttcccctgcgccccgagccaagatgaatgttgaaaagctcaagaagatggcaggtgctgtgcgcactggggggaagggtagcatgcgcaggaagaagaaggcagttcacaagactacgaccacagatgataaaaggctttagagcaccctgaaaagaataggagtgaacaccattgctggtattgaagaggggaagatgtgttaaggatgatggtgttattgagggggggaatggctaaagggcaagctggaatgggggctgatacatggggggggaggggaactggacagacaaagaacgtggggcgatctgggtgggatg

SEQ ID NO: 124066 - DNA, 279 bp, Zea mays
  Clone ID: MRT4577_44629C.1
ggggggggcccgtattttcccattataagttattacaaaaccaatccaaacgaaccatgccctttgtgatacgttaaaaatacggggggggggcaaattctccttccatacaatgatttcaggggaaaattgttccaccagtcgcaaaaaaatatttggggccattgtacaataaaaccggtttttacccccataaaatgagttgttttttattcagggttaaaagccccaaaagggacctttcgggcaaaaacatttgccattttttggagagttaaa

SEQ ID NO: 124067 - DNA, 452 bp, Zea mays
  Clone ID: MRT4577_4462C.1
aaaaaaactggtggggattaaaagactagcatttctggggggaacagatgaaataggcatacgactttaggcacggggcaaaaattcaagtacttggaccgaatcctaatgataagtgtgggaccaacaaaatcaactgaaatgctgttgccgagctaacaattttttatatatacaaaaaaaacaccacagacttttgaacacaccatgcttgactaaaagattcaaggacgtgttcagaactgaagctggcactgagtattcccctcaagatgccccatttcccaccttaacctaagagcattgttcactgtttaatgttaccttcccatataatgtggcgtgcggtagattatattgcagatccatgcaggatctatgcgtccaacaatgtatctaggtacttgctttccagctggttactttgctcccacgcgtacacggacgcgtgg

SEQ ID NO: 124068 - DNA, 406 bp, Zea mays
  Clone ID: MRT4577_44630C.1
gccaggcattggagcagacagctactcgtgccaagagagatggttcggacgtgccaagtgaccagtctgaaatagagaaggcggtgagagatatggttgagcagaccacttccatgatccaggcggcatatgcagaagaagacgacgtcgcaagatcaagagcgctgtcgcaccacaagtctgagatgtttcgccgcttcaagcgcctggttcaggtccgtcatgagctactggaagggaaatgcgaccttggaaagtttgtagacgaggtctgcctcatcctaaagtacgtagtgagccaatgcttctcggatcaagatcagatcgacactgtgagccgtgatacagaggattttgatggagctaagccatcaggtgcggttacagcagacggtacgcatgacac

SEQ ID NO: 124069 - DNA, 640 bp, Zea mays
  Clone ID: MRT4577_44631C.1
gtgacgcccccaatcgagccgagctcctcgcgattcccaatccccgcacgcctcctcctccggccccgccgccgccgccgccgccgccgcctcgccacaggctttacagttattcaagatggaacacaaggaggcgggttgccagcagccggagggcccaatcctatgtgttaataactgtggcttttggcagcgccgcgaccataaacatgtgctccaagtgccacaaggagatggtcatgaaggaggagcaggccaagctggctgcctcctccttcgatagcatcgtcaacggtggcgatggtgggaaagcacctgttgttgcggctgtggccgcgagcgcagaggtggcggttgctcaagttgacgtgaaggcgcttgttgtgcagcctgctgctgatgttgcaggcaccagcgaagctgttgccgtgagccccaggaggaaggaggggccgaatcggtgctcaacttgcaggaagagggttgggctgacgggattcgactgccgatgcggtaacatgtactgttcactgcatcgctattccgacaagcatgactgccagttcgactaccggactgcagctagggatgccatcgccaaggccaacccggtggtgaaggcagagaagctcgacaagat

SEQ ID NO: 124070 - DNA, 293 bp, Zea mays
  Clone ID: MRT4577_44632C.1
tgagaaaaacaatgtccacatttcgtataatccttcattgactgtccttactttcgattgttaacatgataagctactactcttcagaatcagagagctgtttagatgactggagttcacatctctgggtgccagacaagctagagatggtagacttgataacatgaagacctgttttttatgctagctgtttacgtgcaatttgttccttccacatcgtgattcgggtcgtggagattttgaagatcttatacattgcgggcgagcgaagtcacgactcaatttaagtcgga

SEQ ID NO: 124071 - DNA, 219 bp, Zea mays
  unsure (1)..(219): unsure at all n locations
  Clone ID: MRT4577_44633C.1
ngagtacaagctttttttttttttttttgtggtttttgtagactattgtttgttaaatcagtataaaacaaaaaatccatattgctggaaccagagggatgcaacatatcgggttagatgtgggaatgagagctggaaaaaatggatgaatgggtctgctgtttcgatcttgtcagatggccagactcaaatccataggaccatgaattgcaggcgagg

SEQ ID NO: 124072 - DNA, 659 bp, Zea mays
  Clone ID: MRT4577_44634C.1
ggccgggggatcatcctcctgtgtgctgtctgcgcacttgtcgtccattgagctgagcgagccatcccgtgatcgccgatcccccagttgccaccctcaccggctgcctgccgttccctccgcctctcaaatccagtgccgtgcgggcgcgcggctccccagtttgggcttgcccagcccccagcagcatgactactacgaccaagaatcataagcagcagcagctgctgcccacggcggcggcggccccgccttggcccgtaaggactaagctcctgctctgcgccgccctcggcttcgcgctcggcgtcgtggccaccgcgtccctcgtgaactccccctcctacgcgacgtcgtccgccgccgccgccgcgctacggggaggaggaggagcgctgggcctcgtcttaccgccgtccgccaccaggaacgccgctcaggaccgccgcccgccgcccaaacaagcaggcgcggcacgggcaacggtccgccggtcccgaccggagccgccggctgccacgggcatcactagcgctgcagccccgccgccgtatgttattggcgcccagggaccagcagcgcctagtgccgttgccgcctcccgtgtcaatggtggtagcatcgtcagcgacagcgacggcgacgacgaggagctcatg

SEQ ID NO: 124073 - DNA, 213 bp, Zea mays
  Clone ID: MRT4577_44635C.1
acccggcccggaaccccaggtccacccacgccccccgcggacggaaaaatattcaattttccagacacagggcgcaaggcacgaacaggggggggcaccaggacggggaccaggggcctcaccaaaaaaaccacaccggggcacagcagaaccggggcgagccagccgccaacgagaagaccggcaacccgccagagtacaacccagggaccg

SEQ ID NO: 124074 - DNA, 1476 bp, Zea mays
  Clone ID: MRT4577_44636C.1
cacgcatttgccgagcttctgcgttttgagcatcacggtcagcagctgatggatggttcgttaacttgtgaggatgagtaaccactcctttttggaaacaagagttgcacacatcaaaatctggacaaatctcgcaccgccagccttgaccagtttcaatatcatgactgcagacattgcacgtagtgacaaatgctggcgcagttggattgtgtaggtggtatagcaccatcattgacgaatgctttgcgcgtcgaagtgtgtcatactgataatggtttccttggcaaaggctaaggaatgcctgcctggtgtcaaagaactcgctttctaagatgtcatctctatctttggtatctttgggcaccccaacaatatcaaccggatggagcatatgtgtgtctctactattacacgggtgcctctccctgtcttcaagttgctgttctgcgtcataacacttgtcacagatgtaaaaacttctgcattgatgacaaacccaacgtcttccagacaccataagggtacagcagtgactacatgaatactgcaaatggaccataatgaaatcttccttcataggatatatggtttcaccaagcttttgcatcaacatagcatccttggaagcattcccgctgagatcggtgtggccagcagctttaagagctctttttgtaataatcttctttgtcttactctttttctggagtttacggtcatcttcttcttgtcggagttgattgatcatatcttctgcagctcctggccaataatctccatcaaagtatggcaagcgagaagcagtcaccttagccttgcattcccccatagtaaggaagaaatggtcatatagatttgtgagctcaacaacaatttcctccttagaagctttccgaagcatagatagataccactcacgcagtttatcagatttcggagtcttttgaatctcaggatggcaatataagatgtaatcttcacccttcaaaggtggacaagcccatatgtaacaacttgtgaatccccgcagtttacagtattcaagatatcctatcagaatttcatgatacacaaatgtacgcaaggcttctccagatactgttttaatctcaggtctgaagtacttaacagaatccaagtatgacaaataaacacgacgctggttcgggaaagagcattcagcaccaaattcttgaacatacattccaaatagacatacttccacaccttctattttctggaacaagagaacagccttggacttgtaagggaactctgtagggtagttgtcttcttgaaaaatttctaaaaaacgtggtttaacctccagctttttatccactgatgaaacaactctgacaacaagtccttccgctccaggaatctcatcaatatttttgccagcaggcagctgcacggtcctgtttctcctgcttaagtcgtttaaatcccacgcgtccgcggacgcgtggg

SEQ ID NO: 124075 - DNA, 215 bp, Zea mays
  unsure (1)..(215): unsure at all n locations
  Clone ID: MRT4577_44637C.1
gctgtgttttgtttggggtgttattgcaacatctgatggccacttgcatcagcagnggcgattaaaagnanacagnncaaaccatgctggggactacacatnntccgcannacatccaacnnacaattgaggaggctatacgacattatttttttttttttcttacatcctcatnnttcatttgggggggggggggggggnncancacaaaacac

SEQ ID NO: 124076 - DNA, 897 bp, Zea mays
  Clone ID: MRT4577_44638C.1
cattgggtacctcgaggccggccgtcgccaactcgccccgcccgcccgtaaccctaaccctagtttctaaatcctatcgcgccacgcacccgcttctctcctctccgctgcgactgcgaccgccgtctcgcctctcgtccatctcctccggtctccggtctcggctctccgctcttggcctctccgtctccgctccggtgactccgtggacgtgtcctcctcgtccctctcagtctcggactctcgcactcgcacggtaacgctggatctactactaacggcgtcgagttcttcgtgtctggcgcagaggtaatctaatatgttgtgatctgtgtagtagtaacttgtttacctgatttatgcttgagtggacaatggtgcttgacagcttgagtttaactaaatagagtaactgatctgtgtagtatagtagtggacaatggtgcttgactgcttgctgtagaatagagtaactgatctgtgatctgtgtagtagtaacagctttggaaccggtgcttagtaatttgtttaactgatttgtaacctttcttgctaacttggataactgaatagagtaactgatctgtgtagtatagtagtggacaatggtgcttgctgttgtattaccttatgtttggtaataacttgctattgtcgagtagtggacaatggtgcttgctgttgtattaccttatgtttggtaataacttgctgttgtagctctgagttcccatattctggttctacaacacctaaccttggtagtggaacatcagcatctgctttgcttcaacagcacactctagtgctgaccttagttcacttgacacagagttgaccctctacctagatagtgacactttgtagaagtttgacgaggacttcatatcctaaac

SEQ ID NO: 124077 - DNA, 364 bp, Zea mays
  Clone ID: MRT4577_44639C.1
aaaaaaaaacgggccgggggtccattacttttaaaaaaagcgggggcccggagcttttttcattggttaaaagcattacaacataagcgggaaaaccggaaacaggcctcaaaagccccccttattggggggggccaacacaaacgaaaagcgcggggccgatcaagaaagaccccccccctggggaacccctttaaaaggctggttaagcccaggagacccccaaaagctttttactgaaaaaaggcccccttaggcaaaagggttcccccacttgggggggttcccccccccccaggggaaggcaggggcctcccttccaaaggggcccaaggccccccttttgagggaacccccgcacccc

SEQ ID NO: 124078 - DNA, 209 bp, Zea mays
  Clone ID: MRT4577_4463C.1
gagcggtcgttcgccatgagggagatcctccacatcgaccgcggtcagggtggctaaccagatcggagccaagttctgggaagtggtgtgcgcggagcacggcatcgacgccaccggccgctacggcggcgactcctacctgcagctcgagcgcgtcaacgtctactacggaggcggtggcggctacggcggtcggcgcgagggtggtg

SEQ ID NO: 124079 - DNA, 365 bp, Zea mays
  Clone ID: MRT4577_44640C.1
gtgctcactagtcggcggccgccctttttgtgggggtttttaataacataagctttacattacgaggttttaatttccggtcgggaagtgaccgtcctcgctcgctgcacaggctgggcctagctgttcacaggctacatgaaccagcacctgtgctgagctcaaggggtgattgacctgggcatgatgatgtccccgatgttgctgggccaccggctggtgaggcgggagtgccaggtacatcctgcggaccaacgccctggtacgccggctgctgatcacagaagccgacataagccaggatggcttgggggccgttctggacccccttgagctcgtactcctggaactcggcggggcccttg

SEQ ID NO: 124080 - DNA, 314 bp, Zea mays
  Clone ID: MRT4577_44641C.1
tcggctcgaggttccttagaccttttgtgatcgttatgcagaggagcaatgctccagaggtacgagagctgattgttaggtgcgtctcacagatggttctgagtcgggttaataatataaagtctggttggaagggtgtttttatggtttttacttttgctgcagctgatgatacaagaagtactgtcctattggcatttgagacggtggaaaaaattgttcgagattattttcatcacataactgaaacagagacaacggcatttagctgattgtgcgacttgtcttattgcatttacaggtagtcaatttaa

SEQ ID NO: 124081 - DNA, 299 bp, Zea mays
  Clone ID: MRT4577_44642C.1
ctagatctcgagcgggcgctgtcgatgtttcaagcttacgttcgcgtgcatgcgcctgcggggctattttatagtgatactgaaacccaaattaatggcagtggctttacaactacaacactgggactaccatgacgttacccatcattaatcgtattgcagtagatgcacatttccctatctgcagctatagcgataacgaccagaccgatagcgattgccaatagctacacaacctcaatcgcaaatgcaacacgcactctagctgatcattaacctcaagcgcagtggttgttacg

SEQ ID NO: 124082 - DNA, 368 bp, Zea mays
  Clone ID: MRT4577_44643C.1
gcggccttttttcttttttttgcacgtaatttttaagatgattcacatcatgctcgaaggtaaagtacatcgggtctaagaaccatgaaaatattgcttgtggaattgaactgaatccactccccacgctagcgggaggttggtcccgcgtgcttacgccggcggggatgtaacggcctcaagcaggtcctcccgcatgtcgtcgtgttcgtcatccccggtgatccggtcgagcacgagcacgatccccatggacaatgcggcgtttatgccggctcgcacccatagcacgaatacgttccggcccatcatgacgtgcgcgtgctcgtgcacctttcgtctgagctctgtcaccaccacgttctcct

SEQ ID NO: 124083 - DNA, 249 bp, Zea mays
  Clone ID: MRT4577_44644C.1
atcaaattgtaacaccacagaaaaaaaacccgataagtttcaccatgattgttattgtccatgtgcacattgccataatgttactgtgctagtttttcgaaagaagattcgtcaatgagctggagcaacagatgtttactaaaaaaagactgctgtaatggttggtgtagattagcagttgggggttgttcacttgatatctggtgctgaaagatttcagaagtgatccaatcaagagaccacatcctc

SEQ ID NO: 124084 - DNA, 797 bp, Zea mays
  Clone ID: MRT4577_44645C.1
ttgggttaaaaactctgcattctgtttaattagaaaagttaacaacaataaaaatgttgagcattgcattttcaatagaatcaaaggatccacctcgataaggttaatgcttattccataatcaacgaccaatgttgcaaaatccctcacataccaagatgacaatagaaccttcaagctctaacccatgatgagctttggtttgaccttctttttccgctacattgatggcttatcaataacaaatcagcaaatagacataaagttgcttctatagttgtcgaatcataactataatatctcagattttgctttggaccaccttagaagaaaagaaacattcaacaccgccacccatgtggtaagttgccagcagcacacatatgctcgggagaaatcagtaaacaactgattcaagtttggccagatctggcacgaggaggctcgggcaggcttcacgagcagctatctcctcagcgtcgccattgctttcggcatgtggacctgaaaaagcaccagtgatgacaagacccggtacaaccaatatgctcgtcatgtccttcaacgaatttggccaaccatccactctaggacctaatcttcctcatatttgagaaatacttcaatgtgtgtccagaaaagatgagtgccacattggcacctagcccaaagagtgggtagaactctttggcctcttcaactgtaataatctctgagagttttctaggaacacttgacaaataatacaagtaatgagaaccatatattacaatcccggccggcctcgaggtacccaa

SEQ ID NO: 124085 - DNA, 777 bp, Zea mays
  unsure (1)..(777): unsure at all n locations
  Clone ID: MRT4577_44646C.1
attgatgattgatcatttttctcagaggacgcatctcgatcaaaaccgaccggaccccggtctagttatcgatcgaggggaacgaagcaagacaagagggaggccgagcctagccgcctagggtagtcccgtccggtctcccgcggccagcgacggactgcctggcgccggcgaatcgatgggctactggtggcaccgcgtcgtgctgccggtgcggcgggcgtggctcggcgtcgcgtcccgcttcggggttcgccaaaccggtacggcacagcagcggcgcgacgcaggcggctctcggctgtggaggctgcggcaggaggtgagcacgtgcgagtacgaggacgtgcacgtgatgtgggagatgctgagccgccncacggcgccggcgccggcgcccgcgcccactaggcggcagcacagccggttccggccgcagccgcggccgtggggcgacaggttccgcctctgccgaggcttctagtagaccaaggccgccgccgccgccgccgccgcgcgtgtcagctccgctgctgttgctgcggaatagatatagtgcttccactttcttctggctttttcggcttcgtcttctctggcttccgctgcttgtattgtattgtatctagtatgtatcgtcgaccatctccatccctccggagaactctgagatgtaccccccttcctcctcgtgtacccggctcgatccgcctgccgatgataccggatcatgtgaattgacaccgctgggttcgaccaaaaaaaaacaaacaccgc

SEQ ID NO: 124086 - DNA, 627 bp, Zea mays
  Clone ID: MRT4577_44647C.1
gcgtgctcgcgctcccggtcttgacattgatcagcttcgcgctcggcctcgcgtcctgggcgttcctggccgattctgtgtttggcgtcagcgtcagcatcattttggagtcggcgcgcagggcgctgcggccgcgggacttgatcagctctttgctcaaatctcaagtgtttggtgccattatcgcggtggtgagctgtgcctggggagttacaacccatggaggagccaagggtgttggcgagtctacaacatctgccgtagttgtttccttggttggaatcttcattgcagactttgctctctcgtgcctgttcttccagggtgctggtgattcgctcaagtatgcaatgggttgaggtgggtcagtgcagaggaagttttttcctttctaggaggatagcatagtcttgtacattaaaaagagtggtgcactggattctagtaggtgaacattgcaacttctgccacagtccaggtgacatgcatagttgtttccccttgatacctacgaaaatcattacctttgttgtactgaactgctgctcaattatttgccagtgattcatgtataaccttattcatgaaagtattggtcggattgaatcaaaaaaaaaaaaaaaaaaa

SEQ ID NO: 124087 - DNA, 780 bp, Zea mays
  Clone ID: MRT4577_44648C.1
attgatgattgatcatttttctcagtatacgcattgcctcgaggccggccgggaccgaccggactccggtctagttatcgagtggaacgaagcaagacaagagggaggccgagccgcctagggtagtcccgtccggtctcctgcggccggcgacggactgcctggcgccggcgaatcgatgggctactggtggcaccgcgtcgtgctgccggtgcggcgggcgtggctcggcgtcgcgtcccgcttcggggttcggcaaaccgggttgtggaggctgcggcaggaggtgagcacgtgcgagtacgaggacgtgcacgtgatgtgggagatgctgagccgcaccacggcgccggcgcccgcgcccaccaggcggcagcacagccggttccggccgcagccgcggccgtggggcgacaggttccgcctctgccgaggcttctagtagaccaaggccgccgccgccgcgcgtgtcagctccgctgctgttactgcgggatagatatagcgcttccactttcttctgtctttttcggtttcttcttcttcactggttcccgctgcttgtattgtattgtatctagtatgtatcgtcgtccatccctccggcgggctctgagatgtaccttccattcctcctcgtgtacccgtctcgatccgcctgcagatgataccggggcatgtgaatgaacagagctggttccgatcaaaaaaaaaaaaaaaaagcggttactgtgtgtccttgtttctaatataccacacctggttctccatctctgttgc

SEQ ID NO: 124088 - DNA, 769 bp, Zea mays
  Clone ID: MRT4577_44649C.1
tgggtccctcgaggccggccgggaaaaaaaaaaaagggaccgaccggaccccggtctagttatcgatcgaggggaacgaagcaagacaagagggagaccgaggaggcctagccgcctagggtagtcccgtccggtctcccgcggccagcgacggactgcctggcgccggcgaatcgatgggctactggtggcaccgcgtcgtgctgccggtgcggcgggcgtggctcggcgtcgcgtcccgcttcggggttcgccaaaccgggctgtggaggctgcggcaggaggtgagcacgtgcgagtacgaggacgtgcacgtgatgtgggagatgctgagccgcaccacggcgccggcgcccgcgcccactaggcggcagcacagtcggttccggccgcagccgcagccgcggccgtggggcgacaggttccgcctctgccgaggcttctagtagaccaaggccgccgccgccgccgccgccgccgccgccgccgccgccgccgcgcgtgtcagctccgctgctgttgctgcgggatagatatagcgcttccacttaatttcttctgtctttttcggtttcttcttcttctctggttcccgctgcttgcattgtattgtatctagtatggatcggtgtccatccctccggcgggctctgaggatggacctccattactgctcctgtacccgtctcgatgcagatgatacccggggcatgtgaatgaacagagctggttccgatcaggttactgtgtgtgcttggtttctatatac

SEQ ID NO: 124089 - DNA, 875 bp, Zea mays
  unsure (1)..(875): unsure at all n locations
  Clone ID: MRT4577_4464C.1
cattgggtacctcgaggccggccggggagattccccctcgactaccagtccctctcttttcgctcttttctagtaacatttctacatcatgatctgtagttcattactgcgggtctcctcaagatccgccgtcagaccctcacatagcttctcccagagcgcctccaaccttccgcgaatatgcgcgatcaacagatggcagcgaggatatgccaccgaagccaaggaacatgacctggtcatcattggaggaggcgttgctggatacgtggcggcgataaaggcaggtcaagaagggttgaaggtagcatgcatagaaaaacggggaatgcttggaggcacatgtctcaatgtcggatgcataccatcaaaatcgctcctcaacaattcccacatgtaccaccagattcttcacgacaccaagaagcgcggaatagaagtcggcgacgtcaaactaaatctccagcaaatgatggctgcaaagaacacctcagtggacggcctcacgaaaggcgtggagttccttttcaagaagaacaaagtcgagtatatacggggtacagcagctttctctggcgagcacgaagtcacagtgaacaaaaccgaaggcggcgaaaccactcttcgagccaagaatatcctcattgctacgggcagcgaggcaaccccattccctggtctgacgatcgacgaanagagggtagtcactagtacaggtgcaatatcactgggataaggttccaaaaaagatggtagtgatcggtggaggcatcatcggtctgggagatgggatccgtctggtcaagattangtgcagaggtcaccgttgtcgaattcttggtcaataggcggtcctggcatggatgcgaatatcg

SEQ ID NO: 124090 - DNA, 297 bp, Zea mays
  Clone ID: MRT4577_44650C.1
caaccaaagaagacgacccataccatacccaaactgtcaggcccagaaaatagtaccacagaaagcacgggcacggggccaatacttgacacaaaaagctgcaaccgccggaggcaccggaaaccgcagggactgccaccgaaaaccaccgccataaaaacccgaaaacggggggtggagcccacgttactgggataccggacaggacacactcacccgaaagacactggtttctacggtaccagactactaaggacccacacacacacacagacattgagacttcattatcccgca

SEQ ID NO: 124091 - DNA, 366 bp, Zea mays
  Clone ID: MRT4577_44651C.1
gtggggcaaaaggctcgctcgtaggaagaagatgaaatttctgctctagtctggggcgggtctttcttatgctgtttgcatcctagacttaatcattctaactgacactctgtgctataactccctaactaatttctactcgttcgacatacttagatcgccgttcgactacttggatccaatacttatacgcgtacaaaaatattccacctctcattaggtctagtcctccgtcttttcatccacacactattaccaattgtttctatcaatgatccttataattctagctcttatttactgtcactagccgtacatcattaagttaatactaatctgtctatgtccttgtgatacctcatctta

SEQ ID NO: 124092 - DNA, 232 bp, Zea mays
  Clone ID: MRT4577_44652C.1
aaggacggacgggtttccaatcacacatattatatgagaccaactatccaacatatcaaagcacgatagtgcaccaacaatgccagctaaaatattttgcctccttatgctcactgcactttctgaaagcgctgatacgccgcacattttcccataatgataacaaggtcctatagattcccttcttcccccgacctactccccaacgtagttttcattatgtgaaaaacca

SEQ ID NO: 124093 - DNA, 410 bp, Zea mays
  Clone ID: MRT4577_44653C.1
ggtccacgcacgcgtccgaggacgcgtgggcaaagatgcagtggcatatgcagactgggttaagaaacatcatcagttttctgatatgcttgttcaaacctcaccagctgtaactgggcatgcctttcctagactgaaactacggtacaaaccatcacttgttcagagtggaaggaaagacttgaagctaggacatgccttgatgtgtcctcaggcgaaacatctggaaagggggcttttgctgcttgatgtgaggaatgattatgaatgggatgttgggcactttgaaggtgctcagcggcctaatgtggactgcttcagaagcacttcctttggactttcgggagagatcctctaaatggtgtagacaaagagaggacagatatactaatgtactgcaccggggggga

SEQ ID NO: 124094 - DNA, 454 bp, Zea mays
  Clone ID: MRT4577_44654C.1
gcggcggcgtgccttttacaaatccgaggggcgtaaggaattccgccgcgtcctcccagaagaaaaacaaaagcgacaagcggctcgccctgcgggaggacccgacgacagctcactcgcgtgcgccacccatccacctccccgagacccgacccagatctcatctcgcgcgcggcggtccatggccaccgccgccaccgcttcccacccggcttccgcctccacctccggccgcgacgctctcgccgccgcctcctcctcccccgccgccgtctgcctcgtcccgttcaggtggtgggcgcgggtgcgggaggaggaggcggcgggcggtgcgcagcacgcggtcaccgtcgccgcggccgccttctactacggcctgaggctgcttcacagcttgctgcacccggatctcgtcctgcgcctcgagcgcggggagtgccgcgccggtggcggg

SEQ ID NO: 124095 - DNA, 563 bp, Zea mays
  Clone ID: MRT4577_44655C.1
ttactttgtagattttgttttagatgttttaggatcaactaggtaaccatctatgtctcttctaacaacagggacaatcccattaacaatatcaatagtcacattgccatttaggtcaactagtggggcaaaaaactgattgtcattatctatgtgctcattctccaaattatccaggtcatacacatatcttgctttagattgaacaacaacaacccactcaatatcaattggataaggaacataatatacttggaccgcttgtgatgctagaatgaaaggatcatttgataatttttcacatgtattaaacaaatgcttaaagttgacagatgtgatacctaactggtcacttttcacccatttgttccgcacacggttgtcaacccaatcacatttgaaaagcaccatcgtacctttgtggttatagtttagttcaacaatttcattgataataccaaaataggtcttatttcctattatgacattatcattattacccctgtcaaagcttgttgactctgcaactacaacaaccccactattttgaatagatctaccct

SEQ ID NO: 124096 - DNA, 164 bp, Zea mays
  Clone ID: MRT4577_44656C.1
cagacacatactccgacgcgttggctttgactgcaaaggtgccaatatgagaggtgagtctactttctacacttccagttagcaccaacacatacctaattaagcatgataataacgttcgtatgatatctatatgtgctgcttatgaggaaactacaaagcca

SEQ ID NO: 124097 - DNA, 297 bp, Zea mays
  Clone ID: MRT4577_44657C.1
cacaatatacccagaattatacatatagggcaggaaaaggggttcctaaaaacaaggcaggggggggtttttattttaatttgcatttttacaagggttatgcacttggaaagcttcctgacaaaggggggggggggcaaaaaaaaggctgggaaattcactgtttacatatgggagtactaagggtaactaccaaagtatgcactgggcaaaacattaaaaaaaaagcaacaggttaaaactttggggaccatggggtatgttggtacccgacagtttgtttaaaaaactccgggg

SEQ ID NO: 124098 - DNA, 319 bp, Zea mays
  Clone ID: MRT4577_44658C.1
gtcatctacgcacacagcttcagctagctagctcatcatctttgcacgcgtacgtacgtagatctactaccaagtcacggcacagcacactgatcacctgctgacagagtgatcgatcgagcgatgacgacgcgcgcgctcgtggacatggcgctgcgcttcctccgcgagtacgtgcaggcgtaggacctggccgtggccgacaaggtgctcttcaagtgcactgcatccaggagccagctgtcgtacctcccgggcgagccgatactgatgccggtggtcggcattattccaacgcttttcacgcacatcgtaggca

SEQ ID NO: 124099 - DNA, 858 bp, Zea mays
  Clone ID: MRT4577_44659C.1
tcgagggccgcttctttttccgcaagcaagccatatatacacgcattatctcttcttcttcttgtaggtagcagcgcctaccaagctcttttccatcggtgaccattccagtcgtccatcacatggatcaggacgagcgccagcatccagagccgccggccatggagaaggagctctctgccgacgcgctagcctgcgactactgcagcggcccacaggcggtcgtgtactgccgggccgacagcgccaggctctgcctgccgtgcgaccgcctcgtgcacgccgccaacgcggtctgctcccgccacctgcgcgccctgctctgcgccgcatgccgcgcaaccggggccgtcttccgccacgctggtaccgaattcctctgctccaactgcgacttcgggaggagccgggacgccgagctgccgctgcacgaccgctgcacagtccaggggtacacgggacgaccctcggcgcacgacctcgccgctcttctcggggtccccgacttcgacaagccctcggccggcaaagccgacgacggttggtgggccatctgggaggagccccaggtgttccgcctggaggatctcatcgtgcccaccacttcttgccatggcttccagcccctcgtgacgccgtcctcgcccaagatccacaactcacccgatggaaagaccaacgatgaggtcatacggcagttacgtgagctcgccgaggtcgacatgggcagcggtcagataacacctcgtgaggaggcagagcaagctgctcatcagttgccttcctggacagagtcacagcacaccactgggaaatggcgattttcgcatagataacagccacggagttgcaaccatg

SEQ ID NO: 124100 - DNA, 205 bp, Zea mays
  Clone ID: MRT4577_4465C.1
gagaggaaagccggccgccggacctgcccgtcactacttgctggatcctcttcttgcggtggtcaaccaacaacccatcggggggggtgccctcttttagaccgcccatgagttattgcccaataatgaagctttttggatgatggttgcggcgatccacatataaataagcacttttttagaaagaacattttctagaacttac

SEQ ID NO: 124101 - DNA, 150 bp, Zea mays
  Clone ID: MRT4577_44660C.1
cggccggcccgtacgccgccgggctgcaccgcccttgcagtccaggacgaggcctaacctttctttttctatgttttattcattgaactttaatttcatcacattcaccttacttataatactgcttagccatctattaataaacttttt

SEQ ID NO: 124102 - DNA, 2000 bp, Zea mays
  Clone ID: MRT4577_44661C.1
cttgtgtggtgatgcttgtgactcgtgttttaaattgctgtaaaagttctcgcacttgacgtgaagatcagccttctgttaatagaaattgtttcattcaggaagcatcttgtggaaactttttttttgtaaaacgacccttatttatttctaacattgatcaataagattttaagatcagctttccgctaatagaaattgtttaattaaggaagcatcttgtgggtatcatatttttggtaaaagaaattcttctctttgtttctaacattgacccattggtcttatatgcaaagaaatcttgacaaaagctattgagcaacatggttttcttttccaaattggaggttttgagactgtaaccagatttaagatgtgtctacaacatggttgttgccttctttttgtcctttattttgaatttgacagtggtgctgatatatcatgcttgcacaagtacctgctgtactcctttgtattcacattatgaaatgatgggcaagaagttacacttcccaacatgtacttctattcataaattgtattgttttttctagtgatgtttggaaatggatgtctgcatatcataattgcacagttgtacttgagtacaatgttttctcttttttttggaagattcaagtcggtggactgataagtacaatagaaacaacaatatcttctgtttagtgtgacaaaacaaatgtatcaacatatagaattgcttgaagtgataactgtacgtgagttccaatgtagagtattatgctatctctgttccatgctttatcacagtagtcagttagagctgtgttatatttttcagacttatgttcattatatgtttgcttgtttaggtatctgactatgcaagagaccttgaagagatgcagatgatatccaaggaggattatctcgtgtctcttaggagaaagagcagtgccttctacagggggttaccaaaatatcgtgggcttcttaggcaacttcataattccagatgggatacatctttgggactcggcaatgactacatgagccttagttgtggcaaggatatcatgttggatgggaaatttgcaggaagctttggtctagagaggaaaattgatcttacaaattacatccggtggtggctaccaaagaagacaaggcagtcagatacatctaaaacagaagaaattgctgatgaaattcgagctattgaaagttcaatgcaacagactgaaccctataagttgccttctcttggcttcagttctccatcaaagccctcttcaatgggcttatcagcatgcagcatattatctcagtctgatgcctttaaaagcttcttggagaagtctacaaaattatctgaagaatgtagtcttagcaaagaaattgttgaaggaaagactgttgcctcggtacctgctactggatatgatacaggggcaattaatattaacatgaatgagttgctagtacaaagatctacttactcaatggcccctgttatgcctacaccaatgaagagtacctggagccctgctgatccttccgtggatccacttttttggagcaactttgttttgccatcgagtcaacctgttacaatggcgacaataacaacaacaacgtttgcaaagaatgaggtaagttcaagtgatccattccagagccaagagtgactgcacgagcttactgaagcaggatattttagattggtcaaagacagcatcccgtgcgtcaactagattctttttgtcaagcttttgatgtcgcaacttgtgagcaatactccttgtttatccatacttcataggacatgaatagaaggtatgacaagtgcaagcatagttatgtaatatacagtggctagttgccagaaaatgagatttagttgtgtagagctgtttgtacatattgagatggttgtttcagttcaatctcaacaggtttgaggaaaatatccaacgaaatgatacagttttaatgctaaattagttattttgtac

SEQ ID NO: 124103 - DNA, 549 bp, Zea mays
  Clone ID: MRT4577_44662C.1
ggccagacccccgcgtccgcggaaaggaaaaaaaaaagaaacattcgccgcatttgccgcggagggcgtaattgagatttgtccttgccccctcggtgaaaactaaaaaacggcagcgccaagcgccgctcgtcttcttactgaattacccccctgcgtgggacgtacgactgtgtgtgcctgtacatacgggagggttgactgtggtggctggtggatcctaggatgggtgggggtacaaaggggattttctcctgcagctcaaccgttttagtgcctgctgtctggtgggaattttttcttccttctttgttgttgctcctgccgtgattttgggtcttcgtctagatctagctctccgcagtcttgctctagctctagtggtggttgtattgaagtagtactagctagttgtgactgctcagcagtgagcactacctgccttctgtttccctcttagggcttttgagatcttaacaatactccaatgccgcaaggctagtgatctcgtgactgagaccgaggaaaaaaatgccaaaagttcatatt

SEQ ID NO: 124104 - DNA, 1703 bp, Zea mays
  Clone ID: MRT4577_44663C.1
cccagcgtccggttctacgcttggcttggctgcgctgcgcacaccgaacccctcgccgtcgcggctcgcctcggctccgccccgaccgaccgatcgatccggccggcggtgggcgccatggcctcccccaaccccgaggccgcggggctgcaggccgtggctgtggcgggggcaggggagggcggctcgtcctcgtcgctcagcgccgttgcgggagcggctgcgttgtccggggagctggtgcccaggagggcgttggcgctgcgcaaggagcgcgtgtgcacggccaaggagcgcatcagccgcatgcctccctgtgcggcggggaagcggagctccatctaccgcggggtcacccggcataggtggacaggtcgatatgaggctcacctttgggacaaaagcacgtggaatcagaatcagaacaaaaagggcaaacaggtatatctaggtgcatatgatgatgaagaggctgcagcaagggcctatgaccttgctgcattaaaatactggggagctggaacacaaataaatttcccagtatctgactatgcaagagaccttgaagagatgcagatgatatccaaggaggattatctcgtgtctcttaggagaaagagcagtgccttctacagggggttaccaaaatatcgtgggcttcttaggcaacttcataattccagatgggatacatctttgggactcggtaatgactacatgagccttagttgtggcaaggatatcatgttggatgggaaatttgcaggaagctttggtctagagaggaaaattgatcttacaaattacatccggtggtggctaccaaagaagacaaggcagtcagatacatctaaaacagaagaaattgctgatgaaattcgagctattgaaagttcaatgcaacagactgaaccctataagttgccttctcttggcttcagttctccatcaaagccctcttcaatgggcttatcagcatgcagcatattatctcagtctgatgcctttaaaagcttcttggagaagtctacaaaattatctgaagaatgtagtcttagcaaagaaattgttgaaggaaagactgttgcctcggtacctgctactggatatgatacaggggcaattaatattaacatgaatgagttgctagtacaaagatctacttactcaatggcccctgttatgcctacaccaatgaagagtacctggagccctgctgatccttccgtggatccacttttttggagcaactttgttttgccatcgagtcaacctgttacaatggcgacaataacaacaacaacgtttgcaaagaatgaggtaagttcaagtgatccattccagagccaagagtgactgcacgagcttactgaagcaggatattttagattgttaataaagctttggacatttcaatcgatgaacaacaggtcaaagacagcatcccgtgcgtcaactagattctttttgtcaagcttttgatgtcgcaacttgtgagcaatactccttgtttatccatacttcataggacatgaatagaaggtatgacaagtgcaagcatagttatgtaatatacagtggctagttgccagaaaatgagatttagttgtgtagagctgtttgtacatattgagatggttgtttcagttcaatctcaacaggtttgaggaaaatatccaacgaaatgatacagttttaatgct

SEQ ID NO: 124105 - DNA, 655 bp, Zea mays
  Clone ID: MRT4577_44664C.1
accctcggcaagaaggacggcgacaaggaagacgacggcgagaagaagaaggacaagggcgctggcgctggcgatggcggcgaaaagaaggacggcggtggcggcggcgaggacaagaaggacaagtccgcggcgtccgtggcgccgatgcccatggcggacccgagcatgtaccagatgcccccacagtacggctacatgccgtaccccccggcgcccgtcggctactacggcgcggcgccgccgccgccgaaccccggcttctacccgaacgccgggccccagtacccgtcgccctacgcgacgtaccccgcccacgcgccccagatgttcagcgacgagaaccccaacgcctgctccgtcatgtgagctgccatgccacgccacgccacgagccgatgagcacgacgccaagcccagagtcgccgcaagcagtatgaatcaaaccagagaagcacggcctgggtttggcgcgcggtaccattagcctagctagcagctggtagttacgtagcttagcgcaccgagaattagcagacatgtacatggcgacagcgatcccgtcccgcgatgtaatgtaatgtaatgttccacgatccatccgataaattttggccctgcactcgttaattataacaaacaatcgttgttgtta

SEQ ID NO: 124106 - DNA, 350 bp, Zea mays
  Clone ID: MRT4577_44665C.1
tgctttgattaaaaaaatgcatacaaaaaagtaaattttttatatgatttttgcattataatcaagcgtgtgtgatttaaaaaaagtctacatttttaaattaaatttaaaaaagtaaactttttcacattcaaaaaataaattttgtatgtgtgcagtttgacaaacgaactatcgattttacttgtaaaaataaaatcattcgccgtttataacaaacatcattcaaacaaattgtgttttaatatttttaaataaaaaaacacttgcttgacataaaaatattaagcactatctaaatttttatattaaatttaacaagttaaatttaaaatttagacgaacgatac

SEQ ID NO: 124107 - DNA, 402 bp, Zea mays
  unsure (1)..(402): unsure at all n locations
  Clone ID: MRT4577_44666C.1
cagaacggnattcaatattacacaggtgagcgttacgatgggatccctcgataataacatcatgagcgggggcgccgttcttttggcgctcgacaaccaagggtcggaccgacccccgaaggaaccacccggccccaacatcaacaccaactacaacggcaattgactcaccgctagggccacactggactgtcagcccaacggtgccggttctcctgacaactgcgtaacgggcgggatcaagaacgcgaacctgccatcctacagaggcatgactgcgtgcggccacttccacaatttctaggacgacaatgactgcggctcatgctacgatgagtgatgcgaggaacaacctgagtgctcgggcactccaatcacggcgtacataactgacatgaacta

SEQ ID NO: 124108 - DNA, 440 bp, Zea mays
  Clone ID: MRT4577_44667C.1
ggcaattcccaaaaggggggggcgtttttagcggcaaaaaaagccccctcaaaaaggggacaaaaaacggcgggcgggtttgtcttaaaaaaaaacctggggtttggctggaaaccacgaaagggggcccccggaaggggggggttccaaaaggggcccttggacccaggggaaacggggaccacaaactagggggggacatttttccaaaaacccccccctggaaaaaacgaaacacaactttgcccacccccccatccaaaatccccataaacctactgggatctttgcccaatttttggggggttccttttaaacctccaaaagcgcttttttttccactggggcctaaaaggggccttcttggggggtttccttggggcgtttcctgttttttgttggggggggggttaacccccacccctcccgggaacccgggg

SEQ ID NO: 124109 - DNA, 395 bp, Zea mays
  Clone ID: MRT4577_44668C.1
accattcgtacgcaacagagcgcctgtgaagacactcgatgttagacatgttgacattatcggaccatatgaacatgacgcgtatgcccacggcgcagacgatccatgagttcactgcaatcttacgaccttggtacagggcactcacgcttatgctacagacacaagctcggcccttgtatgcaaggacgcttcctgtacctcaccagatacgttaggcgaagctgttgacgaagctaaaagagccgatattggcggcgtaattgctggctcgaacctgacagactagcgacagtgacttagacagactgagtgttgtcctttcactcaagcagatggacctgatacatgccatagctagacgagctgaataagcctcttgagcaggttctcct

SEQ ID NO: 124110 - DNA, 620 bp, Zea mays
  Clone ID: MRT4577_44669C.1
ggcggacgcgcgggccatggactgggagatgtaggcgaaggcggaggggatgaggcgggtgctggagatggcggacgcgctgcgcctcgagacgatgcgcgaggtggtggcgctgctccgccccgcgcaggccgtgcacttcctcctcgccgccgccgagctccacctcgccgtgcacgacttcgggcgccacaaggacgaccgcgccggcaacttcgccgccaccgcgccgccggagtgacggacgctggcgcgcgtgaaacgataacgggcttgcctgcctgcctggctgctctgcttttgcttgtgtcgtgtagctggggggctccctgttccaagcggcgcatggctgcgcctgctcgcgcgcgcgcgttcgttgcccctgacgtcgcgctcgtcgcctagctacccatccataaaggctgcggctggtttggtcagcacgagctgtcgcgataagcttctgaccatttgttcctcttgctgtgcctgtgcactgtgcagtcgtgagtcgtgaccatgcctgtctttggagtaaagcgagatcttgtttgggagtagtagagatgttatgcttcagcagtgaaatgaaaataattattaggaggaatcagcgcaac

SEQ ID NO: 124111 - DNA, 201 bp, Zea mays
  Clone ID: MRT4577_4466C.1
ggacggggactgacattatgaaaatgaacacgcaaatacccatcacaagtaagtaaatatatccgaaacatatataatgcacataatcctgcagtaaaagaggctattatctccaacaagggcgattactaccaactattactaaggattaatggggggggcggaacaagcaatatgtggaataccacaaagagaaagagc

SEQ ID NO: 124112 - DNA, 935 bp, Zea mays
  Clone ID: MRT4577_44670C.1
ccggcttcggcccgcgaaccgggccctctatccgcggcccgagctccgctctccccgtcttcggcgtcgccgccgccaccccaactggcaccaccccttctccggctatcccgtcattcccatctgctggcccggccacctcatcgttcccctctgctcgcccgaccaccccgtccttcccctccgctcgcccggccaccccgtcctttccctccactcgcccggccaccccggcctccccctccgctcgccccggcaacccgtccttcccctctgtgcgccctgccgccccgcgcttcccgagccatcagccccagctcgccgcggcggatacagcctctcgctcaatgcctatacccgtaccctccgcacgtccgaccgctggtgcttccccgcgcttcccgagctctcgtcctgcactcgacccaggtgtgaccgctgccactggtcgccatgttgctcgacatcttcagccacagccgagccataccatccgtaagcaggtccttcaatcctcttatttcttcaaggaacagggccccatcacctgtatcaaatatgcgcacagattctcctgcagattacgataatggcatggaacaaagaaggttggtgcactttgcagacccattgtttgaaaatggaagtttgcaatcttcagagcaattgaggatgcggccttccgagaacatgaggtcacaaacttcaaccaaatcaccatcaaacatagccagcaagtttagacatccatcagacttccaagatcatcatcatgtgcagattgttgatcctcgtgctaatgtgtataagtgagtgctttcgttcaattttcaccatatttgtactgatactttttatattcggttattgtgtcattacaaactgaccagaaaatgaatgttataattactctagccattggttatactttcagt

SEQ ID NO: 124113 - DNA, 300 bp, Zea mays
  Clone ID: MRT4577_44671C.1
agctctgattgttttgttccgctacatatcgcttgattatggccttcgtagaaagagcgtaactagaacagatcatgccagtcattcactcgtcaaaacttgaggtactgatgtaaagaaagtcattcatcagactgaaacggatggaataatagattggaggagcaaggttaactcgcctccagttgaagcagcattcgaacagttcacaaggcaccttatctcagaatgggtaacagatctgtggtactcgcgcgtaacacctgacaaggaaggtccagaggaactcatcgatgtagt

SEQ ID NO: 124114 - DNA, 328 bp, Zea mays
  Clone ID: MRT4577_44672C.1
aggggtatgtttttttattttagtgcattattacttttcttttttacagacccccaaacccaaaggggtggaattcccatgaaaccaattggggagtttcttaccggaacaccagtgtttaaaaggtgcaaacccccccacccaaatctgataaaaaaaagggtcctttccttttttcacatgttcaacaggatacggggatttcagcgaaaacaggtaaaaagacttgtggggggaaaaatccccttttgtttagaaaaataacaaaatttctaaaactgtggcccctttgtccttcaaaccggggtaggaccgttttccttttaag

SEQ ID NO: 124115 - DNA, 159 bp, Zea mays
  Clone ID: MRT4577_44673C.1
ttatattttttttttttgtttcaaaacagcgagggaataatcaatattaagaatttcctacattccactgtccttttgtccatagatgaaataacactgcctactgctaatcgacatatactggatgctacagcaggtgtctaatttctctacaatcag

SEQ ID NO: 124116 - DNA, 243 bp, Zea mays
  unsure (1)..(243): unsure at all n locations
  Clone ID: MRT4577_44674C.1
ancaacaatccacactttttttaataaaacaccacacaggccccccaaaagagcaaatttaaaacgcatccgggggcccacaaaaaacccctgcacataattcaatagaccaaacccaacaaaaaaaaacaactcattccttacatctcctccttttaccaaaaaaatgagccaaatttaccaacaccatccagcctaaaccctataaaccccaaataaaacaaacttactaaccaccttcat

SEQ ID NO: 124117 - DNA, 271 bp, Zea mays
  Clone ID: MRT4577_44675C.1
ccgcagacaaaacccaaacggcaagatctaagctcagcttttccattttcatggtctagtagcttgctttgggctgggggcgccggtcgatccgacgcaatcgtcatgcatcatctctctatcttgtcgttacgctgatcataatttggtatatttgccattccgctattgtgtactctttggcatacatacaataattaaaatggcgttgcgtggctctcatataaaaaaaaaaaaataaaaaaaataaaaaaaacacactaaaacaagg

SEQ ID NO: 124118 - DNA, 1215 bp, Zea mays
  Clone ID: MRT4577_44676C.1
gctgtctcggaagactctagctaggagcacgccgcctacgccatcggccgtccacagcaccccgtgctccggcttctcgctccggcgccgtgtccgccggcacctggtgctagaggagcagcgcgctgggcatcgtcacccgccagcggttgccgacagcctccggcggcgccagctggaggagagggcggcgccggcgccacctcgttcctcagtggctagccggaggaagtggtacccagctaacccgcccttgtccaggctcccaagcttcctgtagccaagactcaggcccatcagcgagggtttgccaccatcaaacgagtgcactgtacacgttcgtagcccgggtgagactgcggctccatattaagtcgccgagctctgaagaatctagctaggagcaggccgcctacgccatcggccgtccacagcaacatgtgctccggctcctggttctggagcagcagcggcagcggcaaggagcacccgtctcttgtcgtcgtcaacctcgagcggcagctaaagaagacgctggccgtcaggagaaggaggaggttgaggctgaggaggttgcgagccggaggagcagaggccatggagatggtgaacctgaagctgtatctggagaaccggtgcatcatcgcagagaacgagaggctccgggagagggccagcgcgctccgccgcgagaacctcgcgctgctccagaacctgtcgtccaggacggcggccgtgccagagccaggagcgggagctgcgtgaggttgctgcttcgatcctctgcctgcctgcctgctgaacatgaagtagcgagctcgcgtcaccctcgtcgttggtgcttgtgctacttgtgtggacaggagacaggccagtgaactcgtagccctaggaggccatctgcttggctgctccgccatgtctgtgtggctctgtgctcaactgctcatacataaaccgccaggttcctggagctctcttggggtgctctgcgccatggtgtctgtacattataagtgcgcggattaactagattttgttggcaagaactaaaaaatttgatcatataagaacactctcagggtgctcagtgccatggtgtctgtacattataagtgcgcggattaactagattttgttggcaagaactaactcttttggtcatataagaacacggtcaagttaattattaaaaaaaaaaaaaaaaaaccttag

SEQ ID NO: 124119 - DNA, 354 bp, Zea mays
  Clone ID: MRT4577_44677C.1
caacatttatctcatagggtcatggtcaattttttttttttcctcatagattcacccagaaatatatatccaacaatgccaacatcaaaagaaacccatgaatcagcatctttacactagcaaactgtgagccaacaaaagaaacccgtcttgtgctaacactattacagaatgcactggttacaaactctaagtctctactcctgcactaaacaccaacaagtctaattctaccacctccacaacagtagactacagttgtactacccaaccaccagcgcactagtagactggacacacaactgaaacgacaaagtccttcataaaagcctgcatcattctaccctataaaaa

SEQ ID NO: 124120 - DNA, 1124 bp, Zea mays
  Clone ID: MRT4577_44678C.1
cttgccaacaaaatctcgttaatccgtgccgcgcacttataatgtacagacaccatggcgcagagcaccccaagagagctccaggaacctggcggtttatgtatgagcagttgagcacagatcacagacatggcggagcagccaagcagatggatgatacctagggctaggagtccactggcctgtgtctcctgtccacactccacacaagtagcacaagcaccaacgagggtgacgcgagctcgctacttcatgttcagcaggcagacaggaaggcagaggatcgaagcagcagactcacgcagctcccgctcctggctctggcacggccgctgtcctggacgacaggttctggagcagcgcgaggttctcgcggcggagcgcgctggccctctcccggagcctctcgttctccgcgatgatgcaccggttctccaggtacagcttcaggttcaccatctccatggcctctgctcctccggctcgcaacctcctcagcctcaacctcctcctccttctcctgacggccagcgtcttctttagctgccgctcgaggttgacgacgacaagagacgggcgcttctcgctgccgccgccgccgccgctgctccagaaccaggagccggagcacatgttgctgtggacggccgatggcgtaggcggcctgctcctagctagattcttcagagctcggcgacttaatttggagatgaagtgttccaagggcttcaaggctatatataaagttagatctcgcctcacctcgcctctcctcgcctcagggctttggtggtcgctttaggttttctgtttggtggtgcatgcacgcattggcgcgcgcgacgcatgtgaggcgagagagagagagagatggaggcagcagggcatctagcatgcctcctctccatcagggagcaggggatccgccatgccatggtgcagtggctcttccgcgcgttatatcgatcgagcagccgaccttggtcggcaaccaaacaataatgaggtatgagaggagttggagacaactgtccatggctgatgtgaggagagtacgagatcgagaaagaaaaaggacatcgcgattgagagtacaagaatgagtatcccggccggcctcgagg

SEQ ID NO: 124121 - DNA, 783 bp, Zea mays
  Clone ID: MRT4577_44679C.1
cggccgctcgaggcggctggcggggttccgattaaataaacacgccggagggagcggagaggggaaaaatctggccttgccctccgagagagcagattccgcaagctccggcgccgcaacaagctgcttcgcttcgtctccttctcgccccgcctcctcgccgtcgccaccagggccagggtttcctgctcggctccgagcaagccagttcctcgtctccggcgccattcccctcccccttgggctccgccgccggatccaacccctcaaccaccacaggacaggacagcgcagattctagaggtggtccatcagttggcgcaatgggcgtcgaggagcaagccgtgcagcaaccggacggtggcggcggaaagcctgatgccgccagcgccaagccaccgcctccggaacatggtcagcaaacaccaccgagcaacccccgtgcgtcgacctgcagcacggacaaggacgacgacggccacgccatctgccgggtgtgccaatgcacggagcctgacctgacaggcgcatctgctctgggtttcctaggcatcgtgccgccttcccctcacccatcctgcctcaaggacccgggcaacgacgccaccaagaatcccaccaccaaggatgcctccaacgctccaacatttctcgagttcataggccccgagggggagatcttcaagtgcgccaccgacatcgaatcaggccatttccgcccgcaggacgccatcgggaacctcggatgctcctgcagaacgagctcgccctcgcgcactacgc

SEQ ID NO: 124122 - DNA, 123 bp, Zea mays
  Clone ID: MRT4577_4467C.1
gagtcgcacaatgaccatgagcacatcgtcatcgccaagatggactcgagtgtcaacgacgtggaagtcgtcgcagggcacagctgtcccagactcgagttctttcctgccagtgcggagagg

SEQ ID NO: 124123 - DNA, 741 bp, Zea mays
  Clone ID: MRT4577_44680C.1
gacccccgaggtcggccgggatctccaattaagtcgccgagctctgaagaatctagctaggagcaggccgcctacgccatcggccgtccacagcaacatgtgctccggctcctggttctggagcagcagcggcagcggcaaggagcacccgtctcttgtcgtcgtcaacctcgagcggcagctaaagaagacgctggccatcaggagaaggaggaggaggaggttgaggctgaggaggttgcgagccggaggagcagaggccatggagatggtgaacctgaagctctacctggagaaccggtgcatcatcgcggagaacgagaggctccgggagagggccagcgcgctccgccgcgagaacctcgcgctgctccagaacctgtcgtccaggacggcggccgtgccagagccaggagcgggagctgcgtgagtctgctgcttcgatcctctgcctgcctgcctgcctgctgaacatgaagtagcgagctcgcgtcaccctcgttggtgcttgtgctacttgtgtggacaggagacaggtcagtggactcgtagccataggaggtatcatccatctgcttggctgctccgccatgtctgtgatctgtgctcaactgctcatacataaaccgccaggttgctgctggagctctcttggggtgctctgcgccatggtgtctgtacattataagtgcgcggattaactagattttgttgacaaaaaaaaaaaaaaaaagcgccctc

SEQ ID NO: 124124 - DNA, 564 bp, Zea mays
  Clone ID: MRT4577_44681C.1
gagaaaatgggaaaaaaataaaaaggggtgaaggttgtccttgttttccaagataacaactttaacaaggaaacctagccccagggggggggggccctaaacttcctgtttttataaaaggaaacaaacaaacccccaaaaagggaccaaaacgaggagccccctgaccaaacgacttcgggggccccgaaggggaaaccacatggggggggggggggggggagaaaggaaaacccctggggcccaaaagggaaagggaaaaaaaagttttggggggccggccacccccaatcacttcccggggggggcaacccctaaaaaggcgaaaccgaagccccccagggacagggggaccaaagcccccttgggactgaccaaatgtcacatgaaaggaacccccaaagccaaaaacccaaaaaaatgcccaagcccccgcggaggaagtccccccacccccccctgaacctttgggggagggccctgccccccccccccggggggcccaagggacccaaaattcccccggtttttttggaaaattaaaaaaacccttcccaaaccggg

SEQ ID NO: 124125 - DNA, 335 bp, Zea mays
  Clone ID: MRT4577_44682C.1
cgcaagggcccggatggtccacgcacaggtgtttttccaaaaagcttctcctgtccggaataatctatgatattccgaacagtcgacttagagtagttgtagatgaacttatccacctgacaaatgatcaactgggtaaactagttagtccataaggtttgtgatggtcgtcaaacaccaaaatcgattataggaaatgttgaggccatttccctttcaagaggaaaccgtgattcggttgtagctatccaaaaccaagtcggttccatagatccaataaacatgcaccagattaggatgtggatgatccgcaccacataaggatctcacaataa

SEQ ID NO: 124126 - DNA, 1086 bp, Zea mays
  unsure (1)..(1086): unsure at all n locations
  Clone ID: MRT4577_44683C.1
catcttccgnnnnnnnnnnnnnnnnggctgtgaattcggcaagagcaaggactccagcaggcagtccaagcagctggaggaggattctcaccgccaagatgagagagtgcaaacgacgcttgatcaaagaatttgaccgtatactcaaggatgaggagaaaaaggacactcctgaggccaacaagcagctcaatgacaagaaacagttcatgatcaaagaactcaactcctacgtaaccctgaggaaaacgtaccagagcagcctaaggggtaacaagaggatcgaactattcgatactggtaccgaccaagtggccgacaaatctccagttcaaatggcatcagaaatgtcaaatcaagagctcattagcgccggaaggaaacaaatggaccaaactgaccaagccattgagcgctcaaagatggttgtagcacaaactgttgaagttggagctcagactgctgcaactctgtcacaacaaacagagcaaatgaagagaatcggcaatgagttagattctgttcacttctcactgaagaaggccagtcaaatggtgaaagagattggccgtcaggttgctactgacaaatgcattatggcgttcctgtttctgattgtctgtggcgttattgcaataattgttgttaagatcgtcaacccacataacaagaacatcagagatattccggggctggcacctcccgccatgaacaggaggctgctgtccatcgacgccttaggactatgagcgctgtgaatggctgctcccctgcagcacagcgctgcgcagcgcatcagagttctcttaacgagccacgatatatgatttcacgattcttttgtgcctgtatattgtgtttatgttgtttgcgtccgcccattccttccctattgcattggtaagtagtagcttcaggttcctagcaccggcgttctgattgtctgtgtatacgcggtactggttgtggatgtgagatattcttcatggttgttagtaaaaatagaaacggctgtgggagaagaaacagtaaatgaatccatgtttctttaaaaaaaaaaaaaaaaaaaaaaaaaaaaaaaaaaaa

SEQ ID NO: 124127 - DNA, 301 bp, Zea mays
  unsure (1)..(301): unsure at all n locations
  Clone ID: MRT4577_44684C.1
cgcgttcgcgacaattaataaagcgcgcgcgcgctcttttagaggctcggagagctgantgagaccgcacatgctatggcgtccatgaccgtcctctctcatggcgttctgcccatcatgcgctccgccaacagggccaggacggccgtcgtcttcagggcgtccgccgaggcgcatgctcatgcgggccgccgcgcctttctttttctggttgccactggcatcctcggctgctccttttttttattcttttcacaccaagactgtcaagaccatcaagatcggatcctcaactcctccc

SEQ ID NO: 124128 - DNA, 958 bp, Zea mays
  Clone ID: MRT4577_44685C.1
gcacgacctggaatcttgggagtcaatcttggcaagaacaagactagtgaagatgctgctgctgattatgtgcaaggggttcatacattgtcacaatatgctgattacttggtcataaatatttcttccccaaatactcctggtcttcgcaaattacaaggtagaaaacaactgaaagatcttgtgaagaaggtgcaagctgcacgagatgagatgcagtgggctgaagatggacctccaccattgcttgtgaagattgcaccagacttgtctaagcaggatcttgaggatattgctgcggatgctcttgctcttaggttggatggcctgattatatcaaacaccacagtttccagaccatcgcctgcagataaacatccattggctcaggaaactggtggattaagtgggaagcctttgttggacttatctactaacattctcagggacatgtatatgcttacacggggcaagattcccctcataggctgtggtggcgtgagcagcggtgaggatgcatacaagaagatccgttccggagctacacttgttcaactttatactgctcttgcatatggtggtccagctcttatacccagaataaaggctgagctagcagaatgtttggaaagagacggtttcaaatctgtccaggaagcggtcggcgctgatttccgatgatccctggcggatcgctgacaaggtctgaataaccgttccgttaaagttcatgtgattttgatgagaagcaagcaactttttttttgtgtgtgggcacgatgcttgccaattccatttgaccggtacttgaaaagaaataccgggttgaaactttgctgggggtgagttgagtaatgagtacgcgatgagctgctgttcccaaaaaaaaaaaaaaaaaaaaaaaaaaaaaaaaaaaaaaaaaaaaaaaaaaaaaaaaaaaaaccccccacccccccgc

SEQ ID NO: 124129 - DNA, 330 bp, Zea mays
  Clone ID: MRT4577_44686C.1
ctgatgtgaaatttcttagaactcattttggaattctttttcacatctgcactaattcttaaattttttagcactacagggaagatctgttctttgaaacaggtgtatgagaatggctcaagtgggaacataccacaaggcatgtattaccgtaaactaattttcaaattacccttttttcctttctatgttcccggtacctgtggatcgactcattggtgattgtatcgacgaacgtgactacggaaccttctaaaatatttacttaacacacatggacatcaactacttataatgaactgttaattactgttccaatagcgtactgag

SEQ ID NO: 124130 - DNA, 553 bp, Zea mays
  unsure (1)..(553): unsure at all n locations
  Clone ID: MRT4577_44687C.1
gcacgagccaacgcgcaccagttcgtatcggctctgcccgacgggtacagcacccttgtcggcgacagaggcatccagctgtccggtggccagaagcagcgcgtcgccatcgccagggccgtcgtcaaggaccccaaggtgctcctgctggacgaggcgaccagcgcgctggatgccgagtcggagcgggtcgtgcaggaggcgctggaccaggcggtggtcggtaggaccacggtggtggtagcgcatcgcctgtccaccgtcagaggcgcggacgtcatcgctgtcctcaagaacggggcagtggccgagaaaggcaggcatgaagacctgatgcgggtgaagggtggaacctatgcttcgcttgttcagctaagctctacttcttcgtgatctccaaataattaattaataaggttagatgatcctcacatggattgggaaaagaattaataaggttgctactcaaagttctacttcttagcctttaatatcaattgggcaattaccaagcttcgcttgntgatatactgagttcggtcatcattcaaaa

SEQ ID NO: 124131 - DNA, 504 bp, Zea mays
  Clone ID: MRT4577_44688C.1
acctgttacactacaatgtcataaacgctgagaaaacccaagaatgaagaccgacaagatgcaacctgcatgcctgcttcagatatgacatcactcaccatcagtcctactaaacactataccattattacatgccacacctaaggcgcagaccttggaaccactcatgatgcactatctcctgcaatataatgcactatcacacctctgtgtccactgtcagctactttctggccatccttatgccccactatccttcatcgaacctaggtatgtattggggacatctagcacctaccagttcatccagcctccatcacgcttacggcgagaaactgtctatcattcaaccaactagcagccgttaactctgctgcttatgtacagcagcaacaactactacgattcagacagctagctgtggtgagccctgctaccttcttgaacaaccacagctgttgccgatctaccagcacggtgcggctaacgctggcaccctcttac

SEQ ID NO: 124132 - DNA, 272 bp, Zea mays
  Clone ID: MRT4577_44689C.1
ctcaaatcctatgctattcttggtactggacaacgagccacttgagtgcactattcagacttagactcttcatgatccctatcctcaaggcatattacaaggcatgtgaccagatccaaggccagcgatacgaagttgacatgtaccaagaagtctatgatgtccgtacatcaatatgatatacttcgcatcttattatgcttttctaacggccgatgcgctcaagatgtaaattcattacgcaataatctaccttgcatctatactttatt

SEQ ID NO: 124133 - DNA, 965 bp, Zea mays
  Clone ID: MRT4577_4468C.1
ggaccctcgaggccggccgggccggggcgggggcctcgggaagagtatcttttctgcttaacggcccgccaaccctggaatcggttcagccggaggtagggtccagcggccggaagagcagggccccgaggccggcggggccgggatcgcaaacaagctagctaatcacttgtcaagaacaagagctctctacctgcattggctagcgtgatccgcgaggtagctggctgcttgttgtgatcgagcaatggcgtccaaggcattcgcgctgttcctggccgtgaacctggtggtgctgggcgtagccaacgcctgcacgcccaactgttcgggcccctcgacgacgccgacgcccacgccgtcgtcgttcggtaggtgcccccgcgacgcgctcaagttgggcgtgtgcgccaacgtgctgggcctcatcaaggctaaggtgggcgcgccgcccgcggagccatgctgcccgctgctggaggggctcgtcgacctggaggccgccgcctgcctctgcactgctatcaagggcaacatcctcggcatcaacctcaacctgccggtcgatctcagcctcatcctcaactactgcggcaggaccgtgcccaccggcttcaagtgctgagcgcctctccgtctcatcgccttgcgctgcctcccttccattccatgcatattgcatggttccgtttcagtgacgcatggttccgtttgattgctttcccacgtacgagaggtactgcatgcatgcaacacatggccgtaccgtacgtgctctcgatttgtaatttcccagcctcttccgtccttgtgtgcatttgttgtaaagggctggcgatcacttctacgccggtgctaataagttccaatcaagtttcagtgttttgcatgcaggctctgcctacatatataactacatttttctacccgtgccggagagacaacagagcgggaatgacaagaac

SEQ ID NO: 124134 - DNA, 779 bp, Zea mays
  unsure (1)..(779): unsure at all n locations
  Clone ID: MRT4577_44690C.1
ccggccgggaacttcaaccatttatcttttggctagctagatccccttcgaaagcattgcttcaattgccgaaagctacaactctatcgcattacctgaacatatcacgactttcatctcgccataatgtctctcaagggcccctctcctcagcatcacgacggctccggtctgcgcatcggcatcgtccacgcgcgctggaactcgacaatcattgatcctcttgttactggagccaaggagaagctcctggcagccggcgtcaaggaatctaacattgtcattcaatcctgccccggctcttgggagctgcctatcgccgtccaacgcctcttctctgcttcccagatccagggcacctcaactggcggaccctcagctggcgaccttctggcttcgtctaccaccgatctcacttcgctctctgctccctccggtgctttcgatgccatcattgccgtcggcgttttgatcaagggcaagaccatgcactttgagtacattgccgagtcaacctgccaaggcctgatgcgcgtgcagcttgacaccggtgtgcccgtcattcttggtgtcttgaccgtactcaccgaggaccaggcaaaggcccgcgctggagttgatggcaagggtcacaaccacggcgaggactggggaatggcagctgttgagatgggggttaagaagaaaggagtgggtccacgntactatcgatggnnntaaaaagatagatacataacgcgaaattacnatggcagtacnnatcatacnagtcaatgcat

SEQ ID NO: 124135 - DNA, 321 bp, Zea mays
  Clone ID: MRT4577_44691C.1
tctctcttgcgatcacgcatacgtcctgttccgcatacactacttgcgccggttagggatgtgctgtacagggaagatggatagaaagagggcgaaatggcgaagcacaccaatcgttaagcgcaacgtgcactgaagaggcactgctacaactatgtcaagacatggtgaaagcatgcactaccaaagcagtgacgccgcatggaacgacaaaagaaggctgtgaagatatatcaacgagcaactggtgggacttttcgtgccaatggacaatgccagactgttaagaacaacatgaattctatggctggcagaggcttt

SEQ ID NO: 124136 - DNA, 510 bp, Zea mays
  Clone ID: MRT4577_44692C.1
acttagaattaacatacaataacccctgacggtggtaacagaaacgatcgatacgaactacatgctatatgctgcatgggactccgtgaacccctgaatgatcacagcgctaacaactgacacaaacggacgcttgcgcgcaacacacagctgggcaccaaccctcacgacacgaaggaggctgaaccgtgttgcctcggctcaacatcacgggagctaacaggataacttgaacgtgcgggccccatcgatcagttcctccatttcccgtcggagttgcagtagccgccgctaaggatgccaccgacgtaggcgtcgccaccaccaccgtaggcgccggcggcaccgtatccggcgccacagcctcagctcgaaccgctattactggtaccgccaccgccgtagacgccttcttcacgggaacgagcgtacgcaccgtcttcgtatctaggggcgccactgcaactggggcctcttgacggtgattttgcggccgtccagctccttgcc

SEQ ID NO: 124137 - DNA, 740 bp, Zea mays
  Clone ID: MRT4577_44693C.1
atcacctctttccttccttccaattcccgttcctacggacaggcagacacgcaacagcccgacgcgcatctcgctcggggagctccgccgccgatccgcccgcccgctcgccccctcactcgcccgccatggaggaagccaaggttgtggagaccagggatggaactatcgcagttgcttcagcgtttcccggtcatcaggaagccgtacaagatagggatcacaagttcttgtcgaaagctgtagaagaggcgtacaaaggagttgactgtggccatggaggaccgtttggcgcggtcgtcgtccgcaacgacgaagtaatagttgggtgccataacatggttttgaacaacaccgatccaactgcccatgctgaagtcactgcaataagagaggcttgcaaaaagcttgggaagattgagctgtcggactgcgaaatgtacgcatcatgtgaaccttgcccaatgtgttttggggctgttcatctatcccggatcaagaggctggtgtacggagccaaggcggaagctgctattgccattggattcgacgacttcattgctgatgctcttagaggaactgggttctaccagaaggccaacatggagatcaagcgagccgatgggaatggagctctgcttgctgaacaagtctttgagaacaccaaggagaaattccgaatgtactaatgtgtagcaaagacatggtagaatttcacagcatgaaagaccctgatgctc

SEQ ID NO: 124138 - DNA, 338 bp, Zea mays
  Clone ID: MRT4577_44694C.1
acaggttcatggttttgggcctgcgcacgcaaccgctactgataatgctaattttgtggcggcttcgaccgtggttgctgaaaatgattcggatgattccatgtctaagttttttgagtctgatgattctgggagttcggttgtgtggacggaggagtcttcggatgaggacttggattattttgcggccttggatgtggctgcggcggaggcttctccgcgtgtgatggatgctgaagttcttcctggtccgagtgctgggcgtatgcggcgaagggaggtggcgaagcgtagagtgagtgaggtggagagtggtcatcttcgtgtggatggggctg

SEQ ID NO: 124139 - DNA, 141 bp, Zea mays
  Clone ID: MRT4577_44695C.1
cccacgcgtccggaaagtgcttcagtacctgcctttcgaagcaaacggaagaggcgcaattaatcacgtttgcttctaaaccgctctttttcttcgctctaacaaagttttaacactaaattcctatgttctttgacatag

SEQ ID NO: 124140 - DNA, 307 bp, Zea mays
  Clone ID: MRT4577_44696C.1
ttgccaatgtgctgcagtcgagcaggcctgcgccatatctttaaccaatccaccggacatggcttatcagtgtggtcatctgacatgtgaggcatgtggccgaacactatcatcgtgcccattgcgtcccgctctgagcaccttgcgtgggaggttttacttctaagcctgttggggtcaggtgcgctggcaccaatcagaatggagcaggacttttggtgcacgaggactgcactacaatttcgagctggggcacatctcaatgtcatgataacgatgcatgtacagatactttttccgcgcctat

SEQ ID NO: 124141 - DNA, 750 bp, Zea mays
  Clone ID: MRT4577_44697C.1
tccgggacagcgcagaagaacacagcacccgcctgcctcgccgccgcaatggccgccgccgcctccgctgcgagatccttcctccggtccagcggctcatcgtctctccgcagcgcggtggccagagccgcctcgcgtgcgggaccgggaccggctccgctgccgaggcggatgcccacctctgccccccgtgtactcctaaggtcgccggtggaaatgagcagcgtgtgtctggagtccttgatgcccatgcacagcgccacggcttcagcgctcatgacgtcgcttctcgccgccccggcttgcaagggattcggttggctatcagaaggtcaagctgaaactagatgaacttcatgggacccaaaagatggatgatttgtcgttactggagatctgcagtgatggtatcttgtctggattatggatacctcgtgaatttaaagtacttggttggcgtctcagttaacatgttttgtgctctgggattgcagtttgtatgaaatttgcagaattgatcctgagatttattttggctggttagctgtcaaaaagactttggtcttgacgacttgcctgatcaagtagatctggaatgaataaacttaatagaagggttttcacaaaaaacaaaaaaaatcaaaaacaaaaaaaaacaaaaaaagcagaagagacacaacaaaaagacaaacaatccaacaagccgggtgtgctccttaataaaaaaaaaaaaagggcggccgcccaaaa

SEQ ID NO: 124142 - DNA, 490 bp, Zea mays
  Clone ID: MRT4577_44698C.1
tgggccgcgctgtgtctgggggctgaccccgacgagcttcgtagggagagtactacagctgccatgaccacgacgaagggtcacatcaacatggtggtgcataacacatgtagactccaccaagtgcacaagcaccggcacctgatctacatcaactgcgaggcgattgacaacgcgaggggcggagaggctcgatacggaggctgccgctatgtacaagaggtccttgaagtgctcctggcgtacttaacaaggcttaagagccggacgcgctgactaggtggcactgacgcattggacattgtcactgctggaaccttagagacatccatatactactgctccgtgatcgatgcccttggccacgcggactccatgaagaacatgatcaccggcacctcccaggctgattgcgcggtgctcatcattgactccaccactgcaggcttagcagctggcatctgtaaggacgggaagacccgtgagcatg

SEQ ID NO: 124143 - DNA, 547 bp, Zea mays
  Clone ID: MRT4577_44699C.1
accgggaccggctccgctgccgaggcggatgcccacctctgccccccgtgtactcctaaggtcgccggtggaaatgagcagcgtgtgtctggagtccttgatgcccatgcacagcgccacggcttcagcgctcatgacgtcgcttctcgccgccccggcttgcaagggattcggttggctatcagaagatggatgatttgtcgttactggagatctgcagtgatggtatcttgtctggattatggatacctcgtgaatttaaagtacttggttggcgtctcagttaacatgttttgtgctctgggattgcagtttgtatgaaatttgcagaattgatcctgagatttattttggctggttagctgtcaaaaagactttggtcttgacgacttgcctgatcaagtagatctggaatgaataaacttaatagaagggttttcacaccttttgcgttttagtctaagcgtagtatgttcaaatgctgattgagcttcaaaattatctcaatccacatggtttcttgaaaaaaaaaaaaaaaaaagcggcc

SEQ ID NO: 124144 - DNA, 1438 bp, Zea mays
  Clone ID: MRT4577_4469C.1
tttgtaaaagccaagggaggtccttgaggcataaggccccaagaacaggtccatcaatatctaggccccgcaaaggttttcattagaattcttccatgcgtcttggcagactccaggaatatagccttccccgagcacgctgacaaccgtagtataaaaaaaaaatcatatacacaagtaccactggtagatgcacatgcagcattgaatcacgttcagcaaacacgacctagcacgcagctggagatcagttaaaagtgcatgtcgtgcttgtaattgtaagtggagctgcaattttcgtgtcaccaactgatagcaacgcaagttagtgtgaggttgtcatgtatctgccaataatgcgcaagttctgaatgcaatctacaaattgattgtctcaagctccatgccccagctttgaatccataaccaacaagccatcctgaaacacccatcactttcatgcatgcctcatacagtcatactgtcctcactctgtccaaacggacgttctggctcttccgaggtgttggttccagtgacatgatcacctgcggcatagtcattcctcctgaaacaattatttctatgccttcacgaatagacaaattgggccttataatttcggcggagtttaccaaaaagatgtcaccaatatataaatgattggttggcacataaacactacacaattcttcatcacctttgtctgtctgaagaaccatggttgatgttatgaatccaaatgcatattcaccaacacggggatgactaatgattgctacttctttgaatgctgttgtattttgatctggtgaaacagcagtgctaacttgctttgatgcagagtatatgtgccttacaaagggcattttctttataaaccattctccaacccagaagacagttgaacccacccaagaagacacaaagattccaacaagaagtataaacaccagggaggtcaagaacccaaggccgaatatgtcaaaccccagttttgcatagagtgggctgaaaaaaccatcaacaaattggataaaccaccaagtgatgaagaatgtgacagcaattggcaaaagaactacacatccagtcataaattttcttgacacccagctttgaagaacagcaaagaatgccttgcgagtggacgtgccgggcgagctgggtcgcggcggcgacttggcggggtcctcggggtcaggcgccgccgcctggccgagtggcacgggcgcgtactccttgtcctccggcattgcgatcggcgggacggatgctgcttgccgaagcttacgcgaggttctcgcgagcggcgcagtgcggtgaggagtcgcggtctcggtgctcgacggggacaaggtggttggcttccgctggctgccagcggcaagaggcagctaaaccaaacagaaattttcccttttccgtttctttcgcg

SEQ ID NO: 124145 - DNA, 465 bp, Zea mays
  Clone ID: MRT4577_446C.1
cagtcacgtggttggggagtgtgcatctcaaagcatgcagtccaaaagctgaacggatcccctattgtgtgccaccgatggaaaaaaaacgtatcccaaaccttagcataagtcatggacgacggttatttcttgctgcaactacagagtccaagggctgacttgactatgcaccagcgtccgggggcactgtgccgaacaacaccgaccctggctctggaggagcttattgataccaatatgacacgggctaccggcgaggtcatgggagactaccgccatgactgtgtgccaacaatggcttccggtcctatgcatgagggacgatgcgtgccggcttgctagggcagtatctgcatggccaactgccccggtgccgtatcttactggaattccgagagtgccgctagcccgactgcgctgtccagcgctcttgcgaagacgtcgaggagtgcaacacgtaca

SEQ ID NO: 124146 - DNA, 356 bp, Zea mays
  Clone ID: MRT4577_44700C.1
atctccttcttatccgccgcatcgtaatataaattcatggtgcgctaaccccatcacaaaccaaaccaaaccacatcttagttctgatgtacccaacatccaacatatagctgctcaagcacaacttatggaaactcttacctaaaggcaactcatgactctagtatctgacatacagcaaaacttgaacaccacataccgtctaatctcaccttccaactgaaagagcagccctcagtgtgcctaactctttcctcctctacctatacagagaacagcattgctaacagagcacacatcaacactcatggagtggctcaaaacaggatttatgcttaaacaccccttgcacttaa

SEQ ID NO: 124147 - DNA, 526 bp, Zea mays
  unsure (1)..(526): unsure at all n locations
  Clone ID: MRT4577_44701C.1
acccagcgcagaagaaccagcacccgcctgcctcgccgccgcaatggccgccgccgcctccgctgcgagatccttcctccggtccagcggctcatcgtctctccgcagcgcggcggccagagccgcctcgcgtgcgggaccgggaccggctccgctgccgaggcggatgcccacctctgccccccgtgtactcctaaggtcgccggtggaaatgagcagcgtgtgtctggagtccttgatgcccatgcacagcgccacggcttcggcgctcatgacgtcgcttctcgccgccccggcttgcaagggattcggttggctatcagaagctggtaatgatgacgtgtgacggtctctagatggaaattagcagattattatcccgtcatctcagatcttcagatggatgatttgtcgttactggagatctgcagtgatggtatcttgtctggattatggatacctcgtgaatttaaagtacttggttggcgtctcaaanaaaaaaaaaaaaaaagaaaaaaaanaaaaa

SEQ ID NO: 124148 - DNA, 234 bp, Zea mays
  Clone ID: MRT4577_44702C.1
aattagctggcataacaacttcaatcaaacgtcgcaaagcatcttccatatactacatactacttgtacataaaacatggaatgatatgagcacttcgccgttgcccatcgaatggaaccacaacctgggcactgctgcaccagacatttggtcctctttgattaccggacacaacttttaccatcgccactgctttttttcaagattgaaccttgcagaagataagaagcctt

SEQ ID NO: 124149 - DNA, 755 bp, Zea mays
  Clone ID: MRT4577_44703C.1
cattgggaccctcgaggccggccgggaaaaaaataaaaaaaaaaaaaaaaccacagcgcagaagaacacagcacccgcctgcctcgccgccgcaatggccgccgccgcctccgctgcgagatccttcctccggtccagcggctcatcgtctctccgcagcgcggcggccagagcagcctcgcgtgcgggaccgggaccggctccgctgccgaggcggatgcccacctctgccccccgtgtactcctaaggtcgccggtggaaatgagcagcgtgtgtctggagtcctttatgcccatgcacagcgccacggcttcggcgctcatgacgtcgcttctcgccgccccggcttgcaagggattcggttggctatcagaagctggtaatgatgacgtgtgacggtctctagatggaaattagcagattattatcccgtcacctcagatcttcaggcctgtgattagtgcgatggaggtcaacttggatgaagactagactgctatttattttgccatctctgttgccttggttttgcccattataaatggaacatagagcaatgtagctttcgtcgctgttaatttatatgatgttattctagagcttgagcccagattattgtgtttctatttgtagatggatgatttgtcgttactggagatctgcagtgatggtatcttgtctggattatggatacctcgtgaatttaaagtacttggttggcgtctcagttaaaaaaaaaaaaaaaaaagcggcc

SEQ ID NO: 124150 - DNA, 456 bp, Zea mays
  Clone ID: MRT4577_44704C.1
tacactcgctggaatactactacatgatcacaaggctcattcattctagaattacctagggagaagcgcaggacgatgatagggtcgccgaaatcggtgttcaacatggccacaggtgtcaaacacgattaacagggtcaagctgacattcaccatctgattcacaataaggaaatccctggtcaaaaagaccatcatgtggggtgctctcctctgttacttttacttgttccccatttagcaggtcattggtcacacacctggccattgattcatgcactgcatgctggcctgcatagtttgtttctttaaataaacgatttataaaccgatcgaaatgctctaaaagcggcttgcatctctacacctagcactgaattgtgccgaactacaggataagactgatgatgttctggtccatgatctggatgctgacggaacatatgtacgacaata

SEQ ID NO: 124151 - DNA, 155 bp, Zea mays
  Clone ID: MRT4577_44705C.1
cagtcaaggttggtggacctctcagtatgttgtcaccttcaaaaccagagattggaacgaagtagatcttatgagggtgtgtatgcaaccttcttgaggtaggaagagacttgcttgacaatgtcatgatagcgggaactttgaatactgggggg

SEQ ID NO: 124152 - DNA, 315 bp, Zea mays
  Clone ID: MRT4577_44706C.1
gcccgacgtacccttgactgttccttttattgggctggcgatcgccgacacaaccatggcagaaaaaggcatgtggcttgctgccattgcttggtgaagccgtatatgaatgaatagctgctgtgctgtatactgaccctatcattgatggtggggacggcaggaaaaaggaaagctataacaccttgtgagcatcgttggaaaactgactcgctagcaccacttgtagaaagagcatggagcataacgagggaaagtatcttgctctccattgatgctctatggccgctactggataccactatctatgtggcg

SEQ ID NO: 124153 - DNA, 746 bp, Zea mays
  unsure (1)..(746): unsure at all n locations
  Clone ID: MRT4577_44707C.1
gggaaaaccgcacactccccgcctcccgccggccggtcgcccgcctaacgactcgcggtcaccgcctgcgggccaccgtccgcccccagctcgcttacgatattgtacgttcgtggcgcggagcaccgtggtgttggcctagtacgtcgatttcacggtgacttcaccaccattgccgcccagtggctgcagaagctccccgccagcaacaagttcacctacaactgcgacggccacaccttcagttacctcatagagaaaggatttagaatcccattaagtttactgctgctaccatttaaagggcagaactgccggtcttcaagctctttgttactcctgatcatctgtggcacaattgtcatcgggcaaaatgccatcagtttatctctacatccctaacattatcgggtattttaggatcatcataaatttcattgcatttgcggtttgctattccaacaaggctctctttgctgtcttgtacttcttcagctttgtccttgatggtgtggatggttggtttgcacggaagtttaatcaagcatcaacatttggagcagtgttggacatggttacagatagggttagcactgcttgtttattggcccttctttcccagttntacagacctggtttagtcttcttgatattgctcgggttggatattacgagccactggtttcagatgtacagttctttctttgtcaggtagactagccacaaggatgtaaaacacacagggc

SEQ ID NO: 124154 - DNA, 1410 bp, Zea mays
  unsure (1)..(1410): unsure at all n locations
  Clone ID: MRT4577_44708C.1
gggtacctcgctcgaggccgggccgggtttgccgttttctccctttacacgctcgattccccccgccgtttgcacgggggccaggtgcctgcattactgggtccgggcctagcgtcagcgcaaccgaacacgccggcgaccgctgccgcccttctcccagctgcccaggtcttcgtcgggccctttgcctgcggcgtcggcgacgagcgcctgccacaccaggaatcccgttaagtttatttatgctcaccaatttaagggcagaacttacggacctcaagctcttggttactcctgatcttctctaggcgactaggcacaattgccctctggcaaaatgccatcagtttatctttacatccctaacattatcgggtattttaggatcatcataaatttcattgcatttgcggtttgctattccaacaaggctctctttgctatcctgtacttcatcagctttgtccttgatggtgtggatggttggtttgcaaggaagttcaatcaagcatcaacctttggagctgtgttagacatggttacagatagggttagcactgcttgtttgttggcccttctctcccagttttacagacctggtttagtcttcttgatattgcttggattggatattacgagccactggtttcaaatgtacagttctttcttgtcaggtaagactagccacaaggatgtaaaacacacaggcaattggcttctgaaattatattatgggtacaggccattcatggccttctgctgtgtttcttgtgaggttttatatattttcctgtttctctttgctgatgaggagtcaacaagcttgcttagtgtatgcaaaggcatcctgaaccaaagtcccgtcgttatcttggtgtttgtttccactctagttggctgggcagtgaagcaagccaccaacgtcatccagatgaaaactgctgcggacgcatgcgtggtgtatgatctgaagcgcagcaaatgaagcatgaaggcagcttcacggtttagtatcgacatatccaagggaaaactctgcgagggggcgggctacgtcttgcgtgccttgacatctttctgatgatgcggtcatatgtgggaccaggggatgacatgccgtggccaatgcaaacaattgttttgtgaaagcagcggcccgttaagttgttgtcagtgtgagagtggtgatgcgatcatgatccnnnnnacctagagtagctcccctttgtgttagcctgaacgatgttttgcaagccgcatgttccgaactctaggattatttggattacaaaacttacatattccatcctcaaggccagttccctcgagagttcgatagttacttatagtcgctnnnnnnnnnnnnnnnnnnnnnnnnnnnnnnnnnnnnnnnnnnnnnnnnnnnnnnng

SEQ ID NO: 124155 - DNA, 310 bp, Zea mays
  Clone ID: MRT4577_44709C.1
caacctcgtcttaccatgacactgatcccgtacaacacttcccttaccaacctcaatttcatcgcattacatccgactcttaccacgaagcctaccatcaacatatactatcacaccaaccccatctactccattatccttctcaacttgaaaatgacactgccaccgacgaaccccaattactactaccatcactggatcaaggacattcactaaatcactatcatcaatgaccagcaaggtcacccagcgttctcactgatgaacaagacaaccatcaatgccatcaatcactcgctactgcaattcc

SEQ ID NO: 124156 - DNA, 129 bp, Zea mays
  Clone ID: MRT4577_4470C.1
gcgaacgttcggtcaatattttggacaaagaggacagcaatactgaggggggcctgaggaccactctctcttatagcctccaatatatgcctgttgacccatctccaccgtacctcaggggcggccact

SEQ ID NO: 124157 - DNA, 2916 bp, Zea mays
  Clone ID: MRT4577_44710C.1
atgtctgaagttgctaagaaggctgctgctgagatgaagctaagtcttgatgaagagaagaacttagggtttcttatagcgatgtcgaagaccaacacagaaaagatcaccaaggagattctggaagggctgtctgaagatactggtgacagtgaaagttatgatgtggacagcggtggcgaagactccgaagatcgcccctggcgaccaagccattcagtttatggtaaatcaactatcaaagagaatcatcttgttaatatgagaggaaggtatttccgggatgtgtccgttgtgagggccgacgaaggggagaagacttgcccacaccccgaagagaatgaagtcgtagtgttccgaagctttttaaaggctgggctgcgatttcccttgagcagcttcgtcgtggaggtgctgaaaattttcgaagtctaccttcaccaacttacccccgaggcaatcataaggctgaacatcttcgtgtgggccgtgcgaagccaaggtttgaagcctgatgcaaaaagtttctgtaatatgcacgaattatcatacgagacaataccttggggtaaggaacagtatcacaataactttggctgctacagttttgtttctcggtctgggtcaagctgccccgtgccaacttttcgaaagagatggcccagcggctggatgacagaatggttttatgtaaaaaatgatctgaaagcacgagaagacatcaaaggtataatcatgcgtcctatttggcaaagcttcggccttcgcaggccgaaggttgaaatgaaggaagccgccgaagaatgccaaagggccttcggcgttgtctgttcttttataggaacaagggacttagtacaagagcatatcgccttcagggtgtggccgcttgcggagaaatgggaaatgccagaagaaaccattaaagaggccgacgaaggtggacttatcagatttaagtacacttttaaatttggagataaatttattgagccagatgatgagtggttgaaaagcattgacaatttaagtgatgagctgcttgggacctactcgaaggccgaagatactgcaatgtcagcagccttcggaggccgaaaaaagaagagactgaatcgggtatttgatgccatcgggtttgtctaccctgactattgctatcccattcgaaggcagaagagaaaaaatacaacctctgcaaaagaagaagctgcagctgctcctagcgagccagaaccggaaaggaagaagataaaggttcttacgcatcggccgcgctatattgaaccagcttcggtgcctgagtttaccggagaaacttcttcggcatccgaagctgaaaaaccaacagagccagctttactgccagaagtcgcagaaacggccgaagtgccaataaagtcaaaattggaacaatcaaaaattttgttatcaggaacagaagagaaggccgaagcgccgtgcacagaaaaaatggaagaggtaaaagaagcaactgagggctccaaaacatcagaagttttgagtcctgcagcaaacattgggacatcaaaaaatgaaaaagtgcaagccgtaactccgaaaagaaagagaatggctaatgtgctagatgtactggaaacactcaaatcttcaagcacacctccgaagaaggctactggcactcctgaaacagcaactgcaattcctggttttacagctccagagcaagagattgaagccgaagctgggccctcagagcccgcaaagggaaaacccttggaaaaaaaagaagaacaagaggcccagcattatgcccaaaaactgaaatatccaaagggggcgttaatatttaatggcagtggagaagaagacttcttgtattgtcttcccgacagcaaggaaatttccgtctgccgggagatgagcaagagcttcggattcccgactttagaagacgggctctcagtgctgtcgaagaacgatctggccgacagcctggcttacaatagcttaaagggcttaatacttagcaatgctctcagagcacagaaagatgctgaagacgaagggtgtactatagccctgagcaaccttcgttccgaagtaattgaactgaggaacgaaggtctcgaaaaagacaaaatattatactcattgataaataaaataaaggaggacgaagctgcttttaaaagtcaggctgaagctcagaaacgcgaaattgaagaccttcggaaacaactggccagagccaaggaagaacgcatacttgaagaaacaaagcgtaaactcagcgaccaatgggcagatcacctagaagtgactgtcgaagagcttcgttcgtccaaaaagagatgctacaacaaatctatagattgtgttaaaaaattaaaggctagcttcgccaaggtcggcgcattctcaagtgaggaaaacttttcaagaggcaatcccgaaggtgtcattgaatggattaaccacgaagccgaagccttcgaagaaattttaaatagccgaggagatatatgtgccttctctggcgccagagggattgccactatcttagagaaggagggctgcgaacatgtaaaaattttagcacagtccgaagctgctttgtcctttgaagatacaaaagatccttcggccgaagctagcataattggtggaaagttttttactgatatctgggataatggtggccgagagatggccggagaaattattcgaagaagtgaaaggggcattcacgatgctagagaagtagctgaggccgctaaaaagagcgcagaggccgaagatcctactgaagtatctccgggtgctcggcctaggggtgatgatgaaattaaaaagatggctgaagctattatggatgaagttgtcgatcgattgttgaacgaagctgcagaagtggtacttagggaagactaa

SEQ ID NO: 124158 - DNA, 769 bp, Zea mays
  Clone ID: MRT4577_44711C.1
cattgggtacctcgaggccggccgggaacatatatccccacacctgcgtatcgcgctgcccaccgcacatccccgcctcccgccggccgcccgcccgcctgacgactcgcggtcaccgcctgcgggccaccgtccgcccccagctcgcttacgatattgtacgttcgtggcgcggagcaccgtggtgttggcctagtacgttgatttcacggtgacttcaccaccattgccgcccagtggctgcagaagctccccgccagcaacaagttcacctacaactgcgacggccacaccttcagttacctcatagagaaaggatttagtgagtagctttcatcccgtcgctccgctccgccttattccatctgaatctgcgccgccgcgggctcgaatcgggttcggcttgcttggatctcgaggggttcgcctcgatccgctagatggtatcaggttcgttcggtagtctcgtgttattctggatttgatgggattgtactgcgttcagcgttctcatgccttatctggggataaaagcactggcatatatttctcagatggatccatgcgggatatgttgctcctgtttttaatcatggaaagggttggctattttgccgattctattggtgttagttgatgccgtggctttgtagctctattttgctttcatttgctattcgtttgtcacataagaaattgcggcatactatagtagtattatgtgataagggatgttgtaatatcaagttctcagcgactgatatgagtc

SEQ ID NO: 124159 - DNA, 1256 bp, Zea mays
  Clone ID: MRT4577_44712C.1
cgaaaaatgaagggaatctgacctggagaggatggcggccaggtgaggctgctcaaggaatttcacagcaaggcagggatggccggatttgggacaaagaagctctgggcgagcaggggttgggcgaattggatctgccctgcagctgtactgcgtgggggagagctttctgctcctaggaatggaggggaagggtcagcgtgtgccatggcaaagctccaagcggggaggagaaagatgactaatcggatgccatggatgggggagagcaacgctgtactgaacgcgcggccaaaggtgaataggcgcggtcaccacggttccattgtcgagcaggacctgagggaataagatgcgcgaacaggccctcagatcgatgccctcgccgtacgagcggagacgtagtggagcgaaaggtggtcgtgaggaggggctaggcctccgactaagcaggatgacgagggatggcagcactcagacttgacggagaagaaggtcggcgtggggccgaacttggactgcaggaacagcagggggaggaggtcgacggctactggctgagggagacggtgggaaaaaaaggagcctgagctagtgcccacaggtccgaggggaggcagggacgctcggtcctgggcttgccgtgcgcaggttaggggaaggaacagagaagggaggcgccatgggaggaacacaggggcaggtgaccatggggatatcagcaggggaggcatcgatgagatggaggatcggactagctcggcactgctacagcgcgccatagggagcaggagcgaggaggggcaccgtgaagcgaggcagttagccgccgacgagatctccatggacgagcaggaaaggcatcggccgtcaatggaaagctgggattggatggagcagggtagcgccaagagatggtgccctcgccagcactccaccatggaggagcagaggcagggggccgagagggagaagcccgagctcgtagggagagacacagcaagagcgcgcaccggccatggggacctcctgctcggcaaatcccacgcacgagcagagggagtcgcggcgcgctactgatttccatgggggaggaggaatcctgctgggggaaggtgccgagggaaagggtggcgccataggagaagccatagctcggctagggaaggagctgggcggccatgagcttcgatgtccgaggagtcagggaggcggagtcgctgcctgccgccgtgtgggagagaggggagattggt

SEQ ID NO: 124160 - DNA, 2694 bp, Zea mays
  Clone ID: MRT4577_44713C.1
atgtctgaagctgctaagaaggctgctgctgagatgaagctgagtcttgatgaagagaagaacttagggtttcttatatcaatgtcgaagaccaacacagaaaagatcaccagggaaattctggaagggctgtctgaagatactggtgacagtgaaagttatgatgtggacagcggtggcgaagactccgaagatcgcccctggcgaccaagccattcagtttatggtaaatcaactatcaaagagaatcatcttgttaatatgagaggaaggtatttccgggatctgtccattgtgagggcggacgaaggggaaaaaacttgtccacaccctgaagaaaatgaagttgtggtgtatcgaagctttttgaaagctggattgcgattccccttgagcagcttcgtcgtggaggtgttgaaaatcttcgaagtctatcttcatcaacttactcccgaggcaattataaggctaaatatcttcgtgtgggccgcgagaagccaaggtctgaagcctgacgcaagaagcttctgtaatgttcatgaattattatatgaaacaaagccttggggcaaagaacagtaccataacaactttggctgctacagcttcgtctctcggcccggggcaagctgtcccgtaccaacctttcggaagagatggcccggggattggatgacagaatggttttatgtgaagaatgacttatcagcacgagaagacatcaaagataaatttattgagccagatgatgagtggttgaaaagcattgacaatttaagtgatgagctgcttgggacatactcgaaggccgaagatactgcaatgtcagcagccttcggaggccgaaaaaagaaaaggctgaatcgggtatttgatgccatcgggcagaagagaaaaaatacaacctctgcaaaagaagaaactacagctgctcctagcgagccagaaccgaaaaggaagaagataaaggttcttacttatcgaccgcgttatattgaaccagcttcggtgcctgagtttaccggagaaacttcttcggccaccgaagctgaaaaaccagccgagccaactttgctgccagaagtcacagaaacagccgaaataccaacgaagacaaaattggagcaatcaaaaattttgttaccagaaacgaaagagaaggccgaagcgccattcacagaaaaaatggaagaggtaaaggaagcaaccgaggactccaaaacatcagaagttttgagtcctgtggcaaacattgaaacagtaagtaatcaaaaagtgccagcagtgactccgaaaagaaggagaatggctaatgtgctagatgtgctggaaacgatcaaatcttcaagcacccctccgaagaaggctgccgtcactcctgaaacaacagtcgaagcttcgggttctaaagctccagagcaagatactgaagccgaagctgggccctcagggccctcaaaggcaaaaaccttggaaagtgaggcagaaaaaataacaaagccaacttttgctgaaggaactggtgttgttacccccgaagcatccaaaattcgtgattatatttttcgtcatgcttcggggaaaaaattaacagaaaaagaagaacaagaggcccaacactatgcccaaaagttgaaatatccaaagggggcgttgatatttaatggcagtggagaagaagatttcttgtattgcctccccgacagcaaggaaatttctgtctgtcgggagatgagcagaagcttcggatttccaactttagaagacggactttcgggcctgatactcagcaatgccctcagagcacagaaagatgctgaggacgaaagatgtactatagccctgagcaaccttcgttccgaagtaattgaactgaggaacgaaggtctcgaaaaagacaaaatattatactcattgatagataaaataaaggaggacgaagctgctttcaaaagtcaagctgaagctcagaaacacgaaattgaagaccttcggaaacaactggccagagccaaagaagaacgtatacttgaagaaacaaagcgtgaactgagcgatcaatgggcagatcatctagaagtgactgttgaagagcttcgttcgtccaaaaagaaatgctacaataaatctgtagattgtgttaaaaaattaaaggctagcttcgccaaagtcggcgcattctcaagtgaagaaaattttttgaggggcaatcccgaaagtgtcattgaatggattgaccacgaagctgaagccttcgaagaaattttaaatagccgaggagatatatgtgccttctctggcgccagagggattgccaccattttagagaagaagggctgtgagcatgtgaaaattttagcacagtccgaagctgctttgtcctttgaagatacaaaagatccttcggccgaagctagcataattggtggaaagttttttactgatatctgggataacggtggtcgagaaatggcaagagaaattattcagagaagtgaaaagggcatccatgatgctagagaagtggctaaggctgttaaaaagagcacagagcccgaagatcctactcaagcatcttcgggccctcaggctaaagatgacgacgaaattaaaaagatggccgaagctatcatggatcaggttgtcgatcgactgctgaacgaagctgcagagatagtacttagggaagactaa

SEQ ID NO: 124161 - DNA, 3036 bp, Zea mays
  Clone ID: MRT4577_44714C.1
atgtctgaagctgctaagaaggctgctgctgagatgaagctgagtcttgatgaagagaagaacttaggatttcttatagcgatgtcgaagaccaacacagaaaaaatcaccaatgagattctggaaggactgtctgaagatactggtgacagtgaaagttatgatgtagacagcggtggcgaagactccgaagatcgcccctggcgaccaagccattcagtttatggtaaatcaactatcaaagagaatcatcttgttaatatgagaggaaggtatttccgggatttgtccattgtgagggccgacgaaggggagaagacttgtccacaccctgaagaaaatgaagtcgtagtattccgaagctttttgaaggctgggctgcgattgcccttgagcagcttcgtcgtggaagtgttgaagatttttgaagtctatcttcaccaacttacccccgaggccatcataaggctgaacatcttcgtgtgggccgtgcgaagccaaggtctgaagcctgatgcaaaaagtttctgcaatatgcacgaattatcatacgagacaataccttggggtaaagaacagtatcacaacaactttggctgctacagctttgtttctcggtctgggtcaagctgtcccgtgccaacttttcggaagaggtggcctagcggctggatgacagaatggttttatgtaaaaaatgatttgaaagcacgggaagacatcaaaggtataatcatgcgacctatttggcaaagcttcggccttcggaggccgaaggtggaaatgaatgaagccgccgaagagtgccagagggccttcggcgttgtctgctcttttataggaacaagggacttagtacaagagcatatcgccttcagggtgtggccgcttgcggagaaatgggaaatgccacaagaaaccattaaagaggccgacgaaggtgggcttgtcagactgaagtacaccttcaaatttggagataaatttattgagccagatgatgagtggttgaaaagcattgacaatttaagtgatgagctgctcgggacctactcgaaggctgaagataatgcaatgtcagcagccttcggaggccgaaaaaagaagagactgaatcgggtatttgatgccatcgggtttgtctaccctgactattgctatcccattcggaggcagaagagaaaaaacacaacctctgcaaaagaagaagctgcagctgctcctagcgaaccagaaccgaaaaggaaaaagataaaggttcttacgcatcagccgcgttatattgaaccagcttcggtgccggagtttaccgggaaaacttcttcagccaccgaagctgaaaaaccaatcgagccagccttgttgccagagatcgcagaaacggccgaagtgccaccaaagatagaatcagaacaatcaaacattttgttgtcagaaacaaaagagaaaaccgaagcgccgctcacagaaaaaattgaagaggtaaaagaagcaactgagggctccaaaacatcagaagttttgagtcctacagcaatcattgggacagcaaaaaatgaaaaagtgccagctgcaactccgaagagaaagagaatggctaatgtgctagatgtattggaaacgatcaaatcttcgagcacacctccgaagaaagctgctgttactcctgaaacaacagttgaaatttctggttctacagctccagagcaagagattgaagccgaagctgggccctcagagcccgcaaaaactttggaaagtgaggcagagaaaataacaaagccaacttttgaagaaactagtgttgttgcccccgaagcatcccccaaaattcgtgattatatttttcgtcatgcttcggggaaaaaattatcagaaaaagaagaacaagaggcccagcattatgcccaaaagctgaaatatccaaagggggcgttgatatttaatggcagtggagaagaagacttcttgtactgtctccccgacagcaaggaaatttctgtctgtcgggagatgagcagaagcttcggattcccaactttagaagacggactttcggtgctgtcaaagaacgatctggctgacagcctagcttacaacagtttaaagggcctgatactcagcaatgccctcagggcacagaaagatgctgaggacgaagggtgtactatagccctgagcaaccttcgttccgaagtaattgaactgaggaacgaaggtctcgaaaaagacaaaatattatactcattgatagataaagtaaaggaggacgaagctgcttttaaaagtcaagctgaagctcagaaacgcgaaattgaagaccttcggaaacagctggccagagccaaggaagaacgcatactccaagaaacaaagcgtgaactcagcgatcaatgggcagatcacctagaagtgactgttgaagagcttcgttcgtccaaaaagagatgctacaacaaatctatagattgtgttaagaaattaaaggctagcttcgccaaggtcggcgcattctcaagtgaggaaaacttttccagaggcaatcccgaaggtgtcattgaatggattggccgcgaagctgaagccttcgaagaaattttaaatagccgaggtgatatatgcgccttctctggcgccagagggattgccaccatcttagagaagaagggctgcgaacacgtaaagattctggcacagtccgaagccgccttgtcctttgaagatacaagagatccttcggccgaagctagcataattggtggaaagttttttaccgatatctgggataacggtggccgagaaatggccggagaaattattcggagaagtgagaagggcatccacgatgctagagcagtggctgaggctgctgacaagagcacagagcccgaaggtcaactagatccgactaaagcgccttcggacccccagccgaagggggacgacgaaattaaaaagatggccgaagatattatggacgaagtcgtgaatcggctcctgaatgaggctgcagaagtcgttttgagagaggattaa

SEQ ID NO: 124162 - DNA, 3027 bp, Zea mays
  Clone ID: MRT4577_44715C.1
atgtctgaagctgctaagaaggctgctgctgagatgaagctgagtcttgatgaagagaagaacctagggtttcttatagcgatgtcgaagtccaacacggaaaagatcaccaaggagattctggaggggctgtctgaagatactggtgacagtgaaagttatgatgtggacagcggtggcgaagactccgaagatcgcccctggcgaccaagccattcagtttatggtaaatcaactatcaaagagaatcatcttgttaacatgagaggaaggtatttccgggatctgtccgttgtgagggccgacgaaggggagaaaacttgtccacaccccgaagagaatgaagtcgtggtgttccgaagctttttgaaggctgggctgcgattccccttgagcagcttcgtcgtggaggtgctgaagatcttcgaagtctatcttcaccaacttacccccgaggcaattataaggctgaatatcttcgtgtgggccgcgcggagccaaggtctgaagcctgacgcaagaagcttctgcaatgtgcacgaattatcatacgagacaatgccttggggcaaggaacagtaccacaacaactttggctgctacagcttcgtttctcggtccggggcaagctgccccgtgccaacctttcggaagagatggcccggcggctggatgacagaatggttctatgtgaagaatgacctgtcagcacgagaagacatcaagggtataatcatgcgtcctatttggcaaagcttcggccttcggaggccgaaggttgaaatgaacgaagccgccgaagagtgccaaagagccttcggcgttgtctgctcttttataggaacaagggacttagtacaagagcatatcgccttcagggtgtggccgcttgcggagaaatgggaaatgccacaagaaaccattaaagaggccgacgaaggtgggcttgtcagactgaagtacaccttcaaatttggagataaatttattgagccagatgatgagtggttgaaaagcattgacaatttaagtgatgagctgctcgggacctactcgaaggctgaagataatgcaatgtcagcagccttcggaggccgaaaaaagaagagactgaatcgggtatttgatgccatcgggtttgcctaccctgactactgctatcccattcggaggcagaagagaaaaaacacaacctctgcaaaagaagaagctgcagctgctcctagcgagccagaaccgaaaaggaaaaagataaaggttcttacgcatcggccgcgttacatcgaaccagcttcggtgcccgagtttaccgggaaaacttcttcggccgccgaagctgaaaaaccaaccgagccagccttgttgccagagatcgcagaaacggccgaagtgccaccaaagatagaatcagaacaatcaaacattttgttgtcagaaacaaaagagaaaaccgaagcgccgcccacagaaaaaattgaggaggtaaaagaagcaactgagggctccaaaacatcagaagttttgagtcctacagcaatcattgggacagcaaaaaatgaaaaagtgccagccgcaactccgaagagaaagagaatggctaatgtgctagacgtactggaaacgatcaaatcttcgagcacacctccgaagaaggctgctgttactcctgaaacaacagctgaaatctctggttctacagctccagagcaagagattgaagccgaagctgggccctcagagcccgcaaaaactttggaaagtgaggcggagaaaataacaaagccaacttttgaagaatctggtgttgttgcccccgaagcatcccccaaaattcgtgactatatttttcgtcatgcttcgggggaaaaattatcagaaaaagaagaacaagaggcccagcactatgcccaaaagctgaaatatccgaagggggcgttgatatttaatggcagtggagaagaagacttcttgtactgtctccccgacagcaaggaaatttctgtctgtcgggagatgagcagaagcttcggattcccaactttagaagacggactttcggcgctgtcaaagaacgatctggctgacagcctagcttacaacagtttaaagggcctgattctcagcaatgccctcagggcccagaaagatgctgaggacgaagggtgtactatagccctgagcaaccttcgttccgaagtaattgaactgaggaacgaaggtctcgaaaaagacaaaatattatactcattgatagataaaataaaggaggacgaagctgctttcaaaagtcaggctgaagctcagaaacgcgaaattgaagaccttcggaaacaactggccagagccaaggaagaacgcatacttgaagaaacaaagcgtgaactcagcgatcaatgggcagatcacctagaagtgactgttgaagagcttcgttcatccaaaaagagatgctacaacaaatctatagactgtgttaagaaattaaaggctagcttcgccaaggtcggcgcattctcaagtgaggaaaacttttcgaggggcaatcccgaaggtgtcattgaatggattgaccacgaagctgaagccttcgaagaaattttaaatagccgaggagatatatgtgccttctctggcgccagagggattgccaccattttagagaagaagggctgcgagcatgtaaaaactttagcacagtccgaagccgccttgtcctctgaagatacaagagatccttcggccgaagctagcgcggttgggggaaagtttttcaccgacatctgggacaacggtggccgagaaatggccggagaaattattcggagaagtgaaaagggcatccacgatgctagggaagtggctgaggctgctgtcaagggcgcagaggccgaagatccgactaaagcgccttcgggccctcagccgaagggggacgacgaaattaaaaagatggccgaagatattatggacgaagtcgtcaatcggctcctgaatgaggctgcaggagtcgttttgagagaggattaa

SEQ ID NO: 124163 - DNA, 3036 bp, Zea mays
  Clone ID: MRT4577_44716C.1
atgtctgaagctgctaagaaggctgctgctgagatgaagctgagtcttgatgaagagaagaacttagggtttcttatagcaatgtcgaagaccaacacagaaaagatcaccagggagattctggaagggctgtctgaagatactggtgacagtgaaagttatgatgtggacagcggtggcgaagactccgaagatcgcccctggcgaccaagccattcagtttatggtaaatcaactatcaaagagaatcatcttgttaacatgagaggaaggtatttccgggatctgtccgttgtgagggccgacgaaggggagaagacttgcccacaccccgaagagaatgaagtcgtggtgttccgaagcttcttgaaggctgggctgcgattgcccttgagcagcttcgtcgtggaggtgctgaagatctttgaagtctatcttcaccaacttacccccgaggcaatcataaggctgaatatcttcgtgtgggccgtgcgaagccagggtctgaagcctgatgccaaaagcttctgcaatatgcacgaattatcatacgagacaataccttggggtaaggaacagtatcacaataactttggctgctacagttttgtttctcggtctgggtcaagctgccccgtgccaacttttcggaagagatggcccagcggctggatgacagagtggttctatgtaaaaaatgatctgaaagcacgggaagacatcaaaggtataatcatgcgtcctatttggcaaagcttcggccttcggaggccgaaggttgagatgaatgaagccgccgaagagtgccaaagagccttcggcgttgtctgctcttttataggaacaagggacttagtacaagagcatatcgccttcagggtgtggccgcttgcggagaaatgggaaatgccacaagaaaccattaaagaggccgacgaaggtggacttgtcaggtttaagtacacttttaaatttggagataaatttattgagccagatgatgagtggttgaaaagcattgacaatttaagtgatgagctgctcgggacctactcgaaggccgaagataatgcaatgtcagcagccttcggaggccgaaaaaagaagagactgaatcgggtatttgatgccatcgggtttgtctaccctgactattgctatcccactcgaaggcagaagagaaaaaacacaacctctgcaaaagaagaagctgcagctgctcctagcgagccagaaccgaaaagaaaaaagataaaggttcttacgcatcggccgcgttatattgaaccagcttcggtgcccgagtttaccggaaaaacttcttcggccaccgaagctgaaaaaccaaccgagccagccttgttgccagagatcgcagaaacggccgaagtgccaccagagatagaatcggaacaatcaaacattttgttgtcagaaacaaaagagaaagccgaagcgccgtccacagaaaaaattgaggaggtaaaagaagctactgagggctccaaaacatccggagttttgagtcctgcagcaaacattgagacagtaaagaatcaaaaagtgccagccatgactccgaaaagaaagaggatggccaatgtgctagatgtgctggaaacaatcaaatcttcaagcacacctccgaagaaggctgctgttgcttctgaaacaacagctgaaatttctggttctacagctccagagcaggaaattgaagccgaagctgggccctcagagcccgcaaaggcaaaagccttggaaagtgcggcagaaaaaataacaaagccaacccttgctgaagaaactggtgttgttacccccgaagcatcccccgaaattcgtgattatatttttcgtcatgcttcggggaaaaaattatcagaaaaagaagaacaagaggcccagcactatgcccaaaagttgaaatatccgaaggcggcgttgatatttaatggcagtggagaagaagatttcttgtattgtctccccgacagcaaggaaatttctgtctgtcgggagatgagcagaagcttcggattcccaactttagaagacggactttcggtgctgtcaaagaacgatctggctgacagcctggcttacaacagtttaaagggcctgatactcagcaatgccctcagggcacagaaagatgctgaagacgaaggttgtactatagccctgagcaaccttcgttccgaagtaattgaactgaggaacgaaggtctcgaaaaagacaaaatattatactcattgatagataaaataaaggaggacgaagctgcttttaaaagtcacgctgaagctcagaaacgcgagattgaagaccttcggaaacaactggccagagccaaagaagaacgtatacttgaagaaacaaagcgtgaactcagcgatcaatgggcagatcacctagaagtgactgttgaagagcttcgttcatccaaaaagagatgctacaataaatctatagattgtgttaaaaaattaaaggctagcttcgccaaggtcggcgcattctcgagtgaggaaaacttttcgaggggcaatcccgaaggtgtcattgaatggattgaccacgaagctgaagccttcgaagaaattttaaatagccgaggagatatatgtgccttctctggcgccagagggattgccaccattttagagaagaagggctgcgaacatgtaaaaactttagcacagtccgaagctgctttgtcctttgaagatacaaaagatccttcggccgaagctagcataattggtggaaagttttttaccgatatctgggataatggtggccgagaaatggccggagaaattattcgaaggagtgaaaagggcattcacgatgcgagagaagtagctgaagctgctgtcaagagcgcagaagccgaagatccgactaaagcgccttcgggccctcagccgaagggggacgacgaaattaaaaagatggccgaagatattatggacgaagtcgtcgatcgactcctgaacgaagctgcagaagtcgttctgagggaggactag

SEQ ID NO: 124164 - DNA, 238 bp, Zea mays
  Clone ID: MRT4577_44717C.1
cggacgcgtgggcgaacgcatgggcgggatcgtgctcagtcactagttcgtcaatctcgtctcacggttagacaacgacttgggcaacagcaaccgcattgtgaaggtgatcctcaatatgctcatgacccactgtacgggatttttctacctgcttgtaagggatggatgcagctagtgttcgcctaaaattaaagttcatagtactagccactgagtcgccagcttcatgcagagt

SEQ ID NO: 124165 - DNA, 2612 bp, Zea mays
  Clone ID: MRT4577_44718C.1
tgtcccgtgccaacctttcggaagagatggcccggcgactggatgacagaatggttttatgtgaagaatgacctgacagtacgggaagatatcaaatctataattatgcgccctatttggcaaagcttcggcctgcggaggccgaaggttgaaatgaatgaagctgccgaagaatgccagagagccttcggtgttatttgttcttttattggaacgagagatttggtacaagagcatattgccttcagagtatggccgctcgcggagaaatgggaaatgccgcaagaaaccataaaggaggccgacgaaggtagacttatcaggctgaagtatactttcaagttcggagataaatttgttgagccagatgatgactggctaaaaagcattgaaaatttaagtgatgaactgcttggggcttactcgaaggccgaagatactgcaatgtcagcagccttcggaggccgaaaaaagaaaaggctgaatcgggtatttgatgccatcgggtttgtctaccctgactatcgctaccccattcgaaggcagaagagaaaaaatacaacctctgcaaaagaagaaactgcagctgctcctagcgagccagaaccaaaaaggaagaagataaaggttcttacgcatcggccgcgttatattgaaccagcttcggtgcctgagtttaccggagagacttcttcggccaccgaagctgaaaaaccagctgagccaaccttgctgccagaagtcgcagaaacagccgaagtaccaacgaagacaaaattggagcaatcaaaaattttgctaccagaaacgaaagagaaggccgaagcgccattcacagaaaaaatggaagaggtaaaggaagcaaccgaggactccaaaacatcagaaatcttgagtccttcagcaattattgggacatcgaaaaatgagaaagtgccagctgcaactccgaagagaaaaagaatggctaatgtgctagatgtactggaaacgatcatatcttcgagcacacctccgaagaaggctgctgttacttttgaaacaacagctgaaatttctggttctgcagctctagagcaagaaattgaagccgaagctgggccctcagagcccgcaaaggcaaaaaccttggaaagtgaggcagaaaaaataacaaagccaacttttgctgaaggaactggtgttgttacccccgaagcatcccccaaaattcgtgattatatttttcgtcatgcttcggggaaaaaattatcagaaaaagaagaacaagaggcccaacactatgcccaaaaattgaaatatccaaagggggcgttgatatttaatggcagtggagaagaagatttcttgtattgcctccccgacagcaaggaaatttctgtctgtcgggagatgagcagaagcttcggattcccaactttagaagacggactttcggtgctgtcaaagaacgatctggctgacagcctagcttacaacagtttaaagggcctgatactcagcaatgccctcagagcacagaaagatgctgaggacgaaggatgtactatagccctgagcaaccttcgttccgaagtaattgaactgaggaacgaaggtctcgaaaaagacaaaatattgcattccttaataaataaaataaaagaagacgaagctcttttcaaaggtcaggccgaagctcagaagggtgaaattgaaaaccttcgtaaacaattagccagagctaaagaggaatgcatacttgaagaaacaaggcgagaactcagcgaccaatgggcaaatcatttagaagaaactgttaaagagcttcggtcagccaagaagaaatgcttcgacaaatctatagagtgtgtcaagaaaataaaaactagcttcgccagcgttggcgcattttcgcaagaagaaaactttataagaggtaaccccgaaggtcccctggaatggatcaatcatgaggcggaggcctttgaagaaattttaaatagtcgcggggacatctgcgctttttctggtgccagagggattgccaccattttggaggggaaaggatgtgaacatgtaaagattttatcgcagtccgaagccaccttgtccactgaagatataaaagatccttcagccgaagctagcgcggttgggggaaaatttttcaccgacatctgggacaacggtggtagagaaatggcccaagaaatcattcagaaaagcgagaaagggattcatgaggctagaaaagtagccgaggctgctgagaaaaacgcagagcccgaagggcaaatagatcctactaaagcatcttcgggccctcagcctaaagatgacgacgaaattaaaaagatggccgaagctatcatggatcaggttgtcgatcgactgctgaacgaagctgcagagatagtacttagggaagactaagtgctattgcaaaaaacatttgatatatgatttgtgtaatattctgtaatcctgtatgtaatatacttgttttatgattcaattctttacgatgcatgaaactttaaacacgtaccatttttgagtcttcgacgaaaaacaaggactacaagaacctgataatcagcaataaccgaatcagggacttaattaatggg

SEQ ID NO: 124166 - DNA, 824 bp, Zea mays
  Clone ID: MRT4577_44719C.1
atctcaacgggcaaaaggacgactctcccagctggcctcgtgacgggcgctttccccatctccacatcgccgccccgcgcagctaccgcatcggcgacggcgatgagacacgggacgaggctgctctgcgcactagcgctgacgctgctatgcatggccacccacttccagggtgcatcctgccgcggcggcggcggtggcggtcgcggaggaggaggaggcggtggcggaggaggaggaggacgcggcggcgggtcaggaacaggtggcggccggtcgggaagaggccgctccggtcgcccgttcctcggcggggtcggtgcgggagccgccgccggcgttggcgcgaggacggccgcaggaggatcgcacggccaccgcagcgccgcagcgggtggcgcgggcgggccaggcgtgtggagggtggccggcgccggcgcggccctcaccgccgcgttgctcgcctagtcgcctggctgtgatcgtcgcgcgtgttggaggcgtaatccaggttagagttagacacgaggggttggtagagtttagtggtagcagtagcagatcggtggagacatgtgtgagtatcgcgccgttctgggatctgaactgaagtgtgtgtcattgtgattatcttgtggagtagtagtagagttttagcgattagctagctgtgcagtagggcgactttacgatttcttgttgagtaattcccaccacgtataaataagaagaggagttcaaaggtttgtgggcgtgattgtgtgtgtggtacattcaagattcaacttatatctgcaagactgcaacgatctctgtttttttgg

SEQ ID NO: 124167 - DNA, 568 bp, Zea mays
  unsure (1)..(568): unsure at all n locations
  Clone ID: MRT4577_4471C.1
gtccctcctcgcgnagcctcgccgnatccccncactccccntcccnnctcgcttcaaggatgcanannnctttgtgaanaccccctcaccggcaagnactatcaccctcgaggggtggagtcttctgacaccccattgacaatgtcaaggcttaagatccaggnacaaggnaggnngcatccnnctcctgaccgagcagcgcnnncttatcttcnngccggcaagggcagcttgnaggnacccggccgcnnacacttnngctgactacccaacatccagnaagggagtacaacccccttctatttggtngncctgcgccnnttaggggaggacagtgcagnannnctttgtcaagaacctnntgactggcaagnacaatacatccctnntgaggtggnnagtccctcagnacccaccattgnaccaatnngtcaagggctgaagnaatccaggnaccaaggnagnnggcatccctcccctgacccagcagcgnnngcttatctttctgccggccaaggccagcttgnagggacggnaacgcaccacttgctgnactaccaaccatcca

SEQ ID NO: 124168 - DNA, 3928 bp, Zea mays
  Clone ID: MRT4577_44720C.1
ctacctctgaaaaatttcttaggttctatgtcatttttgttttgcaataaagaacaagtaatgtaaatctagttttaattcattataatagtttcgtttatattaaaatgaaatatatcttcttcacagatttatgaagctcaaaatattaccgaagctcaaaagtcgttcctaagggaatatagagctagataaatgccgaagctataagcaaaagtcgttccaaagggagcgcatcgtaagttttgacgaagctacaaaaaagtcgttcctaagggagcgcagtgttagttttctgctcaaaagtcgttccaaagggaatgcagagccaaataccgccgaaatataaggcgaagaagttcaaaagacgtttttaagggaatgcagaacttacaccgaaaattcaacgctgataccgcctaagtaaaaggcgaagaagctccaaagacgttcctaagggaatgcagagcttataccgcctaagtaaaaggcgaagaagctccaaagacgttcctaagggaatgcagagcttataccgcctaagtaaaaggcgaagaagctccaaagacgttcctaagggaatgcagagcttataccgcctaagtaaaaggcgaagaagctccaaagacgttcctaagggaatgcagagcttataccgcctaagtaaaaggcgaagaagctccaaagacgttcctaagggaatgcagagcttataccgcctaagtaaaaggcgaagaagctccaaagacgttcctaagggaatgcagagcttataccgcctaagtaaaaggcgaagaagctccaaagacgttcctaagggaatgcagagcttacagcgaagaatcagtgctgatacaaaaatattgtgtggggatatgtgtgtatctttcggaacaaatgtcatcacttctgcagcttcgttcaacagtcgatcgacaacttcatccataatatctttggccatctttttaatttcgtcgtcccccttcggctgtgggcccgaaggcgctttagttggatctagttgaccttcgggctctgtgctcttttcagcagccttagccacctctctagcatcatggatgcccttttcacttctctgaataatttctcttgccatttctcggccaccgttatcccagatatcagtaaaaaactttccaccaattatgctagcttcggccgaaggatcttttgtatcttcaagggacaaagcagcttcggactgtgctaaaatttttacatgctcacagcccttcttctctaaaatggtggcaatccctctggcgccagagaaggcacatatatctcctcggctatttaaaatttcttcgaaggcttcagcttcgtggtcaatccattcaatgacactttcgggattgcccctcgaaaaattttcttcacttgagaatgcgccgaccttggcgaagctagcctttaattttttaacacaatctacagatttattgtagcatttctttttggacgaacgaagctcttcaacagtcacttctagatgatctgcccattgatcgctgagttcacgctttgtttcttcaagtatacgttcttctttggctctggccagttgtttccgaaggtcttcaatttcgcgtttctgagcttcagcttgacttttgaaagcagcttcgtcctcctttattttatctatcaatgagtataatattttgtctttttcgagaccttcgttcctcagttcaattacttcggaacgaaggttgctcagggctatagtacatccttcgtcctcagcatctttctgtgctctgagggcattgctgagtatcaggccctttaaactgttgtaagctaggctgtcagccagatcgttctttgacagcaccgaaagtccgtcttctaaagttgggaatccgaagcttctgctcatctcccgacagacagaaatttccttgctgtcggggaggcaatacaagaaatcttcttctccactgccattaaatatcaacgccccctttggatatttcaacttttgggcatagtgttgggcctcttgttcttctttttctgataattttttccccgaagcatgacgaaaaatataatcacgaattttggatgcttcgggggtaacaacaccagtttcttcagcaaaagttggctttattattttttctgccttactttccaaggtttttgcctttgagggctctgagggcccagcttcggcttcagtatcttgctctggagctttagaacccgaagcttcgactgttgtttcaggagtgacggcagccttcttcggaggggtgcttgaagatttgatcgtttccagcacatctagcacattagccattctccttcttttcggagtcattgctggcactttttgatttcttactgtttcaatgtttgccacaggactcaaaacttctgatgttttggagtcctcggttgcttcctttacctcttccattttttctgtgaatggcgcttcggccttctctttcgtttctggtaacaaaatttttgattgctccaattttgccttcgttggtatttcggctgtttctgtgacttctggcagcaaagttggctcggctggtttttcagcttcggtggccgaagaagtctctccggtaaactcaggcaccgaagctggttcaatataacgcggtcgatgcgtaagaacctttatcttcttccttttcggttctggctcgctaggagcagctgcagtttcttcttttgcagaggttgtattttttctcttctgccttcgaatggggtagcaatagtcagggtagacaaacccgatggcatcaaatacccgattcagccttttcttttttcggcctccgaaggctgctgacattgcagtatcttcggccttcgagtatgtcccaagcagctcatcacttaaattgtcaatgcttttcaaccactcatcatctggctcaataaatttatctccaaatttaaaagtgtacttaaatctgacaagtccaccttcgtcggcctctttaatggtttcttgtggcatttcccatttctccgcaagcggccacaccctgaaggcaatatgctcttgtactaagtcccttgttcctataaaagagcagacaacgccgaaggctctttggcactcttcggcggcttcgttcatttcaaccttcggcctccgaaggccgaagctttgccaaataggacgcataattatacctttgatgtcttctcgtgctgataagtcattcttcacataaaaccattctgtcatccaatccccgggccatctcttccgaaaggttggtacgggacagcttgccccggaccgagagacgaagctgtagcagccaaagttgttatggtactgttctttgccccaaggctttgtttcatataataattcatgaacattacagaagcttcttgcgtcaggcttcagaccttggcttctcgcggcccacacgaagatatttagccttataattgcctcgggagtaagttgatgaagatagacttcgaagattttcaacacctccacgacgaagctgctcaaggggaatcgcaatccagctttcaaaaagcttcgatacaccacaacttcattttcttcagggtgtggacaagttttttccccctcgtccgccctcacaatggacagatcccggaaataccttcctctcatattaacaagatgattctctttgatagttgatttaccataaactgaatggcttggtcgccaggggcgatcttcggagtcttcgccaccgctgtccacatcataactttcactgtcaccagtatcttcagacagcccttccagaatttccctggtgatcttttctgtgttggtcttcgacattgctataagaaaccctaagttcttctcttcatcaagactcagcttcatctcagcagcagccttcttagcagcttcagacat

SEQ ID NO: 124169 - DNA, 573 bp, Zea mays
  Clone ID: MRT4577_44722C.1
cccagtgcaactaatgtctaaggcggcctacgccctgccggagaatttcacagtgcaatttgtccgctccctggtgacggggcaagcctggtttggtatttcttggtgtgccctttatctagaaccggccaatgtgttggccaattttcctccggaaaagcgtaatttacgcccccaagcagtgcaaaacgccatggagtatctcaatctctacgaatcctattgtttagagggggatatttaaatttggactaaattgacagcatttttggccggatttttcagactttttaggcgatcggggtagaatccaagcaagaactccctgtattttgccttcccctatgtctaaccaaccttcccccggtggcctaattaagctcagcgtcggtgatgtagtttccggcggcctcagggtttaccgcgaccatttcaaatcctatctctggctggcagggcaatcctacctttggcttttaattccctttgccataaccgggttagtgatgttagccatagctgggctagcggcggtaatggagccgatcgccgtgggaggcataatagttttgg

SEQ ID NO: 124170 - DNA, 155 bp, Zea mays
  Clone ID: MRT4577_44723C.1
cctgtacatgcactacccgccattccccttcgctagacggtactaccagcctcccgcctaatcctcgtcttcagggttcccgtactcctaccaacctggctacccttcgtcgttctacactccgtcgcaccatcacctgcaccatcatcagacca

SEQ ID NO: 124171 - DNA, 216 bp, Zea mays
  Clone ID: MRT4577_44724C.1
gtctatactatggaatggccaaaagctccctttgcgctgctaaattggcaagctttaaaaatgagatctccccgacaagggcttctcccagtgcgtgaattcacattggcagagattgagcattttttggacccacaggacaaatcacatccaaaatttgttgatgttgctgatttggaattcctgatgtttccaagagagctacaactctcaggg

SEQ ID NO: 124172 - DNA, 288 bp, Zea mays
  Clone ID: MRT4577_44725C.1
atgcgccagggcggccgccgcccggcgacgcgcgcaggcccggttcgctggcgggcctctgcgctggctgcaagcccgcacctctggataagggtggggatatggagacgtggcgtccgcgccggacaagctgaagggcgagcacatggccacggacggtgaagcgaaggtgcgcctgcacacgaatttttttttcggctttaatcccgtgcaggtcccaacagatacaggtccattgctggtggacccccctctgtggccaatcgctttggtggacatgaacggccg

SEQ ID NO: 124173 - DNA, 286 bp, Zea mays
  Clone ID: MRT4577_44726C.1
gagggcaaccgaaaaatgaacacattttatacattgggtttttaaaaaaaacacattttacaatgggttaaaaaaaaccccaaagatcggtcttttgataaaaataaaaccttgctttcttttttaaaaaaaatacccccccaacattacaaaaaatttaacacattaagggactttagggccctaagggggtattggggagcctcctggaattttttctgatataaccttgagaccctgtgaggggggagaagtttcccatatttaccaaaaaatgggagaaggg

SEQ ID NO: 124174 - DNA, 1726 bp, Zea mays
  Clone ID: MRT4577_44727C.1
cctcgagggccggccgggctcgaaacggcaacccctccagctcctatccccaaactcgattgcagctcgtgcaccacacacggacacgaatcctcctccggtcctccctctgggaaaccaggactacctcggatcagatgcagtgcctaccctgcggaccgtccaccaacgcgcccgctgcgcatgccgcggccaggagcgtcagccgtcggagggttgtcgtcgagggcgtcacctcggcaacccacgacagcgaggaagcgcctccaaggtcaatgagggcaacaggtgaccgtggtgcaatgtcaagcaaaaccttatggctcgtgtcaaagaggaagcttattgctttgtcagccttttgtcttagcttacattcttcaaggtactttccagcatttgctttgggtgatacgtctgtcaaaatcgaggatgtgactcctaagatttttccatctgggccattatttccaactgagaaacggattgcagagctatttgaaataaatacttactcagttgtgaacatttttgatgcaacactacggccgcagcttaatgttactggtgttgtggagatccctgaaggaaatggttctggtgtagtgtgggacgattttggacatattattacaaattatcatgttgttggcagtgctctttcaaaaaatccgaagcctggtgatgttgttgcacgcgtcaacattcttgctgctgaagggatacagaaaaattttgaaggcaaattggttggtgcagatcgtgctaaagatcttgctgttcttaaggttgatgctcctactgatctcttgaagccaattaatgtgggacaatcctcggccctaagagttggtcagcaatgcttagcaattggaaatccttttggttttgaccatactctaacagttggtgttatcagtggtttaaatcgagatattttaagtcaggctggggtgacaattggaggcggaattcaaacagatgcagctattaaccctggtaacagtggtggtcctttgcttgactcaaaggggcatatgattggtattaatgcagcaattttcacacagacagggacatccgctggtgttggcttcgctatcccatcatcaaccgtacttaaaatcgctcctcagttaatccagtttggaaaagttcgccgtgctggcttgaacgtggacttggctccagatccaattgcgtatcagcttaacgttcgcaacggagctcttatactcaaggtacctgggggcagcgccgcagccaaagcagggcttgctccgaccagcaggggttttgccggtaacatcgttctcggtgacatcgttgtcgctgtggatggcaagcctgttaaaggcaaatctgacctgctgagggttctagatgactacggtgtcggagaccaggtgagcttgacgatccggcgaggctccgagaccctggaggcgacgctgcctttagaagaggcagacatgtgagcagtttgtggaaaatagaacccacgtataccgagctgtccacgactgtcgtcccattggaaacaattccatttcactaggaaatattgaagtgtccttttcgctctggacattcccttccatgcacgtgtatgagcatgatcatgagcttcacttctcgtgcttgtagttgccttaagatcagacagcctgatgttggagaacaagctgacctgttagttggattctgttgtcatctcattcccgtc

SEQ ID NO: 124175 - DNA, 265 bp, Zea mays
  Clone ID: MRT4577_44728C.1
cctttttctccccgtgccgctgcagctgttgcatgcctgcgggcggtcgctgctgctgctgctgtgcacctagagatttgctgctggcgctgtttggccgcgtccagcattcaagaagcacgcctgcacgcgtgtgggagaggagggagtggatgtctcattcttaaccaaaaaaatctgaagcggagatttggtaatggttgaaacggagttgagctcgtttggcttgtaggcatacttttgctggaatttgggtttttcgacg

SEQ ID NO: 124176 - DNA, 471 bp, Zea mays
  Clone ID: MRT4577_44729C.1
cgctcactcttatatttcgtttctttgttaaaccaacactgtcttctactcatgaggcgagcagcagaatactattgacaatctccatatggggagagggcaccaaacgattcaggcgcataagcagtttaagacgacccatgacttactgacacacaaaaaatacggttcacaaggcggatggaaatctacttttggatgatggattcttttaaggtgcggccattctccagctgttagccggggaacatcaaacactgctgttccttggggatgccctacttgtgctggaacttttccttcacattgttgggggcgaacgagctctcaacctgcatggaaatggcttttacacacaaggtctttacaaacatgtgtttaccacctctaaaaaaaaaaacaaggtgaacgttgctctaattgtggatgttgtattcctagagagtgcggtcatcctgcaactaattgccc

SEQ ID NO: 124177 - DNA, 278 bp, Zea mays
  unsure (1)..(278): unsure at all n locations
  Clone ID: MRT4577_4472C.1
tcatcctcctgcgtcttcctctcgctacccctctctctcttctcctttcccgacaaacaactcccagtcgcccacctgnatgaagtttcctgctccctacctccttgctctcctctctggaaactccagcccctcttcccatgacttgacagccattctcaagtcagttcgctgtcaagttcacaattaaaacatgcaactccttctgtcccaacttatcagtaatcacattacctaactcattgcttctggcaatgaaaactttgcttcagtcccat

SEQ ID NO: 124178 - DNA, 859 bp, Zea mays
  Clone ID: MRT4577_44730C.1
tgagcaaaatttactccaccttaatgattcaggaatttatgtttttcctgctcaacctatccattggtcttatcaaattaatacctttaaagctgctcaatctgcctattatggtcgttctgttcaatttggtgggaaaggtgcaaccaaaaactatccgattaactatggtcgtgccaaagaattagcagtaggtagtgagtttctgacttatatcgtgagtcaaaaagagctagatctccacctaatgtaacccagcctgagcgctgtgatttttttcgggttttatttaggctgattcttaccgataaattgatgatggcttgacaagggaaaactaatggtcggtggtggggaacttttgcccccaaggactggacgaagggaaaaagccaattatgtaaagttttgttattgtgggaaaagggtgggatgtatttatatccagcaccaacccgttgtcaggatggcatttattcatggttaacgaccttatttctccgcagtctcaacagatggagcgccaacttacaactgtttggcagtccctgacccccaccagttgtccacggttttataattttcatctccacacccgatgttccgacggccagatgaccccggagggtttgatcgaacaggccatacatcaagaattacagggtttggcgatcacagaccaccattgtgtggcgggttattaccgggcccagcgctggctcaccgaacattgccattatcctagtctccggccccaactttggactggcattgaaattaccgccaatttagacggcactgaagtgcacatcctgggctatgactttgaccctacccacccggtcctagacccctatct

SEQ ID NO: 124179 - DNA, 460 bp, Zea mays
  Clone ID: MRT4577_44731C.1
gccaaccactaagacataatgcagcttccacattcgctcgtccactgcccgcccacctatgacggtacaccgggaagctcccggcacgggcgtgtgccgcgctcgtggagtgctggcgccaccgccgggaaatgcggttctcaggaaagtggggatccgcagcatgctattactcctacctggactacgtgaaaccgttgaccatctctgcttacgactgctttctgaacgccatggaacgctaatgcgtgggcttgactgtggatgcactgtcgaacggctcatacaataatgacttcgaccggtaaaccacaccgctgcttacggcacattaaattctactaccaaggcttgctgcttgcaaataaacaccagacacaagtcgaatgtgccgcaccaatgccgattgaccacgattccagtctggatagctagcgggatctggtttcataaaacacct

SEQ ID NO: 124180 - DNA, 447 bp, Zea mays
  Clone ID: MRT4577_44732C.1
gggcaaaaaaactttttttttttttgcaacaggggggggggggaaccgaaaaaaccccttgccttaattgcctgttaaatttaaaaggaaaagggggctttataccaaaacgtttttttttaactgggccccccccattatactaaaaaaaccagggggggaaacccggttttttcaaccctgcaaagggaaaaccacccctgggcttttttttccaaaaaccccctacttttgccttttggaaattttgggcaaaaaggatttaaaccttttttaaacccaaagggtggggggggcttaaatggttgaaaaaagctttttggagctttaattttcggcccccaaaaaaccccctttagggaaaattttttggagagggttttcatttttgccacaaaggggggattttttttgccaaaattttaaaaaaaaaggggcttttgggtt

SEQ ID NO: 124181 - DNA, 233 bp, Zea mays
  Clone ID: MRT4577_44733C.1
ttgatatcgtgggttgagtctcaaagctcattcggggatattttgaatgacttggcgatgcaaccccacatgaatggtgttgcaccagtcgacagctctctaaggagagcaaacacaattactgctacactgaacggtgtcaactccgcagaagctaaccccatgacaaactaccctgaaaccaatgggataggacatgcggacatgggtggccttggtcaacaactgagaac

SEQ ID NO: 124182 - DNA, 1314 bp, Zea mays
  Clone ID: MRT4577_44734C.1
atgggtcagcaagaggagccaacttcttcaagaccatatgcttttgcatatgatgaaaggaaaggcaagaagaaggctctcactccaagctccccaagtgaagaagaggaggaagaagaaagtgatgatgatgaagataatcaacatcatcttctgaggacgaagacacaatctgacgcgtcggaaagggagaagggccacttcggggacagttgtccaaatatggccgaacccacaaaggggaggagcaaaggcaaggcacttagtgtcaaaacttgggataactcttcaagtgaagatgaacctccaaggacgcgcaaccaccgatcctcatcatggtcatcaagaaagtgccttatgataagaggtaaaatgagtattttatcctctagtgatgctacttgtagtgataatgaaggtgagggaaagccctccttagatgagcttgcgaaaaccgttaatttttttgaggatgtatacactaaacaaaaggctcaacttaaaacattgaaaaataagttgatcagctctcaagatgattataaatgtttgctagaaaaatttgaaacatttgcaaatttaaatggtgaactatcaactaaaattgagcaattagaatctaatgctccatcctcagctaccaatgatggccttattaaaaagaacgaaaaacttaagactaggttagctagctctcaagaagccattgaaaacttgctaggaaaaatgaaaattcttaacatacataataatgagctaactactaagctagaaaacattgatagcacccctagagtatctttgattgaaatgcctaaaattattaagaaagatgcttctactttttgctttgatttaattgatgattctaacccctgcaaccaagttcttgttgagaatatcgttgtagaaacatgttcgaatgaggttacaaacgagaatgagcaattaaggcaagaaggggctcgcctttgcaaggctttgtatgacaagaaaggcaaatccaaacaaatccaacctcctcaggataacaccactgcaggagtgaacaagcctgtggagggagaaactgtgatatgtaggctatgccacatggaaggccacaagtcttaccaatgcaaggcaaagatcggcgataagcaaacgcaaaagctcaagcaaaagccaacaagaaaaatctccaacacctacatcaacaaggtggataaaaaggctgctacaccatacttgatcgagaagaaaaagaatggaaaggtgatagcaatcaaggccaacaagcgagccaacaaaggaaaaggggtcaaacgtatctag

SEQ ID NO: 124183 - DNA, 331 bp, Zea mays
  Clone ID: MRT4577_44735C.1
ataatatgccgcaaccctagcttccgatctcaattgcgaaccctcgcgtgttcttcggcatgacggtctgcggtgcccctgctggccggatcgtgatggatctgtacgccaaccaggtgcccaagactcgtgagaacttgcgcgcgctgtgcacgggccataagggcgtgggcaagtccgggaagccgtttcactacaagggcttcaccttgcaccgtgtcatacccgagttcatgtgccatggcagatactttacccgcggcaactgcaccggctgcgagtgcatctacggtgagaagtttcccgactagaagttcgagcgcaagcacac

SEQ ID NO: 124184 - DNA, 243 bp, Zea mays
  Clone ID: MRT4577_44736C.1
tcgcagaccattagctttatctactccagagcgcagaagaacccgatcgacaccatgagggtgttgctcgttgccctcgctcttctggctctcggtgggagcgccaccttcacgcatacaagcggcggctggggctggcagccaccggcggcggttcatttatcggcggcggtgcatctggcaccttcggttcacctgccaacttcggtgcatcttccacacgcggtccacctggcggcggcg

SEQ ID NO: 124185 - DNA, 384 bp, Zea mays
  Clone ID: MRT4577_44737C.1
gttcttacaagcctcccgggtcagcccgggacttaccagaaaccccgaaccgggacctggaagcggaacaacacagcgtactcaggaccccagcacgaccaggcccaaggctgggcagagcagttggccgaaggcaataggtaaccctgcaccatagccaacctgaaacgccaccgtaggggaaggcggaaacggtacagtgacgaaacagggagccaaggcacgttgaacacaaggagctgaaccgccacttgccaaaccgacaacctggcccgcccagagcaaccacgaaacggacgaagcccagggcgaggcagattgggtacggcccgccagcgaagcttgactggctacaagtaacaccggggacagacggagggcatt

SEQ ID NO: 124186 - DNA, 377 bp, Zea mays
  unsure (1)..(377): unsure at all n locations
  Clone ID: MRT4577_44738C.1
agacggtgcacggccgtgtggtgtcaagcacgttttgttacgtggaaagaaagccgngtggttgaaaagtatagggtataggaagggaaaatggggattaatgcaaggagagtggatttgagggtggtttgggggttggggaagtgagaatctggggaattgtggtcggaatagggattaggggttacgaaagggtagatttcagctggggttttgaaagggggaagaagatgaacagtggtttgtttatataggggagggtcaaacggcctatagccacgcctgtgtactttaagggtgagcccatgtttttcatatttggcaagtttggtcgtgcccgtctactatcacatgccagtgtgtcttgagcgtgtgtc

SEQ ID NO: 124187 - DNA, 692 bp, Zea mays
  unsure (1)..(692): unsure at all n locations
  Clone ID: MRT4577_44739C.1
gcgacccctagaactgcttcgccntcctcggtccgggttacctccacttgcggcaggagcancaaccacngaggcaggagggcaggtttcttggcgccggcgccctcaccgatggtggtccctctgatggaaagaattttgtagagctgtggctttcttctttccagaactaatatcgtcagacctcgcctaagctaccctgtaaatagtatcactctgttttagttctactacgtttgtcctagtcgcacaacgtatcgatgaaggaagacatgaaaaagaaatctaaaaagaaaaagaaaaaaaaagaggagcagtagaattctgaaacagcatcaattggatatgtccttcctgaggttcccaggctattctactcttgccaagcaaggcgaaagctgagctgcacaaactgcgcgccatcgagaatgattttgccgtcctgatatgtgctgagtgctaacacgtagagatgaactgctattccatcgttaatctgtcccatttgcttggcgacctcggactctactgcctgtacagtgttcttgcagtgtatatagtcttgcgcaggactactgcagttgcgcgatttttcagtgtgtgttggtgcgtgtgtcgtattcttgtacatggaattgaatttctgatgaatgaatctatctggtgtaagtaattttacccccccccccccc

SEQ ID NO: 124188 - DNA, 549 bp, Zea mays
  Clone ID: MRT4577_4473C.1
gccggccgggccccgaaaagcgaacgtaagcagagaaaaatgtcccactgatgacgcgggacgccggagcggaagggagggcccaccatgtcagcgccgccgccgccgccgtttctgtcctattctgctcttcctgccgatctgtgcgccccctcttcttcatcccgtccctagcagccgatcccaactcccgatcttcgtttcgtttgaggtatgactctgtattcgcctgttgggggtataatcaatttgggggctggctccttttttaagcgtttctgattgagatgacggaggtgcaaaatactccagcataattggttccttgcttatggagtatttgttaatgttgtagtactatgtgaacatcgaattccaggctgtaacttttgctgcatcgggcaaatggttttgatttgctcgatagaactgtcagtttaggaaccactaggcgtcgttacatactgtacgctcgcaagtttcatggtattattagtaaagtgctccttagaaaattattttgaaaaaaaaaaaaaaaaaaggccccta

SEQ ID NO: 124189 - DNA, 296 bp, Zea mays
  Clone ID: MRT4577_44740C.1
acacacattgaacacccactggtttattcaaaagaaacatcctcataccctttggtttataggcgggaagcagggtttctaacacctttggacgggggaaaagagactttttttttttctagctgcaaaaaaatcatgccccacaactgaagtgaaaacataggatgttctttgagcaggggttttgctaaaagggggccagtttttacactgaccggttttccctgaattcgcactctcctgcctggagcttttaactccagggatagttttccactccgaggggatgcttgaaa

SEQ ID NO: 124190 - DNA, 692 bp, Zea mays
  unsure (1)..(692): unsure at all n locations
  Clone ID: MRT4577_44741C.1
cattgggtacctcgaggccggccgggagaggaagccnncgtcgttctggaagtttccacgctccgcgcctccgccccctggtctccgctccaatggcgccctcactcctcgccgccatgtccacctcgcccttcctagccagcagcggcagcagccgcaggccgctaggcgctgcccacacccgacgggctggactgcgcgtggccgcgcttaagtacgaccctgccaagaaatctgctggcggtgtattgctaccaaaatctgctgttaagtttgagagatatctgatgggtgagattctatcgatcggtgctgaagtcagtgaagttgaggctgggaagaaggttctcttctcagacatcaatgcttatgaggtggagcttggtactgatgaagagaagcactgcttctgccgtgagtcagacttgttagctgtagttgaatgaattttaccatgaaaatttcggacttacctgggaatgctccaacggcatgaacttatcttgcccccactttgttgtatgccatttgaacgttcgttaattcagcttctagatgattgttagttaccgttgatttttggtcgccataaactggaattatgttaatgcccattttctttacagaggctcttgctcacgtttggaatacgaaactgtgctgaaccgaaaaaaaaaaaaaaaaaagcggcc

SEQ ID NO: 124191 - DNA, 857 bp, Zea mays
  Clone ID: MRT4577_44742C.1
cattgggctggtaccccccgggccggccgggggggaaaaaagataagggacggcacgcgacgcaactatcctcgagagagagagagagagagaggaagcccgtcgttctggaagtttccacgctccgcgcctccgccccctggtctgagtggtctccgctccaatggcgccctcactcctcgccgccatgtccacctcgcccttcctagccagcagcggcagcagccgcaggccgctaggcgctgcccacacccgacgggctggactgcgcgtggccgcgcttaagtacgaccctgccaaggtggcgccgcagaacgaccgggttctcgtccgtcttgagcagatccctgagaaatctgctggcggtgtgttgctaccaaaatctgctgttaagtttgagagatatctgatgggtgagattctatcgatcggtgctgaagtcagtgaagttgaggctgggaagaaggttctcttctcagacatcaatgcttatgaggtggagcttggtaccgatgatgagaagcactgcttctgccgtgagtcagacttgttagctgtagttgaatgaattttaccatgaaaatttcggacttacctgggaattatcttgcccccactttggtgtatgccatttgaacgttcgtgaattcagcttctaggtgattgttagttaccgttgatttttggtcgctataaactggaattgtgttaatgcccattttctttacagaggctcttgctcacgttggaacacgaaactgtgaaccgaatttgaaatgcttacattgctcatctgacgtttgtgcttctgaacaaaaaaaaaaaaaaaaaagacttctatctaaaaccccaaaaac

SEQ ID NO: 124192 - DNA, 122 bp, Zea mays
  unsure (1)..(122): unsure at all n locations
  Clone ID: MRT4577_44743C.1
ctgcaaagtcctaggcgcgttctggccacccaccgtaccggtaccgggccctctctacctcggaacgagggggggggatanctcacgctctatgtaacaaaggggggcgtacttcaaacgac

SEQ ID NO: 124193 - DNA, 690 bp, Zea mays
  Clone ID: MRT4577_44744C.1
gccggccgggtcgggacggcacgcgacgcaactatcctaagcccgtcgttctggaagtttccacgctccgcgcctccgccccctggtctccgctccaatggcgccctcactcctcgccgccatgtccacctcgcccttcctagccagcagccgcaggccgctaggtgctgcccacacccgacgggctggactgcgcgtggccgcgcttaagtacgaccctgccaaggtgacgccgcagaacgaccgggttctcgtccgtcttgagcagatccctgagaaatctgctggcggtgtgttgctaccaaaatctgctgttaagtttgagagatatctgatgggtgagattctatcgatcggtgctgaagtcagtgaagttgaggctgggaagaaggttctcttctcagacatcaatgcttatgaggtggagcttggtaccgatgatgagaagcactgcttctgccgtgagtcagacttgttagctgtagttgaatgaattttaccatgaaaatttcggacttacctgggaatgctccaacggcatgaacttatcttgcccccactttggtgtatgccatttgaacgttcgtgaattcagcttctagaggctcttgctcacgttggaacacgaaactgtgaaccgaatttgaaatgcttacattgctcatctgaaaaaaaaaaaaaggcccccta

SEQ ID NO: 124194 - DNA, 810 bp, Zea mays
  Clone ID: MRT4577_44745C.1
gtgaaatcaatgaataaaaccataaaccagaacacaggcttgtgtgattaacagaagttttttttaacattattcaagaaaaaattaccaattaaacttccttattttggataccaattggagtgctaggaagaattcttttacatatgcacgacttttataaaatcaaaccttgaaaggcaattacatctgacaattgtcataagaagggggaggggtgcacgttatactatctttgacatatgtcttctcggggtgggggaacgcatgtttctttttttgtacgaacgcaagccttgcttaacccgacacttaattttttgatcagttttaatttggtaaacttttcaatttgacgttttgcaccccatgtttatgttttgggtaccagcctacaggggaacttttggcgttttttttttggtggacacccttttctatttcaaaattaaaagggtttcttggggttaacccggttatttttttttcggttccggggaaaaaacaaaatggtcttttataaagggggccaaaaaggccatgccaaaaaggggattgttctcccaaaggggggggtttttcgtataaattccaaaaaaaaaaatttttaaaaaaaagaaaacttggggctttggtggggacaaaaaaaagggggggcaattgcccttttaaaaaaaaaaactccctttttttttaaataaaaaacaaataaatcttggacatcccccggggggtttttaaaaaggggttttttaattttttccgcctggttttttttgttttaccaaaaaaaaaaaataattttttttt

SEQ ID NO: 124195 - DNA, 822 bp, Zea mays
  unsure (1)..(822): unsure at all n locations
  Clone ID: MRT4577_44746C.1
attgggtacctcgaggccggccgggatccccgtttacaaacagataagggacggcacgcgacgcaactatcctcgagagagagagagagagagagagagaggaagcccgtcgttctggaagtttccacgctccgcgcctccgccccctggtctgagtggtctccgctccaatggcgccctcactcctcgccgccatgtccacctcgcccttcctagccagcagcggcagcagccgcaggccgctaggcgctgcccacacccgacgggctggactgcgcgtggccgcgcttaagtacgaccctgccaaggtggcgccgcagaacgaccgggttctcgtccgtcttgagcagatccctgagaaatctgctggcggtgtgttgctaccaaaatctgctgttaagtttgagagatatctgatgggtgagattctatcgatcggtgctgaagtcagtgaagttaaggctgggaagaaggtttttttctcagacatcaatgcttatgaggtggagcttggtaccgatgatgagaagcactgcttttgccgtgagtcagacttgttagctgtagttgaatgaattttaccatgaaaatttcggacttacctgggaattatcttgccccccctttggtgtatgccatttgaacgttcgtgaattcagcttctaggggattgttagttaccgttgatttttggtcgctataaactggaattgtgttaatgcccctttttttttagaggctcttgctcacgtntggacacgaaactgtgaaccgaatttgaaatgcttacattgctcatctgaccgttgtgcttctgaacag

SEQ ID NO: 124196 - DNA, 509 bp, Zea mays
  Clone ID: MRT4577_44747C.1
gtcatctcccctagacctgtgcgaatcgcgactaggtccctcgctgggagtttctacgaggagcctcccacctcaccgccatactcttaccatacatcctcccgagctcacttacctgagatcacataaacaacgcagaaggctgctgctgcgcttggtatactccacgaagccaggcacaccatcttgtttcacctgacacggagatggccctaccgctgccaccagaagtgtctctggtctcaagtctggcctatatgcattccatgtacatgcacttggagacaccaccaatgcatgcatgtcaactggaccacactacaatcctgctagtttttttatgccgccccacaagatgagaaccgccatgctgccgatacttggaaacatgacagctggagcacatgccgctgctaatatcaatgttactgacagccagatcccactgactgcgccacactcaatcattggcagatttgttgttgttcacaatgatcctgatgatcttg

SEQ ID NO: 124197 - DNA, 1345 bp, Zea mays
  Clone ID: MRT4577_44748C.1
cggtcccttccctcctctccccgctcccggctgactcacgcgacgcgcgcgacgacgcggcagagaaagccaggaactccaaagtccgagttcgggttcggaagccaacccacaccactccaccacaccctactcgagcgaagcgagccagcaatggcgcatcgcagccgcgggccgtgaccggcgtcgccggagactggaacaacaatggctgccgtggcgcgcggcgggcttgcgatgcccccagcagttgtgccggcggcggcggctgcggcggaggaggagatgcggtggcggcagctagacagcggcgtgagcgcggtgtcgttcgggttcgtggccaccgccatcctcgtgtccatgttcctcgccatggccatcctcgagcacttccttcgccccccggcccacacgctcgggcacgcgccgccccggggggatccgccgccgactccgcttcttcctcggccgtggcggtgagcgtgccgacgcccccggctcgaatctcgaggcggcgaggaagctccaaggccacgcgcccctcgagataccggccgggccctatagctagctcggtctcttcgccattcgtttacctgaagcacaagaataaacgcagccgggcatgggcgaagctaagctcaacaacgtgaccgtcctgctggtggccctcctcctcctgagcagtggcgttcaggacgctggcgccatgccaggcactagtgaactaccacacgattggggctgggctgcgcgtggacggactaaagaactaccctgccaaggtgacgccgcagaacgaccgcgttctcgtgcgtcttgagcagatccctgagaaatctgctggcggtgtattgctaccaaaatctgctgttaagtttgagagatatctgatgggtgagattctatcgatcggtgctgaagtcagtgaagttgaggctgggaagaaggttctcttctcagacatcaatgcttatgaggtggaccttggtactgatgatgagaagcactgcttctgccgtgagtcagacttgttagctgtagttgaatgaattttaccatgaaaattttggacttacctgggaatgctccaacggcatgaacttatcttgcccccactctgttgtatgccatttgaacgttcgtgaattcagcttctagatgattgttagttaccgttgatttttggtcgccataaactggaattgtgttaatgcccattttctttacagaggcccttgctcacgtttggaatacgaaactgtgctgtgtgaaccgaacttgaaatgtctgcattgccaatctgatgtttgtgcttctgaacattctttaggcaacaccctaa

SEQ ID NO: 124198 - DNA, 1573 bp, Zea mays
  Clone ID: MRT4577_44749C.1
gcattcgcagtcgccgcaggacgctacccggtgcacaaaccagataagggacggcacgcgacgcaactatcctcgagagagagagagagagagaggaagcccgtcgttctggaagtttccacgctccgcgcctccgccccctggtctgagtggtctccgctccaatggcgccctcactcctcgccgccatgtccacctcgcccttcctagccagcagcggcagcagccgcaggccgctaggcgctgcccacacccgacgggctggactgcgcgtggccgcgcttaagtacgaccctgccaaggtggcgccgcagaacgaccgggttctcgtccgtcttgagcagatccctgagaaatctgctggcggtgtgttgctaccaaaatctgctgttaagtttgagagatatctgatgggtgagattctatcgatcggtgctgaagtcagtgaagttgaggctgggaagaaggttctcttctccagacatcaatgcttatgaggctggagcttggtaccgatgatgagaagcactgcttctgccgggagtcagacttgttagcttaagggacggcacgcgacgcaactatcctaagcccgtcgttctggaagtttccacgctccgcgcctccgccccctggtctccgctccaatggcgccctcactcctcgccgccatgtccacctcgcccttcctagccagcagccgcaggccgctaggtgctgcccacacccgacgggctggactgcgcgtggccgcgcttaagtacgaccctgccaaggtgacgccgcagaacgaccgggttctcgtccgtcttgagcagatccctgagaaatctgctggcggtgtgttgctaccaaaatctgctgttaagtttgagagatatctgatgggtgagattctatcgatcggtgctgaagtcagtgaagttgaggctgggaagaaggttctcttctcagacatcaatgcttatgaggtggagcttggtaccgatgatgagaagcactgcttctgccgtgagtcagacttgttagctgtagttgaatgaattttaccatgaaaatttcggacttacctgggaatgctccaacggcatgaacttatcttgcccccactttggtgtatgccatttgaacgttcgtgaattcagcttctaggtgattgttagttaccgttgatttttggtcgctataaactggaattttggaattacccgattatcttcacacggcatgaacttatcttgcccccactttgttgtatgccatttgaacgttcgttaattcagcttctagatgattgttagttaccgttgatttttggtcgccataaactggaattatgttaatgcccattttctttacagaggctcttgctcacgtttggaatacgaaactgtgctgaaccgaacttgaaaagttaaaaaaaaaaaaaaaaaaaaacaaaaaaaaaaaaaacctaaaaaaaaaaaaaaaccatgttcttcttcctcctcccccctccctggcgcgctgtcctctcctccaggtggcgttggaggcgctctctcctctgctcttgcggcggcgcggctctatg

SEQ ID NO: 124199 - DNA, 285 bp, Zea mays
  unsure (1)..(285): unsure at all n locations
  Clone ID: MRT4577_4474C.1
tatgatttacacacncatagagtcttccaatgcatgtactgatgtattaacaccgtcagccaatcacaaacttcattaataggtgaacaaatcccacaccctcaatgtccttccagcataaaacggataaaatggcaatgtgtttaacgtctgtgatgactcatataatgttgtcaaccttgacacatgggaattcaccttccaaaagtggcatatttctaatctgtcatgcatgcatttgattgttgtattggatcgcactttgcaatatgcatattactactg

SEQ ID NO: 124200 - DNA, 445 bp, Zea mays
  Clone ID: MRT4577_44750C.1
tggcttggaacctttgggctgatttatgtgcttgtttgagtgttaacggtcgtatgcatttcgccattttaagcgtcgtcgtaatgatgagtaggagtagtggcctggttggtgcgcatagtttcttagtgacgggcttgctggtttctaatgataatagtgtcgttgttggtgctgcttctttgacggtcggtgtcgggtggtcgtcgacttcggttcgtcgtctgtctgctgtctctcatcattctggtgtgcgacgactgcgcgaggatgagatgttgtcttttgtcgttgtccgtcgccgccggggcgctcctccttccagtttcccctcccctcttctcagcggtagcggtaggtaagagagaattccgcgacgacgggtgtatcgtatcgttccttattggcggaggagagtcgggtaacgcgaggttttcgcaaactc

SEQ ID NO: 124201 - DNA, 1934 bp, Zea mays
  Clone ID: MRT4577_44751C.1
gggtactcgaggccgggcggggcaaaaaagataagggacggcacgcgacgcaactatcctcgagagagagagagagagagagagagaggaagcccgtcgttctggaagtttccacgctccgcgcctccgccccctggtctgagtggtctccgctccaatggcgccctcactcctcgccgccatgtccacctcgcccttcctagccagcagcggcagcagccgcaggccgctaggcgctgcccacacccgacgggctggactgcgcgtggccgcgcttaagtacgaccctgccaaggtggcgccgcagaacgaccgggttctcgtccgtcttgagcagatccctgagaaatctgctggcggtgtgttgctaccaaaatctgctgttaagtttgagagatatctgatgggtgagattctatcgatcggtgctgaagtcagtgaagttgaggctgggaagaaggttctcttctcagacatcaatgcttatgaggtggaggcagtcctcccggtacggcaggttcgggttcggcggcagtcagacttgttagctgtagttgaatggatctctccgcgtcacgacgacgcggcagagaaagccaggaactccaaaggtgaaaggtccgagctcgagccgattcggctcgaggtggttcttgtttttgtctcagttcagcacgcgacgcaactatcctctagagagagagaggaagcccgtcgttctggaagtttccacgctccgcgcctccgccccctggtctccgctccaatggcgccctcactcctcgccgccatgtccacctcgcccttcctagccagcagcggcagcagccgcaggccgctaggcgctgcccacacccgacgggctggactgcgcgtggccgcgcttaagtacgaccctgccaaggtggcgccgcagaacgaccgggttctcgtccgtcttgagcagatccctgagaaatctgctggcggtgtattgctaccaaaatctgctgttaagtttgagagatatctgatgggtgagattctatcgatcggtgctgaagtcagtgaagttgaggctgggaagaaggtaaggaacattttatgacttaactcttattgatgcatgctcaaatgctcacttgtgcaaacaagtagcatttttgtgctttgcgtgtgaagtttgtttatactttagagaacaatctatcatatatttcacacttttgtttatactttggagaacaatctatcatattatgtcacactttgctttgtggtttgtcttctaatcttactattcaaatttattgtttatcttggacaaaggaactaagtgaatggactatgtttacttgagtagattgaagagtggttatgtttctaaaacaaatatagtgtgctaatttgcaagatgctaccattatgacattgtctgctactgaaatctgcttgtcacgccagaaatagacatgctttatttttgttttctatccttgtcaatttttccggcaattgaaattgttactgtgtcaattcttacagtttgcatagtttgttgaatgtacttttacttgtgccgaagtacaatgctcataatgtagaatactgtaaccagtttgcacttgcaggttctcttctcagacatcaatgcttatgaggtggagcttggtactgatgaagagaagcactgcttctgccgtgagtcagacttgttagctgtagttgaatgaattttaccatgaaaatttcggacttacctgggaatgctccaacggcatgaacttatcttgcccccactttgttgtatgccatttgaacgttcgttaattcagcttctagatgattgttagttaccgttgatttttggtcgccataaactggaattatgttaatgcccattttctttacaaaggctcttgctcacgtttggaatacgaaactgtgctgacccg

SEQ ID NO: 124202 - DNA, 1320 bp, Zea mays
  unsure (1)..(1320): unsure at all n locations
  Clone ID: MRT4577_44752C.1
acgtacgcgtcagcggacggtgggtcatcattgacacctacggtggctggggaacgcgtgggtgctggacctttccagcaggcggacgaccacaccgtattgcaggcggcgatatctactaagacaccatacattgatgtctgcgatgacacggactattcttggagagcaaagggcttccatgagcaagctaaagctgccggtgttccggctattactactgctggcatctatccaggagttagcaatgtgatggctgctgagcttgtacatgctgccagaagtgaagttggccctcgaggccggccgggatgttcctacttgagcatttatgacctgtttggctcgctgcctaatttgccacatattgccacacttttgtgcctaaggttagttcttcaattcgaacgactaaccttaggcaaagtgtggcatagttagccacaaaccaaacaagcccttaatgtgtagttcctgtgttacagttaaaccaaatggtttgctgtgggctggaatccagaacatatacatgaagagatgataatgttcagttttcagttcgcattaattacctgatccccaacttggccctcttcaggagttcttgagggatagaaataaagttcagaagttggttcagtctgttgatcctttggttcgagccgttgatggtattgcaggagagcatgtctctatgagagtagatttggactgctcaaatggtcggaatactattggattatttactcataaaaaactatctgtatcggtgggatttgcaaccgctgcatttgctttagcagttcttgagggcaacacacaaccaggagtttggtttccggaagagccggagggaatacggatagaagcaaggaagctgcttcttgagcgtgcatctcaagggacaagtaccttcgtgatgaacaagccttcctggatggtagaaactgatccgaaggaagtcggcctaggaatttttgtgtgagaagatcgagttgcttaaattattggggtgcttgaaaagggcagctaaatcttgggagtagtttaccatccgcgagaagttgaatgcggcaaccagcagcatgttgaagtcccagaaggttgcgctattttgtttttgaaagggttgtatatgaaccatgatgggttatgaagaaaaagaatacaggtcagttacacgattttttccaccacacaggtggtaagcttggaacttagctgtcattttttaatattaaaaacctaacgtggaaaaaaaaaaaaaaaaaaatnnnnnnnnnnnnnnnnnnnnnnnnnnnnnnnnnnnnnnnnnnnnnn

SEQ ID NO: 124203 - DNA, 250 bp, Zea mays
  Clone ID: MRT4577_44753C.1
gccacggccacggggaaacccgacgacggccaaacccaccacgacaaccaggagcaagaacaaggccgagaccatcaccacgagcacggacatggaggcgctaccactgccacaaacccaccaccaccaccatcaacacgatcacaatgacgaggaggcgccgaccaagcatgaaggaacccaccccgctggcagagccggaaagaagcctccggggaacatcaaccagcacagcgccatacccccacga

SEQ ID NO: 124204 - DNA, 949 bp, Zea mays
  Clone ID: MRT4577_44754C.1
tcgcaacgcaggcatgttggaggaagcgctgcagggtgtggatttggttgtccatactgctggacctttccagagggcggaggagtgcaccgtattgcaggcggcgatatctactaagacaccatacattgatgtctgcgatgacacggactattcttggagagcaaagggcttccatgagcaagcaaaagctgccggtgttccggctattactactgctggcatctatccaggagttagcaatgtgatggctgctgagcttgtacatgctgccagaagtgaaaatggcgaacctgaaagactaaggtactggtggtgctggtccaacaatactgacaacaagttttctacttcttggggaggatgtgattgcatataacaagggagaagaaatcaaattgaagccctatagtggagctctgaacattgattttggaaagggggtcagaaagaaaaatgtctacttattgaatttgcctgaagtcaagagtgctttcaagatattaggtgtgccaactgttagtgctcgatttggtactgctcctttcttctggaattggggaatgcaggctttcgcaaactttttacctgttgagttcttgagggatagaaataaagttcagaagttggttcagtctgttgatcctttggttcgagccgttgatggtattgcaggagagcatgtctctatgagagtagatttggactgctcaaatggtcggaatactattggattatttactcataaaaaactatctgtatcggtgggatttgcaaccgctgcatttgctttagcagttcttgagggcaacacacaaccaggagtttgggttccggaagagccggagggaatacggatagaagcaaggaagctgcttcttgagcgtgcatctcaagggacaagtaccttcgtgatgaacaagcccttctggatggtagaaactgatcc

SEQ ID NO: 124205 - DNA, 312 bp, Zea mays
  Clone ID: MRT4577_44755C.1
gtgatgtcaatattatgccggtgcggtctccttggtcccagactctgcggaaaatgactttgatacttctcatgctactggctttctaagcagctccgccggcgagcgcggtggtccgcggtgacgagtgttatcaggtctgctacccagtccacatgattggcgtaggagtgatgtttcgaggtgaaagcagatctctgctagccacgggcccatggacacttacagggatcacgcttttgggttcctaacagccactattgtttcctatatcatttgcctagccatgcatgtcttgcattgcgtttttta

SEQ ID NO: 124206 - DNA, 441 bp, Zea mays
  Clone ID: MRT4577_44756C.1
atgtccccgtttgaagctttatatggcagaaagtgcagaacccctctatattgggatcagactggtgagaggcagttcttcgggcctgaaattattcaagaggcagaagaacaaattcggatgatcagagagaacttgagaatagcacagtcgaggcagaagagctatgcggatacccggagaagaccactggaatttgaagtgggtgatcacgtatacttaaaagtgtcaccgatgcgggatgtacatgatgtgttccacgtatcccagcttatgaagtgtcttcgtgtcctagaggagcagttgcctatggaagaacttagtgtgcattgtgatctaacctacatcgagcatcctatcaaggtcatcaataccctcactcgagttacgaggaacaaagtgataaaaatatgcaaagtgcaatggagtcatcatggataa

SEQ ID NO: 124207 - DNA, 577 bp, Zea mays
  Clone ID: MRT4577_44757C.1
gccacgcgtcgctggcgtcgctgctcggttccctgacggtgccacggaccgaggaattggccgagtattaggtagagaatcgttattgcttgtcttactacggggtctgctgcgtataggtggagagaaaaggggaaaatattcgcgagatatgctcccgatcaggcgtaccagctctgtaatacatggtttcacacatagctatttcaattacaattggatgttctaatggagtataagggtggcaaaaagtctaccatgattcattacattatgtttgaatatacccttgactacattatacatgacgttacgacctaacaaaggcctgaataattttcactctaattgttactacaactgatccaaaaatccattctgatttccttattgtcttactcattctagtattttatgatacttttattgacactaagatttttaccaatctgtttgctctgctgctacctgataatcaaccaggttcctagtattgctccttgcactatttcctgcttcatgttcatgattaccttctgaattacctgctccaatgtgctgctctttctgctgctga

SEQ ID NO: 124208 - DNA, 969 bp, Zea mays
  Clone ID: MRT4577_44758C.1
cggccgctcgagccggcgggcggggatacagaagagagacgaaagcaaagcaaacactttccctcctttccattccattcccctcaatcaatccgccgactgttccgtttatttaaccgagccgtcccattcttggagagcaagaagcacgccaccacctcgcgccaaagaatccccacccctcccctcccctcccctccccggccgcagacagatccggcgaccgacaagccatggtgtccaacggggagctgtcgcagccgcaggcgggggagtacggcctcgccgtcatgcgccgccggcccaagaccaagatcgtctgcacgctcggcccggcctcccgctccgtcgacatgatcgagaagctgctgcgcgccggcatgtgcgtcgcccgcttcaacttctcccacggctcccacgactaccaccaggagacgctcgacaacctgcacgccgccatggagcgcaccgggatcctctgcgccgtcatgctcgacaccaagggtccagagatccgtactggatttttgaaagatgggaagcctatccagttgaggaagggccaagaaattgtgatctccacagattatagcataaagggggacgacaagatgatatcgatgagctataagaagctagcagttgatctgaagccaggcagtgtcatattatgcgctgatggtaccatcactcttacagtgcttcattgtgacaaagagcaaggtctcgttcgctgctgttgtgagaacactgctatgcttggtgagaggaagaatgtcaatcttccaaggggtcgttgttgatctgccaacactcactgaaaaggacagggaggatatccttcaatggggcgtcccgaacaagattgacatgattgctttgtcgtttgtccgcaaaggttcagaatcttgtggaaggtcagggaaggtactttggggagcatgccaagtcaataatgctgatgtcaaa

SEQ ID NO: 124209 - DNA, 623 bp, Zea mays
  Clone ID: MRT4577_44759C.1
tcccaagaccccgaatgtattctgcgactagctgatggagcctccaggaccatgcaacgtagaggtgcacacctgcaggccttgggtaaagagaagatcccacatgtacagtgagggcataggccatgagaactctgttaagtgggcgacaagaggacaccttgtctacgagggttgtacgcattgacaagcatgtgatcgaagaagctccagaaggaggctgcggaaatgaacaagcggttcttgacggactcgcgggggctccacaacctcaagggtgaccgtgagcagatgaatcaccattgagatcgcatctgtgctaagcttgagagcaccaacgactactgcacggagatagatgcccctggatagcgcgacttcatcaagaacatgatcagtgggacctcccagagctgagtgagctgaacttatagattgactccaccactggtggcgttgaggctggcatctccaaggatgagcagacccgtgaacgtgttctacatgcgttcacccttggatgagaagccgatgatttggtgcttcaaccagatgaagtgcgagccactcccaaataccccaaggcacgttatgaagagattgtgaaggaagtctcatcctac

SEQ ID NO: 124210 - DNA, 2287 bp, Zea mays
  Clone ID: MRT4577_4475C.1
aaataaacttggaaccccaaaaacggcccccccctattaatttgtatttaaattcttctttattttaattatttattagtcattctattatagatcctttattttttctatttttatatatttaatatttttaaattagagactcaaatgatttcaacatgacatgccatgtcgacactttgtttgagcaaacccgattttagacagttttgaatgagccactaagtttccacacccgtttacctgttttaagttcggggagtcgctgctgcattttaatcagtaaataaaatgtatctatctgttaccaatcatctacgctatggttaagtaataaaatagatggatcttcatattagaaaacacgcagactagtatttatactactgactagagaattgcaggcatgaaaccgcagtcatgactcaggcccaccttacatagtcccattgagttgagttgacatacacctccagtccagaagaccttctgagcgccagaccctttcagttttcacctcatccttaaaatgcgacacgtagtttccttatcagaaattggtaatatggtctgatcagaacaagatgttgccaggaacactttccaaaatcctactccatccgttcttttttatttgccacgttttagttaaaaaaatgaactagtgggagtgttgcataagcttatgctctgtaatatagtttcttcaaataacttccgagctggggtgagatagagtctgcagcaccctgaacacacttgtggtaagaaaagtcttcagtggtatcatcgtttctcagcaaaatgaagcaccttgtacctgggtgactaggattcaacccgatcttaatttctcttactcccacaccgatcttttcagcacctctggaatgaaatttcagggcctcgattaactgtgatttatctggctccgccacatatccatttaacgggtactctcttagcatgttttgtaaggaagtacgcatatcgataatgttatcccatatactgactttagcatgaagaaagtcctggtcgatagttatagcaacaccattgacggtcgtactgcctttagaagacttgcatgctaatctacatatcgaagcattttcagtactttgtctacgggtatccaaatgattcttttcaaaattccgaactttagagctgcataggaaatcatagatgctctcattttgttctggttcatgtggctttcctgagtgcataatttcaaaaggccctgacgtcccattgaaaggctctttgccccaagcaactgcatcgagacttccacacagattgtccactgaacattgctttgcagcatttataaaactttgtgcaggcctagaaaaacatgcttcagaaaatggagacgagatcgataaccgagtgcgctgctgctttaaaccttgactgcttaatgcatggaactgcccagttacagacaagctatctgcaataaccagcaagtgctcccggcgaatgttcctcccagtatcagtagtcgctgatttcaaggattcaacaaagtatttccatgctgagtctatgccatatgaacagaaaatatcagatacattgcttggttgactcagctcccagtcaatcaactccattactggaatgcaagcattttgtagagtaggccagaacctcccccctttacaatgctcagacatacaaactttaacaagaagttcaccatcatgtggacactggatctcaacatccttaaattccaaaaaacctttcagcagtgtatccagtatgcttggaatcacccttgtcttgatagtgtccaactgagagatggagttgcgttcagcatgtgctacgacagcgatacagcatgatgaacttttaacaccctcgtcacctactaaacattttctccttgagatacgaattgatgggattgcgttgtttagctgatctctggtggtgtcatactcttttgcaagttcatctacaacaaatctcaacccacatctttttttcttcatcattgccttgtttatatgaaaatgggtggtccacattccttcgtttcttattttgtcatgtccatcgtatataatcatgatggttccaaccaaatcagagaagttcactcgctcaagatggtttttaacttctagggatgcatattccagaccgtatctgtacttcttcaaatgccttgacaggaaaagcaaaccaatatgatcccctgaatttgtagccttgtgacacttaaatacttcttgtagattcatgagaggggagtcctctaaac

SEQ ID NO: 124211 - DNA, 388 bp, Zea mays
  Clone ID: MRT4577_44760C.1
gccatgcacactcccagcccagccgtaccagcaccagctcagctcagctcagcagggatgggtcgcccctgcagcagcagcagcagcgccgatgcccgcctcctactactgctcgccgccgtcgcaacgacgctacaggccgcgggcgccgcgccgacggtggccaacggctacatccgcaaatcctgccgcgcgacgcagtacccgtcggagtacgagcagagcctcgcggcatacggaggctacccgccgccgcgatagcccgcacgagctggcgcacgccgcgctggcagcgagcgcagaccgagctcgggcagcgtccgcgtacgacggacgcctgtgcggattccggtccggatccggcgacgggagcccccgccgaggcgcc

SEQ ID NO: 124212 - DNA, 389 bp, Zea mays
  Clone ID: MRT4577_44761C.1
ttcgtctgtttcaggccctcacatgttgaattgttgatgctaaaatgtgctgcatatatatatatatacgatgaaaactatcgtcaatgcttttgatcaagctcgtctatctactgctgcgactgataagttggttcgctcgctgtgcccgtttgtttccctgctcgtttgttcagtcccgatacctggtctggtgatcgctggaccatggacgccaagaagattaagctgcacgactaccacctctacggatcgcagcagctgtttcccgcggccggggggctctccttccacccggctccggggctcatgagctccctgccgcatgccggctggctgcacgaggaccaccgcacgacgaccccgaggtcggtgctcgcgacacatgg

SEQ ID NO: 124213 - DNA, 1144 bp, Zea mays
  Clone ID: MRT4577_44762C.1
cgattgggtacctcgaggccggccgggcctgaaagcacccagaagattcatatcaatcggacataccatgtctaccagagaatagaaagaccttccttccatccatcccacagtcagtcgttgacacaaagagaaattccacagccggggggcaaggctttaattgccccctctccctccctcgcctccttcaccatcccaccgagctttgcaacagctagtagcatgggcaagctgtgctgcagccaggaagacgacgagccggcgttcaacctcctggggctgctcgtcaccgtcgtcctcgccctgctcctgctcatgctgtgcacgccgccccgccgcaggcgctgcgtcgcctactacccccgttactgctaggacaggacggacgcggtggcggtggcacacgccgtcgagcttcagccttcttcgaggtagggaggaaaggatcaatcttctgctctgctctgcgatgggcgccgaggtaggcatcagacgtggagttcaattcgagtccgagttgtggagtatacaataaatcatgctggattgtttgtttgtatgtaaaagcgttctgttattattggtaaatcaatgtgactactgcataaggctggtcggtctgtaacctgatccgagagtctgtctgttggtaaaaaattaattgactactggaatttgttgactgaaaaaaaaaaaaaaaaaagcggcctagaaaaacgcggtatctgaaagttttcgctctgctgctgctcatgctgtgcaagccgccccgccgcaggcggtgcgtcgcctactacccccgttactgctaggacgggacggacgcggtggcggtggcacacgccgtcgagcttcagccttcttcgaggtagggtcagggaggaaaggatcaatcttctgctctgagctgtggagtaataaatcatgctggattgtttgtttgtatgtaaaagcgctctgttattattggtaaatcaatgtgactactgcataaggctggtcggtctgtaacctgatcccaaagtctgtctgttggtaaaaaattaattgactactggaatttgttgacttggtaaaaaaaaatataaaatgggcgcgcgtgggtacgcgtgggaattaccgcgaccggtacgtggagggg

SEQ ID NO: 124214 - DNA, 677 bp, Zea mays
  Clone ID: MRT4577_44763C.1
cattgggtacctcgaggccggccgggggacatactatgtctaccccagaatagaaagaccttccttccatccatcccacagtcagtcgttgacacaaagagaaattccacagccggggggcaaggctttaattgccccctctccctccctcgcctccttcaccgtccccatccatcccaccgagctttgcagcagctaagctagtagcatgggcaagctgtgctgcagccaggaagacgacgagccggcgttcaaccccctggggctgctcgtcaccgtcgtcctcgccctgctgctgctcatgctgtgcacgccgccccgccgcaggcgctgcgtcgcctactacccccgttactgctaggacaggacggacgcggtggcggtggcacacgccgtcgagcttcagccttcttcgaggtagggaggaaaggatcaatcttctgctctgctctgcgatgggcgccgaggtaggcatcagacgtggagttcaattcgagtccgagttgtggagtatataataaatcatgctggattgtttgtttgtatgtaaaagcgttctgttattattggtaaatcaatgtgcctactgcataaggctggtcggtctgtaacctgatccgagagtctgtctgttggtaaaaaatttattgacaaaaaaaaaaaaaaaaaagcggccc

SEQ ID NO: 124215 - DNA, 809 bp, Zea mays
  Clone ID: MRT4577_44764C.1
gactcactctcggcaacggatatctcggctctcgcatcgatgaagaacgtagcaaaatgcgatacctggtgtgaattgcagaatcccgcgaaccatcgagtttttgaacgcaagttgcgcccgaagccttctggcggagggcacgtctgcctgggcgtcacgcgcagtcgttgacacaaagagaaattccacagccggggggcaaggctttaattgccccctctccctccctcgcctccttcaccatcccaccgagctttgcaacagctagtagcatgggcaagctgtgctgcagccaggaagacgacgagccggcgttcaacctcctggggctgctcgtcaccgtcgtcctcgccctgctcctgctcatgctgtgcacgccgccccgccgcaggcgctgcgtcgcctactacccccgttactgctaggacaggacggacgcggtggcggtggcacacgccgtcgagcttcagccttcttcgaggtagggaggaaaggatcaatcttctgctctgctctgcgatgggcgccgaggtaggcatcagacgtggagttcaattcgagtccgagttgtggagtatacaataaatcatgctggattgtttgtttgtatgtaaaagcgttctgttattattggtaaatcaatgtgactactgcataaggctggtcggtctgtaacctgatccgagagtctgtctgttggtaaaaaattaattgactactggaatttgttgacttggtatctgaaagattttatttttaaaaaaaaaaaaaaaaaagcggccaaaaaaaaaaaaaaaaggccccta

SEQ ID NO: 124216 - DNA, 358 bp, Zea mays
  Clone ID: MRT4577_44765C.1
ccggccgggcagggccgttaccgtctgggtgcactggttcgacgtcttgtgtgctgcgtgtgcgcttgagggctacaggatgagcgagatctggagggagagggactatgattgcctgaagaactacgctcgtggggggaggctcccgtcacccccactcaagaacaccgtcacggttcgtatacgctgcaagtggggtcttgggcacgagaacctcgtatattcatttccatgggcgcatccccccaacaatgtgtagaggcgtgaatgagataaatgacgctgaaaaagagcccctatcatcagatttgccctatgctgggatctcaccatcttcaaagaaaaaataaggggcgga

SEQ ID NO: 124217 - DNA, 228 bp, Zea mays
  Clone ID: MRT4577_44766C.1
ggtcactttcgtaacatggtgcatcatctaggaggtttgcaacgttcgcctttcgtaccagttacttatcccttctggatcctaggacgcactgtgtatcggatcattatgagcagttagtgtggtggtcacgctcaatcttgctcactaacatgactacgtatcaccgccagtaccattgatggtcataccgtcccggtgcatcataatgggcgagatggcagggga

SEQ ID NO: 124218 - DNA, 1279 bp, Zea mays
  Clone ID: MRT4577_44767C.1
tacaggagcaacctccttttgacaagaaatcatttgttttttcttcaaaaaatacatcaagattttccctgctgtgttggagccaaagaaagcggatgagttcaaaaagggtgtcgagggggcaaccaagtttttccttagcaagctgaaggccctccaattttttgttggtgagtccataaaggataatgggtttgtggtattcccctattacaaggatggggcccctaatccgacattcctctatttttttcatggttttaaggagatcaagtgttaggggtgcggcgaaattagttacccctgttggggcctatttatgtactttttttatatcccaaactatagtgtcctggctgaattgaactcaaaagggtttggtttgagaaaaaattgtcccaagattggattgcttgttaaagctcaatattgttattgaagtgttattgcttaaaaaaaaaaaaaaatggtcaaaacataatatttcagaacaagtccgaacgaactgaaggagaggaggaggaggagggatggcggacgcagccagaggcctcgggtcttcgtctctcccggtggctaacgtgcaggcgcttgcggagtcttgcaacgacaacggagccgatgcgccggtgcccgggaggtacctcatcaaggatcctagcgccgaggaggtcgtagccgccggcgacagcgcctgcgcgattccggtcatcgatttccgcaagctgctcgatccggggtcgtccgaggaggagtgcgccaggctgggagccgcgtgccaccactggggattcttccagctcatcaaccatggcgttccgaccgaggtgactgggaacctgatgaaggacgtagctgggttcttcaggcagccgctggaagccaagaaggagtgcgcgcagcaggccggcagcatcgaaggctacggccaggccttcgtcgtgtcggaggaccagaagctggactgggcggacatgctcttcctcatcgtgcggccgagggaggccagggacatgcgcttctggccgacgcgccctgagtccttcaggtgaccgtagtccgccgagtccgagatgaatgatccatatattcaactgctccagcttccttttaaccgtacctgaaccgattccagggattccgtggacgcgtactccttggaagcttcgaagctagcgtaccgcctgctggagttcatggcaaggggcgtgggtgccgacccggcgtcgctgcagggcatgttccaagggcaggtgcagggcatgcggggtgactacta

SEQ ID NO: 124219 - DNA, 992 bp, Zea mays
  Clone ID: MRT4577_44768C.1
tttttttttttttttttttttttttttttttttgttttttttttttttttgggaaaggcaatcacaactaagcaataacacttcaataacaatattgagctttaacaagcaatccaatcttgggacaattttttttaaaacaaacccttttgagttcaattcagccaggacaactatagttttggatataataatagtacatagatagtccccaacatgggtaactaatttcgccgcacgcctagcacttgatctccttaagaccatgagagaaatagaggaatgtcggattagtggcaccatccttgtaataggcgaataccacagacgcatcatccttcatggactcaccaacaaaaaattggaggtccttcagcttgctaaggagaaacttggttgcaccctcgacaccctttttgaactcatccgctttctctggctccaacacagcagtgagattcttgatgtattttttgatgtaatatgtctactccctggtatccaacgaaattgggttggttcgcaataaaatcagactgctgcaccatgggtccaggcccagacccaggccctggtgcagctaatgctggattggcaccatctggcttcggatggaagtatctacatgaatccccatacttgcaagtccccgtgcggacgaagtggtggcatatgcccttggcgagggtgccgtcaggcaggaggagggaggaagcgccgccatgctggtcttggtggcgaatggagtcgtaccagagggcgcgggcgcgttggtgctgcacgccctggaggtggcgcttccgggcggcgggggtgtcctggaactgcttgtcgcagtagtcgcagtagtacttccccaagggcatcgtgttgggtgttggcagctctggtctcactgagaatttccacacgattttttacaaaaaaactgagaatttcctttgctaatccgaagcctagccaaaaccaagagatttactattcccggccgg

SEQ ID NO: 124220 - DNA, 473 bp, Zea mays
  Clone ID: MRT4577_44769C.1
gtacattgtcctgccaacgtttgcttatgagcacaagatttttgtcggtcctttttctaggaagttccccaaggctcaagtatgggttgcaccaagacaatggagctggccattgaacttaccacttgagtttttcggtatctttcgtgctaaaatcatcaaagacagggacttatctacgccatgggctgaggagatcgaacagaaagtcctaagctccccagaagttggaattggaccatatgtcgaagtagcgttctaccataagcggtcaagaacccttttagtcactgatgctgtgatcttcgtcccgcggaaacctccctcgagtatcagcaacgaatccttgttggcctcggctaagaatggactagctgtgaagatacttagcaaaggaaaagacattcctaatgatcctgtggttgataatcctaacacccgccaaaaaggatgggaaagaatggttctgcaaa

SEQ ID NO: 124221 - DNA, 261 bp, Zea mays
  Clone ID: MRT4577_4476C.1
gcggaaggcgtcgactttgctgtctccagcgacggggcccgcggtctttggcggcggagtcgaggtgtttctgccgggcttaattccccggttgttctcccctcttagccaaggtttcccttcagtcctctcggagtggaatgccctaaagcaatgcatcttctctttgaatgagctctggatgcagctaagaggcaaagaagatttggtaccttgcattagggtggacatgttacgcatagtttaaattctctgacagtg

SEQ ID NO: 124222 - DNA, 837 bp, Zea mays
  unsure (1)..(837): unsure at all n locations
  Clone ID: MRT4577_44770C.1
gctttcaagcatttctacttgcatattagtatgaactttggtaagtcctcgtttggatctctacagataataattatctattaacaattaactcatatccaattctttagtccaaatagaaatactaataataaactcacttctactttcgtcaaaaacaagattttaatgaagagataaaaatataaaatataaaaagactaactgaaaggcaatcacaactaagcaataacacttcaataacaatattgagctttaacaagcaatccaatcttgggacaattttttctcaaacaaacccttttgagttcaattcagccaggacaactatagttttggatataataatagtacatagatagtacccaacatgggtaactaatttcgccgcacgcctagcacttgatctccttaagaccatgagagaaatagaggaatgtcggattagtggcaccatccttgtaataggcgaataccacagacgcatcatccttcatggactcaccaacaaaaaattggaggtccttcagcttgctaaggagaaacttggttgcaccctcgacaccctttttgaactcatccgctttctctggctccaacacagcagggagattcttgatggattttttgatggaagacacaaatgatttcttgtcaaaaggaggttgctcctgtagacggaatgtgtcaacaatatcaaccaccttcacagctgtgtcatcaacgctttcgtcctcaccaccctcggcggatggattggcaccaatgtccacatcaacaggaccttgggtgacccactttccctcgacctcccaaggnacgccgttctcgagctcc

SEQ ID NO: 124223 - DNA, 1292 bp, Zea mays
  Clone ID: MRT4577_44771C.1
gacaaatctgctaaaatgtcaggtgatgttcctagagcagccattgccaatattttcttcaccgaaatatttacgccgctcttgctcgctgtcgtaacggtcatcccgtacttgttcatcaacgcgcaaactggtgtcctagcagacaaacaaactgttgccaaaggtgcaaacccgccaaagattcagcctacggcctcccttgtccgtattctgattgtcgcctttggcccggtggccatcaatgctggtgtgttgttggttatgtttgccatggcatgttttatgggccctctcttgagtatgtgctgcaaaaagttcggtagtgtcttggctgctattgcgcatgctttggctgtcatcttcatgctggttttcttcgaggtactgttcttgctcgaaggattcaactttgcccgtacaatggctggtatgattgcggtggtatcgctccagcgattcctgttcaaactgattgtctcattgactctgacgcgagagtttaaaaccgaccagtctaacattgctttctggactggaaaatggtactctatgggctggcactccgtctcacagcctgctcgtgagttcctttgcaagattacggaacttagcatgtttgcagctgatttcattctcggacattggttgttgatgttcatgcttccggtcattcttattcctcgtgttgatacactgcactcaatgatgctcttctggcttttgcccagtcaacaaatccgccctccgatttactctttgaagcagtcaaaacttagacgtcgtcgtgtcatccgttttgctatcctctatttcgttctcgctgttgttatgattgccctgattgttggaccagtttatggtggcaaggcagtttcggcctcattaaacaaccagctgtctgatattgctggtttccgattgttacagccaaaccaccaaaaccatgataacacgaacggaacccagcaaacaggtacaggggcgccaaactataccggtgctggcagaaaaacgacaagcacaggcgcgggtgctggtgtcactggcaagatcagactattttgattacagaggtatacattttatccaacttaatggcccgttcattatggagcaagtcttctagctctcgaatatctattgttacacctatagttgcttgatctttaagggataggtagtatatgcttgctcctcattcattgagcaatggccctttatgaattatcatagtattttttttatatctattccataacgatgcttgcctaaatagactttgttttctt

SEQ ID NO: 124224 - DNA, 1641 bp, Zea mays
  Clone ID: MRT4577_44772C.1
cgccgcctccgacatcgtctcttcgtccccacgagcaaccgataatccgccggcgctgagatgttggtttatcaagacctcctatctggcgacgagctcctgtcggattcattcacctacaaggagctcgagaacggcgtcctgtgggaggtcgagggaaagtgggtcacccaaggtcctgttgatgtagacattggtgccaatccatccgccgagggtggtgaggatgaaagcgttgatgacacagccgtgaaggtggttgatattgttgacacattccgtctacaggagcaacctccttttgacaagaaatcatttgtctcttacataaaaaaatacatcaagaatctcactgctgtgttggagccagagaaagcggatgagttcaaaaagggtgtcgagggtgcaaccaagtttctccttagcaagctgaaggaccttcaattgtaagttctatcaataaatacattgcatatctattattagcttagtaatgctatgtgaagtatcctctgcaagttctatacccaaatctattggtaatacatttcatatctattgttaacttattatagcaatgcagcgtgaactactatactatctttttctaatatgaattagaacttggtattctcatacacaaatgtatatctagactttgtgatcccacgtttgcagattgtaccatcctatctttttctaatatgaattagaacttttggtattctcatacacaaatgtgtctccagactgtatgtccctagactttgtgatcccacattgggcagattgtttttgttcatgtaatacactggtctggctgtaacctcctgtttgcctgaaaatgctgctctaccctcttcatgctgcttgcattattttggcacaatagttttttgacaatagcttaacatattacattttattcctaccacgatttattcacaactctctagtttggtctaatgttggcttttgtgtaaggacagtcctttttaacaggtaatttagtctaatgtttgtttttttgttaaatctaatgttgacattgttgtcatttacatgtctaatattgacattgttatttatgtttttaacagttttgttggtgagagcatgaaggacgaagcgtccgtggtattcgcctattacaaggatggtgccactaatccgacattcctctatttctctcatggtcttaaggagatcaagtgctagattagttacccatgttgggtactatatatgttctattgttatagccacaactatagctggccctgcctgaactgaactcaggttttttttaagaaaaaactgtccaagattggattgcttgttaaagctaaatattgttattgacgtgttaaaaaaaaaaaaaagggcggccgcccttttttttttttttttactacagctggtccatctcttatcttcttaagacatatgcttctttgggaaccacatctaatcctgccacccaaccaaaccagcgggtataatggcataatagagagactgtacacccaaacttctgctattattttctttcaggctacaaatcaaagaacagcgtttcctatatatttatatatacatggcagtataactatacctccaaaaactaaacacagacctgca

SEQ ID NO: 124225 - DNA, 369 bp, Zea mays
  Clone ID: MRT4577_44773C.1
ctgattttacgcgcctactttttgctgctttttttttgtcattcaccttttttctgtggacttcccgggagaaaagaaaaaacatgctttggatccgctgttgctgcttacgaggagtttgaggaagactactgcgtaggcggtctctcccggggaatgtttgcgtaggtggtgtaccggccggctgtatctttttttagccttgacaaccttggcgcttctcggatccaaaattgaacccacctcttgcttgatctcgccaaccctctcgatgagggcctaggctttgtcggcgtgctgctagatctcatccgcgaccgtcttaatcttccaggccgcttatctgagaccgtgggtgtcggggatcgc

SEQ ID NO: 124226 - DNA, 852 bp, Zea mays
  Clone ID: MRT4577_44774C.1
gggaaaatgcgccgcggccgtcctcgctgcccaacccttgctcgctgcgccgccgcctccgacatcgtcccttcgtccccacgagcaaccgataatccgccggcgttgagatgttggtttatcaggatctcctatctggcgacgagctcctgtcggattcattcacctacaaggagctcgagaacggcgtcctgtgggaggtcgagggaaagtgggtcacccaaggtcctgttgatgtggacattggtgccaatccatccgccgagggtggtgaggacgaaagcgttgatgacacagctgtgaaggtggttgatattgttgacacattccgtctacaggagcaacctccttttgacaagaaatcatttgtgtcttacatcaaaaaatacatcaagaatctcactgctgtgttggagccagagaaagcggatgagttcaaaaagggtgtcgagggtgcaaccaagtttctccttagcaagctgaaggacctccaattttttgttggtgagtccatgaaggatgatgcgtctgtggtattcgcctattacaaggatggtgccactaatccgacattcctctatttctctcatggtcttaaggagatcaagtgctaggcgtgcggcgaaattagttacccatgttgggtactatctatgtactattattatatccaaaactatagttgtcctggctgaattgaactcaaaagggtttgtttgagaaaaaattgtcccaagattggattgcttgttaaagctcaatattgttattgaagtgttattgcttaaaaaaaaaaaaaaaaaagcggccaaaaaaaacaaaaaaaaaaaaaaaaaagcggccttaggaggg

SEQ ID NO: 124227 - DNA, 249 bp, Zea mays
  Clone ID: MRT4577_44775C.1
gattatagtgataataacattgcctactggggaaaggcatacattcgaagttccacaagccggttattaaactacaacaagggaagggtcaagccacccctaacggtgtggtgaagccaaatgatcaaaaacgcatggcatgaatgaagggacgagcacaatgcaagaggtttaaaccgaaaacattgaatctgttgaagcacaaatttgctcttgggactacacaagctacagaagttgctcacgggc

SEQ ID NO: 124228 - DNA, 648 bp, Zea mays
  Clone ID: MRT4577_44776C.1
acttgatacacttcatatcctctatcatttatttgccttttattcttatttacattcgttctggtctgatctaagcttcactctacgccgacatcatggctagacgtcatattcctgtcattcgttctcgtaatgatagcctaagcagcgatggctttgaggagctggggcctcgaagcatgctacccaatgcgcgacatctcagatacgccgttgatggcgaggttcctgatgttttgtatactctcaatcacgttggtgtcaatcggcgtttccttgggcgcttgcgaagctcgaagccgttccagaacgtgaccacctacgaaatcagacaagatgagactgatgaggacggcgagcttgtcaagaagcctattttcgagattgtcaccaccgtgtgcattgagggcagacctgatgatcatagacgcatggctcatcctcgtcgagcagcccctcagatagatcggcccctcacggctgcctttgaaaatgtcgattatcgaagtgacgggtattataccgatgaagagcagtatgttgatccggctggatctccagtggctgatgctcctctcatggttatctactcggagcatctcatcaatgcccttagagcttggtgtagatactacccgaccatcactc

SEQ ID NO: 124229 - DNA, 388 bp, Zea mays
  Clone ID: MRT4577_44777C.1
agctctcgagggtgcttgagaccatgcattggtacactgattagagctcatggaggtgtctaagccagcaacaatacaggactcagctggtcgtgcactggttgctctgtttaccttgtagtctaatacgaagggtgttttaaagaatgagaagagtcttaacattatttgtgcggaagctcgatccacggcttcaggagactgataagaagtatgcactctagatctatctagttcttgtcataggccgccggaactgtacacgacgacaacttgttgatgctgggtcttgacagtatgtacaaaagctgactgatgctgatatggctggtgcaaaaaaagctttgttcatgatatctaacaatctacttaaaagtttgtttttcat

SEQ ID NO: 124230 - DNA, 811 bp, Zea mays
  Clone ID: MRT4577_44778C.1
ttttgttgtgtctggagctcgtacggtagaagggtattatgataatctggcagcagagggtgaattagataacaaacgttcagattctcgaacctcggaaggtgttcacgagaagtggattggacaaatagagaaggatttgcccagaacttttcctggtcatcctgctttagatgaggatggaagaaatgctttgagacgcttgcttatagcttatgcgaaacacaacccatcagttggttactgccaggcaatgaacttttttgctggtctcttgcttctattgatgccggaggagaatgcattttggacattggttgggattatggatgactattttgatggctacttttctgaagaaatgattgagtcacaggtggaccagcttgttttagaggagttagttcgagagaagttccctaaattagcaaatcacctggattaccttggacttcaagttgcatgggttactgggccatggttcttatccatcttcacaaatgtgcttccttgggaaagtgttctccgtgtctgggatgtgcttttgtttgatggaaacagagtaatgctgttccggacagctcttgcgctactggagttctatggccctgctcttgtgactacaaaagatgctggtgatgcagttacccttttgcagtctttagctggttccacttttgacagcagccagcttgtcttgacagctcgcatgggataccaatccgtaaatgacacaatattgcaagaactgagtaataaacaccgcccacctgttatatctgcaacggcgacagcaacggcgacagcaacg

SEQ ID NO: 124231 - DNA, 432 bp, Zea mays
  Clone ID: MRT4577_44779C.1
cacacgcgtccgcctagcgtagtaggaaattctccgccgacgccccgccatcatcgcccccgcacccgacattctacccctcgcgcaccttccttcggctccacccctccccacccccgctatgcccctgcctccgtgacacccgtgcccagccccaccacccccggcaatctcccatgctcccccatcaacgctccctcctcacatttcccgcacaccgagacaaatccgtccacgctatggtttggattcgtggatggagcccgaggttagatccagcaggagaaggaagatagaggaggagagggaatgggtggcgggcctatcagacatggatggccgccaccgtcgcagagtcggacgacgctggtagcggcggcggctgtgggtgcggcgagcggatgaagctactattcaacctgggcgggcgca

SEQ ID NO: 124232 - DNA, 1748 bp, Zea mays
  Clone ID: MRT4577_4477C.1
ccacgcgtacggtgcgaggacgaggacgacgcgggcgcacgcagcagcaagctctgaccctgaaagctgaaaccgctccacgccctccccctccgcgcagagccagccaagccaaccagccagtcagaagaggaaccggggagcggcagctgcagcggccgagggcggagcacgcgaggcatggatagataccaaagggtagagaagcctcggaatgacacgccaatcagccagaatgagatcagaatcactactcaggggaggatgaggaactatatcagctatgggatgtcgctgcttgaggaaaatggacatgatgagattagtatcaaggccatgggacgggccataaataagacagttatggttgttgaattgatcaagagaagggttggaggtcttcatcagaacactgctactgaatctgttgatatcacagacacatgggaacctttggaagaaggccttctcccactagagacaactcgccatgtgtcgatgatcactgtgacactgtcaaagaaccctctggatacatcatctccaggataccagccacctatcccagctgaagaggtgaaacctgcttttgactatgatcatgaagaatcgtatcccactggtcgtggaagaggacgtggtggtggcagaagaggcaggggaagaggcatgagcaatggcccccctccacctgcttatggttacaacgaagagtgggaggaggaaggagattattataacagagggcgcgggagagggcggctacgtggacgaggtgggagagggcgtggtggctactacggaggtgggaggcgtggtggctacggttatgattatggctatgcccccagaggcgggtactatgaagagcaagacgaatactatgatgagcccgaggaatatgctcctccccctggccgcggacgtggcagagggagaaggggcggcatgccttggcgtgggcgtggaggccgcgggccaccgcgcggtggccgagggagctactactaggcgcgagaaatgcgacgtgccgaatgcgtgtgcttattagttatctgttagcgtttgctgcagtgctcttctatggagctccgaccccggactggaattatctcgtaggcccttccaggtgctactctacttcagctgctgtccctgtgcaactcgtccgggcaagttttgtggctcgctcgtggttttgtagctaggttaagcgagtgaagttacactcggtagcgcagtatttcctgcgagattgtttattcttctgttaatgtacctaccttactatttcgtttggattatggatactgggtgcatccgtttcatgtttaaaaaaaaaaaaaaaaaaagcctcaacgacagtgtgtacgctgatgcctgctgccatacggggcagaagttttttttatgctgcagaacagagcagcagggaaaaaaagtcacaatacagatgggcaagacggaaaaaaaaaaaataaaaaattaataaaattaaaaataaaataaaagatgaggagtgaagctgaccagtacggacgatggcttttctgaatatgctagaagcaagagacaccgtcgagggcggaagttcaaggcatcatctcaagtttctgaggaaaatcttgctgcagtggctgctttgaaggatgccacctcacctcaacaaaagagtggaatacagaggagtccagcacaagatgtatcctcgctgcagcaagggaagcccatacgaatggtggtaatga

SEQ ID NO: 124233 - DNA, 1686 bp, Zea mays
  Clone ID: MRT4577_44780C.1
atagtggaggaggtctggccctgcgtccgaggcggagagcactatagtacgagctccacagtccaagttcgcactcgcgagtgctagcatctctcgggaatggcggagtcgcgtggcttcgtgatggcggctgtgatggtggtggccgtggtatcggtggcgccgcgcggcgcggaggcgaagacgacgatcgagccgtgctcggggtccgactcctgcccggcgctgctgggctacacgctctacgccgacatgaaggtgtccgaggtggccgcgctcttcgccgtcgacccggcggcgttgctggccgccaacgcgctcgacttcggcgccccaggggcggcgcaccgcatcctgcccatgggcctcttcgtgcgcgtgcccacccgctgctcctgcgccgacggcgtccgcaagtccgtctccgtccgctacgccgcgcgcccggccgacacgctcgccaccgtctccgacgtcgtcttcgcggggctcgcctcctccgaccagatccgcaacgagaacggcctcacctccgccgaccccgacgcgccgctcgacgccggccagaagctcgccatcccgctgccatgcgtctgcttcaactcgtccgacaacaacctccccgcggtgtacctctcctacgtcgtgcaggtcggggacaccgtgcccgccatcgctgcaagctacgagaccaccgtcacggatgtcatgaatgtcaatgccatggggagtccagtcgccgcgccaggcgacattctcgccatcccattgccagcatgtgcatctacatttccaaaatccgcatcagaccacggactgattgtagcaaatggaacttacgcgcttaccgctagcaactgtgtgcagtgtagctgtggacctggcagcctcaatctatattgcacgccaacttcactgtcgggaacctgtcctagtatgcaatgtcctaacagcgacgtgatgcttggcaatgtgagcacccatccaaccggtgctggatgcaacgtctctgcttgcagctacggaggttttgttaatggaactataacagcttcgctaaccggaggtctccaagccagatgcccaggaccacgccagtttcccgcactgacggaaccacctaccacggtgagccacgactcaacgtaccttcctccgttatcagcgcctgggccagcggaagctggtggcgtcatgcctgaaccaggctcgccagggccaggcccctcggtgcaagcagggcccttcacgctcccgaaagtgtctaaggccaatggccccgctggcagcgtttcagcagctccgttggtgggtaaaccacttcaaatcctacccgtcctggtctcctgcctagccttctacttgcagctctgatcgagtgaacccacatcgcgatgaattctttagctttgtcctgtccccgcagcctagtatatgcttttgaagcaccacgggacatcattgctcgatcaaactccctctgagttgttgttctagctttgtttcgcgaaatctccccggcaaaactgcgcgcctaaacagcatatctgatgatgtgttcgctgcttttgtacaaaaaaagaatggccctgtgtaaagcagtaaagtggtagctattgttcttctccgcaaggcatcctggtccaggagctgcgttttttatactgagttgttctggcttgtttc

SEQ ID NO: 124234 - DNA, 994 bp, Zea mays
  Clone ID: MRT4577_44781C.1
cacagaaaaacacagccaatgctacatacatcggactgcagtgtacaacagaacagccttcacagatttactcttgtttacattttggaagctaacttgattacaaggtgaactgacaaaataacaaaccttacataactttgtgtacctaaaaagttacatgaagaatatctgtacagaagcttatgttacacagccacaccagtataaaaaatagtgggcatgctatctaacagttacaggcttatgttttagacaaggccgatatgttacaattctttgctaaaacaatgccaactagctacagaaattatcaatcgaacctaaagacctatacaaatgaagttacataaaggccggtacaaaaaaatttacatggcaatgttgtggacgcttttgtcctaacctaccacaacagacaatgtcgctatgccacatcactaccttacagaacaactcaagagttacattccaaaataaacaagagatcagatcaagcatacttacatctcaaattattgctacaacagaccgcggagatatatatgcagtgaaagccatcacagctacaagcagtaagcagttgatggatgttactgaacaatgcctgggtgcaaagaggtcgctgccctggatcgtcatagcctctacactagatgtagctcagccagctacgctattgagaagtcatccgtctacgtttagaatggtcagcttccctggacctgctgcgtttcccagatgacctccccctgtcccagtcttcattacgctctgaatcacggtccctgtgcctgtgatgatcaccataacgatctctgtcatccctgtgtctgtccctatctctgtctcggtctctctctctgtcacgatctctttccctgtctctgtcatagttgcgatctctctctcggcccatgtcacgctcattccggtgcctcctctccggctgctcctgttgagggtggcacccacgcgtccgcccacgcttccg

SEQ ID NO: 124235 - DNA, 665 bp, Zea mays
  Clone ID: MRT4577_44782C.1
ccgggaatccgaaacggaagtgagacgcccaatcggtgatccaccgcttccccgtcggtaccatgtccgctggaagcgagaggccgtacgccttctcgcccccctcggcggtcccgggccccttctcccgcggctccggctccggctccgctcccaccacggccgcgacagatagcactgggaggagctcgtcctccgtggcgccgacgaagagccgaaagccaccgttccggcccgccgtggacgacacaaagcccgtcctccgcgatccgatatcacgctcggacctggcggtcaccgagcaggtcgtgctgcggctgccgccgttcccctaagttcgcgccacccaatgatcgtagaagactgtcataatctgctgaaatgctgctactttttttgttttacatctaagtctgttttttgtttcttctctaatttgttccgtcggtgatgcactgatgcttgcagttctttgctcaaccatattaatctaaagatggtgccctttctgcgcatgttcgtcaactcgacagtttgtcaattggaaactttgcccgtctaattatggttctggaccattagtggtttttgtattcaattagtaaactgagttatatagaagtaatgataattggttatctaaaaaaaaaaaaaaaaaagcggcc

SEQ ID NO: 124236 - DNA, 893 bp, Zea mays
  unsure (1)..(893): unsure at all n locations
  Clone ID: MRT4577_44783C.1
ccgctgtgtacgaacttctgaaacgggtactgctagtgctgcgttgggaatccccacgcgggccgggacgcccgaaacattcggatctgaaatcctaaacggaagtgagacgcccaatcggtgatccaccgcttccccgtcggtaccatgtccgctggaagcgagaggccgtacgccttctcgcccccgtcggcggtcccgggccccttctcccgcggctccggctccgctcccaccacggccgcgacagatagcactgggaggagctcgtcctccgtggcgccgacgaagagccgaaagccaccgttccggcccgccgtggacgacacaaagcccgtcctccgcgatccgatatcacgctcggacctggcggtcaccgagcaggtcgtgctgcggctgccgccgttcccctaagttcgcgccacccaatggtacgccgtaccactctaccagctactgtctggatcagttttagttctgtagcattaacaacgattgtgcatgctctggttcacctgttgtttaacgctagctacagaagttcttcactaccctaccaacaatattcaggtgttgaatggtccgatgtgtatccagcataagatttttgtggggtcttctctttgtttggaatgaatgaacacaacccacatgtcactgcacgaaatgttgctaatttgctcaaggatatagaaggagatcctgatttggccgaaatagaaaaatacatttatccacagctcttcttaaggaagattggggggttctcccctatcgctggttggaccctaactgtgaaaagctttcttggtccagactctgntgtaatgctaaacattatgattttctttatacataggctatgnaaataaagagaggaagaaatggtgagg

SEQ ID NO: 124237 - DNA, 388 bp, Zea mays
  Clone ID: MRT4577_44784C.1
aacatagaactccattctggggtcgggtaccctaaaaattagcgcccctcaccaaccaaagaaaccaaaaaaacggccaacaccatagtcacctcgtacgttcggataagagctacctgccaaagtacctcataatgatcaacgtgttaagtccttattcctaacaaagcccccctttactcgggcaaacaatgatagagcggacaacgaactgccacaaccatttactaccgaggagcggccctgtgcatacccaccctaacacgaaaaaagggaacttcatggataacttgataatctattcttcaacataaacacccaagctcaaactagagaggaaccctacagtaaatacacccatccgcaggcatgtcctactttactacaa

SEQ ID NO: 124238 - DNA, 400 bp, Zea mays
  Clone ID: MRT4577_44785C.1
aaagcaaaaaacctaatcctgccttacttgggggggggcaaaaaatttagcaacggtccatcaggggtcattcagccaagcaagaggggaccccaggccctacaccccctttttcggttatatcctttcctttgggcccatggcaatctacaacacacataaacgaatgggttgactttaacccccacgggccggaccaggggcctaataatttaacgtttggcttcggcgaataacggaacggggaggcgcggggcccctcccaaagggtcccaaggggctgttgttgcccgttccccccaaacgggctttgggccttgggaggagccggggccggggttgctcctgccgttcatgctggtcgagggccccatgcgctcggggggcattgtttggaaaa

SEQ ID NO: 124239 - DNA, 214 bp, Zea mays
  Clone ID: MRT4577_44786C.1
ttttttttttaatccccaaaaaacgtaaatatatataatacaacacccccttttgctgcccggttgcctgacacacgactaacacatatccgtacataaccatccatggatggatggatgccttgaaacacttttttttttaacaaaagctcacgaggtaaagcgtttatatatacctacccacgtcttcggccggcccatgctgtgtgaaagt

SEQ ID NO: 124240 - DNA, 447 bp, Zea mays
  Clone ID: MRT4577_44787C.1
acgcttacccacaagctttcattctgttcattgttcaatcaccaaattgttcgaccttgcatttcacgcactccactgccacgcttccatggcctaacgtaaccgcggcatactacagcgaatcgcactcctagtacgagaaggcggctgcctggacgttctgtgatgagcccaaaccctggagacaagccgaagagaagcgttgcagaaacgagcacgagggcaagcttcgttcaccatcttcgttgcatggtcatagtaatggctggttcaacacactaaaaaaggcacactgtatctgcaaacagttctgtggaacacagtttcattttcttcgctgggttatattatcaaccactacgcttcattgccgcaaccatacggggggaactataaatagacaattatacaaaaatgcacgggccatcaattgttagaagccgggca

SEQ ID NO: 124241 - DNA, 210 bp, Zea mays
  Clone ID: MRT4577_44788C.1
gaaatagtaacacagcttacaccaggttagattgaagcattcctcagatattatggttcatattttcaagtctttgaagtaccaaagtttatggatacttttaacccatcagttataatcgataacatgtgcgccaattcttcttttggtgggttattgaatattttgaatccggccagtgagttttcacaacgtttatttaactaggtt

SEQ ID NO: 124242 - DNA, 523 bp, Zea mays
  Clone ID: MRT4577_44789C.1
tatgacgtctaccgacgccttcggtctgcttgtagatatgcatagtggagcgcacatcacactggcaaaaacatacattcgctggcgacaaccgttgcacggatccgcggtgcagacccccgatgagtatgtaatgccccacagtataaggggcagtagcactgaccgtgtaggacatgcttgtagccgtagccataggaactggcgactatcagctacgacagttaccacgactgataccatcattgcgcgaacggtaggattgacgattgctggaccgagatgggcatccaggagtgaggatgcactgtccagcacgatggggacagccgcgccaagacaggatgatcgtacatggcattgaactgatgcacttgacatcatcgctgtgctcggagcgatgcacatatgaccaagacgatgacctgctctaaatgttgaagcccggggagctacagtactttatagcctattgctataatgctaccataggtgcggaacagatacgtgatgacaaacatcg

SEQ ID NO: 124243 - DNA, 456 bp, Zea mays
  unsure (1)..(456): unsure at all n locations
  Clone ID: MRT4577_4478C.1
gggagcggcggcggcatggctacgccgcactgcttctccccaggctggagatcatggtcgtcgtcctggcgatgccgtgcgtcgcccaagcggcggcggcgctcatcaggggcgggaccacgtgcggcctggtggtcgggatcgtgctcaccgccgtcctgacgtcggtcctggtggccctgctgctgttcctgtctctgggcatcaccatgggcaagctgctgcagtacagggaggtgcaccatgaggaggggcaggaggagtaccactggtaccaggatctggcccgccgcgccgnctgcctgcccaggcttggcccgctcttcgaggacctgcgcggcccgcccaagtacatgcgtggcggtggaggcggcaagcgccgcgccgaaggcggcggaccagagcggcgggtcatcgcgtcggaggacgagaacgaggggtcgagggcgcccttgg

SEQ ID NO: 124244 - DNA, 310 bp, Zea mays
  Clone ID: MRT4577_44790C.1
ggacccacgcgtgcggggaggcgattttttttgttcctctgcaccggcaaagggaaatggcgcccgggccagggtatctgatcgggacggttctgagcaagaacaactcccaccttgtgacgcaacttccgccacaggaaaaccaaggcgccgttcatcatagagcccaacagcttctacatgatacactacttcaaacccactgagggggcgaacacagaataatgggacgatccagccggctgcaaaggactcggttgaggaccagcctaactacccagaccaagaagcagaacctacctgcaaagct

SEQ ID NO: 124245 - DNA, 593 bp, Zea mays
  Clone ID: MRT4577_44791C.1
tccccatctttaaatattaatagagctcctgcagagatctggggggggggggggggggggggggggggtagaggccctatcactcaggcccggcacccgtacccgcagccctactggactacctgtcgtcgttccttcccacaaacccacggcaaactttttaacttcacacccacccttgggggaccacaacaccaagttagatcactaacccactcggacgtacctactccactgcggaagaagaagatgacaatgacgacagtaataaagggtattatcaagaagatgcccaaggagaactttattaacttgaagatttgtaagattctccagaaaaagaagaacgtaaagataatcatgcaactgtacatccatatataggttatgcacgtcttgatccaggtagtcgtcgtatttctccacaagatcatcatagttgttctggttctcgacgtacacattacatagtacaaggttatcttgattacaaattacaacagtgattataagttgctggtcgtaatacaggtccaaaatgatttacaactgaacatccagttcgttgtataggatgaggtcgttgttaacaa

SEQ ID NO: 124246 - DNA, 437 bp, Zea mays
  Clone ID: MRT4577_44792C.1
tggacgcgtgggcggacgcgtgggggtctttccatcggcgacgtctacgtcggtggaaccactgggctttttgatgtgggccgtcatcctcgctgggatcctcgtcggtggcgcccttcctcgtttatcaacacacatcgcctctttgctggttaaggatatttcaatgcttgcgcattattgcgattctttcagtgtaacaatttaggggcgtttgtcctataattttaagcctctcatggatgcttcaactttgcgtcatgttaacaaataatcagctgcttactcttttattacataaattcttgtattgcttagaaaaattaataaatatgggcgggcccgctttaataggatctcacagctttacggttacgctgggctgtgtcgaacgtccaaaggctcttttttataggtggttactctaaaattcaaat

SEQ ID NO: 124247 - DNA, 424 bp, Zea mays
  Clone ID: MRT4577_44793C.1
gatcaacaaaaatcaactaacggggtgggggatttttacagttccacaccgccaaaagtttacttttttggtccttaagcacgatcaatacaggcacactctatgatttgaaaagcccagccatattaagtttttacaaactatccattgaactcacagtgcgaatccatccaaacttatgaagacagtggtggctgtggacccactataccttcctcagaagtcactgtcaaattaacagtggggctcagcttagcgcaaatttccttggcacccaggacaggggcagacatgaatttgctcatgaagtcctaaatgacaggggctgttttgtcgacagcaacaaactcctggtgggtcaacatgagaacaaagcgtggtgcacacttccaaaaagccaaaccaacaatttcaggaccatttt

SEQ ID NO: 124248 - DNA, 319 bp, Zea mays
  Clone ID: MRT4577_44794C.1
cgcccctctctttacggccacgcgtaaattgaaaaaaaggcatatagcaccaaactcttaaacaaaacacaacagatcctaaatccaaaaagcgaccagccaagggtcaattgtttgcctataacaaatgagggcacatctgatcatcactcttcatcccacataaatcttaattcctaatgcctgaagatcaactactcccccaaaggatgcctgatgatcccaccccccttatccaaaacaaacccatcttccctgaagcactccctcgaaaaaaagggcttaaaaacgtacattttttattcttgggccttgttcc

SEQ ID NO: 124249 - DNA, 416 bp, Zea mays
  unsure (1)..(416): unsure at all n locations
  Clone ID: MRT4577_44795C.1
aacaaaaaaacaacaatagcaaccaaaataaactccctccttatcctccttgctctctctacatctcttgctcaccccacaatcctccctcaatactcacaacctcctataccttcccttcttcccccataccttccgtggggggtggcttcnacataaaaaaaacccacccctccaaccatacanccttcaacaaccaatcccaacaaccaacatacctttaccncccttnttncatcaacactcaccaaccctatcttccctacantcattcnnacaaaccatcaacacccaacaactnaaccaactcnncctacctncaaccaaccaantacctccaacaaacctaactccctactctcaccancaacaatncctttcattcaaccaactccctacactcaaccccccctact

SEQ ID NO: 124250 - DNA, 867 bp, Zea mays
  unsure (1)..(867): unsure at all n locations
  Clone ID: MRT4577_44796C.1
atagggtacatatataataataagctaatagcagcgccacgcaccgacaccaatacgccatgggttccatcatggagcaacgctgcaacaacgatccgcaggcgctgctcgacgctcggcatcgccgacgccatccactgccacggcggcaccgccacgctcacccagatagccaccaaggccgcgctccacccgtccaagacaccgtgcctgcgcaggctcatgcgcgcgctcacagtcgccggcatcttcagcgtcgccaagaactcgtccgacgatgacagcgatcagcacgtctacggcctcactccggcctcccgacttcttgtcggctcgtcacagaacttggctccaacactgagcctcatccttaacaacgtcttcgtggccccgttccttgacctcggcacgtggttcgagagcgcgctgccagcgacagacctgccgctcttcgagctgtcccaccggaagaacgtgtgggacgtcgtcggccacgacccgtccgtgagccagctcttcaacgccgggatggtcgcggatacccgcttcctcatggacatcgccgtcagggaggtgcggcgacgtgtttcaggggatacgctccctgggtcgacgttggcggcggccatggncgcggcggcgcaggccattctctgcggcgttccctgccatacagtgcaccgtgctggaccttgcacacgtggtcgccaccgctcccgcttgcgccgggctcagncttcgttgctgggcgacatgtttgaggccattccgncagcgaatgctgtcttcccctcagtggatncatgcacgactggggngtgacactggagtgtgtcacgatactaaagaaaactgcagaagctatac

SEQ ID NO: 124251 - DNA, 1705 bp, Zea mays
  Clone ID: MRT4577_44797C.1
atagaaagttgatccccatgtccatgtgtatttctcaccaattctggaaagtaagctgaataggggccttttttttttttttttttggttctgaaaatcctggagttcattccttagaattgaaaaacgcaacttcttcactttggagacataataatggttgaaacacttgcatacatgcatacataaaccatccttttagtgagtatataactatatataccaatttattaaacacacatgcacactgttcttaaaggaaaaaacacacacacagatccacacgccaaagcattcaacatgtaggtgatgaggccgccggctgaggaagctggattatatttcaggggtatagctcgatgattgatcgaacacctaaaactggtatgattatgtagtcactgaaaccagcttcaaagatgatgttcctccattcctgctcatctctctcaaggccgttgacgatcataaaaaagagatcagacatgacctgtgtctctttgttcttaaggtttggaggccctgcaccaaccacggtatctactattatcaccttgccgcctgcatctcgtggaggtatagctttcttgcagttctttagtatcgtgacacactcagtgtcaccccagtcgtgcatgatccacttgaggaagacagcattcgctggcggaatggcctcaaacatgtcgccagcaacgaagctgagcccggcgcaagcgggagcggtggcgaccacgtgtgcaaggtccagcacggtgcactgtatggcagggaacgccgcagagatggcctgcgccgccgcgccatggccgccgccaacgtcgaccagggagcgtatcccctgaaacacgtcgccgcactccctgacggcgatgtccatgaggaagcgggtatccgcgaccatcccggcgttgaagagctggctcacggacgggtcgtggccgacgacgtcccacacgttcttccggtgggacagctcgaagagcggcaggtctgtagctggcagcgcgctctcgaaccacgtgccgaggtcaaggaacggggccacgaagacgttgttaaggatgaggctcagtgttggagccaagttctgtgacgagccgacaagaagtcgggaggccggagtgaggccgtagacgtgctgatcgctgtcatcgtcggacgagttcttggcgacgctgaagatgccggcgactgtgagcgcgcgcatgagcctgcgcaggcacggtgtcttggacgggtggagcgcggccttggtggctatctgggtgagcgtggcggtgccgccgtggcagtggatggcgtcggcgatgccgagctccagcgccgacttgaacgccatggacttgatgaacgcgaacgtgctgtgccagagctcgagctgagcgtcgagcagcgcctgcggatcgttgttgcagcgttgctccatgatggaacccatggcgtattggtgtcggtgcgtggcgctgctattagcttattattatatatgtaccctatcccggccggcctcgaggttcccaatgccggccctcgagggagtcattgtacgtggtccaggagagcgcgctgcagaagcagcggtactcaccatccgtcgacgccatctcgatccgcccacccacgaaaccgaaccccggagaacctcacgaacccgaacccgaaccggagggggaggagaagccaaccctcctcgtattagcac

SEQ ID NO: 124252 - DNA, 702 bp, Zea mays
  Clone ID: MRT4577_44798C.1
atcacgcgtcccacgcgtccgcccacgcgtccgctcggaggtccgggatgagctccggcggctgctcgacgtgcctcgaggtcatcttcgccgccatcctcccgccgctcggcgtcttcttccgctacggctgctgcagctccgagttcttcgtctccctcctcctgacgctgctgtgctacgtccccggcgtcgcgtactccctctacgtcatcctccggacgccgcccgagccgccgggcatcgacggggagcggccctacgacatgctcgcctgacggctttgcttgtacttgtacagctccacccaacaacaacaacgcgtaggcctgtgcaatgcaacacacactcgctgtatgtagtagctgtaggtagcaggtagcggctcaggacattcctgactgtgttctccagcgtcacgtacgtccctgttcctcgtcgcgtgtgatgactgtgcaattgttggtcattggtttgctgattctttcgatcagtttatcacgaacagtagggtgctgccgtgctggactgctgctcgtctgtttgccgatcacgcagcagttggtggtaattggcaactgatataaaatttatgcgtgtactcatgtataaatcccaaccagtaatgcggttggaattaaaagaaaggtattgtttggatatggtttaaaaaaaaaaaattctatagagaaccaaaaggcg

SEQ ID NO: 124253 - DNA, 681 bp, Zea mays
  unsure (1)..(681): unsure at all n locations
  Clone ID: MRT4577_44799C.1
aattcgggcacgaggggatgatatgagacattctgaaatgttttcgagctgcctttcctctgagcattttgagaaatcaattatatctcctgctacagcttccagcttaaatatgcatcatctcaaagccaagtgtgagaacattcatcttgatctacagacttatccaaaaaatgtaaggctcaaggcatcaattgcccaaattaaacttgatgaatactaccacgccggaaacaatatttcagatgattcaaaccttggtaatcacttcttgaacaataacttgcggcaaggagttcaagcttccctccctcagtgcctgtttgctgttggagatcattcggtggaaacctatgaattttgtggcaatagttcaactgaattgactagagttgaattgctaaaaacttttggcgagtgcacattctgttatgatgtcagtaccaaagatcaagatggcaatttagtgagctcaacttccatgtcgatctatttggctcctttgcttttatgggtgcactttcatacaatatacatgctactgagttntgtaagtaatgttgagtctgatttgtcacatggagagcataaaattcaaaagcatggtgacgaanagggaagcagattgactaccagcacaaccatgtcctcaagtgggagtcctaaagttcagatatccct

SEQ ID NO: 124254 - DNA, 1403 bp, Zea mays
  unsure (1)..(1403): unsure at all n locations
  Clone ID: MRT4577_4479C.1
attgggtacctcgaggccggccgggggcacagtttgcgaggacgatgcgggcgcacgccgcagcacgcagcaaagccctgaaaccgcccccacgtccccctccccgcgccgcagaaccagccaaccagccagtcagaagagtaacaccggagcggcagctgcagtggccgaggccggagcacgcaaggcatggatagataccaaagggtagagaagcctcggaatgacacaccaatcagccagaatgagattaggattactactcaggggaggatgaggaactatatcagctacgggatgtcgctgcttgaggaaaatggacacgatgagattagtatcaaggccatgggacaggccataaataagacagttatggttgttgaattgattaagagaagggttggaggtcttcatcagaacagtgccactgaatctgttgatatcacagacacatgggaacctttggaagaaggccttctcccactagagacaactcgccatgtgtcgatgatcactgtgacgctatcaaagaagcctctggatacatcatctccaggataccaaccacctatcccagctgaagaagtgaaacctgcttttgactatgaccatgaagattcgtatcctactggccgtggaagaggacgtggtggtgggagaagaggcaggggaagaggtatccgcaatggtccctctccacccgcttatggttacaatgaagagtggggtgaggaaggagattactataatagagggcgtgggagaggaaggtcacgtggacgaggcagagtgcgtggtggctactatggaggcgggaggcgtggtggctacagttatggctatggtgcgagaggcgggtactatgaagagcaagacgaatactatgatgatcctgaagaatatgcccctccaggccgtcgtgggcgtggcagaggaagaagggggatgccttggcgtggccgtggagtctactactagacgagcgatgcgatgcgatgcgatgcgacatgccaaatgggtgtgctgaagctagcaatggcgtgcttggttggttatctgttctatggagttccgacccaggactagaattacccagcagggtccttccaggtgctgtgcctgtgcaactcgtctgggcaagttttgtggctcgctcgtggttttgtagctaggttaagcgagtgaagtttaatcactcggtagcagtgttttcccccttcggacggcatgcatgttgtttattttgctgctaatctacctaccttccaatttcgtatggatggtgatggatactggatgcatcagtttcatnnnnnnnnnnnnnnnnntaatcctgtagttnttataaagacggttaacactgatacctgatgacaagatgaggcaggaagtttgttatgctg

SEQ ID NO: 124255 - DNA, 338 bp, Zea mays
  Clone ID: MRT4577_447C.1
cgaacaagctcgtgcaagccttttttggcaagtacgccaaggggtaataacctttggccaaaaacacactggcgcccattttgtgcccccagggtcgaaaggttgaaaagacccggtgcatccctgctcaaaagtttaagatttgtgaaagccccccaagttggtaaaccacaagttgggggcaaatggcggccgtccaacatctggcttgaacttttgtagaattggtttattctgggatttaaaacatggtgtaacgggatcatgcatggcgtggatcattttttatggatagactatataggaagcatgcatggtgtggtgcccatcgacgtgct

SEQ ID NO: 124256 - DNA, 580 bp, Zea mays
  Clone ID: MRT4577_44800C.1
cattgggtacctcgaggccggccgggctggcgctacggcgagtgtaaagagtaatgcgcaaatggcgtcgttttcgacgggcaagtgggcgctgagagcactgagtcagtcccttgcgagggagtttgggccgcagggcgtgcatgttgcgcatgcaattatcgatggggtaattgatattccgaagacaaaggagtggttgaaggatatgccgcctgaggcgaaattgagtgctgatgggattgcgaatgattattggtggctgcatactcagcccgtgacgaacttcacgtgggaaatagatctcaggccagcgattgagaaatggtaaagtcacgtctttccttctctacggctgcgctgaggtcctggagggacggcgaagatagcagcaccgggcctgcgaagagacagtcacgaatataatatacaagtcagcagatatgctgctgtcgcgagtctacgtgtcttcattccagccatgcgggttgtgatcagcaatgcattccagcagttgtttgtacgacagtgtggaatactaccatcgcgcaagtctaaaaaaaaaaaaaaaaaagcggcc

SEQ ID NO: 124257 - DNA, 523 bp, Zea mays
  Clone ID: MRT4577_44801C.1
ccggccgggttgcctcggttctcggaatctgaacgtctcccatgggctcttggcgcctgctgacaatggagtacaaggctctcctccgggtgcgaagaagcgtaagcctcgggctcctatctctcgcctgtaacctcctcctattgcactctcactaaacctagccgaccgcctccgcccgctgatgtcggaagccctatctagctgcgtcaaccgccctgacgagtgcgccgttcctccggatcaagagtgactaggatcttggatgcacggactgctcctatgagatgcccctgcgcccgacgtggagatccgtacaagtctgggctgagcaatctgcaggaagagtatcaggcgatacgagacgaacgcgacgagcacgcgtacgtcgatatggacacgcgaggtcctcggctatcaaggtgcagccgatcgacgagcaccgggtcactctgcgaccgcatcgacgccggcctcgagggcaacgaagacgaggtcaagctcattgagctatgactcacct

SEQ ID NO: 124258 - DNA, 796 bp, Zea mays
  Clone ID: MRT4577_44802C.1
ggtaccctcgagtcggccggaacctctcccatggcagccacgtctccctctctcctccctcagctcgctggtgcttgccgcacagtctcgagctccccatggtgcgcggtcctggtccagcccctgttcttctctcttctcctccaccgcatccttctccctagacaccccttcggccgagcatcctctctgccggagctgcctcaacgcccgcactccttcaggttcttccatggcgatcgtcgttgaactccgtgcgcgcgcctgctcctatgccgcgacccccagttccctcccatggtgctcttcctcggccactgcttccccagccacgagttccccctgctcggcatctcctcgagattgccttagctcgatgcccagtttctttctccatcgcgccctgctcgatttcacccctgtgtcgcgtgccctggcatctgcgtgctccgcgcgcgccccttcctcctgcttggatccgaccatcattctggcagctggccacgcccctgcccctgcttctccctcgccagcgcgcgtcctctgctaaatcgtctctagcacgccctggatggcattcctctccctgcgcacagctgcgagctccgctctgtcgctcggtccttgctgtagctcgcgcccagcctccctatgcgcgcttagcttggagctcccgcagcctagctcggggtcttttccatgggcacgcgcacctcaagctcgactcttctggtgtcgcacgcgtgcctcttgttcgcccctgcttggactgtgttcacctctgcatgtgtcgagc

SEQ ID NO: 124259 - DNA, 424 bp, Zea mays
  Clone ID: MRT4577_44803C.1
ctttccgtcgccactagagaaagaaagagagagtccgctgccatcgaatcacaccatcctcaccgctcggcacctgtaacctggttctggatgttcaggcgtgtgcgcgggtcgcgctcagggaagaagctagaagcgcgaggcccacgcgtccggggaattctttgcgtagttgaatctccgccgcgggatcgcgccaccgcgtgggcaggagagtcttcacccctaaccgaggagaagaacaggtgctcaaggaggagccttacaatgaagaatatgagctcatctaggtggtgtctcccagtcaacttgttggcgccaaggattaatatgtagtccgttttatggttatcatttatttttgtaagacttcagctatgtaataatgatacttgtgtcatttatctctatacactttgtcatt

SEQ ID NO: 124260 - DNA, 667 bp, Zea mays
  Clone ID: MRT4577_44804C.1
aaggagctcaggaagaacagcttcatggtgctcatccccgaggacgagtgcgccgaggtcgaggaggatggcgacgaggaggaagggggcagccccagggagtggctggagtcgggtgtcggtgacggcttccccctgtgtgggttcgattcactgtatgataagtactgcgagagtatgctggtgtttcataaaatgatcgcacagctcatgaaggatccaggtaaaaaatgtagctgactatggatcaatgttcttaaggcggtaaggcgaggcgttggaccccccccttaacgcataggcgagcaaggcgcctaaaattattcgagcacctggtcgtttagacgacgccttaaaaacactgctatggatgttctcctatatgcttggctgtagcttctcacatgcagttggttgtaatgtggattgtgatgtgtgtacatagtctttttttgtgtgcatgtgattatgcatgtatctagtctgatgctacaaaattatccatgtttgtctcgggtacttcttagttatcagggtccacctgttgctattctagtgttatagattgtgtggccaacatggggccttgttagcattttaaactgtggtcccaactcctgtaaagtggcttaatgaatacaagtgttctgtggtagttgcatgtctc

SEQ ID NO: 124261 - DNA, 405 bp, Zea mays
  Clone ID: MRT4577_44805C.1
cttggctccgaacctttgggctgatttatgtgcttgtggatgtgcgggtcgcggatctggacgaccactaacgactgctgctcactgtacacgaatgggtgcacacgagacacccgcccgtgagagagcctagcccgttaccgacgctcgcagtccacgaagtttccagccagccgttatcgccgccttcggcatccgcacgaaccgggccacgaaaacgaagagccgcgccacgagccgcaccccgcgactaaaaaaaaaaaaaaaagaaaaaacacaaccaaacacaaaaaaaaaaaaaaagggtggttgtctcagaggacttaagtccatgcatgtgcgtacgtgatgctacagtctcctcacagcgctattcaaacctaacctatcggttgctgccccata

SEQ ID NO: 124262 - DNA, 404 bp, Zea mays
  Clone ID: MRT4577_44806C.1
ctcgagccggcgggaatttttcaaaaaggcagccagccatggagattgcctccttcctttcagtggcgctggccctggcggccctcggccccggctcgctgctccttgtgaaccggctcctctacggcaagctgcccccggggccgcggcggaggtccgaggtgggcaacctgttcgacgagcaaccagtgcggggccggtgctaccaagagggggagagccgtctcggggccaacatgactgagagcctgatgacgtccccctcggtgcaggaatccacgacgaagctggagcaaggagatgattgagaaccccgaggatctgctcgaccaccaggacccgttttttttttttctacacccccctcccgtccactgctcaccccaccagtgacatcgactcgc

SEQ ID NO: 124263 - DNA, 178 bp, Zea mays
  unsure (1)..(178): unsure at all n locations
  Clone ID: MRT4577_44807C.1
cgtcaaccccagcttcggctatgacgaagcgcaaccaccgcttcgtcagttctccgtcgcgcctccgccatccgcaccggcggctccggcgtctccagtgccggtagtaccgntgcgcatagcccgtacctagctggttaattgcatgcacgatgcacccactagcgctaattggttg

SEQ ID NO: 124264 - DNA, 289 bp, Zea mays
  Clone ID: MRT4577_44808C.1
catataaaatatgggagtaactttaggattttctccgtcattttaaaaaaacaaatatatccccgaggtacttccgagcacattaggctctagaaaatagacttgccgatacgatattacactcactggatggctctttgaaaccaaaggacctgaccgcgcagctagccaatgcacaggcgattctccagtcatgcaagcgtgcatttactgcaactgcgagatgttcaactccaaccgcacccaagtggagacttttatggttgagcaggacaatatatcctcatct

SEQ ID NO: 124265 - DNA, 246 bp, Zea mays
  Clone ID: MRT4577_44809C.1
gtgcactgtgaagctgtccaatgagatccgagctgtgaggatatagattgttcccatcccattgtcaagacactaacgcgcccgacatcgatatttattgccactacctgcccttttccagacagggtaattagcgctcctgcgagacttccttaagttgtggtaaccgtgtatgatgcttcctctgaggtatataaccccaattctgggtgacccgtcactcaccatggttgggccatatcctac

SEQ ID NO: 124266 - DNA, 1388 bp, Zea mays
  Clone ID: MRT4577_4480C.1
ccgggtcctgaaagctgaaaccgctccacgccctccccctccgcgcagagccagccaagccaaccagccagtcagaagaggaaccggggagcggcagctgcagcggccgagggcggagcacgcgaggttcaagattatccggtttaaagacatcagaagaggctgcggcatggatagataccaaagggtagagaagcctcggaatgacacgccaatcagccagaatgagatcagaatcactactcaggggaggatgaggaactatatcagctatgggatgtcgctgcttgaggaaaatggacatgatgagattagtatcaaggccatgggacgggccataaataagacagttatggttgttgaattgatcaagagaagggttggaggtcttcatcagaacactgctactgaatctgttgatatcacagacacatgggaacctttggaagaaggccttctcccactagagacaactcgccatgtgtcgatgatcactgtgacactgtcaaagaaccctctggatacatcatctccaggataccagccacctatcccagctgaagaggtgaaacctgcttttgactatgatcatgaagaatcgtatcccactggtcgtggaagaggacgtggtggtggcagaagaggcaggggaagaggcatgagcaatggcccccctccacctgcttatggttacaacgaagagtgggaggaggaaggagattattataacagagggcgcgggagagggcggctacgtggacgaggtgggagagggcgtggtggctactacggaggtgggaggcgtggtggctacggttatgattatggctatgcccccagaggcgggtactatgaagagcaagacgaatactatgatgagcccgaggaatatgctcctccccctggccgcggacgtggcagagggagaaggggcggcatgccttggcgtgggcgtggaggccgcgggccaccgcgcggtggccgagggagctactactaggcgcgagaaatgcgacgtgccgaatgcgtgtgcttattagttatctgttagcgtttgctgcagtgctcttctatggagctccgaccccggactggaattatctcgtaggcccttccaggtgctactctacttcagctgctgtccctgtgcaactcgtccgggcaagttttgtggctcgctcgtggttttgtagctaggttaagcgagtgaagttacactcggtagcgcagtatttcctgcgagattgtttattcttctgttaatgtacctaccttactatttcgtttggattatggatactgggtgcatccgtttcatgtttaaaaaaaaaaaaaaaaaaaaaaaaaaaaaaaaaaaaaaagggcggcagctcgcgatctagaactat

SEQ ID NO: 124267 - DNA, 289 bp, Zea mays
  Clone ID: MRT4577_44810C.1
ggctgattctactagtactagtatgcgccctgctttcaatctgtcaatagtgaattccgcctggccggccaccttattgacggacggtcgagcgctgctgctgctgctgcaactggcctgctgcgcttgccctgcgcctgcacaacccgccctcggttttttttttgataaaggggagtttatttcattaagctaatgaaaaaacagtgctcggtctcaaaaaacaaacaggacccggaaaatatgataaaccctcgcttccgcggacgcgtggggtgatggtagcacg

SEQ ID NO: 124268 - DNA, 1527 bp, Zea mays
  Clone ID: MRT4577_44811C.1
cgaacgagttaatgggtgggttactaagtggcatagataatcgacgacgcgcggctccttcgttgctccttttcaggaaaaaaaactctgttacaatcggatataaagttttctctgtggaaccaaccaagtcgatggtatgttctggacaagattcagtgcacgtatcaatgtctgtatctctacttacaaacactcacgtaaaagattttaggatcaacccacgagatctttgctactcatagcagccaggcattttctttttatttctcaagcatctttagctacctacagctagccaaaatgaactggaactctcaagcgtcacaggaccccgattgttcaatggtactcaatcggtgcaggtgtctccttgagctgcataccctggaaatgtatgtccgacgcaaagtgattgacgtcgcggtggtgcgcctcgtcggagcgcaccacgacaaccacatccttgagcgtcgcatcagctgggagctgccagtagtcgatggcaatggccggcgcggggacgttctcgatcttgccggcctcgaggtccttgaggtattcggtatatgagtggatggcctcctcctcgaggtacccaacgacacggtgcgcgaacttgggggagatgaggtagccgaggaagtaggcgttgaagaagacgccctgcacggcgaggacaagcgcgcgctcgtaccacttgggcttggcccccgccatgaaggtcatgaggtgcatgcgttcattctccgcctcctccagcagcgcccggatccagccgccgctgtgctcgaagcggcggagcgagcgcaggtgaagcagcatgccgcccaccatccccggtaccgcagccaccgtttccagcatcatagcgcggcagccgtacctcctctggaagaatatgtcggtgggcacgcgcagtaatttgacggtccaataggcgatcttgtcgatcagcaccttgggttcgtgatgcctgttgagatcgatcgtggtgtccggcttgtacgcctcccatggcctgaagcaagaccacctccactcggcgccgtccttgttcatcagcttcgacggcgcgacgccccagtagctgctcaccactttgtctctctttccgtcaccctccttagcggcctccaccgcctccgccttcgccgccgcggtgcttcctgagttccccttggacgccgccacctcctccttcgcctcggcggcggaggtggacagtagccgcacccgcacccacacgagcgccccgccccgttccccgccgccggccaaggccagcagtggcctcggcggcgcgaccgccggagaaaaaactgggccgaagacgcgcggacccaggtggcggaggagggcggatcctgccgcgcgggtgctcatcgtggtcggacgacggccactagtgcggtcaactggtgaaggtagacgagggatttctccagagcgtgctttgctcctcctcgctaccgtagtactagtgtaatagtgtttcagtgtctcccggccgaaccggagggtacc

SEQ ID NO: 124269 - DNA, 312 bp, Zea mays
  unsure (1)..(312): unsure at all n locations
  Clone ID: MRT4577_44812C.1
ctaaatagatccaatggcgccgacctcaaagctgtttattgacatagggcgcgcttcacaatcncacgcgtaccatcgccgtgggctgtgggccatcaaggccaagaacggcgtcgccttcgctaaggccgacatttttctttacgtcgttgaaacaaaaattctaccttgtctaccacttcaagcccctcgtacttatcacctacaagcctaagcctaccaatctcatgtcgagcatcacgcctgggacgtttcttattctactctaactactatatggtaattattgtatcacattctattatctttttt

SEQ ID NO: 124270 - DNA, 419 bp, Zea mays
  Clone ID: MRT4577_44813C.1
aaaaaaaaaaaaaaaaaaaaactggaccggagcagacacgccgctgcttccttcccttcccctttccccacctgcgtgcgagcggccacccagaccaaccgcgtccagatccggcggccgatctctcccgcccgtctccccatggcggccggagccctggtcctggccctcgtagcggcgctcgcggtcgcgctggcgggggcaaactccgagggcgacgcgctctcggcgctgcgccgcagcctgcgggaccccggcggcgtgctgcagagctgggaccccaccctcgtcaacccctgcacctggttccacgtcacctgcgaccgcgacaaccgcgtcacccgcctagatcttggtaacttgaatttatctggtcatctggtgcccgagcttggcaaattggagcatttgcaatacct

SEQ ID NO: 124271 - DNA, 266 bp, Zea mays
  unsure (1)..(266): unsure at all n locations
  Clone ID: MRT4577_44814C.1
ctcacgcgtccgcggcgcgctgcgatggatggcggagtccggcggctgacggatggtgagttgatcgacacgatgctcagctggtccccggtcgtgtgnctgatcgcgttctcgacgtaccgttatgtcctggcgaacctggccgtgcgcagctcctatctggatcggctcgacggctctgggctgcgctgtgcgtacgctgtcttggcgttgggcatcgcggaggtggacaaggagcggatcaaccacgtgtgcttcattccgga

SEQ ID NO: 124272 - DNA, 596 bp, Zea mays
  Clone ID: MRT4577_44815C.1
accaaaatgttcattttagggatattacacaagaggcaaacaagagtcaagttaaaagggaaactgacatcctaccaacatgtcacaatgcaactgatttgatctagtcatatcagatgtaagcaaaatattctgaagcaagcaacctgaccctctcctctttcatcttcttcgcaatctcaattaccttaggattaaataaagatccatgtactcatctaatccatgtaaaaacacgagacatgtctggcgagagtgttcaaggccacaatcattagatccatataaaagcagcgtgtggcacccatctaatccatgtccttcagattgcagcaccatctttcacgagacgcgacgctggtgaggatgacggtgggtggggcgatttggggagggagctagaggcggctaatccggaccagacgcaaggctagcgaggagggcttgtaaggattttgtagaaactgtcttgctaaggcttcaacttctctaggccatgttggtctccttgttgtcctggaaatgacgagaccccggacaccgtctgaccatggtagaactggcagaagcaacaaagatgtgtgaggcactgatga

SEQ ID NO: 124273 - DNA, 380 bp, Zea mays
  Clone ID: MRT4577_44816C.1
ggtgtttgttgctatatggttcgtgcaagtttattactcggggaaaaaaaacatgggctggaaatgtgctggactagtagtagcggcagtacgcgtccggtacggcgtacccaactttggactgttgcgatcgagcacctgtctatctgcaggctgctgcgtgtgctgctgtagtcaagctagacgtgcctgcaggcgtgttcttcctttcacttgcgttgtgtcaggcaggcctctctccttcctccgcggcacatgccaagttgtgagcacgacgtttttcagatgaggggtttctgtcggttcgccggggatgccatgtggggccgccggggagccggcgcgcgcgcaacctaacgcgaaaaaaaggaacggagaaa

SEQ ID NO: 124274 - DNA, 137 bp, Zea mays
  Clone ID: MRT4577_44817C.1
ccggcctgggcgtccctttcttggagctttaagctgggatatggcatagctgtcctggtgaaagttcgctccattcccacaacatacaccgaagcataaatgtaagcggggtgcctaatgagactctacattaattg

SEQ ID NO: 124275 - DNA, 358 bp, Zea mays
  unsure (1)..(358): unsure at all n locations
  Clone ID: MRT4577_44818C.1
cggtcgcgtggngaaaaaaaaaaaaaaaaaaaaaaaaaaaaaaaaaaaaaaaaaaaaaaaaaaaaaaaaaaaaaaaaaaaaaaaaaaaaaaaaaaaaaaaaaaaaaaaaaaggggggtgaggttgtggggagatcaaagtttaacgtacgcgggcttgcgaaagtattttttttttttttggggtcccttaaatgaaattaatgggccgcggtttaaaaaggtcgtgatggggaaaaccggagctttcccaaatttaatccctttgcagcacttccccttttcgcaggttggcgtattggggagggggcccgcccggttgggctttccaaacatttgcgcanctggatggggaatggg

SEQ ID NO: 124276 - DNA, 399 bp, Zea mays
  unsure (1)..(399): unsure at all n locations
  Clone ID: MRT4577_44819C.1
cccaccccgccaccaccgacgcnggtttgaaggccgngccaggcgggagcggcgggcccccggagccgangccgangccggggccggcgaccaagaacaccanncccgnnnccgcggggggcggcacggaggcggcgcnccncgggaaggggcggnacaaggncngggccnnggccgccancgcgccccncgcgcccnggggcggggggggcgccnccgncncacnccgcnggncccccncgggngaccncgccnccgacaacggggaccnggacgacccgcncgccgacgaccacgacacccnngagaaggaggagagggagaagnnagngggacgaaggggggacangnacacacggaccagggaggaggcacggannacacggnacaggcaggagg

SEQ ID NO: 124277 - DNA, 363 bp, Zea mays
  Clone ID: MRT4577_4481C.1
tgattttgatagactaagtaagatagagtctgttagtctgcatttgtcgttaagccacctacggaagtctaactactggtatattctgcatatttggctatatgtggactaacttggtggctagtttcttgtattttattatgcattgctcagattgcattgtttggcttcatatatgccagtgtacacattaatttttcattgattccaaaaaataaataattttttgtctataagcttaagctccatacttcatcacattgaattatctgctgcctgctgaattcatcacacatattgtttctatttcttaatcccatttaccggctattttttgttaatatttttaacatgtaaactacc

SEQ ID NO: 124278 - DNA, 279 bp, Zea mays
  Clone ID: MRT4577_44820C.1
aggtcattatcttgtttttccatgttacaccttagaacgaaaaaaagggtgctgaataaaggaaagatggtttttaactcaaagccataccttcatgtatgaacaaagagggtgtgaatattaccaagggacacataggagagaaactcgagccacaaacacttgaaatatatgaacccaaagatgattcgaaacaggactacatagatgatgaaagtgtacaggaatatttcataaaggctgatgatgcggccacgcgggacaggcccgaccagcaag

SEQ ID NO: 124279 - DNA, 667 bp, Zea mays
  Clone ID: MRT4577_44821C.1
cattgggtacctcgaggccggccgggttctggttcagaatgagagcttgatgtgcaactctcgttgccttttatatatactccagttgtgcatgatacctgcatcatgacttctggaggttgtatttgatcatgtacattattcctctctacacaaagctcatcataatgcccccgccttcataggcagttgcaccctgcacgaatactgatgtcagcgcgactgcaagaggtctaattgctgctcgaatacctgtgtgcagcacagcttttcaacaatactatgtccattttctccagcgcaagtactccctgaaatcattctacctcctgggccacaagctccatccaaaatatgtcactgctgctaaagctaccatttgcgtattacttgttgacaggaaaaaccgtggaacaggtcagattgtcatcgcttggtctgcttttcctggcactctcatgcttcatcttacattggtggtaatctgagccaattcatctgcatcactgggttctcttgccgatccttccaagggctagggcacatgcaagaccgaacttgttcagacccttgagcttcttgtctttcttaaacatcgcctgaaccttcaaacattgcacgtgatgaacctgaacgatctcaaaatgatatggtactccaactcgtc

SEQ ID NO: 124280 - DNA, 717 bp, Zea mays
  unsure (1)..(717): unsure at all n locations
  Clone ID: MRT4577_44822C.1
ctcgaggccggccgaggagagaaaagtagaggttgaagatgatcgtcaatctcttatcgatgcgcacaagctgaaaaaataatggaggctcgctctcactaagctccctgtttgctaaatcgcaactaatccgatgcaaaatatttgtagaagaagagagaatagagggttcaacgcagaggcagaacaacagctgccccaccaagcgccgtcctgtcggagatggcagctgcggctccggcggcgtgcaaggggaaacgaaagcggcacctctccgaggacgacgtctggctcctcctccacaggtaccatccagggacgatcctgacggcgctgcaggaggtggcgcagcacgcggatggccggcgcatagactgggagggcgggnggtgggcgaagtcggccccacggggatcacctccgncccgcgagtaccagatgctctggcgccacttcgcctatcatcacgacgtagacgagagcgtcgacgccgatgaccagcctctggacgatgacagtgacctagaactggagcttgaacccgatcccaacctgaccaaggaagctttatgtgaggcctctgcattagccaaggcgctaatatctggatcttcacaagcctctggtcatcgtattaacttggatactcatgttctgaaccccgaaatgagagatagtgcgggttccatctgagaaacagcttgctcaaagtcatcg

SEQ ID NO: 124281 - DNA, 485 bp, Zea mays
  unsure (1)..(485): unsure at all n locations
  Clone ID: MRT4577_44823C.1
aactagcaacatagcaaagcacaatagtgntaccaacaatggacagccataaatatgttgtggcctccttatgnnctccttggtgcttgtcgttgcaagtgnnctgctacccggcgaccccattnnttcgcctgcaatggcnntcgcaagnnctcctnatnagnncttncctctttctttctctctccgtnaccctnnctcacncnnagcgggtgtgcgggggggtgagtgggannnaaacccaattncnnttcaacccttacaggnnatccaatcagnngcaatcaccagtctggcactcnnttaccttttatnncaccccttgtnntcctccaacaaatcactcagtcccgttattacactcatgttaccctcttngggtgcatgttacttggggcacaaaacnnatcagggcacacaccaactaccaacaacctttgtgcttagcagatacctctgctgctctactcttttcagcaacagca

SEQ ID NO: 124282 - DNA, 207 bp, Zea mays
  Clone ID: MRT4577_44824C.1
ggaatgattcctcaacagagggggcgaaggaccgaggaccaacttgagccaaaatcggccgattactcacacaattaccgaataaagggtactaccattgaccgtgccacactgggttgtattcataaaagcgaattccatcgagacccaataggcatgactagtgttggatgtctatcacatgagcatgcccatactctaccggct

SEQ ID NO: 124283 - DNA, 397 bp, Zea mays
  Clone ID: MRT4577_44825C.1
cttttattttttatttttttttttctttttttttttctttttttttttttttattttttaaaactaggacaaaaagcatttttttgcaaccaaaggcccacaaagggttctttaccacagtttgtgaaaattccttttcccaaagataattacggcacaaatcttccaaccctttgtaatttgacaccctttttaaatttgccggtttttctccaggccatgtgttgctttttgacctaaacctaaaagaatttggcgctaaaccccttctaaaacgtttttttttttcttaattaaagagtccatcccccagcccttgctgttcgttttgagcgaaatttcctggtctcctcggagcttctttgcaaaggatccgacccactgccgttttattggg

SEQ ID NO: 124284 - DNA, 462 bp, Zea mays
  unsure (1)..(462): unsure at all n locations
  Clone ID: MRT4577_44826C.1
gggnctgaaatccccgggccgacccacccttccgcgacacccttggccgacacccttggccgtccccttggcttccagggtaaactgaaccttaaccgacaacaacggccccgggggcggcttaaaaacaatccatatttttcccgccgtcttcggcccttgcggttcgaaccgtattaaccttttttacctacccatgatcacaatttgcttgtttactactactactgaataaaaaacctttcccgccacgtggtccttgtttttttttttttaaaaaaaaaagaaaacccgcccatttccttttggttgtttggttaatttttaagttcatccggcctttattaatttccatttccccagtcccaactcttgcccatgcatccattttcctaataatccactaacttttttttgttaaaaaaaaaattaaaatataataaataattaaaatattattat

SEQ ID NO: 124285 - DNA, 359 bp, Zea mays
  Clone ID: MRT4577_44827C.1
gggaaaaaatcaacgggcgggggctttattcatatttcagggcagggggtaccaagggggcccacctttcgcccggttttggggaaagggttaacccctggttccccccccttacaaaggggggtaaactccccaggccctgggctaatttagggcccatgggaaacggaagggggcctcccaggggcccaacgggggggccttggtcatctcccccggggtccggcaagggcaatgaaaagcgcccctttctaaccaaaaaacctagaatttcggcggggatttttctacccaacagcccgggcaatacataaacccgactggttgccccctagggttttgacccaaatcatggacaa

SEQ ID NO: 124286 - DNA, 607 bp, Zea mays
  unsure (1)..(607): unsure at all n locations
  Clone ID: MRT4577_44828C.1
cccaaccttacctggcttaacatgcatgttaccttttcggaaaaccctaaaggttagggtcagtaattgtatatgtttttgtcccgatgccttcctttttcctgttaatgtcgctgcagaaatgacagtgtgcttaatctttagtgttaggccgtgcgcttatatgtactgtagagtctactgtttatagagtgaattttgaaatggggagtgggataggaaggctgctggaaacagccttaatgcatataagaatacattttggattagatgtttttgctgtggcgaagatttgtttgttctatcaattttgcatttgttttgcagctcttgttatcctatctgtctagcctctactctattgtctctactgagcattatatcatgatattaatgcataactttatacaatcattgaattttgtatatattncgtgtattatactacacatcttgtgagtttataacctcatccagtctattgtttgttatcatcattattgtttgtcatcagcattgttgtttgctatcagcattatatctcacctagtgtgtcagtgctcttggtattacgtctagatagtgtttgcttgggcacatgttgtct

SEQ ID NO: 124287 - DNA, 2426 bp, Zea mays
  Clone ID: MRT4577_44829C.1
gctatatgaacagtgccatacagtgtctggtgcacacaccacagtttacgatggacttctgtgaagattatcatcgcgaaataaatcggcaaaatccactgggtaatgtgggtgaacttgcattagcttttggtgagctattgagaaaactctgggctcctggaggacgtgcccctgtttcacctagaccattcaaaatgaagctttctcggtttgcatctcagttcagtggatacaaccagcatgattcacaggagctgttggcgttcctattggatggactccatgaagatttgaatcgtgtgaagcatagaccttacataaattcaggggatgctgatggaagatcagatgaagaagttgcagatgaatattgggcaaatcatattgccagaaataattcaatcattgttgatgtatgccaggggcagtacaagtccactttggtttgcccagtctgtgggaaggtttcagtgacttttgacccgttcatgtatctttccttgcccttacaatttgcctcaacccggagcgtgactgccgtggtgttttcttgtgatggtagtgttccaccaacaccattcactgtgaatgtaccaaaacaaggtaggtgcagagatctattacaagcccttggtgctgcatgctcacttaaaaatggggagaaacttctaattgctgagatacggaatcataagatctaccgttttattgatgatccagtgcttcagctgtctacaataagtgatgatgatcatctggcagtttataagctcccaaagttggaaaagagggtgaattacattcagtttgtgcatcgtcatgaagatctggaccatggaaacaataacagcttgacatcttggaaaccgtacggtgttcctcttcttgcacaaatttcttgcaatgaaattgtcacgggttttgatatccatgagttggtccataaaatgcttgtgcccgtgctaaggaatccggactctctgcatttggctgttcaaagttctgttttcacaagaactcatagttatcataccgacagcatcaaatgtcagcttctgttggttgatgatagcaacacagtcattgaaaaatcaaatgatgctatcaggatcccacaatcttcacttgcaactgtattttttatcaactggcccaaggcagatctgaaaaagatagacactcatcatttagagtaccttccagaggtgtttatgtatgctccgcctgcgaagagaacccgtggtgaagctctgtcactctatgcatgcttggatgctttcttgagagaagaacctcttgtacctgaagacatgtggtactgtccaaggtgcaaggagcaaagacaagctagcaaaaagttggatttgtggagacttcctgaagtactagtcatacatctaaagagattttcatttagtaggtcaacaaaacaaaaactagaaacttttgttaattttccaatacatgacttggatttgacaaattacattgccaataagaagacttcagagcgccagatctatgagctgtatgctgtgagcaatcattatggcaacatggcaagtggacattatactgcacacattaagcttgtggatgagaatcggtggtacaacttcgatgatagccatgttgcttccattgatgaagatgaggtgaagactgctgcagcttatgtgctattctatagaagggtcagagaacaagacatagcaaggggaactagtaatggatctcagttatatgcaaaaagaagtcacggatatagccataggtaggctgatgattactgtggttcggtgcaagggggattctggaaatgacacccgcacgcctttagtcattgccaggagtatatggcttgctggaaaaaatgctcatcacgtgcagtcaatgcaccgttgtccagttgtcacagaagatatttcgtgcagtgctggtacaagatgggaattttgtatgaggtgagttgaaggagtaattgactctttatgataactgggtagcttcaacaggaacgccggggcttggtggcattttgttcgtctgttttcttctagaagagaaacaaggggaggcaagaaaacatttaggaaacaccttttcgttaatttgattttttatttccatttttagatttagctagtctgtacactgttgttggaaatgggtccgctgttgttggtcgatgcttgtggtggccaataatactacacccaactataccaggctctgcaatggcgaatcatggtgcacattatggtgctctgttgcgggaagaattgtagctgatgttgtacttatatactggcaaaaaggccccagaaatgtaaaaatgtatcgatatgctgacatcttaaaccctattttggattcgtgctctttcctaaaaaaaaaaaaaaaaaaaaaaaaaaaaatgtcca

SEQ ID NO: 124288 - DNA, 1602 bp, Zea mays
  Clone ID: MRT4577_4482C.1
gtcggatccggtattcccgacggagatccctgaagatgggaaacccacaccgccggtgcagactccgggaggagacgccacgccgccggtgatgccagtgcagaccccgttgccgttggacgggatgccgctgacggcaatggagtaccgttccttcttcgagaacccggacatgaagcctgaggcacaaatcatcatgaagctacaagatttggatgggtggaagtacttcggcaggaacatgttctggctgggtgtcatcggcggcggcctcatcctcctgcacctcctcaccctcctctacttcaagctgaggtacagagacagggagcggcggcggcatggctacgccgcactgcttctccccaggctggagatcatggtcgtcgtcctggcgatgccgtgcgtcgcccaagcggcggcggcgctcatcaggggcgggaccacgtgcggcctggtggtcgggatcgtgctcaccgccgtcctgacgtcggtcctggtggccctgctgctgttcctgtctctgggcatcaccatgggcaagctgctgcagtacagggaggtgcaccatgaggaggggcaggaggagtaccactggtaccaggatctggcccgccgcacgctgggcgccggcaagcgcgggcagtggacgtggaaggacccgcgccgcgccgcctgcctgcccaggcttggcccgctcttcgaggacctgcgcggcccgcccaagtacacgcgtggcggtggaggcggcaagcgccgcgccgaaggcggcggaccagagcggcgggtcatcgcgtcggaggacgagaacgaggggtcgagggcgcccttggtgcagcagctcctcggcgtgctccgcatctacttgacgctgctggagtcggtgaagcgcgtggcggtgggcatcgtggccggcgcgcacgcgtcgtcggggcggtcgtcccgcgcgcacgccgtggcggtgctgtccgtcgcctcgttccagctcctgttcatgctgctcgggaagcccttcgtcaagaagcgggtgcagctggtggagaccctgtcggtggccagcgaggtggccgtgttcgcggcgtgcctggcgctcatcgacaggacggcatcgagtggcgggtggctgcccgacggcgaggcgcgcggcgtggggctggcgatgctgggcgccttcgtgctggggttcgcggcgcaggtgtgcaacgagtggaacgcgctgtaccggcaggcgcggctgctgagcgccgaccggagctccttcctggacggcgccaagacagcgggcctgggcctgctcgtgctggtgctgccgtcgtctgcgctcggcgaccaccgggatccgccacctcccgacggcggtggaggagccggggagagcgtgtcagcgtcgacggcggccgacgggggcaggggcgggagctccaacaacgagcggtggtggcttgggcagctgcgggagatggcgaaggctagcttcagcaaggagagtaatgcgtaagaatgtgtttggtactgtatctcggaacatgtaacatcagaaatcagcattaaacgattagaatgacagcgctcgagctcaagaaaatgtttctttttttttgg

SEQ ID NO: 124289 - DNA, 348 bp, Zea mays
  Clone ID: MRT4577_44830C.1
ggagagaggatagtctcatttcattttctatcgcgagcggcacctttaagagggtgatcattgaaaaccaatgacaccctccccttctgcctcaatgccggcgtaaaggccaacctcgcgcctccgcacccgttcaagtccagcatccaatcggaggccaagttctgggcggacaaaaaaaattttgggacagaggccatttacggatccgccttgaacatccgaaaggttctctatgccaaaatccttttaaggttccaaaggccccttgaggcttggcaattatttttgttggatatgaggcactgacaggttccctaaatgattgtggttttgaagattatctta

SEQ ID NO: 124290 - DNA, 490 bp, Zea mays
  Clone ID: MRT4577_44831C.1
cggacgcgtgggcggacgcgtgggcggacgcgtgggcggacgcgtgggtagtggttctgaaaacggttgcgatatgtcaatacggggtgcacaatgtcactgcagattacatcatgaagtgcgacgatgacacctttgtgcggctggatatagtactgcaccaaatcagtacctacaacaaaacctcacctctgtatctgggcaacctgaatctcttgcacaggcctctaagaaggggcaaatgggccgtcacctacgaggaatggccagaagcggtgtatcccccgtacgccaatggacctgggtacgttatctcggccggcattgcgagagacgtagcatcccggcatacaaaccactccctacggctgttcaagatggaggacgtgagcatgggcatgtgggtggaggactacaacgccagcgcccccgtgcagtatgtccacagctggaggttctgccagttcggctgcgtggacaactacttcac

SEQ ID NO: 124291 - DNA, 362 bp, Zea mays
  Clone ID: MRT4577_44832C.1
agctggcacgcctgcaggagccgggactgaattatattggtgggtagacaagcttactagtcgggggacgcccttttttttgttgtttgttgaactttgctggatgaatatctttacgatgggcatgtttatttagggatgaaaacatttgagtacactatttgcaaaccttgcttacaaacgatacatgggtatatgcacctacaacctgtttccgaacatgagcgcactctggagacctggaactcttgtttgatacgcgcgtgcaagtgactggacaggactacgcacacgggacatagtagatgctttccataatgaagctccagagcttattgagacattgacagagcgagcccatg

SEQ ID NO: 124292 - DNA, 571 bp, Zea mays
  unsure (1)..(571): unsure at all n locations
  Clone ID: MRT4577_44833C.1
tatanacctatttctattatttcaaccatactaatgacataaattactttcacatgcatgtagatttgctagatatgcagacagtaccaccatttggtctaacttcgatttcccttttgggaaaacaagctgccaaatattgagataattgtagcagacatcagcaagtttgaggtatgattcagtttggtgtcttgctgtgctttggatattttgccatggctctttatgtagcacatgaaaaactacaagtcgcttcttaagaagatatccaggtggatgaaagaggatggcctactattcgttcacctcttctgccataaaacatttccatatcactttgaggtagaagattaatgaccctcagtttcactattcatttggtgcattccaccgcctatctgctatatgtgatagttaagaactcaatatctttagctggaactcaagcatcggtaaggtgtggtgtttgtgctgtcagagtttgtgaacttgagaaagttcagataagtaatttttgcactgaagaaataaattggccacaagaatccaaaagttcaccttcttgcac

SEQ ID NO: 124293 - DNA, 1425 bp, Zea mays
  unsure (1)..(1425): unsure at all n locations
  Clone ID: MRT4577_44834C.1
ctcttctgcgtacctcaagtgcaggtcacaaggtctcctcctcctcctgtccctggtccctcgaattcgaatgggacggccatacccgcagggnaaaggaaggagaaggactcgtgaagctgccatcgttggctccgcacttgcgggggccattgctttactagccgtgatcgtggttgcctgggttgttctccggaggcgatatcggcgtagagatgacgaggacgacgaggatggccttggagaagtgccaggtatgatgacgaccaggttcacgttcgagcagctgagagcagcgaccgagcagttcagcaagatgatcgggaaaggagggttcgggtccgttttcgaggggcaggtgggcgaccagagagtcgccgtgaaacagctcgaccggaactggccaaggaaggcgggagttcctggcagaggtggagacgatcggcaacatccaccacatcaacctggtgacgctggtcggtttctgcgcggagagatcccacaggctgctggtgtacgagtacatgcccaatgggtcactggacaggtggatctactcctccgccgccgccgccgccgacacgacgccgctggactggcacacgcggcgcagagtcatcaccgacgtcgccaggggcctagcgtacctccacgaggagtgcaggcagcggatcgcgcacctggacatcaagccgcagaacatcctcctagacgacggattcggcgccaagatctccgactttgggctgtcgaagatgatcggcagggacgagagccgggtggtgacgaggatgcgaggcacccctgggtacctggctcccgagtggctgacgtcgcagatcaccgagaaggccgacgtgtacagcttcggggtggtggtcatggaggtcgtcagcgggaggaagaacctcgactattcccagcctgaagacagtgtccatctcatcagcgtgctgcaggagaaggcgagggacgggcggctggaagatctggtcgatgctcgtagcgacgagatgcggggtctccatagggaaggagtgattcagatggtgaagctcgccatgtggtgcttgcaggttgattacaaccggaggcctcagatgtcggtcgttgtcaaggtactggatggcgccgtcgacgtggaaactggtatagaactcaactttgtggctacggttccggacagcctcgccaataatggcgggaatctggcttcgtcaaccccgcttctagcctcgcatttgtcaggtcctaggtgaacatatatagagagatttttttacagggtgaatatttgtatgcccagagtaaccatgtgttctgatgcgcaaaataatatattccgacgtattagatttctcaaatgtatcaaaatacaatactctattcttttattagctgagtttttttaccaaaaaaaaaaaa

SEQ ID NO: 124294 - DNA, 1275 bp, Zea mays
  Clone ID: MRT4577_44835C.1
tagggtgatggaaagagatgagcagttgatgcgcaaggccctggaagcgcagaacaagaagctcgtgctcgtttcgagccagggcagcgtgtccttgtccgcgcaagcgttacatgagcagcgaggccctggcgctgaggttggcagtttgcaatcaggcctgattatttatcttcgaagcgatggagaacttcacttctgcatccgcgaatacatacagggagctccatcttcgcgccgaagaagagaaagcccgagttgtgcaggagagcggcggcagtgttccctaactcctttcaatgcttaggttttacacgaggacatgagcgtctgtcaatgcaaagggaccgccaccagtgacccccctgcggcacagtgacactacaacccttgtggcagctgatgcaccttgctcgccaggtgccccaagtttcgggtttcaggctctggtgtggaggcctgtggtactttgtggagttaacaggttgcaacacagggggttttgttttactaatctgtacatgagttgggctacgcgatgcattctttgatctggatggccagcagttctcctcaaaccggaactgtgaagcacggttatggaaataggtgtatcaccaggcatgttctggtagttgtgagccccctggagcgactgagtgaagaagaggcaggcccttgtgcatctgggaagctgaattatgacctctagttggctgtgcaaccccagaagataattggaaggaagatgtaagccgcacgatcttggttcagatcaaagggtggggcatataagatcctgttgtcatgaaatccaagatccatggaacgctgctctccaccccatgtcactatgccagcgctcaaccgtacatacaagaggccaggctatcagaaggtgttccgtaatcgcagcactttggcatgtcattgtacatttgtacagagaggtgatgcgggatgaatcgagctggagcctcttgtccgctgccgagcgcccgagacatgtttgcttagagtttcctctgctgcgtctggactctacttcgccgtgcaaccgagctggaagtactcttatagggtagacgacgccctgacccgttctgcagatcagctaaccgctccggccctcaacctttttttttgtttattatatatacatattattaattcatttgtagcaccccgtgtacagctgccggcgaacttaaacctgctgcgccatattttattcattttttttcaccacgggtttgccgtgcttgtgaattgctg

SEQ ID NO: 124295 - DNA, 237 bp, Zea mays
  unsure (1)..(237): unsure at all n locations
  Clone ID: MRT4577_44836C.1
ggcggggcgggtactgggcgtatcggctctcgcctggttagccttggacggagttaccgcccgatttgggctgattcccaaacacccgactcgtgcggcgcctgggtgcgaagggtccggccggcggggctctaccctccaggcggggggggagagacttggcccggtccgcgctgagacgcctcttccgactcnttcgggcgggaggccgcccgcttctcngctgggctgctcccg

SEQ ID NO: 124296 - DNA, 1269 bp, Zea mays
  Clone ID: MRT4577_44837C.1
gccggaggccgagctcggcagctgcccgcctcggtgtggcgccgccgcaccttacccacgtagcaaaagccgtcttcccgtaccgtaggcagcggcaaacagcgccccctcatcactcggtctcgttccctcctctccaacttcactcgcgtcgcgcccctccactgcaccagcgtcatggcggtggcctcgacctcgccgctgtccgccaagcccgccacggccccttcgccgcccgctcccggatccgggctcctcgctctcggcgttcgccgcgcccccgccactgccgcgtggaggaggctccgcgtggaggcgatcaggacgcagcgaacggaggtgcccgtcgaggagtccgcccccgccagggacgccgccgctgccgcgcccctggacggaaacggagccggagcggacggctccgtggttccttcctcggacgacagctgggttgtcaagctcgagcagtcgttcaacattttcgccacggattcggtgattatggtactcaagggcgtgtacggtgatcggtactacgccaggttctttgcgctggagacgattgcgagggtgccgtacttcgcattcatatcggtgcttcacttgtatgcgacctttggatggtggagacgagctgattacataaaggttcactttgcgcagagctggaacgagttccatcacctcttgatcatggaagaattgggtggcgactctttgtggtttgactgttttcttgctcggtttatggcattcttttactacttcatgactgttgcaatgtacatgctgagcccacgaatggcatatcacttttccgaatgtgtggagagacatgcatattccacctatgatgagttcctcaagctccatgaagaggaattgaaaagactaccagctccagaggcagcattgaactattacatgaatgaggacctttacttattcgatgagtttcaggcatcaagaactccaggttctaggaggcctaaaatagataacttatacgatgtattcgttaatatacgagaagatgaggcagagcactgcaagacaatgaagacctgtcaaacacatggaaatcttcgttctcctcattcaacgccgaactgcttagaagatgatacggaatgtgtaatacctgaaaacgactgtgaaggtattgtggactgtgtcaaaaagtcccttacaaagtaaatagactatattctttcatgtgtttgactgttttcaggtgtcgtagtatacaaagtataaaattttgatgat

SEQ ID NO: 124297 - DNA, 363 bp, Zea mays
  unsure (1)..(363): unsure at all n locations
  Clone ID: MRT4577_44838C.1
ccaaaatccaaatcaccacatccccccatttatttatggggtttttatgtccacctccgccgccaggtccaacttatcccacnaccaccctctaccatatcgttctctctgctctccttccccgctaaacccaccatcacctccaccaccatatctaccccttccccaagaccctcccgctccacccatgtccatttcctctattacgcccgctgcctcctcctccgccttcgcgcgtcgtctcaatatcctacgacttcgtccacccctcggtctctgccttcttattacttccacaacctcatttactaccccaactactttcgcattttttacaccactctgttcgtactatatcattca

SEQ ID NO: 124298 - DNA, 388 bp, Zea mays
  Clone ID: MRT4577_44839C.1
cctctacgcgactatacgcctttctcttccagccccctcgcgcgagatctgcgtcccgtgcgggccctagatccccaggggctaccgccggagcaccctgctcaaggtcatcatcctcgacgatagaggggtctgcgaaaactttcttgaggaaccagcatcctgcgattcagatcgattcttgacaagctgacttgaattcgtgtctgtcgatttttttatttcctttggttggttggttggttggatagtattctttgagctgtgatgcaagtcacatgtgtgaacacgaagatcagtagtcactacaacgttacgaatgtcgcggaataacatcaccacgaggtgcagtgcgaggacacgttcttaactctgcaaatatgggaca

SEQ ID NO: 124299 - DNA, 1910 bp, Zea mays
  unsure (1)..(1910): unsure at all n locations
  Clone ID: MRT4577_4483C.1
gccgtgccgggnaaaaaaaaagttgccataggagtgcgagtggcagcctcacgctcacttgaccgaccctttgcgacgccaaccggccaaagctcccggctcggcggcgccgcttcgttgtgatggattggtccacccggttccgcacccgaaacccgtcgccggccgtgtcccactttgccggccacaggcggagtcaagcggatagggtatttctccggaccatggcgtcggcggccccggtggaggagccgacggcggcggccgaggcgaaggggcggctgaccggtgactccttcatccggcgccacctcaggaccctcgccccgtatcagcccatcctgcccttcgaggtgttatctgctcgccttgggcgtagaccagaggacataatcaagttggatgcaaatgagaatccatatggtccacccccggaggtcgctgcagcactaggtagtctcaagttcccctatgtgtaccctgatcctgaaagccgccaattgcgtgctgcccttgctgaagattctggacttgaatctgattacatacttgctggatgtggcgcagatgaactaattgatttaattatgagatgtgtgcttgaaccaggcgacaaaattgttgattgccctccaacattcacaatgtatgagttcgacgcttcagtcaatggtgcacttgttatcaaggttccaagactgcccgatttttccctagatgttgatctcattgtcgaagtggttgaacaggaaatgccaaaatgcatatttctgacatccccaaataatccagatggcagtgtaatcaatgatgaggatcttttaaagatacttgatctcccaatacttgtagtgctggatgaagcttatattgagttttcaagccttcagtcaagaatggcatgggttaagaagcatgataatttgattgttctccgaacatttagcaaacgggcaggtttagctggtcttcgtgtgggttatggtgcatttcctctgagcattatcgagtatttgtggcgggccaagcagccctataatgtttctgtggccgcagaagtttcagcatgtgcagctttacagaatccaacttatctggagaatgtgaaaaatttactggtaaaagaaagggagaggttgtttaatcttctcaagggaataccattcctgaagccatttcccagtcattctaacttcattctctgcgaggtcacgtcaggaaaggatgcaaagaaaataaaggaagaccttgcgaagatgggagtgatgatccgccactatgacaagaaggaactgaaaggctatattcgtatctcggttgggaaacccgagcacactgatgcactaatgaagggcctgaatgcacttcgattgtgagagcttttgcacacgatcaagcttttgcacactatcaagcttttgcacaccatcacatcaatgtaaacagtgtattcctttgcggatatatatccgtcaggctggatgcagtctataagaggagattgcatcactccaacgcatgtgaagcccaaacagacaagggtcgtgtgggtttcactatccttttgtttaccatgttgaagtctgtttttgttattcagcgacataacagctattcacaagattatcttgttcagaacaagtgtagcagttgaattcctggtaggtggtttctgatgttgggttgagacttgagagaactgaacattgtgtaggtataaataaaggccaacatagcaatgctgttgtcttagtacttgtatcaaaggtcattcagtcgttgcaaatttcgaccaaataaagggatgaaatgaaagcttggaaacggaacagattctcatccataacccccgtgacgacaatgtgtaaacgtcgcgacttttatttatggtgattgggacattgtttttt

SEQ ID NO: 124300 - DNA, 345 bp, Zea mays
  Clone ID: MRT4577_44840C.1
aatttaacctgggtcgttttttttttttggcccagggcccaaatcatcattatcatgcctctatcggatgggaatggatcggtatccctgcttaaccattatcacaacacacctttctttcggaggggcggcagtatcccgagagatggccccgggattaattagcacctgtacttcttgactaacattacctccttggcctgcgccacctcgccgtccgaggtgtacttgccgacctccgccaggaagttggccttggctcgcacctacaccacgtgctgcgccagattgaccttatcctgctggcccccccacgtcttaaggcaggtattctccagccccccc

SEQ ID NO: 124301 - DNA, 821 bp, Zea mays
  Clone ID: MRT4577_44841C.1
tcgaggccggccggggaccacataccccaaagccgaccacccacctcttaatcgcaaccctcgcaccacttggacgtatacgcgacaccgatatccatattgcaagcatgtctcgcggcggcggcacaacgctctacgtcaccggcttcggccacggaacacgcgctcgcgaccttgcctacgagttcgaacgctatggtcgccttgtccgttgcgacattccggctccccgttcggcttcgtctaggctcttcgccttcgtcgaatacgagtctcgccgggatgccgatgatgcgtaccacgagatgcacaacaagcgcatcggccgcgacgacttgttgaagattgagtgggcacgtactcctccctcggcatcatggcgcttcgattccggacgtgaccgcccccgtggtgagcgctctgagcgtggcggtgaccgaggcgaccgttccgaccgcggtgatcgtgcagaccgtggagtgcgctctccacgccgtcgtagcacttccccacgccgtgaacgcggtgcatcccctcgcaaggatgaccgccgcgaacgcgactacgaccgccgtgaccgtgaccgatcaaggagccccattgacggggaccgcgagatgaaggatgtccgcgaccgtgaggacgaccgaggcgaccgtgatcgtggagaccgcgaagagaggcgcgaacgtgagcgcgaggctgagccgcctgctgaaccccgaagatcgaatctcctccgcctgcggctcatgacgactggacgtagctgagtaagccatgagctggcaaccctccagcaggcagtatccggaatactg

SEQ ID NO: 124302 - DNA, 281 bp, Zea mays
  Clone ID: MRT4577_44842C.1
ccggaccagcggggagcacaggaaggagaggcaccagggcgccaccgcaagccgccagcggaagggcgaccaccaccagaagccgaggggagcagcggggcgcgaccgcagcagagacgcagcagaaagcagcagcaggcgaaacgacgcggcgaccacgagggccacgcccacgaaggcggagggagacaaggccaccccaagagcggcaacgccggccgcccaagaggcggcgcggcgacagcacgaaggcgagagcgccgcgcgggacgggcaacaac

SEQ ID NO: 124303 - DNA, 164 bp, Zea mays
  Clone ID: MRT4577_44843C.1
caagatccgggagatcgcggacgggctgtgcctggaggtggagggcaagatggtcaattagaacagcaggatggccatcaataattcactcattgagtggaaatgcttacgctgaaggtccggatggcgtaggtaccgaaagcacagtagtcaccggtgttgac

SEQ ID NO: 124304 - DNA, 407 bp, Zea mays
  Clone ID: MRT4577_44844C.1
gcggacgtaatgctcggaattcggctggggctggatctctgcattcctgggtctggacgacaccgccgctgacggggcatgtgcagagagactccctgtcgtatcacgccaggcgggctcaagcccctgcaggagcgcttaacggaggctatgatatgagaggtgcaatgctaggacgcgcacgtccggaggcacctcgacccggtaatgcaccgccacaggatggagctgctcacggcgccgacggtggccgagctgctgctgctcttctggtcctcggcgtacggcggtgacgcctagggcgagggcgatgctgtccacgtaccaggacgcctgcacggacatgaaggtccccgccagggacctgcgcgcgcggatgaccgtggcggagaaggccggccagataa

SEQ ID NO: 124305 - DNA, 457 bp, Zea mays
  Clone ID: MRT4577_44845C.1
cgcgatgtctgggctgtctcgcccgctgcttttggccgtcggctgcctggccgcgctctgcgtaatcacagcggctgggaacaccaccctggccccgaacgtgactacagcctcgtctccaccgcccaccaccacgacagtcccggtgtcaccgacgactctctcgccgctgccggtcaccactccagcaccagatatctgtggaagccgaaacagttgtgtttcctgtgttgatggtaatgctacctgcttttggatagaatgtaaaggtaaaagctactgttcagataattcaacagctggtgattgcaaggtggtgaacaccacaggattctgttctgtgcccactaccacaccaacgccaaccaattctacagctaaaaccacaactctgccttccactactacaacttccaccacagctactacatcaggtacaactaataccactctatct

SEQ ID NO: 124306 - DNA, 211 bp, Zea mays
  Clone ID: MRT4577_44846C.1
acctcgaccgcaattgatggtctatggatctgattctggactaccaacaacaccgaaacagctaaaccattcattgattatgactacctctcatacggattactaccccgccatctacatgcctctggaacaggctaatggaattgatcgcttgctcctgatctattagacgttcgtcttcagggcccgtctcacgcctttgcctgagagt

SEQ ID NO: 124307 - DNA, 347 bp, Zea mays
  Clone ID: MRT4577_44847C.1
aaaccggaaaaaatattttgggggggtaaggcccctcgaagcttggggaagacaaaaatggcctgccctacctaccaccagggcggggactggaactacaagcccttaaaaaattaccaggccttattgggataaaaaccaatcaagggagggacaaaaaccctggactgaaccaaatatttacaggttttttttgtacaggcacacacacacatggcgggcacgaaccaccaaattcgagggactgggccattcgttttcggttccgttttaattccgggggggggccaaacgggtttattgccccctttccatgtaaaccaactggaggttaaaattatatcccc

SEQ ID NO: 124308 - DNA, 1459 bp, Zea mays
  Clone ID: MRT4577_44848C.1
tacctccgcggctcaaacctttcctacttctcccaattccctccgtcgaaccgccgctccatcccgtacgacgacaccatgagggagcgcatttcgatccacatacgcccaggcacggggtcacaggtcagcaaactgcgtcgctgacgagcctgcactgtccttgagcatgtacattcaggctggggggcggatgcccgccgacacgaccactggtgggaggcccgggagttctgacaaacacctctgtgatatggtaccagcagcagccacaaggaaggggggagtcgtcattaccgccttttccccgggcaccaccaccaccaccccagccgcacagctcactccagccgaaagcacaagcacgccatggcagaggagaagaagaggcacaagcacaagcacaaggagaaggagaagcagccgggcggcggcacggagcaggcggcgcacttcaagccgtgcggcgacgtgaagggcatccggttcgggggccagttcatcgtgaagtcgttcacggtgcggcgggcgtcgcccctggagctgctgcggctgctgggcatcccgccgtcgtacctgagcgagtgccagagcctgccgttcccgtccaccaccgcctacatgcccacgggcttcaccatcctggcgcaccaggcgtggcacacgctgacgctgggcctgggcaccaacaagtccaaggcggcgctcttcgtgttcgagtccgaggccatgaaggcggccgtggaccgcctgtggcccgccgtcaccccgctcggggacgtcaacaggaggctcatccgcggcctcacgggcagcgagatggcgcgcttcaagttccgcaagggctgcctcaccatctacgtctacgccgtgcgccggctcggcgccgccgggttcatgcgcaccgacgacctcaggcgggtgctgcagtccgtcgtcgagctcaaggacttcctggaccacacagccatgctcgccatcccgagccagaagagcatcaccctgcagtcccggacagcggtggctcactgagaggagatcgtcgtcacagggcatctcacctccagagcctcgagtctgatctgattctgatgacgccgcaagaacctcgatcggttcagcatcgcagaacagcctgaacaggtatggtcgtcggtttgtagctgtaatcttcagagggcctatctcattttttttgcccccctctccctctctcggttggattcgtttgttcagtgtcggtggtgcaagtgttcgcctcctctgctgggagagcagatgtatagatctgttgagcaaaaaaaagaagaagaagtgttcccgcaaatcaagcatagtttttattatatatataaaaaaatcccaaaggaaatttcccttcaaaaaaaaaaaaaaaaaaaaaaaaaaaaaaaaaaaaaaaaaaaaaaaaaagggcggctgctcgcgatctagaactagt

SEQ ID NO: 124309 - DNA, 351 bp, Zea mays
  Clone ID: MRT4577_44849C.1
catcaactgcttataccttaccgtgctctacgcgggcgggatctacagctccgccaacccatgagtcccccgtggctgcgaggagcgccctccaactaactatatccaagccttctgcaacctcgtagccaacgtctagctcaggccggacaccaccaacatcgaagtagcacggcaccgttccgatcgcatggatacctggtcgtctgcatgagaagctctcctcgtatggaggtataggcaccagctctccaattacagaaggagcatccaaatctcataggagcgactctcgcgcacgagaccaaacaccggattcgtgatgttccacatctgcgagctggcgaacgc

SEQ ID NO: 124310 - DNA, 289 bp, Zea mays
  Clone ID: MRT4577_4484C.1
cccacgcgtccgcagtaataaaaagtctctttctcctgctgaacaggaccagcaagtgcttaagatgaccacaacagcactagataactgctttcttgtgcctaatctcgatgatctgatgcctaagcatgagcaaattgaataccatcaagctgatgattacccagccacttatgatcctcatatagcatcagattctcctgaggagaataatcatcacctaggggatgtcagtgaaaccctttgaattctacctgatgtattagaatcgccagcgaactccaacaaa

SEQ ID NO: 124311 - DNA, 495 bp, Zea mays
  Clone ID: MRT4577_44850C.1
ttttttttttttttttttttttttttttttttttttttttttttttttttttttttttttttttttttttttttttttttttttttttttttggggaaaccgaaaaacccccccaatctttattattaggcccccccggggggggccggaagggaaaaaccaaacaggggcccccccgggtaaaaaaaaaacccccggctaaactaaaaggtcatcaccgggcggaacatttaggagggggacacccttttcaaaccaccttaaaaattttacaacacgcgaaagggggggccaacccagggggcccccccccgcctaacttttgggtgaaaggggggcaaccaaaacaaaaattctgccccaaaaaaaattttaaagcctgggggaccaaaaccaacaaaatctattgtcccgggggacccccagaaaacacccctcatctgcccggggggaaaaacgggcccggccaaattaaaaccgggcattggccccttt

SEQ ID NO: 124312 - DNA, 396 bp, Zea mays
  Clone ID: MRT4577_44851C.1
gattccgggtcgaccacgctcgatcgcgcgcgctctttgtgcgcgcatggagaagcgcgaatgcttgcaaatagacagcctaccccagtcagtctgcgcggtcctacccaattagactcgagacgctaaaaaaaggtgtgtgagatccactggggcacaagtttttgaaaagaaatgtctcacggggtttgagctggccgattgctgcaacagttcatgaacaagtctgcatgaaaggatgcctttcacctttgggtccgggttaccccttccatgtccttcgtatcaacaagatgctttcgtgtgctggggctgataggctccagactggaatgaggggtgcctttggcaagccttaaggcacctgttctaaggtggacaattggcaggtactcc

SEQ ID NO: 124313 - DNA, 654 bp, Zea mays
  unsure (1)..(654): unsure at all n locations
  Clone ID: MRT4577_44852C.1
aattcggcacgaggcttttctggattctatcgaagacttccgatcgaagcacccacagaaaagaaagcgatcgcgacgacgcatctcgcgaaaccccggtgggaaacccagggatcggcgggcgggcttcttgtgcgtgctcatagtcatggtcagatccgatcccttaccgcgatactccatcgggatcagctttgtccgggcaggcttctcggattgttgctgaagcaaggaaggagggaaagctagcgcaagcgactgccccacacacagcaccacagatcctcgccggtaggggtcgtcggctatcgtgtaccttgtgttggcctccgatccacaagaagctagagctagtatcgagaggccaggggcaggctaggcggcgcgcggaagatcatgtggtcgtcggagatgggtcgaagaagccgccgaacgaacggcatggtggcagagccgcagacgacgcagctgctgctgcacggggtgatcgaggccaccatcctggaggccgacctgtccgtcaccacagacggcaagctgcagccgaccaagaagactctgatgaagaagaaggtcttctcatggatcaggaagctgacattctgcagaaaccagcacagcctcatccgccatcgttctcggacgacgcnagct

SEQ ID NO: 124314 - DNA, 625 bp, Zea mays
  Clone ID: MRT4577_44853C.1
aggagacgtacacaaagcgcatatccttctacgctgtctccttctgatctctctcgcagctaccgagccgaacaactcctctcgtactcgggtatcgaaatgtggagccgggaacgtgcccatcctctacctttccaatcttactccgataactatcctcaggggatgaatgctgatccggcgaggactcggagttggagccatgaagagaaggtgccgtctacacgagctcaacgacgaggacaagaacatattgacaaggccttcgtcgcgttcctgagaatagataatgaccacactggaaggcaaagggtcctcgatggaccaaggagatgtatgtgggagcttgatatgcactgacctgatctaggaattcatagaatgctgatgatgaacactatgctgctgactatctgctaccactgattacatggttgacagaggaaggtgcacttattccatcgaagaccatggaagaagatactcatcatcgggaaagataactgactacctactatgatacggtataagatactataataacatccctgaatcatatgagctcatgagatgggtatcgaagaatgtgacaaagagaccttcctccgatgaattacatgacaac

SEQ ID NO: 124315 - DNA, 251 bp, Zea mays
  Clone ID: MRT4577_44854C.1
cccacgcgtccggcggaccgtccctccagtctttcgctctccgtcactcccacgagctctacgatcactttcacgaggcgcgcggaaatcatatactacatacgatcatatctactgcctgaataacaatcataccgccttactaattcatatgaacctgaccttacctgtacccctctaaagcataactttcatgcatacatattacatacctattacactacctgatcatgtacttaactcaacaacta

SEQ ID NO: 124316 - DNA, 412 bp, Zea mays
  Clone ID: MRT4577_44855C.1
caaaaatcttctaaaccaaaacaacacacgcaaacaaaggggcccacttaaaaaaaacaccgcgatacccccccccccccaagaaaaaaaccccccccagggggcctcccaagaagggaaaagggcaacccctggacaccccccgggacccccaatgtgaaaacaagggcaaaggccaccgggaccccccagggaccccgcacccaaaaccgggacggggaaaaccgaggcccaaccaacccaaagggggcacccaaaggccccaaaaaaaccaaatggggggggaaaaatcccagaacccaagacccctgcaaaggaaccccagaagtcagcccaacccacggggggggggacaaacctaaaaagaaaaaaaggggggaagcaaaaacccaaaaaggccaaaaaaacaccg

SEQ ID NO: 124317 - DNA, 328 bp, Zea mays
  Clone ID: MRT4577_44856C.1
agcagttgaatatgaaagagagcaagatgacctattgaagctatcagggaaaaccagacaggtgggtctaatcgtgagctaaggcaccgaattcatgctggactcatcaaccgatggaactgctgcaatggccaatgcttatgttgaaaaacgagccttagcttgcacctgggaagctatcgagaaccagactccgatgtcggccttagaaccctatgagtctgtcccagaataggccgatgcttacgctgtatattaggctggtgaaactgctacatgcgaggatgtaccggtcaaatatcagtatggtcacgacgagccggaagcc

SEQ ID NO: 124318 - DNA, 168 bp, Zea mays
  unsure (1)..(168): unsure at all n locations
  Clone ID: MRT4577_44857C.1
gagctcacnattcggcggccgcccttaattttttttttcgggggtatttttaaaggagagaaccgggctgcaccaagaaagcataaagcttcggaaaaataaccacgtgaactggtatggtttatgagacatggggtggcacactgacaacaactggaagggggcaaa

SEQ ID NO: 124319 - DNA, 320 bp, Zea mays
  unsure (1)..(320): unsure at all n locations
  Clone ID: MRT4577_44858C.1
taactantttattctagctacagcagtcatggggctcactttttacctaattgagtaatgaattaaatgcatcaatgtcccttgaagttgtcaagagatgccacttatgtccactaactttgaaaatatatttatgggttcctaattaacttgataagtggtgcacttcacatacttaaacttgcaagtccatttctggacatcatccataacatccattcctaatctcttttagttcactttacaaccataattacaagtttggggccacttcttcattatacttctttaattataaaccccccttttaaactatttaa

SEQ ID NO: 124320 - DNA, 329 bp, Zea mays
  Clone ID: MRT4577_44859C.1
gcctcggacgcgtgggcggacgcgtgggcggacgcctgggatggctatctgaagatatcttgtaatggcggtctgaaacacaggcgctcagagatatgctacatctcagcgaaccactcgtccattaaactctaccatgactactacctagccttcatgcagaacgggccctccataaccacgcaggtcggtgccgcgcccggacgccggggcggaggtcacacgaaccgactttctggcgagcgtcacgcccctcacccaggcgctcggctttatgtgcaactcctccgggcccatagggctcaaaggcacggaggtgtacctggggc

SEQ ID NO: 124321 - DNA, 1028 bp, Zea mays
  Clone ID: MRT4577_4485C.1
ggtttagctggtcttcgtgtgggttatggtgcatttcctctgagcattatcgagtatttgtggcgggccaagcagccctataatgtttctgtggccgcagaagtttcagcatgtgcagctttacagaatccaacttatctggaggtatcacttttatgaaatcactgtaatagttctttccacagtttggctttgcctaacttgattttgttgaaccttggacctggacaatggaagaatgtgaaaaatttactggtaaaagaaagggagaggttgtttaatcttctcaagggaataccattcctgaagccatttcccagtcattctaacttcattctctgcgaggtcacgtcaggaaaggatgcaaagaaaataaaggaagaccttgcgaagatgggagtgatgatccgccactatgacaagaaggaactgaaaggctatattcgtatctcggttgggaaacccgagcacactgatgcactaatgaagggcctgaatgcacttcgattgtgagagcttttgcacatcatcacatcaatgtaaacagtgtattcctttgcggatatatatccgtgaggctggatgcagtctataagaggagattgcatcattccaacgcctgtgaagcccaaacagacaagggtcatgcgggtttcactatccttttgtttagcaagttgaagtctgtttttgttattcagcgacataacagctattcacaagattatcttgttcagaacaagtgtagcagttgaattcctggtaggtggtttctgatgttgggttgagacttgagagaactgaacattgtgtaggtataaataaaggccaacatagcaatgttgttgtcttagtacttgtatcaaaggtcattcagtcgttgcaaatttcgaccaaataataaagggatgaaagcttggaaacggaacagattctcatccataaccgccgtgacgacaatgtgtaaacgtcgcgacttttatttatggtgattgggacagtgtttttgaagtaaaggtgattgacat

SEQ ID NO: 124322 - DNA, 160 bp, Zea mays
  Clone ID: MRT4577_44860C.1
tcgaccccgcgtccgatgctcgtggtctgtcgcgtggagtattgcaaggcctatgcttgtgagagtctcagatctgcgcaatgatgctggtgcatggcttgtggttgacatacctaggagtgctttatgtatgaggtactgtagcactactgcttatagg

SEQ ID NO: 124323 - DNA, 514 bp, Zea mays
  unsure (1)..(514): unsure at all n locations
  Clone ID: MRT4577_44861C.1
cgggttgaccccgcgtccggtttcatgttacacactttttatctcccttaataactctgctagaaaccttagttctgctgtttggcttagatttttacactactcaggccaggtatctttttctaccaaaacttatgtgcataattatgattaatgtggctttagtagttgatccatgaaaattgtcaatcatcaaccatttcttttcctggaaccgttgtagtgtacaagagatcaagctttggtttgtagacaatggtgccctggctagaaccgcgaggattgggcctatttcctgactgtctagttattgtctcagaagtctggtttagataaggttctgtttccgcggcaaactattagatacctttgcagttgcggagttctgtaattgatgtattatttatgcagatagtgtagtctaactatgcaaactaatatatgatctgtttcagagttttgagaaaaaaaaaaaaaaaaaaaaaaaaaaaaaaaaaaaaaaaaaaaaaaanaa

SEQ ID NO: 124324 - DNA, 679 bp, Zea mays
  Clone ID: MRT4577_44862C.1
atttttgtacagtctcatgtccgtgcccatattgagctgatgtggctgctgagttcttcaactcctattggttggctgaataaaatgattcagttcaaagagaaatcacgcaaggcggtgcgtcattcgctggtaatgaaaatgttggagtggcacttttgacgtaccctgttctaatggcttctgacatccttctgtaccagtccgatctggtacctgttggggaagatcagacacaacatttggaattaactcgtgaaatttctgaacgtgtaaataatctatatggtggaagaaagtggaagaaattaggagggagaggcggttcattatttaaggttcctgaagcccttatccctccagcaggggcccgtgtgatgtccttaactgatggtctctccaagatgtcgaagtctgctccttcagatctgtctcgcattaaccttcttgacccaaaagatgtgattgtgaacaaaatcaaacgctgcaaaactgactcgctccctggcttggaattcgacaacccagagaggccagaatgcaaaaatcttctctcagtctaccagatcatcactggaaaaacgaaagaggaagttgttagtgaatgccaagatatgaactgggggacattcaaggctacccttacggatgccttaattgatcatctgcaacctattca

SEQ ID NO: 124325 - DNA, 289 bp, Zea mays
  Clone ID: MRT4577_44863C.1
ctcattcctgcgttctcttctcgagttcacgagtgctccctctctctctctcgttacgatgattgggcgaccgccgccgccgccgttgccccacgccaggtgcccaggtcttcgtcaggccctttgccgccgacgagcatcaaccctagttctgggtttttgctctgaagaacaaaatggacaatgctcagagtgacaaccgaactgataccaagcaagatgatgatgcgcgccaaagcaaacaggatgatgaggaggcccgccttgaagaatataaaaagatcattga

SEQ ID NO: 124326 - DNA, 1730 bp, Zea mays
  Clone ID: MRT4577_44864C.1
ccggccgggccgggctgaaaaaatcagatcccgcgcttcgcagcggagtgcgtgccaatccagcttccatctcccgcctcccccacgcccccggccccccatcatggcgtcctcgtcgcctcaactcaaggaaccgtcgtccgcggtgaagcgggcgtcgacgggcccgacggcgctgcccgagcgcaacaagaggaagacgtcgccctcgctccccgaggcctcgggtgccacacagcagccggccaagcggaagccgccgttgttccagcgcgcgtggtcccccggcgacgaggtccggatcctggaggccctcgccacgtaccgccgtgaacatggcggccgcctgccaacgccggttgagctattcggcgcgctcgatggcagcctcgagaaggaaggcgtcggagcaaaggagctcgccatcaagcagcgcagcctcaagcgccgctacgaccgggacgttatgaagaatgctccgcccgccgataaacacgaacgccgcctctacctcctctccaagcacgtatggggacgcgttccgccaaccagaccaccggttgccaaggtccgaagtgctactcaagcgaagtgcgccggcgcccaagcaagcaacgccgctgcccaagcccaagcgaagagcgccgaccgccagtccggcaaggaggcgctgaagcccaaggccaagactttggatgagatgcgcgagctgtatccttacctggttgatgaggccacgatccttgtcgaaccggcggtgctggagagagtgctcctcaacattgaagacatcgacgcccaggtgttggacaagaagatcaggaaggcgaggaagcagctcgccgatgccatcacggaatcggcaaggattaacaacatggaagtgcctacaatatttctgtttacatccagcaagcttcaaccagaaaagttaagagtggaaaatgagaataatcttttggttgatcatttggagaaaatggatgatgtggatatttgtgctaaacaacgattggcaagagtggaacgtgaagtaatggagttgagacagactgtaatagcttaccagtctcaggcaaagggtataatatgtgaatcagccaagggtggccttcaatcaattgtagctgaaaatcagactccagccaatatactacaaaagaagacagaagtaccaaatgacttgatccataaaaagaatgcggcggttacatcaaaatatcattgtgccgttccccacaatgttcctcccaataagccgaaaatgcaaggggtgatgttgccaccatctaaggcgtttcctggtatgcctaggaagattgacaaaagtccgactccacgcaaagcgatttggaaggggcccatatgttgactaggttctaaaggcgacgaccaggtttcccttgtaacatagctctactgtgtgtttgactaggttttcattttggtccaagctgcacatgatccagcacagcagtatgtatggctcggacggttctgggtctcataagactaccgcaccctgtagtgggtctatattttggtgaaatatctgcaaaaaggttatctagatgttgcagatgtcctgtcaaactgatgacattattagcaacgagtgtcctctggtgcacatgcactaagattgttgaactctggttgtaatcctagttaagcaatgaagctcacatctcatatgctgatataaaaatgaacaaaaaaaaaaaaaaaaa

SEQ ID NO: 124327 - DNA, 148 bp, Zea mays
  Clone ID: MRT4577_44865C.1
agaggaaacgtgcacaaaattttttaatcaaccggccggtgttgcctgcatcgccgggaaatgaagagcgccggccgccaacttattttgctgggggggggtaatccgagcttaatctttcggccatgatcacagacttgttgagctg

SEQ ID NO: 124328 - DNA, 671 bp, Zea mays
  unsure (1)..(671): unsure at all n locations
  Clone ID: MRT4577_44866C.1
atacaacccccgcgtccgcctgcctgcaatatcccgcgcttcgcagcgcagcgcgttccattccagcttccatctgccgcctcccggcccccatcatggcgccctcgtcgcctcaactcaaagaaccgtcgtccgcggtgaagcaggcgtcgacgggcccggcggcgctgcccgagcgcacaaagaggaagacgtcgccctcgctccccgaggcctcgggtgccacacagcagccggccaagcggaagccgccgccgttccagcgcgcgtggtcccccggcgacgaggtccggatcctgaaggccctcgccacttaccgccgtgaacatggcgggcgcctgccaacgccggttgagctcttcggcgcgctcgatggcagcctcgagaaggaaggcgtcggagcaaaggagctcgccatcaagcagcgcagcttcaagcgccgctacgaccgggacgtcatgaagaatgctccgcccgccgataaacacgaacgccgcctctacctcctctccaagcacgtatggggacgcgttccccctcccagaccaccggttgccaaggtcggaagtgctactcaagcgaagggcgccggcgcccaagcaagcaaggccgatgcccaagcccaagcccaagcaaagagcgccgaccaccagtccnggcaggaggcgctg

SEQ ID NO: 124329 - DNA, 1605 bp, Zea mays
  unsure (1)..(1605): unsure at all n locations
  Clone ID: MRT4577_44867C.1
ccgggcgtaccagcacgccggccgctgctgtgcctcgctgctgtgcctgcctgccggctgccgccatccatcctttttcccttcctcccctcaccccctcgtcggaatcggaacggctgtcgtctgccccttcgcccccctcttcgatccctcaccccacccagtgctagctagctagctagcttctagtggctagtagctcccctcccctgtgggctgcaacctggtttgggttcgcggatcgatcgcgagatcaatcaatccatgacgcggaccaactgggaggccgataagatgctcgacgtctacatctatgactacctggtgaagcgcaacctgcaggccaccgccaaggccttcatcgccgagggcaaggtcgccaccgaccccgtcgccatcgacgcccccggcggcttcctcttcgagtggtggtccatcttctgggacatcttccattcgtccaccgccaaagcctcatccacatccactgccgccgccttcatcgaccacaccgccaagcaacagcagccaatcggcgccgggaccggggcgcctcctcctcatccccttcacgattccagagagcaccagatgaggctccagcagctgctgcaccaacacaacccccacctccacactacaagagatgctcctcctcccgcctctatcaatgccctcaactccgatgtctccgctgtcctcgcgtccaaaatgatgcaagaccgagtcaggaaccccaaccctattgactccgacgcctcacagcatctcctagacgcaaacaggatagcgcttctaaagtcaccaccacctagccacactgggcctatgcctatgcagcagcagcttcatccaaggaaccagcaacttgacatcaagcccgatgttggtatgccacagagaacgatgcctgcggacccttcttccatgtatgcatcagggatgatgcacccaaaacctgcattacttgccactggactaaatcaaggtggtgttgggagtgtgccacttaaaggctggcctttaacggtcccaggtattgaccaactccggtccaatttaggtgtgcagaagcaattggtgccatcttcaaaccagttccaacttttatcgccacaacaacagttgcttgctcaggcacaaacacagaatgaccttaccagaatgggttctccagcaccatctgcttcgccgaatgttcgaccagatgacccggattatttgatgaagttgaagatggcccagatgcagcagtcctcaggccacaggcctatggaattgcaacagccgcatcagcagaacactagaaagcggaagccaacttcttctggagcagctaatagttctggcacaggaaatactgtcgggccttctcctccgtcaactcatccactcatacccctggtggtggagtaccagtggctagcaatgttaatattttacagaagagtcaatgatttgtggtgtggatgcaactggtggacttgcctcatcctcaaaccagatggatgctttggatagttttgttgattntgatgaaaacgtcgactcttttttgtcgaatgatgatgtagacggaagaagcatgtttgcagcacttgaaaa

SEQ ID NO: 124330 - DNA, 636 bp, Zea mays
  Clone ID: MRT4577_44868C.1
ggatgatgtggatatttgtgctaaacaacgattggcaagagtggaacatgaagtaatggagttgagacagactgtaatagcttaccaggctcaggcaaagggtataatatgtgaatcagccaagagtggtcttcaatcaattgtagctgaaaatcagactccagccaatgtactacaaaagaagacagaagtaccaaatggcttgatccataaaaagaatgcggcggttacatcaaaatattattgtgccgttccccacaatgttcctcccaataagccggcatagccattttggcgctgaagaccaaagcaacaattacttttttaccaaagtaattgttcccactaggtaaattctccgcctttagtagtggaatttgtcatctcttgatcaatgtgtaacagaaaatgcaagggggtgatgttgccaccatttaaggtgtttcctggtatgcctaggaagattgacaaaagtccaactccaagcaaagcgatttgtaaggggccatatgttgattaggttataaaggcgacgaccaggtttcctttgtaacatagctctactatgtgtttcataaaaaaaaatatgtggcagcgagatcgtgctttgttgattctgcccagcatcgtctacat

SEQ ID NO: 124331 - DNA, 259 bp, Zea mays
  Clone ID: MRT4577_44869C.1
ccctcccacacaatggcggacgagcgcctccacctcgcgctgatgatataaaaggcctatgatgcgcgtgggcacacccacgcctcgagccgaccatccgcctgccgtacaaagcggcggcggcacgacgacgccgacaggacccggagggggcgtgcttaatcgcccggtatcaacggctactacaaaataccaggaaaaaaagcggaaatctgccatgcataccacaacatgaaaaaagggcggactttatgacgag

SEQ ID NO: 124332 - DNA, 237 bp, Zea mays
  Clone ID: MRT4577_4486C.1
taaaaaaaaaaaaaaaacaaacaatttttttttaaaaaaaaaaccaaaaatcggggggatttaaataaaaaacacaaacaacggacgcccgatctaaggggttcccccttctagacgctccaagctctcgtccccgtgcttccgatcgtataccttaaatttaatcgcccctccgttcttttacatgcccgtttttttacaaccccttgcctggacaaacctagtcgtttgccacca

SEQ ID NO: 124333 - DNA, 398 bp, Zea mays
  Clone ID: MRT4577_44870C.1
tactgtaatccttttacctaaccaactctgtgtatcggggcagggccaaactaaagagcctctttctttacatttttgcctcggacaacaccaaaatgtattatttacaaattagcgcaaaggacttatgcatgtaggctgaacaacgtattccatatattataatagacccattcttaaaaaattgtcaaataactctttttgaccaatttaaaaagattgaatactaccttcaatagaaaaatagattatcttgacttgactttaaaaaaaacccaaatcttaaaaattttaaatcataatttataattaaaacacaactattaataatatactgaacattcttcttttctagtgatgaacacacatatattaatatcgtaaaatgcctttttttt

SEQ ID NO: 124334 - DNA, 873 bp, Zea mays
  unsure (1)..(873): unsure at all n locations
  Clone ID: MRT4577_44871C.1
gtgaacgcaacgcagcggcaaaagcgacactgccagcagcgagcgggtggaaccagaccagaccagacatgtcgacgacggagccgctcctctcggccggcgccgagaagaagaagggcggcaagggtcggcgcgtgggcatcgacgaggcgctgtcggcgcacgcgggggagttcgggcggtggcagctgcggcacttcgtggccgtgtcggcggcgtgggcgctggaggcgctgcacaccatggtgatcatcttcgcggaccgggagccggcgaccttgccggtgccctgcgccgccgccgggcgggagtgggccggtggcggcggttcaggcgccgctgcgtcgaccgtcgtcgagtggggcctcgtctgcggccagcgctacaaggtcggcctcgcccaggccgtcttcttcgccggctgcatgatcggagcgggcgtgttcggccacctctcggactcgttcctgggccggaaggggtcgctgcaggtggtgtgcgtgctcaacgccgccttcggcctgctgaccgcgctggccccgacctactgggcctacgcggcgctgcgcctcctcacgggcttcagcacgggcagcgtcggcgtgctggccttcgtgctggccaccgagcccgtcggccccgcccgccgcggcgccgccggngcatgccgccttctacttcttctccggcggcatcgcggcgctcgccggcgtcgccgcgctcctcccgcgctcctggcgcctgctctacgccgccacctcgctcccctcgctcgtcttcgccgtcgccgtcgtcccgttcgtctccgagtcgcccaggtggtacctcgtgcgccgccgccccgacgacgccttgcgggtcgtccgcgccatc

SEQ ID NO: 124335 - DNA, 1295 bp, Zea mays
  Clone ID: MRT4577_44872C.1
attcggctcgagctcgagccgcttacctgtgcttgggcgtgtgctcctactactcactgctcagtagtcagtcctcatctgcgttcgtgtgtgtgtgtgtgtgatcggccgcatgcttattggcgccggtgtgctcccgtagcgatcgatgctgccaatctgacgaggctcagcgtgtgtttgctttgctattttgggctctcgggagagatggtgcaagcgcggagtgttgatgttgatgggtggagtagaagctcatgggagtggcagcggactaatgaaacgtacacctcttcgaattatggcaggcatttccatacagaaaacaagcacttatggttactccctggcctaccactgaccttcctaaagatttgaggtccatcaaacggttccagaatttgcaatcattgataagaggaatcagaaatgttcgagcagaatattctgttgagccagctaaacggatatcagcttctgttgttgctactgcggatgtcctggaatacgtatcaagggagaagcaggtcctagcattactttcaaagcttgacgttcagaacgtacattttactgaatcagcaccaggcgatgcaaaccagtcggttcacattgttgctgatgagggtttggaggcgtatctacctttggctgatatggttgacgtgtctgaagaggttaagcggctctccaagcgcctctccaagatgcagtcggagtatgatgctcttgttgcccgactcaattccccaagttttgttgaaaaggcccctgaagatattgttcgcggagttcgtgaaaaagcgtctgaggcagacgagaagatctctctaactaaaaatcgtctcacttttctgcaatcaaccattaccacttaaatacagtaatccacggggactctaccaggatgccattttgatcgatgacgcaggagaaaactgattgttaatagtttttggttgaaggatatgatagattggcaacgaagttgtgccttgtccagcagaaacacacattctttctagttcatatctgttgtctcttgaaacttaaaacatacattcggctaggcatataatttatattcctgacttatggttttagagcctttcgggatgcccttagttgaggtaaattttgttctgcctctgaagttgtgctgatgccattgttagtaatattcatattttgtaaggtgggcgcacgttattagatatgaatgatctgtaaggtcggtgcacatgtataatcaatgactatagtttcgggcgtcagtcggtttctgctgattccca

SEQ ID NO: 124336 - DNA, 410 bp, Zea mays
  Clone ID: MRT4577_44873C.1
ccggagtagcttagcactagcaagcaatggccgctctcacttccgctctcctcttcgccgccctcctcgtggccgcccagtacgtgctccgcttgctccactccttcctgtgggtcccgttccgcctggaacgccgcttccggcggcagggaatccggtggccaccacgaagcctggtctccggtaacgcagccgactaccgcgacctgctagccgccgccaggtccgcgcccctctcctccttccgccacaacggcgtcgtcgcccgcgccacgccgcagtacgcggtctggctggcgcggtacggccggccgttcgtgtactggttcgggccccggccgcggctggtgatctccgacccggagctcgtgaaggccgtgatgaccgacttcacggggggctttgataag

SEQ ID NO: 124337 - DNA, 257 bp, Zea mays
  Clone ID: MRT4577_44874C.1
gagacttgtctatgttgtgttgggcctgggaggaatatagccaggcgcaccatggctgttctaggggtgctttattgcgtttttaatgaaatgcttgttgcgaatgctgtccgcctaaagagatcacttttttgatctacttacagatgtagtatggtagatggatgtgagggactcaagattatggaattatgaatgaatgatatggattgagccctaccattaagcattgcacctgtgctgttgatcttcttgga

SEQ ID NO: 124338 - DNA, 575 bp, Zea mays
  Clone ID: MRT4577_44875C.1
aattcggcacgaggtggtcatggtgatggagcagcgttcccgcgggcgaccaacgcgtccctctccttctgcggctacaacggcacctcctgctgcaacgccacggacgacgccgccgtccagaagcagttcgcggccatgaacatctccggcacgccgtgcggcgacgtcgtcaagaacgtcctctgcgcgagatgcagcccgtacgccggcgagctgttcaccgtgacgacggccccgcggacggtgccgctgctgtgcagcaccaccggcgcgtcgagccgcctgagcagcgccgccaagcccgcggcggcggcggcaacggcaacgacggactactgcacgcaggtgtgggacacctgcaaggacgtgcgcgtgccggggtcgccgttccaggcgcccaggggcacggcgccgtccccggcgccgcggctgaccgacctgtggcagtccgcgggcgagttctgcggctcgctgggcggcgccggcaggtcgccgtgcctggacggcggcggcgcggcgttcaactccacccgcccggcggcgctgccgttccgcggcatgtgcctggagcg

SEQ ID NO: 124339 - DNA, 1143 bp, Zea mays
  Clone ID: MRT4577_44876C.1
cctcgaggccggccgggtatttagaaagtaagatcaagtaccccacactcgctcgctctccgacgactggtgggccgccgctgccctgcgccagccgccaggtgccgaggccttcgttgatctattcgccagcgacgagcgcccaccaggcaagcttctgctgctctgcatgcaatgatgaactaatgattgttgttgataacagaaacttgctgttggtttttgttcacatattactattggcagccaaagagttctacaacctgcattgcacatcttattattagatgactaatcctgtgattactactatactgtgctagccactccatagtctagcatttttgcaacgataccaacttcacgtgtttacatggaatgcaacagagatgaagctgctagagcaaaagctctggcagaaagaaaaatgatggacatggattttgttggtgcaaaaaagatgattatcaaggcgcagcaactcctccaagaagtggatgacgttgacattccaaaaaatgttaactgtttgtgatgttcattctgctgctggagctaaggtgaatactgagattgattggtatggaatactgcaagtacctgtaaatgctgacgacgcactgataaagaaacagtatcgtaagcttgcccttttgctacaccctgataagaataagtttgggggtgcagaggcagcattcaaattagttggagaagcaaacataactcttacagaccggtcaaaacgttctgtgcatgacatgaaaagaacaacattcaggagtgttacagcaagacccagtcatcagccaccaaaaagacctgcacctgctagatctagttctactcctgtgaatctccatactatgcatcagcaacatcagtatcaagcctcaaatcctacagggccgcaaacaacattctggactatttgtccagcttgtggcatgaaatatcagtactacctctcgatcttgaagaaggttttgcgctgtcagaattgtttgaagtcatttatcgcacatgatttgaaggaccaagctattccttctggtgcaaatcagcgatctgccggggtttggaaaaatgcaggcacaccacagaactctgcaggacctcaatcaaatgtcactggtcagaaat

SEQ ID NO: 124340 - DNA, 1282 bp, Zea mays
  unsure (1)..(1282): unsure at all n locations
  Clone ID: MRT4577_44877C.1
ccctgtggaacgacctacgactggaactctcactgcgtgatccgaccgtcatgtaaagacccagagagggactaccggcactcgaactggcgtaactgttgggagtcaaacttcccatgttcaaactaggcgtgcccctcatgcatgccgctaccgatggcctcgaccgctccgacggctgccttacctatgtggtggggaccctacgtggactcagacacgaagtccgacgtcctcagctcgatccgaggyygatggkwgcggggtaacacctcaatctagcgtcggttaaggtccaacgtcccacgggacagtctctacaccctcgaactccgtcggagaacacgacggtagctcttgccctaccttcttccggagccgctaaggtgtctactcggcggctagctgaagggagttcttaatgcctaccttcacctggctgttggtcgagttggacgatagtaggtgtgcggccatcaccgaccaacctctgctcttctggtctcccacgcgatcgtactgaaggagcaattaatctcgactctggcttgagtgacgtctgaaanngttgtggtcactcctgtcatccggtcttcrcggcagtttgtaagtagacgtccgagccvgnyctctcycttswttgtcarstgacgyaygagtgnckacgtgtrtgacagtcccacttaccgttggttgtcgtcgtcttagaagtcttgttgtacgtggcgmmgcatccatagcgaggtagttaaagtctccgtagctcgtcgacctgcccatcccttccacctaaccatggccagaccagtggaggccgtcgaagtcatgtaagactaggtatatgacggctgmtcngactgtaaagctcatcctcaataaacctgtccgtagtcgttagtttatgctactacttgacctcagyygagagagtcagtaactgttgtcctacccttcacctattaatcacgacacactggcctaaattaactaatcctcaagccgtctctcttaatataatatgtatacatttaatagtgtaaaacaagcagatatatcggaaccacacgtacgttcagtagcttgtacgycgaagaacctacgttattaacaacacttggatcaacacatcttggaacaccaaatccaacgatccacgggtgwwctatacataataagcagtctattctcaaaagatcgtagtccaagtaaaacgatgagaccaataacgagtataacgtcaagaaccactaccmtatcagttgtgtccwcgataagagtcaaa

SEQ ID NO: 124341 - DNA, 364 bp, Zea mays
  Clone ID: MRT4577_44878C.1
aagcaaatactatatcattttaaaacggtttttggaaggaaacacccaaacatttcccaggagacaaacaaaagtttttaacaccacaaaatggctggactggaaacacatgcacgcaagcggaggaaattttttctcttcgccccgtcttttctgcccccctctgtggggatggaaagaaaacctttttcagggcggccaaaacatatcgtgttttggaaaaaaacccctttttgttgccctaaaaaaaaatcagtgcaaaaacgcgcgcttggcgtacataagggaaaacttgctgtggtttcgggagaacacctctacaaccctggtggaaaaagagagaaacacacaggacgctgaaaaa

SEQ ID NO: 124342 - DNA, 1937 bp, Zea mays
  Clone ID: MRT4577_44879C.1
ggtaccctcctcgaggccggccgggaagcaaaaacagttgactctgaactcgcattgcaagccccttcctgacgaaaatggcagcacttgttcctctgctgctcgcccacctactcctctgcgtccatggcgccaccgttacctcggtcgccacgcctccgcctctcccggtcctgcccgtcccgtcctacgcgcagctccggtggcagctctccgagatggcgctcttccttcacttcgggcccaataccttcacggactccgagtggggcaccggccacgctgacccctccgtgttcgctccctccgcactcgacgcgggccagtgggcgcgcatcgcggcgcagggcgggttcggccgcgtcgtgctcacggccaagcaccacgatggtttctgcctgtggccgtcggcactgaccgagtactcggtggccgcctcgccgtggcagggcggggctggggacgtcgtcgcagagctcgccgcagctgcgcgcgcggaggggcttgggctgggcctgtacctctcgccgtgggaccgccacgagccggtgtacggggacaccatcgcgtacaacgagcattacttgggacagatgacagaattgcttaccaggtatggagatgtagaggaagtttggctagatggtgcaaaaggcgacgccaagaagatggattatatgtttgatgcctggttttcacttatacatcagctacaagaaagggtagttatcttctcagatgctggaccagatactagatgggtgggagatgaggcaggagtcgcaggctatacttgctggtctcccttcaacaagagctctgtgacaattgggcataccactgctgaatactcatccagtggggatccttttggtcaagactgggttcctgcagaatgtgatgtttccatcagaccaggttggttctggcatgcctcagagaaaccaaaaaacgtgacaactctgcttgacatatactacaaatcagttggtagaaactgtctcctcattttgaatgtccctcccaattcatctggcctcattgccgatgaagacatacaagtcctccaggaattcactgagattcggcgtgcaattttctctcagaactttgctgccaatgccactgttacagcaaacagtgtgcgtggtgagcaagataatctgcagtttgcaccatccaaagtgcttgaagacgggatatactcctactgggctccgcaggaaggccaaacctgctgggaaatgctcttcgatcttgggcaatctacttccttcaacttgctccagctccaggagcctatacaactggggcagcgtgttattgagttccatgtggctatccttgtagatgaactgtggcaaacaattgttgaaggcacgacaatcgggtacaagaggctgctactgtttccagtcactgaatctcggtacctgaagcttaccatcgacagtgcgcgtgcagatccacttatctcgttctttggtgtcttcatggatcccttctcgtccatacatagtttgcagaatcatgtcaaaccaccccggacaaatagtaacgaagttacaatgttgaggatggcccatgcttctgtcaacaagagtattgacgcaatgtagttgttgagtgtacatctgtcagtattacttctagtctgccctggtcatttcaacatgccagaatcacttgcacgttgatttgttctttggactggagaagggccactcgatggtgggcaatgtgtgtatatcttcagatttgcttgccaaagctactaatacgagaactactctttctgcaatcatgcatggatatgttgttcccaagatcagctgttgaaacttcatgtagtctgtactagtgtctgttgaattatgtgccagcaggaagtctggggtttgaatgaagtgaacgtgcactctctaaaaaaaaaaaaa

SEQ ID NO: 124343 - DNA, 711 bp, Zea mays
  Clone ID: MRT4577_4487C.1
cattgggtacctcgaggccggccggggaccattctgccatctccgcaaccccaacccacaggcatgagtccatgacgtgcctctctacgcctccacctccctcgattcgctccgacgcccatcgactccgcctcattcatgaccggctaggacgcaccacatggtcggcgctcctagcccgccaggcagcgaacgcgctccgtccgacgacacgcggcgcacgtcgggacgacaaggtccaccgatgcacagcacacctgcacgcacctgactgaccgtggtgattacgcaaggggtcatggaggaacaggagagataacaggttgtccaagatatcgcaaaagattgcaatgatgcgcccgaaaggagcatcatcacgttgtgtctgactgacatggtccgcggcttgatgctaactctcaagtacttcttccagagaaacgttactattaactacccgcgttgagaaggctgctctagaacacccgcttccgcggtgagtgcgctctcagacgttacgagtctggggaagaggggtgcattgcttgtgaactatgctgagctatatgtccagctcaggaaattactattgatggctgaagaacgtgaagacgaggagtcgccgaaccacaaggctatgatattgacgtgaccaaatgcattttactgtggggttctgccaacaggcttgaccagtcgatgctattgctg

SEQ ID NO: 124344 - DNA, 326 bp, Zea mays
  Clone ID: MRT4577_44880C.1
caaataaaacatttcacccacagtcccataccattttttaaatttccgggctcttgaattccatcacaaaagtttcatccatggtcaagggggggtttttttgcctccaaacaaattgggtacaccaaaaaaccccgggtggggcaaactttattcgcgtggggtgttttaacccttacaggagggcttgttcacggagatggggggatccttccctttttttatagctcccaacaggggggtccactgggaaccttcccggttttatgccgggccctcccccagcgtaattaacgagcttcccccaagttttcttgcttgggttt

SEQ ID NO: 124345 - DNA, 334 bp, Zea mays
  Clone ID: MRT4577_44881C.1
cctacgatgcacgcgggcctaatctctaaattctgctccagctttttttttttttttacaaaaagatattaatcggccatggactatacatgttgggtagtttacctaaatcataaccactcattatccttccacctctactggccgaccatactcacttctctttgaaaccatccttactcaatttcctccactttaagtttcaaaattcaaaggcattctccaaggcacccaaaacccactacacaacttataatgaatgctccacactttgtagcactagacccatacacatgcaccacaattgacatccacacttccttattccccccac

SEQ ID NO: 124346 - DNA, 200 bp, Zea mays
  Clone ID: MRT4577_44882C.1
gggggcgttcggggcacgtagaaggtccttaacacccaaaacctgccgctcggcaaggaaggccggctcagtggtgaccttggcaggatcgacgcccactccatgtgctcgcccggcttctcctgcgaatcccgctaccaggtcactttctttttgcgcgggagcggccgcctacaagttgttgggatcaacagcacgcg

SEQ ID NO: 124347 - DNA, 298 bp, Zea mays
  Clone ID: MRT4577_44883C.1
caaattctgatcttgagcttactatccaaataacttaatactaccaagtaagtaaataagggaaaaaagggacacttgcaataataatgcataatgtaaaactacaaaaaagggcgatgtatgaacatgatcctagcttaaattctcagtcatgccactactacactaatcactctggatgcccatgcgtaaactattggcaaccacatttcaacggcaagactgttaaaacctatacccttccaatctaacacttacttcataccaacttacatattatatctgacatattaccgat

SEQ ID NO: 124348 - DNA, 245 bp, Zea mays
  Clone ID: MRT4577_44884C.1
aagttcgagaggcaccaaagggacatggggtcagaagaacctccttatcaacagccatggaagtgctgagtcaggaagaccaggacctacagttctgtgctcagacgtatgaaaccaaccatccatattcttaccaacaaggaaccggattacagtttgactgactctgtggacccctgaatacctgaaacctaattataacctagacgatgggcatccttgacggggatactatgatgatgatg

SEQ ID NO: 124349 - DNA, 758 bp, Zea mays
  Clone ID: MRT4577_44885C.1
gatctgtttgccgcattccgtggcttactcctccatctatggaccctctgggagctcatggtggttggtgagcccattctggttgttgcgccgtccccagctcagtgctcagaggctgtgtctgcgcttgttagccttgttgctccgcttttgtatagtgtcgacttcaggccatacttcaccatccatgatcccgattttgctcgcttgaatgtgcttgcggaaggcgaggtgttcccgccaatggtacttggagtgaccaacttgtttttcttgaagagtcttaagagcattcccaatgtcgtatccgtgggaagcccaaatccatattcaacaagggtgttaccagtgggtggccaatcgccaggaaatggaatgaatgggacacctgggaaactcaagcttgagaaacttgcaatcaataagttctctccaactagcctattgaattccatcaaattgagaagagaaggtcctctttctctcatgacagagcacaaagaagcattatggagcacgtattcgccaaccacaaagcccgatacttctgttctaaataggctcattgacgctggtgtgtcaccaaggattgaggagtccatgtcagtagtcaacaatgagatattgcggcggcacttcttggagttgacgaccaacttccttgcgccttttgggccgtatctgagaactacaacaccatcagaagggacttcaccttttgttgacccaccattgctaccaccgtttcatgcagatga

SEQ ID NO: 124350 - DNA, 372 bp, Zea mays
  Clone ID: MRT4577_44886C.1
tcctttttttttttttttttaacatactgtagccttaagatcatttttaccctttaattaattttttgcgaagtgaagggattaaataataaacaacggatggggcgttcaacacctagggactcctcatgaccattttacattggaacgggggggtggtctcactggattattgcctatatatactcgagaacaaaaggcctacaacttcaaccaagctaaaaaggatttggggtcttttaaagcacaaaaacggtcgatgtttattgagtatgccggcgcgtttatacgctgcaaattatacagggcaaaaccagcacggtggctcctaattgcgtttgagggggcaacctgaccaaggtccttactttg

SEQ ID NO: 124351 - DNA, 287 bp, Zea mays
  Clone ID: MRT4577_44887C.1
atattttatcttctatatcaacagtgttaccagatttgacattctatattatttcttaccgctcgtgagcacgtgaacgcatagacataggaatcagcacagtgcatagaggatcaccatacaccctctatacatagcggacgcatgccattctctaaattttagtggaccttttagagtcccttgttggagggttaaaggttctaccaaacctctatatttagagtacataatccttttacaggttcctgccggagccagtcttaggcagcgatcctactgatcga

SEQ ID NO: 124352 - DNA, 713 bp, Zea mays
  Clone ID: MRT4577_44888C.1
ccggccggggagcagtattcatccagatgattaaggagtggatgctcgtcaacttctattccatcggcgtgctcttgaagaaggagaccttacaagtcctcactccatgctcaaaatggtctccatctcaatgaatgatgccatcgccgcctacagatacaggagatgctacgtgtgatccgtcaggatgcagatcacaagcgcaaccatatatcccactccgctcaggatcaattcaatatctgataacgtgcaagttgatgtagctgaaaaatataacatcggtctacatatatgaacgccaagataattatgcttaatcactcaagactagtgactactctatgctgctcaatgtgtctcgcatcaaaacccttcaagctcatgatgatcctatttacaaaatgataatcagggcctgaacgatcttccttgtgtcattcatgatcaccatgaataccacaaccttgtgaaagaactaatcattcaggatttgctcctgtttaaagatcagcatcattggtccggtgacgcaaggatgatcaccatcatgtgaaatgatcgctgaattcatcaaagcattgagtatgcatcataagcagatgtccatgaaccagaagatatttgatgatcatgatgtatacctgacacctgccccaagtcatcatgatgctcatgcgcacttttgctctggaggtattgcattggcttct

SEQ ID NO: 124353 - DNA, 189 bp, Zea mays
  Clone ID: MRT4577_44889C.1
cttgttatcactttcttgctttatcttgcttggtgacccatccaatgactctgcgctcaacttaagttgccttacaatgtatcgagtcttgcctgtcttctatgctttgtcccatataatcgtgtgactgatgatatatctgtgtctcacttcatcaataatgaattataataaagaagagcaatcatt

SEQ ID NO: 124354 - DNA, 494 bp, Zea mays
  unsure (1)..(494): unsure at all n locations
  Clone ID: MRT4577_4488C.1
cctctcgtacgcacactgtccactctctctgccccccccccccggtgcacctggacctccacctccatctccatgcatgggatgggcagtcaaagaaggcttcttctcctcctggctctcctcctgctaacgctggtcgccggagaaggcgacggcgcactgtccggcgccggcagcacggccacggacgacggggccggggggggcgacgcnagcccaccggccggcgcgccgctcgacgtgcgggcaaggaagtggtggcggttcccggcgacggaaggcctcgtcacgggcagcgagcggagggtgcccaactcgtcggaccccctccacaaccgctgaagcgcctgtgtcagccgcctgccatgcgtgctgcttctacctctgctgttagntatataccgaacctnttggtcgaagctatttggctgcacaatgcgccttgggattgagacttcaaagaatataattgcgtatactagtaaatggagctg

SEQ ID NO: 124355 - DNA, 487 bp, Zea mays
  Clone ID: MRT4577_44890C.1
gggtacctcgaggccggccgacgagctttctttacaggatcacgaccactgtgttcgatctacatgcttctatcgcctaactgactctctgaactctcttcacttcctgctcatagcgatatacactcaatcacaagcaaaatgacctctatctcaacaagctacgccaacaccaccgaagaacatgaaaggaaacaaccaggacgagcgacagaggaccagaacaacctccctcttctcgagcattcacctaggcgtcctcccactctgactactattgacaatatcaatgctcaagttggatcgggcgaaacccaacacaactatacttatcccaggcgtatctatctgtgagcctcgctggaggcggctcgccggtgcctcacctcgcgatgacaggatagctgtccatgctattccaatcgatgatgcttctcgctatgtcataaatcactctggacttgtctacactactggtaaggattac

SEQ ID NO: 124356 - DNA, 278 bp, Zea mays
  Clone ID: MRT4577_44891C.1
aataaaaagggaatccaaaaatttttttttttttccggggggggtgggggggaacaaacttaaaggagtttgggcccctttttttttttttgaagaaggtgatttcgagggggtagaggacctttccgaggaaaccttttttgttttgggaggaaaattgggaggcttggtgttccccgggaatttggggccgggccctgttggggttccagttttcccttatagggggtgttttaaggggtggggaataatgggaaataaaggttttctgggggaaa

SEQ ID NO: 124357 - DNA, 614 bp, Zea mays
  Clone ID: MRT4577_44892C.1
gacggtcctgttccaatttctgttttcatggttgcaagtgtccttaaggaaaagagagaaaagctgttacaagaagctagaggtctggacgatcttatcaggatattgaacgatgtaaatgggaacttagatgccaagaaagcttgtgctggagcattgaaacttcacaagaaatacctgaaaaaggtacaagaaaagaaaccttaaacgtgccatggaacacacctacccaatgggttattcttaccatttgaacatacacgaccattttctacacaccacttttgagtgaagatttacaggacaaaggtggtagacgactgacatgttctcagatatggtaccaggctagtgggttgagtacaggatgagtgcaaccggtagtttgtattgtattgtatctcacgttctttgtactcaagaattttgttggctgtacaggcagaaggcggtgcgggtagcatgctctgcgtacataattatttgaatacaagttgaaatgaacaccatcttacgactaggagtgttaatgactttaaattttacactataaaatttaaggaccgaattagattaaaaaaaaaaaaaaagggcggcaaaagactagtgagcac

SEQ ID NO: 124358 - DNA, 356 bp, Zea mays
  Clone ID: MRT4577_44893C.1
gccactaacaattctatgaaaaaactcattatttccatctccttttaacaaccatttttcatgggatctttgttcccaaaaagtttcttcttctataatcatatctaaattttctcccaaaagagacattttcaattccaggggggaagtatttaatccatattgttcttaaagcttttccaagttaccaagatcaacttgaatctgggcttttcttttttttttctgccccttcatgttccaatcccaacctttcaaatattgtttacatagttttagtttttgctgaattttatcaagagcactcttggctttgcagggtttactccaaatattgtcaacaatctttttaaaat

SEQ ID NO: 124359 - DNA, 670 bp, Zea mays
  Clone ID: MRT4577_44894C.1
gtatatagaagcctggaatctggtgaatctcgaatctgcttcgctttttttttcttcaagtttgtagtcatgattgattacaagatatgcaaatttcaagtccaaagattggaagcagacaatgatgaattagggtaagtactacctgagtttgaggtgcattgtcatcttgatctgcatcttcatcaatttttttcttctttgagttggtttcccctttcatttttgtttgcatctctaccttatgtttttccgttctggtagctgtctgttcgttgtccttcaagattgttctcttattgggttttggatcttgatccaccatgatcatttgttatcggggtttggttttagatgttctctagctcttttgtgtcgtttgcctttttgtttggcggaaaatttgtctttggcgcatcaaaaaatcaatcgaatgttttgttttcgtttgttgtttgtacttactagctcacatgtgcaagatgacgcattgacaagatgacaagccaagaacaggagaagcaagacatcttagggctagtttggcaagctggctaaaatctctgttttcaaaactgaagtattgcaaatactatagttgttttaaagtattctaaacttaggtctgaacctcagtttccaaaattgtggtattgtaaactacgatatt

SEQ ID NO: 124360 - DNA, 748 bp, Zea mays
  Clone ID: MRT4577_44895C.1
cgacctcctggagttgggaaaaccactctgatcagggaaatagctagaattttggcagatgaaggtaagaaacgtgtgatcatagtggacacatctaatgaaataggaggtgatggggatgtacctcactctggcattggacgtgctaggagaatgcaagttcccaaagttactatgcagcacaacgtaatgattgaagcagttgaaaatcacatgccggaagtaattgttatcgatgagattggtacagaacttgaggcaatggcagctaccactattgctcagagaggtgttcaactagttggaactgctcatggtgtgacaatcgagagcataattaaaaatccttgtttgcaaatgctcgttggagggattgagagtgtgactcttggtgatgaggaagcaaaaaagcggaaggtgcagaaaaccattctcgagagaaaaggacccccaacatttttatgcgctgttgagatgatatcgaaaactgaatgtcgagttcatcacaggttagatgccacagtggatgctattcttgcagggaagcctcctaagtttgaagctcgcaagatgcataataagtctaccgagtttgaaatgccgttggtgatacctgatagagagtatgaaatagaatcactgccactctatcaggaagttatggtcacgaggtcattatcatcagatggcaacttcagcgatgattttgctgcatccaggcaaacaaaaagcaagagtatgccatcat

SEQ ID NO: 124361 - DNA, 598 bp, Zea mays
  Clone ID: MRT4577_44896C.1
ggttccccgatcgtttaaatattaatagagctcctgcagagatctggggggggggggggggggtatggatggtaaatgtaacagccacgtgcggacacgtattcttcccctgtggcaggcaccaggcccgacacctttacagcctccctacattcccaccttgcactgccgactagtgtgacaccctccaaccggaccactgcacgagaacgaaacaacccaccacgtcactaagccaaaaaaaaaaaaaaaaaaacccccccccacaaccacaccgtgtacttttccttcccccaccgttaagtactagccggaaactacttcgaggattgttgacgtataagaaggctaggttatatatgacacattcgatgagaagaacgattatgagaagaggatctatactttgacctagaggagtataaagagttttatgacaacagttaagacgatcgttagcgcggtgaacaaaaggattagaactttctgtcgttttatagcttagatttggggttgtccgattacaagttttggttctgggtccagtttcattactacttgggtcaagataagggagggtttagcaataacttggggt

SEQ ID NO: 124362 - DNA, 966 bp, Zea mays
  Clone ID: MRT4577_44897C.1
gcaatgaaactgaagtatataaaacatgagcagttgctttacagcatacaacgatggggatacagttggctgcatatacttggtaccaaccggccagtttagctgatcaggggctacaacaaaaaggccaaactaacagtagccttaggagctaactgtgggattgctagagctagacccattcagtcctcccacaagccttctctttgctgttttgctgcgatagcaccacacctcgaatgcctcggtgagatcaggatacctgaactgctctgcgttcttcatccactccgacaggatatcggcctggtcatcagacggcagcgctagcaccatcgagactattgcgctctccacattctgccacatgtctgaatccatctgcagagacatttcgcccttgctatttccatccagcgaacgttttgtcgtttggatataaggaagccatgtcttcaggagatggaatctagatggtgccgggagaaccactgtgccgtagccaacagcgtccagggcctttccagtcacttcgataagctttgccttgacagcccacaagcctgagctatacttgctgtcctgaaccactgaaagaatatggcacgagatttctgaccagccagaaacaaaggcatgcgtcatctcaatcttggtcgacagattagctacccagtcgatgtcagctaagctacacagaatccctttctctgcttgatcaggtgattgatcaaactcggttgccaacagatcaagcccggtcctaagtccagataacagttttgttataccttcctgcaccacagatctgacatcttcatccatcataaccagagcagtttcatcgtcttcatggatcataaagtcagtttgctcctgagcagaagtcttgaggtcatccagaaaacgagggaacagcgtttccatgcacgtagcaaatcgtatggcagagatgaagacattctt

SEQ ID NO: 124363 - DNA, 466 bp, Zea mays
  Clone ID: MRT4577_44898C.1
gcgatcgcgaagccggccgccctttatggaccatttcctggccgttccttaccttttccagacaaaaatggggcccttttttgttgggcttcgattttttttttttagtcaaccaggaaaattccccttaacccctcggaccggaacaaaacctttagcttgacccaaagggcgttttcttaagccccatttcctgccaaacccttgccccttaattggggcctattttaaacctcccaccctatttaaacccacaggggaagggacctgacccaaaattagaccccttatttcataaccaaattcaaaaacaagggccttatggggagatttttttttacaaccttgagacaaccgcccaaaacccttagcgcggccaccgggggaaagcctaaccacggggtcccgcggccgagggcgcggtgacgtacttgaccgtgccggcctacgccagcgccgagcggag

SEQ ID NO: 124364 - DNA, 190 bp, Zea mays
  unsure (1)..(190): unsure at all n locations
  Clone ID: MRT4577_44899C.1
gctatttcagttgatcntagaaagaagacggttaaaagctcaaacaacaagaaatgacgtcaactgaatctaacagctggtgagtttaggctgttttttccccagcctgttttgacactgattactgtatacttgaactgcggtttggaaatgctccagctgttagattcagttgacctcattttttgtt

SEQ ID NO: 124365 - DNA, 187 bp, Zea mays
  Clone ID: MRT4577_4489C.1
aattaaaataacttatttattatttacacttaaatacttattcttatccaatttcattacgaaagaatgcaaaaacgttttaaaagcaaccacgaaggcacgaactaaacacttttttttaatgacagtcttacaggaaaagtgtactactaatgggaattgctaaaggggagctaaaagaacccta

SEQ ID NO: 124366 - DNA, 308 bp, Zea mays
  unsure (1)..(308): unsure at all n locations
  Clone ID: MRT4577_448C.1
atcctctaaaatcttcccactcnttctactaaccctaccnccnaccnccggccctgttattattttaaaaatgcgtctgccacacnacacaaantaancncaattaccttcccttcaaccattatctcttcaattccactattcatatataccttacttcctactctttcatnaaccacactttccccctctaatacctcaattctcttcanttcatctatctcatccttcaattcaccaccaatttctttcttacctctactacttccaccaccaacttttacctcacctattaattcattcccact

SEQ ID NO: 124367 - DNA, 472 bp, Zea mays
  Clone ID: MRT4577_44900C.1
tatcttatttatgagatgccgcatgacatgaatacaaaacactttattaacagaacatataaccttcataatggaaatcatagaaagaaggggcacacagcgcaatggattgcagccatgggtgtatagtaaacgtgtatctgctgttcagtacaacatgcatagctatgcgttgtgtagattggtctagctagagttagtgtcgacacgtatcgttaacaacgcgagtagccaagctgtgtattgcgacagcaatgcatggtactaacggcaacaatgcgacagtgtgtcaccaatgctaggtggctcacaccagctagataattgaatggtagtagctgtggcagctgtagataagctagatgagccaaagattgcagttgcaagaatgcaatagattgctgtaaggagctagccgaaagctctatgagtagcctataggcttgcacggctgaatactcaaagcccattg

SEQ ID NO: 124368 - DNA, 1144 bp, Zea mays
  Clone ID: MRT4577_44901C.1
cattggtacctcgaggccggccggggtagaagaatattggacaccaaaactctctacctctgattagtgttcatcttctccctctcctctcctctcctctcatgtacccacatcttctctcttctagtaccttctagatcctatagctgcaggtttctccattctatttctcctggatgctacttccctaaaccctactctaaatgcgtaccagactcatgttcagcgttcattgtactactggtttgagttcgtgagattagagactactctcatccaggaacccttcccacccattcccgcccaccggccgtgttctgctgctacttcaggcatggatgttgcgatgtggcgtcttctcgaccagatggcgcagatggaggtgcgattgaccagcgcgctggctggccgtcgcggtgagcggcccccacgccgaagcacttcctcctgtagcgacggatctgcgccgtcctacctcgcaaccacccgtgaggccgccaatagggcccctgcgctggagcccgtcgtccaccgccgacgccaggctctggctgtagcaagcgatgtcgagcaggaaccaagtggtggcgttaccaacgaggaggtcgtcatcgtggcagcatgcgactccctggcgaatccaccggagcagaggctccaacacaacacccatggcacctccatcgctccacttccaactgcaacatcctcctcgaccacatgcccctgggccgatgcacccaaccacgataaggtcgactttacagccaccgctgtatcactttccgccgacctccctgtctccaacaacctcgctgtcctcaagaaccacctcagcctcggggttgacctaggcaactacgaccaggaaaaggcggtgcagcacgtcgcgagcgggactccagcagatacagcctctagcctacccaccgcctgtatattgtccatgatgaaatatggattagtatgacgatgaacccatattatatacataatccctttggttatttggactggaggcataacgattctatgccttttgacccatcgatcaaataagtcatggccgataaagatgtaatcctgaatggaatttatgcattggaatcttattaaatgattatccaaaaaaaaaaaaaaaaaa

SEQ ID NO: 124369 - DNA, 507 bp, Zea mays
  unsure (1)..(507): unsure at all n locations
  Clone ID: MRT4577_44902C.1
aggccggccgggccgggatcgactcacactcacacagcaaataccccacaaggccactccaaagagctagtagtggaaccgaagatgttcgggaacatcggaaagatccccatcatcggcgacctgacgggcagcaacaagaatgcgcacctcaagggcaacgtggtgctcgtgcgcaagaccgtgctcggcttggacgtcaccancatcgccggttccnttcttcgacgncgtcggcgagttcctcggccgcgncgnaacctgccagnttatcagtttcaacgaactctaccntnacagtgccaaatggtctgagattgggagctcaggctagtctgatcangtgcgagggtcagccgtgctctctggtggcacagccgggagctgctcggcggcggtacgttggaccatagggcgatgagggacgtgtggctggaggtgcaggcccaccagctgagcccgccgaggatcgccatcatagaggagcgcgtgttcacgccgttcctg

SEQ ID NO: 124370 - DNA, 168 bp, Zea mays
  Clone ID: MRT4577_44903C.1
gaacgaaacgttggattctctagaacgggcaggctccgtatggttcatatatttctgcaaacttcagctttatagagcaaacgtatgcggtacaaccaacctgcagatgatttctagccccatagcaacggagactggcagactcaaactatatggaaaagatcgata

SEQ ID NO: 124371 - DNA, 339 bp, Zea mays
  Clone ID: MRT4577_44904C.1
gccggccgttggcaaaatagggaaggaatcaactcttcatttactgctaagattacgaggtggtatgcaaatatttgtcaagactcttacaggcaaaacaatcacattagaagttgaatcttccgataccattgataatgtgaaaagtaaaattcaagacaaagaaggtattccaccagatcaacaaagacttatctttgctggcaaacaactagaagatggtcgtacattaagcgattataatatacaaaaggaatcaacactccatttggtattacgtttaagaggtggaaatagtgaagaacattagaagaaaaaaaaaaaaaaaaaaggccccta

SEQ ID NO: 124372 - DNA, 386 bp, Zea mays
  Clone ID: MRT4577_44905C.1
attcggctcgaggggggggcgagcgcctccacattttttagcggggccacataatggccgtcacgggcggcgagaccgagaaggagggcctggtacccaaccaacgaactttcatcggcctcagccgccgggcctacattctctccgaggagccctgcaatgcgggatgctggatccccgacggttgattcgttcccctgaatggcgctggcggctcacacacaacacgggaggacagagacggtccgcggatcgacggaggaataactgccctcgtttacggcgacgcgaacatgggagggtcctaccaccatgacatgggccaggacgacgcccaagttgggtgatccgtgcgcttggattgaacaaaaaaaaagcagccggac

SEQ ID NO: 124373 - DNA, 509 bp, Zea mays
  Clone ID: MRT4577_44906C.1
ggtttttgcaaaaacaatgtttaaacagtactttacatttgactttttgaaatctgtcagtgtcagccgacaccgctcctgcgccctgtaaatattaactactcttatgcaagcagaagggtgtaatgtatttttttcatacgaagggtaacacatgattcaaaagacgagctccgactatgccattgcaacaacaaacttccccagcagtaaacaaaatgaaatctgaagttggtagtgagttaatttgcatttgttgattcctttggatcagcatctctgcaattagtccctttctcttccaacttctcacaaacataaatgaaatgtgaatctggatctttgagaacatagtcaggtggcagttggccaccctctgtgagtgtaacctcctccattataagatgtggagcacctttactcattctcagttggtatccagctgtgggcatgatgtagagtgcaatactccagctgcatccggactggtccagaagtgggacacgttc

SEQ ID NO: 124374 - DNA, 799 bp, Zea mays
  unsure (1)..(799): unsure at all n locations
  Clone ID: MRT4577_44907C.1
gttcttctttctttctccctacgccttgtccgctcctctctccctctctcgttctcgtcctcgtctttctcgagccgcgaggcgatcgcatcggagactcggagccggcaaaaccctaaggggaaggtttctgcaaggaggagggagatgcagggcgccagccacatgctcctggaggagcccttccgcctcgcctccgtcctctcccccgccaagcctaaagtattcccatcactcaccaagatagttgggacgctcgggcccaattcacactcggttgggattattcaggaatgcctcactgctggaatgtcagttgcacgatttgatttctcatggatggatgctgcgtatcaccaggagacccttgataatttgaggaaagcggcacagaatgtgaagaagttgtgccctgtaatgttggatactcttggtccagaaattcaggttcacaattccactggtgagccaattgagttgaaagctgggaatcatgttatcataactccagatatttctaaagctctctctgctgagatcctaccaattaagtttggtgatctggcaaaagctgtgaagaagggtgatactctttttatgggccaatatctcttcacaggaagtgaaacaacatctgtctggctagaaaatgcagctacacttgccggccccatattcactctgcatgcttcacaagttcacatcaatttgcccactttgagtgaatatgataaaatgtcatttcaactgggnntcatgtaacagtgttgacattatatcactttcccatacccgctct

SEQ ID NO: 124375 - DNA, 416 bp, Zea mays
  Clone ID: MRT4577_44908C.1
attatgtccactcaagctctctgtcgtcttcaagtattctatgctctcttacctactcctcattaggctaactctgtctctctagggctaggcttacctttgtctctctgacctcaccatcctgggcataccaccttgttacactatcgcggaccgaatgatgtctatctctaacgctggaatgacgctgtctatctagtacctcctttgcctgtcagaactgtgactgtgctttatccatggcctcttttatagcaactgctcatgctggtgctgctgtacttatctcagatactgccgcattcagagcatgcacactatgaggcttacccatggcaaaatcttctagcccatctactgtagaaacaccaccgtgatgcgacgaacttgttcgatgatcattgattttcctagac

SEQ ID NO: 124376 - DNA, 499 bp, Zea mays
  unsure (1)..(499): unsure at all n locations
  Clone ID: MRT4577_44909C.1
ggtacccttgtgtgtccggccgggnaattgcattgaacctcacttaccctgtggggaggctactaatcttcttccgaccgtatataggatccgctgcggggtgattgcctgcccccaccccattgcgcctgcgcctgcgcctcgtttaatacagggcgctgcccgcctcactacctgagtgctcttactcgtcctacatctcgtcgcggagcggtgtgtaggcgcacgctccttgtaacgcaccacgcaagagcggaggaagatcattgggccgtgggagtcattacacagcacatgctgaggactggggcagaaggactccaagccttaacatggatatgggtatctcttattatgattaccgaagagcttcatgagcatacacctacagaaacactgggaattcagcctacagttctagagtcaaggacgctccttctatccgagaacagtgtacagatcggagtacacatgccacagttgcagaggatgtattgta

SEQ ID NO: 124377 - DNA, 140 bp, Zea mays
  Clone ID: MRT4577_4490C.1
ttcagattatggtctgtccaagactggcccatctatggaccatactcatgtgagcgcgggtgtcaaaagcaggtatgggtaccttgatccctaattcttccgcatgcaggagctttcagtgaaatccgatgtctactcat

SEQ ID NO: 124378 - DNA, 2066 bp, Zea mays
  Clone ID: MRT4577_44910C.1
ggtttctctttctttctccctacggcttgtccgctcctctctccctctctcgttctcgtcctcggctttctcgaggcgcgaggcgatcgcatcggagactcggagccggcaaaaccctaaggggaaggtttctgcaaggaggagggagatgcagggcgccagccacatgctcctggaggagcccttccgcctcgcctccgtcctctcccccgccaagcctaaagtattcccatcactcaccaagatagttgggacgctcgggcccaattcacactcggttgagattattcaggaatgcctcactgctggaatgtcagttgcacggtttgatttctcatggatggatgctgcgtatcaccaggagacccttgataatttgaggaaagcggcacagaatgtgaagaagttgtgccctgctagagttgaaacccaacaaaaaccacaagtcaaggttcaggtaatgttggatactcttggtccagaaattcaggttcacaattccactggtgagccaattgagttgaaagctgggaatcatgttatcataactccagatatttgtaaagctctctctgctgagatcctaccaattaagtttggtgatcttgcaaaagctgtgaagaagggtgatactctttttatgggccaatatctcttcacaggaagtgaaacaacatctgtctggctagaagttgtggaaacttctggggaaaatgtaaattgtctagtgaagaatgcagctacacttgacggccccatattcactctgcatgcttcacaagttcacatcaatttgcccactttgagtgaatatgataaacatgtcatttcaacttggggttcatgtaacagtgttgacattatatcactttcccatacccgctctgctgaagatgtcagggagctcagggcctttttacaagcacacgcccttcccgacacacaaatatacgcgaagattgaaaattcagagggtttggatcattttgatgacattctcaacgcggcagatggtatcattatttctcgaggagacctgggtattgaccttcctccagaaaacgttttcatgttccaaaagacagctattcataaatgcaatttggagggtaaacctgtgatcatcactagagttgtggacagcatgattgacaatctacgccctacccgtgcagaggcaactgatgttgcaaatgctgtcctagatggcactgatggcattttgcttggtgcggagacacttcgagggctttatcctgttgatgcagtgagtactgtggggagaatatgtgcagaagctgagactgtgtataatcagccgcttcaattcaagaaagtaatgtggcatgtaggtgacccaatgccccacgaggaatctgtggcatcagcagcggttggttctgcaatcaaagtaaaagctgctgccattgttgtgttcacattctcagggagagctgcgaggttagttgccaagtataggccaacaatgccaattttagcagttatcttcccacgtgaaggatccgatccatcaaagtggcgttcttatggcacaacacaggcaagacaatgtttcgcagtgagaggcgtgtaccctttgatggggagtactgatgaggccgaaactggtgggctaacaaaggaagagtatgggataaaacttgcgatgagctatggtcggtcggttggcatagtgaagcctttcgacaggttgataatctttgaaaagattggtgattcttctgttgtcaagatcattgagtgtgaaggttaggcattagatgattgatacctacaacccatgctgtagtttcatgtatcgcatgggagattacctccagttccatctcacttatttaaccaagttccaagtagagtacagcaagagcacaagatatcttgttagggaattttgccctcttttcagattgtcttttgatttgacgcaataaattatgatgtcacagatttatactggaattatgatttgattatgcaaatataggattgttggcaacaaaaaaaaaaaaaaaaaaaaaaaaaaaaaaactcgctcgtgccgagga

SEQ ID NO: 124379 - DNA, 953 bp, Zea mays
  Clone ID: MRT4577_44911C.1
cattgggtacctcgaggccggccggggttttctttctttctccctacgcctcgtccgctcctctctctcgcgttctcgtcctcgtctttctcgagccgcgaggcgatcgcatcggagactcggagccggcaaaaccctaaggggaaggtttctgcaaggaggagggagatgcagggcgccagccacatgctcctggaggagcccttccgcctcgcctccgtcctctcccccgccaagcctaaagtattcccatcactcaccaagatagttgggacgctcgggcccaattcacactcggttgagattattcaggaatgcctcactgctggaatgtcagttgcacggtttgatttctcatggatggatgctgcgtatcaccaggagacccttgataatttgaggaaagcggcacagaatgtgaagaagttgtgccctgtaatgttggatactcttggtccagaaattcaggttcacaattccactggtgagccaattgagttgaaagctgggaatcatgttatcataactccagatatttctaaagctctctctgctgagatcctaccaattaagtttggtgatcttgcaaaagctgtgaagaagggtgatactctttttatgggccaatatctcttcacaggaagtgaaacaacatctgtctggctagaagttgtggaaacttctggggaaaatgtaaattgtctagtgaagaatgcagctacacttgccggccccatattcactctgcatgcttcacaagttcacatcaatttgcccactttgagtgaatatgataaacatgtcatttcaacttggggttcatgtaacagtgttgacattatatcactttcccatacccgctctgctgaagatgtcagggagctcagggcctttttacaagcacacgcccttcctgacacacaaatatacgcgaagattgaaattctgagggt

SEQ ID NO: 124380 - DNA, 729 bp, Zea mays
  Clone ID: MRT4577_44912C.1
ggccgcttttttttttttttttttaaatactgccacaacccttactttcctgtgcagagtttacacaaatcattcttgctgtcataacatgttacttgggagcacttcaggttttcatgttccaaaagacagctattcataaatgcaatctggagggtaaacctgtgatcatcactagagttgtggacagcatgattgacaatctacgccctacccgtgcagaggcaactgatgttgcaaatgctgtcctagatggtgaacacttttactacatttctatcattttatgaatgtcattcttatttcctgtgctggtctctaggcactgatggcattttgcttggtgcggagacacttcgagggctttatcctgttgatgcagtgagtactgtggggagaatatgtgcagaagtatgtttctatttaagaagaaactgtaatagaaccattcaaccatctgaaatacttgactaatcaatggtaaatcctccaggctgagactgtgtataatcagccgcttcaattcaagaaagtaatgtggcatgtaggtgacccaatgccccacgaggaatctataatgttctgtctatggtacactcctgcaaaccttgctgctgttgctggtatgctgctgtcagtactgctccttgaagaaaacagcatagatgatgcagcagatggagatgatgatgataacgatatcgatggtgagcgcagtcatggcctgat

SEQ ID NO: 124381 - DNA, 122 bp, Zea mays
  unsure (1)..(122): unsure at all n locations
  Clone ID: MRT4577_44913C.1
aaatgtcttcggaggcccggagcgcggagcaaagccatctccaaaaccgtagtcagtctcgtagcaccgncggagcctggagctgctacccacctgaccgagcccacactctgtctctatct

SEQ ID NO: 124382 - DNA, 249 bp, Zea mays
  Clone ID: MRT4577_44914C.1
ttggtaccgagctacggagccccagctacggccggcgcgggcggcgaccgcccttgcaacgggcggccggccagctaagaaggacagacagagccgaggaacaagctttttttttaaaacaaaaaaaaaaaaaaaagcaaaaaaaaaggctggaacctgggccgggcccacccaagggcgaatcccgcaaagggccaaaacccggggggccgctcaagcaggcgggggggggcccaatccgccagaggg

SEQ ID NO: 124383 - DNA, 773 bp, Zea mays
  Clone ID: MRT4577_44915C.1
gccggccgggtccggactcggcaggtaggtctgtcgcgctcggggtgtacaagtgcacagtgccaatgcaaaaaattagcattgctttggatggtatgcggtagagctgcaagttccgtatccagtccagtccagtgaggggaattgctttggatggtgcagggcagatggaggggctgacgtccagtgagatcgccggattcgtggtgggtgccctgctgctcggcgccaccatcgctgcccccaaggtcgacggcttcatcgcctcctcccagagaaggtcactagggatgtgtaagaggtgcggtgaccttcggattgtagcatgctcgcagtgcaaaggaacaggatcagctcggagcggagggatgctcagtttgggaatgctggatgacctctacgagtctcttggagccgaagccaagactgagaatctggttccctgcacaaagtgcaggtcgagaggccgtctcctgtgtccagaatgctccaaggtcgcatgaccctggaaccaaggccgtctcctgtgtccagaatactctcaatgcagttgttctcagtgcttttggttgggctggttgggtgttttgtatcttgttcttttttattctctcgtctaataaaaattatggtaaatatattgtcatccttccccaaaaagtaaagtatcccaatgcaatctcaccacaacttgaaactctagcccctacagatgatagaacaaagagtaaccattcgtcattttaaagttgatttatcgtgggagtattcct

SEQ ID NO: 124384 - DNA, 252 bp, Zea mays
  Clone ID: MRT4577_44916C.1
atctcatcaacaagttagccacaagcttctctacaagaaatttcatttcaaaacccacccaccaatcaaccaagatgtctccctgctcctgcaactgctgcaaaggcgaatgcaactcttgctcctgcaacagctgcagccattaaatgccaacgcccgcatggtctcgcaaatgaactgaaaccggatcacttttcctttgtcaactgaaagactcggcggtgtttgaacggaacaaacggatggagatgg

SEQ ID NO: 124385 - DNA, 304 bp, Zea mays
  Clone ID: MRT4577_44917C.1
gggccaaccccaaaaatttttaatactttggcctaaagcccaatcgtttttaaaaaaaagggtcctaataaggactgaaaacatggcataaccctttaaacttgggacccctaaccaaaaaaagggtccttataaggacaaaaattttggggcaaaaaaaaccataaaaatgctttaaactacaacgcttttgccctttttcctttgaagttttttaaagtaaaaacaaacctttttaccctaaagggtgtacccataaggttggccacacttgccaaggggggaaaaaatttttgccaaaaac

SEQ ID NO: 124386 - DNA, 215 bp, Zea mays
  Clone ID: MRT4577_44918C.1
caggtggaggtcgtcctagttgtgtcgccaactctacgcttgttttgttcctattactaccttttgcactagaacttcaatgtctctctgatgtgtctgtgtttcgtatgctcttgcgccacattgccgcgctggttttgtccaatgctcctacttatccgtggtggtggtgttgttgttgttaatatccgtagttgctgtagtgttgtctatac

SEQ ID NO: 124387 - DNA, 223 bp, Zea mays
  Clone ID: MRT4577_44919C.1
caggtggtggacaagttgaaagatttaggggcaaccagtgtacgagagatcagagatttgctacttcgagatgtgaagtcggttctgtgccatacctgaagaatccacttagaaagataggtggaattcatcagctttgtcagtccgtccttggtttaaagagagaaatgatctctgccttgactcaaagaggatgatggctaattttggtccctacagtggc

SEQ ID NO: 124388 - DNA, 675 bp, Zea mays
  Clone ID: MRT4577_4491C.1
ccggccgggattcctgtctgttaactgtaatcaaccaaaagatgagtgatccaattaaagtcaacttgccgcaaggcctcgagctgcaccacatcgacaatacccaagccttggaacaatggactccttctctcaccaatctcctccaatcttgcgtcaatgatgaccctccttcatcatcactcggtttccatgcacctctctccacaaaagatgccacagaattctggctttctctttcgcctcagctatttggtaccaaatcgcgaattacccttttcgttctcgctcgaggcccatccgcaatcggcacagtccatctagtgtcccatcccaaagcaacgcacgcgcacaaagtcgaagtcgccaaattattggtttcgtctgaagagagaggtctcgggcttggaaggaaactgatggagttttctgagaggtttgccatggagaagttgggcaaaagtatggttatactcgatactgcgacagaaacaccggcgaggggattttatttgaaacttggatatacagaatggggaatttgtcctagttatgccgagagtgcagacgggcacttgcatgattgttcattcttctacaagattctggatagttagtatagatgcataactttgttcataccatggcaaaaaaaaaaaaaaaaaacccgcggcc

SEQ ID NO: 124389 - DNA, 230 bp, Zea mays
  Clone ID: MRT4577_44920C.1
ggcacgcgtgcgggctggcttgctgacatgggattgacctgtggacagacatgcaggagagcggaccgggtatggatgcacgaagggatttacgaagcgttcgtacaagcagtcatgagtgctgaggacagttacaatgtagaagacagtacatatgagagtacatcgattgacgcagcgactgacgaaactgctgagcagaacgtggatgacgcaatttctgacgcagc

SEQ ID NO: 124390 - DNA, 145 bp, Zea mays
  Clone ID: MRT4577_44921C.1
gcgggggatagtcggaggcggagaggttgatttaccagccccaatcaccgccctcgggcatgggtataacagccgcgggcagggtataggccaccatggtctggccaccgcaggtgaccaggttcgcccgcctgaccacctacac

SEQ ID NO: 124391 - DNA, 639 bp, Zea mays
  unsure (1)..(639): unsure at all n locations
  Clone ID: MRT4577_44922C.1
ggaaatatctctgtcgtcgccggcgccggtcgccgccgctgccgctttcctgccggctgcgccatgctccggctccgagagtgcgtcgtttcccgcctcctctctccttcctccacctctgccgtctcccctctgcttcgcctcctctccgcatccgcagcccccatttccccgaaccctagcagcttcgccgtggaggagtacctcgtcgccacctgcggcctcacccggccccaagccctcaaggcctccaccaagctctcccacctcaagacccccgacaagcccaacgccgtcctcgccttcctcgccggcnctcggcttctccggcgccgacgctgccgccgtcgtcgccaaagacccgcggctcctctgcgtcaaagtggacaaaaccctggcccctaaggtcatggggctcattggcatcggcatgtcgcgtcctgacatcgcctgcatcgtctccctcgctccctaccgcttccgctccagaaacatcgtctccaagctgcactactacctgcccctcatcggctcagtggacaacttactccggatgctcaagcgagaatccccccttctctcggncgaccttgacaaggtggtcaagcccaatgtcgtgttcctgagggagtgcgggct

SEQ ID NO: 124392 - DNA, 1176 bp, Zea mays
  Clone ID: MRT4577_44923C.1
cataaacgggtctgcaattttcattttaaaaacagacaagtatgtacaatacatagaataatttgtagtctaaatatcgaaattagacgcactaacataagttagaactgaatttacgtataaaacaaagtcttatacttaaaatccagaattaaaatgataaaatatgccattatgggccctcagaagcagcccaggcggcctgccaggcgggccaggcagcggcctggtgaccagcacgccggcccagcctggctggccggcctaagcggcccaactgagaccacaaagcccattagaaatatgagcagttaggttttccaaaccctaactgccccagccgtcgtctcccagggagcgccccagccaccgccagggccctcggtggcgtgtgggtgtcctctcccggcggtcagggcgaacccaaaactccggctcaccggcgggcggcccgtccaggcgggcgcggcctcctgccccgacctcggtccggcgcgcgcgggcacgggtcctccggcagcggccaggcggtcagcctcgaccccagcggtacgcggtgcaggccccggcgcgcggccccccggcggcagcgcgggcagacggtgcaggcgtgcggacgcgcggtctcccggcggcggccgggtagacccggcgctcgagggcgcgggcgcgcggccccccgcggcggcgcgggcagccccggctcgcggcctttcctggcggcggcgtcgcggccccctggagtcgagcgggcgcgacggctcgacggcgcacgggcacgcagcccgtctcggtcgcggtcgaccgaccctgcgtagacaccggcacgcggcctcagccccaacgatgcgcggggcggaaggctcggcgggcgagcgaccgttccggcggcgcgggttcggccaaggcacccctggcggcgattcttccaagccctcggccagggcgcgccggccccgaccccggcggcatgggcgtagccacagcggccctggcggcgccggccccatgggcggctcgggcgcagcccggagggcacaagcctcggcgcttggccgcgcggtcagaagcgcgagcacgcgggagtgcatcccggcggcgcgtggctacggcagcacgggcgcggctcatgcccaggcgcacagacccggcaacggcaacgacaatggatttgcc

SEQ ID NO: 124393 - DNA, 180 bp, Zea mays
  Clone ID: MRT4577_44924C.1
gtaagctggatccttaatcacagctatatgacagcggcgccggaattcgaccgggcctgagcgtaccaggtgcctataatagtctattaactgcgtatatggcatagctgttctgggaaatgtatcgtacattcaaacatacaccgagctaaggtaagctggtgctaatgaggactatac

SEQ ID NO: 124394 - DNA, 936 bp, Zea mays
  unsure (1)..(936): unsure at all n locations
  Clone ID: MRT4577_44925C.1
ggccgctttttttttttttttttctggtggaatatgaactgatttatttatattggactatatggtatgagatagccgcttttttttttttttttttcgtttaatagtgctataggatcagggagatacggttgagctgttggttattgacgatctttctcccctcagtcgctatgacaaaaacatgaccatgatttgaagtcagatgtgtttgagtaggatattctccaccatccgaccaatattattgtaagatagcccccctggttgtgcactgacttgagccagcctcttccactgcagcgtcttctcccttgcgtccttccccttcctcccggtcatcatctccctcacgagcgccgcaacctcgtcgctgccagcttcctgcggcagctcggcgccgatgccccacgcggtgcacacctggcggcagttcgtggtctgctcagacagcacggggcatccaagcaccggcacgccggcgacgacgctctccagaatggagttccacccacagtgggtgacgaacagccccacggcccgggtggctcagcaccgcctcctgcgcgcaccacggcacgacgaggccgttctcgccgacctcgaccgcggcggccatttctggcctgaggacccagaggtagggagagccacagcgtgctagcccggacgcgatctccttgagccgcgcgtcgctcatgctggcgtggctgccgaagctcaagtacacgacggagcgcgccgccttgccgtcgtcgagccacgccatgcactccctgtcctcctgcaacacgccaagcatggcgctgctcctcaccgagccggcggcggggacgctggcctcgccgccggcgccgcgcggagcggncaaggacgctttgacgacgcttgcgagcggcccgacggtgtaaatgggcggcaagtgcggcgcgagcg

SEQ ID NO: 124395 - DNA, 314 bp, Zea mays
  Clone ID: MRT4577_44926C.1
agaagaaagcagtgacgcggatcactgcagtgcaggcaccagcctagcaatcgttgctcattcattttgaattcaaaaaacctggaagcatagtccatatgggggggagattgccttaagttacggagatccaaaaaagaaccaccctacatatggctaaagcgaagcaacccgccaaaaaaatcacaccacaccgcacttaggaactcagcgcttaccaaaaaaaaaggggaccaccattaactagccggtcagggggaccgaacttcttcagcaaacaaacgcacccttattaaggacacatttaccttaac

SEQ ID NO: 124396 - DNA, 279 bp, Zea mays
  Clone ID: MRT4577_44927C.1
acccactcctctcttgatctgcaatcctggcaccacaacggacttgcgcctaaagagccatccgtgtgcctgacgatcaatccaaacgcgttgatgctgtacgtattgacaggcttgatcctgctggagctagtcgtctagtaccgatgggcactaagacgacactgcacctatcaataaatccacccatgcgtgtacccgcaactgcacagcatccatcgatcatgaacctacctcacctgctaacgggggccaagctaagactgagtaccaggatca

SEQ ID NO: 124397 - DNA, 307 bp, Zea mays
  Clone ID: MRT4577_44928C.1
acgcgggtgatttactgtggatgatgctatttcagtaaaaaaaatggtcgaatgacagctgtcttttgccatggaaaaggcaaattatatacaacaaaaccacccgccggcatcagccaaaaattatgtacaataaagccacaggccgcggcggggcgaggcgcgcacatcatgttgcaactacttactgaacgcctactgctagacacccttgctgattgctctcatctcctgcagcaaattcgcttggaccctcttgctgcgttggtctgtgcccattgttcgtaactgaatcagcgacccctca

SEQ ID NO: 124398 - DNA, 608 bp, Zea mays
  unsure (1)..(608): unsure at all n locations
  Clone ID: MRT4577_44929C.1
gccagtnngtgatgggatactctgggcagaaatctcgcccccctttcgaggcggggccgcccnnngggcaggtnacaagncnntttttttttttatttttatttttttattcttttttttttttttttttttttttttttttttttttgttttttctcttctttttttagaggggccccttgcggggggccaacacaaaagggaaaaacgggaaggggggggggggggggccaaagggggggaagccgggggggggggggggggggggggggaggggacgggggaagggggggggggggggggggggggggcgggggcgggggggcgcccgggggggggggcacggcaccgggggccggggccccgggagcggacccccccaccgggcggggcgcaagcacggggggggccgagcccggggccaaaccggggggcgcaagggggggaacccaaaggcgagccggaaccccggcgggaaaaggccggggggccaaacgagccagcgaaccaaaacgaaaagcccggggcgcacagcccgggggccaaaaaaggaaaccggcctgccagccgggggacggaacccaaccccgcaccgcgagaggggaaac

SEQ ID NO: 124399 - DNA, 341 bp, Zea mays
  Clone ID: MRT4577_4492C.1
tagcaactagcaacatacatagtgaattacactagcaacatcttagcaccaatgggagccaagatttttgccctccttgccctccttgctctttcagcaagcgctgctacctcgacttttattccacaatgctcacaacaatacctctctccggcgacagccgcgggatttaataccactatacaatctacatgtcaagagcatcagcagcttacgcatacatacctcaacattgttatgaagatctagctgttcaatgggaacccacagtgtacaaaagtggactggtataacacgttctatattgggacgtatggcaattctacatggagttcttatga

SEQ ID NO: 124400 - DNA, 1093 bp, Zea mays
  Clone ID: MRT4577_44930C.1
gattgggtacctcgtggcagccccccgtccggaaccgcgctcccgagtcctctcgctaaaccctctctgtgaatttcgtgggtgggtcgttggctaccacgaccgcgtcccatccaaagagaaagaggcgctgcggaggaggatagtagcagctagccaatggcgaagggcgggctgggcaagctgcggtgcatgataaggaggtggcactcgtcgagccgcatcgcgcgcgcgccgccggcggccagccacggcgacgacgacgacggcgccgtcgtcgccgtctccagcggcggcggggcgtcgtcgttccacggcgcggacgaggtgcccaagggcctgcacccggtgtacgtgggcaagtcgcggcgccggtacctgatcgccgaggagctcgtgggccacccgctgttccggaccctcgtggaccgcagcggcgggggagcggcggcgggcaccgtggtggtcggctgcgaggtcgtgctgttcgagcacctgctgtggatgctggagaacgcggacccgccgccggagtccctcgacgagctcgtcgactactacgcgtgttgctgaagcgctgctcatcatagccgcggtaaacccgatgattctgcgcgtctcggtccctaggggtgtagaaggatcgtcgtggcggcggcggcgtcggtgctaatccaagaggccactgcagatttacttggatccgtcgctgttaatttgattgtgattgcttgtagtttaccaccgtctatgcattgcatgcagatgcagcccaaggccgccgctgctctttcgtctataaaaaaaaaaaaatggaagccgttccatttcctctaatttctacgatcggtcagtcggtcgtgtaacagacattttttgcattatttttttcatcccattttatcgaattaataattacctcggtcgtgtgtaatagacattcccatctggaatttccttttgtctttaagattttctggagcctggacgacgtcggtgtccacaaatgtacatttcaatgcaaaaacttatattaattggttgctttaataataataaagagtccgttccttcgaaaaaaaaaaaaaaaaaa

SEQ ID NO: 124401 - DNA, 737 bp, Zea mays
  Clone ID: MRT4577_44931C.1
aaaaaccaggcaccactgcaccagcatagatctcgtgctcgccactattattctgcacagcaacgcatcaagccttctagaaccatctcgccgccgccacaccacaacccgtcgaagcgaagcaagcaatggccggagtcggatcgaaggccctcgccgttgccgccgttctggcggccgtctccctctcggtggccgccgcggccgaggcgcccgcgcccagccccgtctccgccgccgtcgcggcgtcgtcgcccttcgccgcggccctcgtcgcctccgccgccgccttcctcttcgccgccgtccgccactgagccgatggggcctcgtgcctgcaggctacctagcagtacttcccccgccgccgccgccgccgcctagatctatttattggagtgctatccagtagtactagtagtagtgagatttgttcggtgctgtcgtgtcgtcgtcgcattttggtcggatctggtttccttggtgcagggagggtttctataccatgtcgcggtgtcggttgtgtgatctcatcccccccttgtagatagtactctgctatctcgtcgtgatcgtgagtggtgattctgtctggttgatatttgctactgatattggtcccatttgagatatgcgttgctgctaaaaaaaaaaaaaaaaaaaaaaaaaaataagaaagaaaaaaaaaaatataagagcatactgaaaaaaaagatgaaaagatctaaaactgcttt

SEQ ID NO: 124402 - DNA, 248 bp, Zea mays
  Clone ID: MRT4577_44932C.1
ttgggaccctcgaggccggcctggccgggttttctcaatcaacagtgcaaggggccggccgggaattccaacaagccgacatatacccaccaggttgggtcgagtcacgacgatcaaagaggccgcccgtctcactcgtctattttcatggataatgcaattggttttgtgctcattttactcttttaccgatatataactatgagtttttgagaataaaaaaaaaaaaaaaaaaggcccctagggcc

SEQ ID NO: 124403 - DNA, 600 bp, Zea mays
  Clone ID: MRT4577_44933C.1
gctcggactcgggctaagccccggaagacggtgaactccgttccgcccgacccagggctcggacttgggctcagccccagaagacgacgaattccgctccgcccgacccagggctcggacttgggctcagccccagaagacgacgaactccgctttgcccgaccccaggactcgaaatccgccctggccttagccaacggcctctgcctcgcccgacctaggggctcggactcgacctcgaccacggaagacggactcgacctcgactcggaggagcctccacatcgccaacctagggcgcgggccggccacgtcaaatgggaggcgccatcattaccctactccaagctgactcaggctacgaggaacaagaccggcgtcccatctggctcgctccgccagataggcgatgatggtgccccgcacgctccccgacgatggcggctctcgacccccttacggaagcaagaggacgtcagcaaggactcgacagccccgacagctgtccctccgccaggctccggcgctcctccgacggccatgacatcacacaaaccgggcgccaaaatctctccggccgccacgatggcgtgtacttag

SEQ ID NO: 124404 - DNA, 345 bp, Zea mays
  Clone ID: MRT4577_44934C.1
ctgtgataattgaggagttgctcatttcttacaaagaaacagggccaccgcgcactttatatgcgctggctatgcgggggtcaatagtaaagggaaacaccggcgatatcgcactggcctgggatattgtgactaaaaacacttgttcgggggcgaaaaaaaaagggaaaaattttcggtagcctacaccccgaggttttaggggcggaacccaaagaagtaggccccggtgtttaaagccggcctaagattcaccaatgagagcctttttcgaaagggttagacttttccaaccaactggcaacctcctccaggataacccccagcttatggtgatgggccccc

SEQ ID NO: 124405 - DNA, 289 bp, Zea mays
  Clone ID: MRT4577_44935C.1
catgccgcgtacgtaattttgttcctctttttggacagcccctttttttttttttttttttggcatccaaatggtcacattaagaatgtgggtaagctgtacagttcttgcaactattatacttctgttacctgtgaacaaaacacaggtggatcctgtagggtggttttttttttgagctgttaggtaaggtgatgggggtggtgggagcgcgtacacatagaacgaagtgcccaaccatgagtaagcgtctgacggggaacattgaagatggcgacaggagccctgg

SEQ ID NO: 124406 - DNA, 499 bp, Zea mays
  Clone ID: MRT4577_44936C.1
caaagtaaaaccattttctaagcgaaaccagggcacaacattattgttcatagtagcaacaccagggggttaacacacccccggttgacataaacaaactggaacggttaagctctctcagcaaaatacacctatgtaccaaagctggtcctcctcaggatgctgatgaactcggtaaagcttatgctcaccggcaccatttggtatcaggcctgttgcaccatgcgttggatctcatcgagggggagatttacacccacctgtttgggaaccctctggatatcaatgctagaaattttttcatttccatcttgatgcaataatgcggaatgcttttgaaagctgctctttactatccctatctccgaatttggcagtcatgcatgtgctcaaacccctggtattgaataggtccactgccatttttgacaacatcaccaatcctttgactaatttgttcttgcacgcatatcaaatcccaaggctttgatggcaacat

SEQ ID NO: 124407 - DNA, 241 bp, Zea mays
  Clone ID: MRT4577_44937C.1
accgcgcgtgctgcaaggccggcatgcggccgagttcagaccggaacgttcgcgcgcagtgatcactacctggagagctttccaatctaacctgcctgtctgtataaaatggacagcaaagactctatacccatgctaactaccatatctctctacaagtcctcgcactatataacatgacggtcgacaaccgagcccgcggagtaccacggagagcgaccctttagccgaagaaaagccg

SEQ ID NO: 124408 - DNA, 1182 bp, Zea mays
  Clone ID: MRT4577_44938C.1
gatggtgcgggaactcgacatgctgtgacgagcagataaaattcgtacacgcggcaacaaagaaagagcgagctgcgcgtgagcagagagctccacacgaaagctcgacgcgcgcagggactacggcgagctagagcagacagtcatgggagatgtacacagggaggagcagtgccgagctgggcgacaaagcgaaatccgggctggagctcgcgacaacagggagcagggcgcgcaacgagctagagctggagcgttgacgagcaaagagcttcgcgcgcgcgagaacaacagaagctatgcacgcgacgcaaaggcgagcaggatgcagccaacaggggagcttcgacggcgagcaactgagaacggctcgactacggcgaacagacagctcgcggcctgcgtgaggggatcgacggcggacggcgaccatggacgaagggcgcgcagacgggcgagcagcaaggcgacggcgcgacagacggaaccaagcagggagcgccggccatgggcgcgacaatagagctgggcgagctcggaggggaagccacggcacaagaaatccgatcaggcgcggccgaacagaggtgccgcggcacaggagctcagggacggacgagcaggagcagaggagatgggtgccgcgagcggcctgcagggaaccccgcgccatgggagaaaagcagagccgagcggctggggattcagccagcgagcagaggggagatgggaaggagctgctcggctgcggcttgctgctgggcgtgcgtggagaagaaacctgcgcgctggagatttgtaggagacgggagaccaagggcggtggcgggataaggataggagcgctcggcggcgtgatttttttttttctaggggttgcgcggcgcggtacagaaaaatcaggcgacgagattaaagagatgcagtgagcagttcgacaaattcgtcggcatggatacaagctgacgacgacggccagcccgaccgcggcaaggtgaggggagacgcggtctgcgcaaaagggcgagctcgagcaaggaactagagccgacgatgtccacgacgagcaggaccagagacacgatgctagtggatggaaactgagcacaggatggacgcaagctggagacgagcttggtcaggtcgtcgggcacagaggtgctcggagggtccgacgagcac

SEQ ID NO: 124409 - DNA, 665 bp, Zea mays
  Clone ID: MRT4577_44939C.1
ctctcccctttccactctggagtcgtcgtctctgctccggtctccggagaaaagcaaagccagcgccgagcagcaagccccacacgccaattcggaatccttctcctcccctccgcccccgcgatcccgcccctcgccgcctgcctgatcggcctgcttcctgccggggtctcgtgggtgtacggaagagagcatttcttagctgaggatgtacagttaatctgcagcagctcgagttgtagcatttggatcttctgacatggctgaaggggcaaggtttcatggcatggttggcggtggcggcaaggggatgcaagagaacgagttcaatggcttcttcagcatgccctactatcataaaattggggagggctcccacatgtctgtcgacagcactgacaactacaacctcggcggtggctccgttaccatgtctgtggacaacagcagtgtgggctcgaacgagtcccgcaccgtcatacttaagcacccgggcctccgtgatgccccaactgcaagctattcggttggcaacagtgtctttcgtcccaaccgtgtggctgcgcacaccctaaatgaagatgcattggccagggttctgatggacccaaatcatccaacagagatacttagccagtaccagcagtgggccattgatctgggga

SEQ ID NO: 124410 - DNA, 1339 bp, Zea mays
  Clone ID: MRT4577_4493C.1
cattgggtacctcgaggccggccgggtttgaaaagatagaagatcttctagcttctgtagctgtgactagaccacaatggacgcgccttctatcttccgtggatcacagagtagaccgatctttagctatactaagaccacaagccattgttgatcatcgatcacttctttcttcccttggctggcctccttcacttgccggctcaaaattttcaagtattaattcggggaaacaggcagagattgtgaacccattgtttgtgatgcggggtgacctgaaaagcaagtattccgagagctttcttgcactatgcaatttgcagggattacagaaacgtagaaaagctagacaactgaaagggcattgtgtgggtaatcaactacgtcaaccattatgggtaattgaagagctagtaaatccaatatctacagctgcacaacgccatttctcaaaatgggctgaaaagcctgaatttgtttttgctcttgcttataagataattagagattttgttgattctatggatgagattctacagccccttgtggataaggctaaccttattgggtatagttgtagggaggaatggatttcaggaatggtcattgcattgtctacatacttggcgaaagagatatttcctaagcagattgaagttcttcaggaaagtagtagctcaagtgactcaggcagcacggcctatcaggctagagtctcgtggctcagccttgttgatctgatgatatcttttgacaagcggattcaagatttaatcttgagtgctggactactacttacggtaaaggatgatgacagttggcagaggatctcagttctctgtgtcttctgtgatcgcccagattggcttcaagtatgggcggagattgagagacaagagagtcttaataagctgcgatcagcaatggatttagagaaaaattggagtacaggaattcgaggaactatgcttgaatactcagatgattacaaggctccagtaatcaccagtgtcgttcatcataccttgtctttgctaattgatcgtgcccgtcccatccctagcatcacacttagggcagaattcattagtatgtctgctgcacccatcatatcagaattccttggttacatgcttcggaggtgtcaagaagcagaggggctgactgctctggctgatgataatgctgtgctcaaggtatcacaatctatcaatgcagctcgatatttcgaatccacgttggcagaatggtgcgaggatgtttttttccttgagatggaaaatttgactgtaaatggtgaagagtgggtgtatctttcagcaagagataaccatctgaa

SEQ ID NO: 124411 - DNA, 261 bp, Zea mays
  Clone ID: MRT4577_44940C.1
acctttaattatccttatacgtttattttggttttttagggactttggggtttgcccaaactgggaaaccccctggactatattgtgcctacccaacagggacccacttaactgggcccacgccttttttcccaacagtcttcaagaccacccttaagaaccttttctttcggaaaaaaaaaaaaaaattttcgataacaacccaagacctgttttttaagggcttggccccaaattataaggcccccattttttaggttg

SEQ ID NO: 124412 - DNA, 379 bp, Zea mays
  unsure (1)..(379): unsure at all n locations
  Clone ID: MRT4577_44941C.1
gccttgccgccagccgcccataacccngttgctgtcgcgcagccacgacctccacttcacatcttccccgaggcggcgcggtcagatgaaccatggcggattccatggccaccttgggggtcaccctgcgcaccctgcagctcatgaccaaccgcctcctggcccgtatgcaattcaagcttgaggtgatccaccccgggcgccccaacgtatccaagggggagtccgaaggagaggctcgccacggcgtacgacgtgaaggaccccaacaccatgtttgacatcgggatgccgacccaacttggaggaggaaagatcactgcatatggccttatctatgataacgtcaaggctgtcaacacgtttgagcctaaatacc

SEQ ID NO: 124413 - DNA, 894 bp, Zea mays
  Clone ID: MRT4577_44942C.1
gtccggccgggaaagtaaaggtgtttggcaagctggaaccgcaaatttaagatgggcagttcagtccctgaaatttagccagtaaatcaaacaccattgtgtacccatgatcaggaaactgtgagtaacaatataattcatgctggagttagtaagaatacaagtcatgatggagttagtaagaatacaagtcatgatgaagtggcaagtgtccaacctagcagagaagcggaaatgagacccagatctgcacctccaagccaatcaacccaagcggacaattcaggttggtctgtggaaactctgatggaactcttagatttcactccacaggaaataaccaaggccatttcggcgaccgagagtaaccgtttcgtagcatctgtcgtcattgctttcctggtggttctgtcaaactggggccttgacattggtggtgccatcaccagagtattagttggtacaaggcctcttctatttctcattgtaaccaacatcaccattgtcttcacattgttgatggagaacaaagaccccaatgtgagaagcagacccgttggcgtcaatctgggttcagctgatagcttagggcagatgctagagatcgggttgctgctacagaaagcactaggtgctctgctgattgactgcagcgtttgcgctgttattatgatatgttttcttggattctgagggagcctgggtagaagtctcacagaaacctttgtaattttttttgtctcatgctctggactgttattccattttgtaacatctcattttggctgagttctaatttatgcacccatgttttctgtttttccgacaccgcggaggaaattagagattacttgaaccaggtcaatggatacagactacagagcgaagagcgaa

SEQ ID NO: 124414 - DNA, 270 bp, Zea mays
  unsure (1)..(270): unsure at all n locations
  Clone ID: MRT4577_44943C.1
cccacgcgtccgccacgcgtccgccacgctccgccacggatcgtgagccgtacgtcgggacgtgnctgctcaacaccaggatcaccgccgaccaagcgcccgtgagagacgtcggcacatggctcttcagcacagaaggcgaggtccctacagagagggccagtccatcggcgtcatcgcagatggcgaggacaagaacggcacgccgcacaagcttaggctctactccatcgccagcagcgccctccgaaatttcngcgactccaagac

SEQ ID NO: 124415 - DNA, 1341 bp, Zea mays
  Clone ID: MRT4577_44944C.1
caacgacctggtacctggaggtcgccaggtggtggtgggggacgaccggacgaggaagtagtggcctgtgcgtgccgtcgcggaggagggggtggcgatggagaagggcgcgggcacgcggcggcggcggctggtggaaaggggatcggatcgccttgccttcatcaccggccagacgcgcagcctctcctgcgacccgattccagattcaccacttcgttcacagtttgaaggtggcactcgtgatgatgggttcagcgagagaaatcagttgcagaagtcagaacctagcgacctggtacctggatttcaagatcctggtactcgccaaggagtcaaggctagaaccttaagctatgatgccctggtacctgaatttgaacgagctggtggccgccaagaaaataacgcaagtaccttgagctatgaagacgaacttttccgcaaatttaagatgggcagtgcagtccctgaaattcagccagtaaatcaaacaccattgcatacccatgatcaggaaactgtgagtaacaatataattcatgctggagttagtaagaatactagtcatgatggagttagtaagaatacaagtcatgatgaagtggcaagtgtccaacctagcagagaagcggaaatgagacccagatctgcacctccaagccaatcaacccaagcggacaattcaggttggtctgtggaaactctgatggaactcttagatttcactccacaggagataaccaaggccatatccgcgactgagagtaaccgtttgttagcatctgtcgccattgctttgctggtggttctttcgaactagggcttggacatcggtggtgccatcaccagagtattggttggtacaaggccacttctatttctcattataaccaacatcaccattgtcttcacattgttgatggagaacaaagaccccaatgtgaaaagcaggcccgtcggcgccaacctgggttctgccgatagcttagggcagatgctagagatcggtttgctgctacagaaagccctaggtgctctgctgattgactgcagcgtttgcgctgttattatgatctgctttcttggattctgagggagcctaggtagaagttccgcagaaatctttgtaactattttgtcccgtgctctgtactgcatcgttctgctactgctattcaattctgtatcatctcactttggcagagttttaatttatgtactccccgttttctgttttctgagcgtatgcagttaattaaaccaggtcaactgttttagccagtattttttggtaaaaaaaaaaaaaaaaaagaaaaaaaaaaaaaaaaatttgcggcc

SEQ ID NO: 124416 - DNA, 534 bp, Zea mays
  Clone ID: MRT4577_44945C.1
caaacaaaaagctttatttgacatgacagcaaagcagagttacagcgaaggggtcggtgacacagagaggaagggaccagaccataatacttgctgatcccctcctccagtcctcctgaaccttacacaaccaagcgctcgacaaaacggcacaagcttacacaacacactgatcaaacaacagaaacttaagactaaccagcatcaccaaccgcagtcccggaggctcttccttaaaaaacagcagtaacctcctgacagcagccactgaaacccaaacaaaacgagaccagaaagcagcaagactgaccgtggacggatggatggaccagcgcgtgctctaatatggcaaccgatccatctgaccaacagacaccccacaaatacttcaaacacggaggagagattcacgagagcttctttgtaaatatttggccctctgccagccctctaccgcgtgcactaaaatgagcacatgatagcagcagaggagcgagggcatcgggcaggccgcgggccggaagtgagaacgcg

SEQ ID NO: 124417 - DNA, 1275 bp, Zea mays
  Clone ID: MRT4577_44946C.1
ccccaactggcaaaagggggttttttttcaaggctttttagttgggttaccccagggtttttccagtcccgatgtttttaaacggcggccagtttttttttttttggttccccttttaaaaaatttttactttgcatgcccgggtaagtaaacttggtttttttaaaggggccgcccctttttttttttttttttttttttttttttttttttttttttttttttttttttttttttttttttttttttttttttttttttttttttttttttttttttggccgctttttttttttttttttcaaacaagaagctttatttgacatgacagcaaagcagagttacaggcttacagcaaaggggtcggtgacacagagaggaagggagcagaccataatacttgctgatcccctcctccagtcctcctgaaccttacacaaccaagcgctcgacaaaacggcacaagcttacacaacacactgatcaaacaacagaaacttaagactaaccagcatcaccaaccgcagtcccggaggctcttccttaaaaaaaaccgtagtaacctcctgacagcagccacttaaacccaaacaaaacgagaccaaaccaaaccaaaccaaaccagagtcaccagatcggaaagcaggggcacgagaagaagcacagcacagaccagcaagaccgtggacggatggatggaccagcgcgtgctctaatatggcaaccgaccgatccatccgtgaccaacagacacccccacaaatacttcaaacacagaggagagattcacgagagcttcatagttaaatatttggccctctgccagccctctaccgcgtgcactaaaatgagcacatgatagcagcagaggagcgagggcatcgggcggaagggagaacgcgcggagcggctcttcttatacttctggggaccggccgtttcacttgttgtcgtcggcgtcgacggaggccgagagaccctcctcgccgtcgccgcggctatgcttgacgaggcccgcggccatggctgagacggcagctacgacgtccttgaggatcttctccttgatctggcccctccgcggcggcggcgggaggcccgccctgctgccgcctctggtggcggcgcgcccagctactgccggcatggccggcgccggaacctggatggtctcggtggccatcagcgaggcagctggggactgggtggtggacgacgagaggagaggggacaccgttggatttgatcacaggaccccggcgagcctcgagggtc

SEQ ID NO: 124418 - DNA, 543 bp, Zea mays
  Clone ID: MRT4577_44947C.1
gaaaaaaagcggcgtttttttttttgggggagcaaagtttttcacatctcctaaaaaaaaaattgggggaaaagggaacccaaaaaattgggaatggtacccccacccccccctttttttggtaaaaattaaatttttttttttttttttaaaaaaaaagcaaaaaaaaatttacccggcccaaatttgttttataccttgaacaaaacccaccgggggggggttaacccgttaattttcccaagaaacgggttaaaataatacttatgggattacggggagggaccccaaagtttttccaaacctttaaaaagggctttaaagcttttgccacaaaatttccttttactttggtgggggtttgttttttttgaagcgggggttgagggaaaaaaaaaaaccagtgggccagggttaagggttttaaacctcggtttttcaaatttgagaacagatttgggaattgaccccttgacccttgggaaaaaatccctttttcctaaggggggccccccttgaggaaacgggaaactttccccattt

SEQ ID NO: 124419 - DNA, 366 bp, Zea mays
  Clone ID: MRT4577_44948C.1
attcggctcgagcgcacaccaccggccaccttttccgccgaggggcaaggccgaaccctggggcgattggcaaggccgagtgcgcccttacaggccaggttgcaccggactaagatctatgccacctagaatctttcccagctagtaacgtgcgcaataccctgtctgtcaagagcaatggcgtccagtggggatccgtgccgatctgatgatgagaagaaaactccactatccgaagggaatctcaacgagcgagaagggctttctactgcacgctgatcaaacacattagatgatgggtatatgcaaaggatgatcaatgatccatctattaaggcgatagcagatcaaattgcaagggatcct

SEQ ID NO: 124420 - DNA, 1135 bp, Zea mays
  Clone ID: MRT4577_44949C.1
caagaaccggggggtgcgcggggggccggagcccggaggtagcaagcaacgagaggaaggagacgacgacgcggcctcggctcggaggagacgacggcgaggaagcgtccaggggaccccgtacgaaagacttgcagctgcgggtgtcttctgctatcacgatctgaagtgctgaacttggttggaagatactcttcttaagcctggaactgtcgtttccgatggtctggcactttctttcctgatggcaagcacagaaggtttccgcctcgtgagatgcccaaagtgtctgaacattctcccagaaccacctaacgtcacagtctacaagtgcggtggatgcggcaccacccttcgagctaaaacccgtgccagcggtggccaacaagtggccgcgaccgcgaaacaaggtcgccaggactccgacagttattcggtcgctaccgccgtgagcagtggggtgcctcgtcagaacagagaccagggctccattggtgccgtcacggagagttccttcgacgctgatgtcgcgagcgccgagcatggcagcaacggagcaaggagcggtgaaaatggtggtggtatgctggctggccagaatgtccatttcgaaggccaggataataataccagttcaaggatggaaggtcctgctggccagacacgcctgaacgcaaatgccacgtatttagactctggtggaacagaaaaccacaccgtgcaacaaactgcagagaaatgccgagtgagtggacatgtcgatgatacagaatgccacttgaacacctctgaggacgaaatgtttccttccgagacaagcaaagcagccgtcggtatgcaggatcctgggcagaagaaggaagcgggcggaaccgagcatgcagcgaacaagaagagccatcttgtgagggcactgtctcggtcgtgtgatcttggatcatcgatgaacttgaccgatttccactctgctcgggcttcgctccagtccaaaagcttcagggccagcgcgcccctccagtcgaagatcatgagcacggtggatgagctgaagggcgacctctctgagatgttcagcaaacctgcggactgcaagccaaggccacacccacaccctccacgcccttccaaacgagat

SEQ ID NO: 124421 - DNA, 252 bp, Zea mays
  Clone ID: MRT4577_4494C.1
gaaatcctatcgcatgtgccacaagaggcggaccgtctcggataccatcctgatgagtgatgtgactgatggtattgacattcccggagtgagtggccctggctatgcaaggtggaggggctccatgagtacacccactatcaaactgctgtaactccttaccacagacgatcacattggccaccacatatgctcatacggtgtgtccttggctaccattgtcgtagactgtgacatcaatgcgcctaagat

SEQ ID NO: 124422 - DNA, 610 bp, Zea mays
  Clone ID: MRT4577_44950C.1
aattcggcacgaggctcctatcctatcatccgtcggccaccgcgccgctccgctcacgcgacgcgccgtcgcgccgacgcccgcggccgtgactcgtgagggcgtgaggccgtgaccgccgtgagccccttccgtgattctgttccctccaggtaggctgccatccctccagcgttggcacaagcggtcaggctgccaggttggggcgttgagctgccacctgcacctgccaagctggggcgctgggctgccatccctccaggagccgacgctgccgacctatcgctggtcaggttagtgatctgaaattctgaagtccatccctccaagctccagtctgcctgtcaggtactcaggttagtgatctgaaattctgaagtcaactagatggagttcaacttacaagatgttgcatacttgtatagcttataaagaagccattgaaacatatgctgatgcagatttaaagtataaatgggaacctacagctgaagagtgggatttgtttattgcaattgaaccaattctttcatctttataggatatttgatgaacatcaagttgtggttgaattagaagatattataagatatttgggaacctacagctg

SEQ ID NO: 124423 - DNA, 464 bp, Zea mays
  Clone ID: MRT4577_44951C.1
ggaaggaaaaccccaaccccgaaaacccccgaaaaggaaacaaaaaagcttcacaagcccctcacaacactgcaactgaaatccccccccccaaaggggacaactgcccataacaccccctcgaaccccacatccgggaacccacagctttagcagggtatctaaaggatccctcatccacccaaagctcggaaaaaaaaaagggggggaaagtaaggcccaggggaaaggaaaacctttagctttacaagcttccctcaagggggcaaacggggggaaaaagggggcaaaaaaaacggcaaaaactagggccttagccccaaaaacaaaccctgcctttttgagggccctgggacaaggcgatcgatgacttctgggggaaccccttttaccccttgaaatctcgaattaaaaaaaggcggcaaaggcccccccttgggtaaaccagggtttgggccccccaa

SEQ ID NO: 124424 - DNA, 1241 bp, Zea mays
  Clone ID: MRT4577_44952C.1
gcattctcctcgctcctgctgccatcgtttttcctttttcctggacagccactgcaactcctcccaaatcctcccacccggtttagccggctccgctgccaccgccgcgactccacctctgtcgccaccatggtcaagtccaaggccatcagggtccacgagctgggcggccccgaggtgctgcggtgggaggaggtggaggtcggggagcccggtgaaggggagatccgcatcaggaccaccgccgtcggcgtcaacttcatcgacatctactttcggaagggggtctacgccgcgcccaccatgcccttcaccccaggaatggaagccgttggcgtcgtcaccgctgttgggcctggcctcactggcaggaaggtgggcgatgttgttgcatatgccggcaaccccatgggctcctatgctcaggagcagatccttccagcggctgtcgctgttcctgttccaccttccgttgatcataagcaagcagcttctgtgatgctcaagggcatgaccgcccatgttctgcttcgccgggtattcaaggcttccctggagtgcttggcgtcccgcggcttcctggtgtcgtttgggcagtcgtcaggcaaacctgacccaatcccaacgagcgacctggcttccaagtccttgttcctcactcgtcctagcctcatgcattacactgctacccgtgatgagctgctggagtcagccggcgaggtgtttgccaatgtcgctaacggggtgctgcacgtccgggtgaaccacacgtatccattgtcggaagctgcccaggcccatgcagatctggagggcaggaagacatcagggtccatagtgctcatcccgggatagactcaagggcatgtgaatgaataaatggggtgatctggttatgggaacggcgtaataataattatatctatgctgtttatgcggtatgttcgagtctgtttctgagttcctaaatctgaatgaataagtggcgcccttgtgttgttgggtctcaaaaaaaaaaaaaaaaaaaaaaaaaaaaaaaaaaaaaaaaaaaaaaaaaaaaaaaaaaaaaaaaaaaaaaaaaaaaaaaatcgtttatcatttgcgcctttacattttttttttttctgctcctccgcctccgcctgatccatccaaaacagggatcgccatgtgggactcggaggaccaccattttaaatcgaaggccgacgttgggggggaaaaaacctacccggagaagg

SEQ ID NO: 124425 - DNA, 1440 bp, Zea mays
  Clone ID: MRT4577_44953C.1
atggatgggaggaggacaattttgatgggacgatatgaaattggtaaacagctgggacaaggaacctttgcaaaggtcttttatgctcgtaatcttactactggcctggctgttgccataaagatgattaacaaggacaaggtcatgaaggttgggctcatggagcagataaagagggagatctcaataatgaggttagtgaagcatccaaatattcttcagctttatgaggttatggctagcaagagcaaaatttattttgttctggagtatgctaaaggtggtgagcttttcaacaaaattgctaaggggggaaagctcagtgaggatgctgcgaggaaatatttccagcagttggtcagtgctgttgatttttgccacagtcgaggtgtctatcaccgtgacttgaagcctgaaaaccttctacttgatgagaatgaaaaccttaaagtctcagattttggcctaagtgctctagctgagtccaagaggcaagatggtctcctgcataccacatgtggaactccagcttatgttgctcctgaagtgctgagtagaaaaggttatgatggtgcaaagtctgatgtgtggtcttgtggagtaattctttttgtgcttgtggctggttaccttcctttccatgacacaaatttgatagagatgtacaggaagatttccagagccgagtttagatgccctcgttttttctcaactgagctgaaggatctgctacataaaatccttgttccagatccaagcactagaatttctatctcgaggataaagaggagtgcttggtacagaaaaccggttgaagcacatgcaaagaaaaatgaggcagaaacaagcgagaatacttgtacgggtgaaggttttaatctttctgggttttttgaggataagtatggtcgcagggaagagagatttactaccagacagcctgtaacaacagtatttacaaagctgaaggagcttgccaaacgcctaaagttgagggtcaagaagaaagaaaatgggaccttgaaattggcagctccgaaggaaggaaagaagggtatgcttgagcttgatgcagagatttttgaggttgctccttctttgctcttagttgagttgaaaaaaaccaatggggacacgctggagtatcaaaagctagtgaaagaggagataaggccggcactgaaggatattgtttgggtttggcaagatgatcaacaccagtgctcacaatcaccagagtctctattatcaccaccggagacacaggatgaattgcgattatcattgcctcagcaagagggtcaagacttcttagaagccccattgccatcactatcgcttgaccagttgaaatcaccaactgccccagagcaagcagagcaactgccacaaccagaacagttgcaaacgccaatcgctccagaggagcaaattaactag

SEQ ID NO: 124426 - DNA, 1002 bp, Zea mays
  Clone ID: MRT4577_44954C.1
aaaatatttccatatcagatgttgtgcacacataattaatttggttgttaaggatgggactgctgcattggattctttaataagcaatctaagatcaactgtcaagtatgttatggtgattgctactattcttgatccaaggtataaaatgagatttattgagtggtgcttcaataagatatttgatgaacatcaagttgtgtttgaattagaagatgttcgtagtgagttagaaaaactttatggggattttgaggtgcagcatagagagagaaaagagtctcaaagcaaatctaatgcttcctcatctttgagtgttgaaagatcatgtagtttgccatccgcttcatgtcaatttcagtctttcttgtcatcaactcagtctaacccatcaaagagcgagttgcttatctatttggaggagactaatgtgtgtttatcagacaaagagtttgatttgctgaattggtggaaggttaattcacatagattttcagtggtgtcgagaatggcaaagaaattcctaactattctggcgacatctgtgtcttcagagtctacttttagcacgggaggtagaactctagatgattatcgtagttctctaaggccttcaatggtggaggcattggtatgctcttctagctggatccgaggaacacatgatggaagcatgatatatgtggaagaagatgatgaggacaatgttgagaacattatgttcccaaaaagcttggtggaaagcaactaaatttggaagaattggatggagacaagacaagctaagctaaggagacgtcaagagtcaagactcaagagaagatgcatcatactactgctggctgctgctgcttgagaatatactgctttattgagaacattatgttgagaacattatgttttgagaacattatgttttgagctgaatatactgctactgatttctagtgctgaactgctgaatatatactactctttgttgaatatatataattatatact

SEQ ID NO: 124427 - DNA, 2307 bp, Zea mays
  Clone ID: MRT4577_44956C.1
aattcggcacgaggcccaccatcctctctacacggcacaggaacccaactactactactacaatcgttgccagggagctcaaccgactcgggaccaaaatcggctgctgttgctgcctgggacgaaatcggaggcatccgcctttctcgagagatcgagctccgcgccggagcaggcgggccaggcggtgccgctgctggtatctggtgggtttacaacatagggatggagtcgagatccatccggattcgacattcgaggtcttctgctttgctgttttaaacctgtagaggcagaggacttgggaatgctgaaaaatgtgcctgcaaaccgacgggggaattttttgtgcaaacaagattcgacctctgttcaagcagatattgttggcttctcatgagtatgggcttcatgctgatactgctcttcttttcaatgatttaaagcacagtagattgaaggcctttatatttgttggccatcaccttggagacgacggttaaaatcttctacattctttgataagtggtgtggcgcttgttcattattctatcgttgcatagtttgatacgatggatgggaggaggacaattttgatgggacgatatgaaattggtaaacagctgggacaaggaacctttgcaaaggtcttttatgctcgtaatcttactactggcctggctgttgccataaagatgattaacaaggacaaggtcatgaaggttgggctcatggagcagataaagagggagatctcaataatgaggttagtgaagcatccaaatattcttcagctttatgaggttatggctagcaagagcaaaatttattttgttctggagtatgctaaaggtggcgagcttttcaacaaaattgctaaggggggaaagctcagtgaggatgttgcgaggaaatatttccaacagttggtcagtgctgttgatttttgccacagccgaggtgtctatcaccgtgatttgaagcctgaaaaccttctacttgatgagaatgaaaaccttaaagtctcagattttggcctaagtgctctagctgagtccaagaggcaagatggtctcctgcatacaacatgtggaactccagcttatgttgctcctgaagtgctgagtagaaaaggttatgatggtgcaaaggcagatgtttggtcttgtggagtaattctttttgtgcttgtggctggttaccttcctttccatgacacaaatttgatagagatgtacaggaagatttccagagccgagtttagatgccctcgttttttctcaactgagctgaaggatctgctacataaaatccttgttccagatccaagcactagaatttctatctcgaggataaagaggagtgcttggtacagaaaaccggttgaagcacatgcaaagaaaaatgaggcagaaacaagcgagaatacttgtaccggtgaaggtacaacttctgtctcaacagagtgcagtacgtctgagggaaatcaagggccattaagcctcccaaacttgaatgcatttgacatcatctgtctctcaacaggttttaatctttctgggttttttgaggataagtatggtcgcagggaagagagatttactaccagacagcctgtaacaacagtatttacaaagctgaaggagcttgccaaacgcctaaagttgaaggtcaataagaaagaaaatgggaccttgaaattggcagctccgaaggaaggaaagaagggtatgcttgagcttgatgcagagatttttgaggttgctccttctttgctcttagttgagttgaaaaaaaccaatggggacacgctggagtatcaaaagctagtgaaagaggagataaggccggcactgaaggatattgtttgggtttggcaagatgatcaacaccagtgctcacaattaccagagtctctattatcaccaccggagacacaggatgaattgcgattatcattgcctcagcaagagggtcaagacttcttagaagccccattgccatcactatcgcttgaccagttgaaatcaccaactgccccagagcaagcagagcaactgccacaaccagaacagttgcaaacgccaatcgctccagaggagcaaattaactagctctaacagccagctggtaattcatatgcccctctcagtcatagttcatagttctattccggtttttactctttgttccggcttttctatttcttctggaattgtaaagctgtatgcctgtatgtactgcagaaatgccatgtattccagtttgaaatgatataatacatcatacatccgatgttccccaaaa

SEQ ID NO: 124428 - DNA, 518 bp, Zea mays
  Clone ID: MRT4577_44957C.1
taagctcggaattcggctcgagcttacaagatgttgcatacttgtatagcttataaagaagccattgaaacatatgctgatgcagatttaaactataaatgggaacctacagctgaagagtgggatttgtttattgcaattgaaccaattcttgcatctttagctaaagttaccactgcattgtctgcttcttcatatcctactgcgaatctattctatcctcacattgtggatataaaaattgcattgagggcagcaatggtctccaataatttgaacttgagaacaatgggtaatgctatgatggaaaagtttaacaagtattgggaagaaaagaataatgttatggtgattgctactattcttgatccaaggtataaaatgagatttattgagtggtgcttcaataagatatttgatgaacatcaagttcgtgttggaattataagatgttcgtagtgagttagaaaaacttttatgggattatgaggtgcaacatatagagacaaaagagtctc

SEQ ID NO: 124429 - DNA, 2018 bp, Zea mays
  unsure (1)..(2018): unsure at all n locations
  Clone ID: MRT4577_44958C.1
gccgctcaggcagctcaggatggatgccaccatcccataatttacactagcgaggatgtcgtcgcaagagtcaaggatattacatcaggaaaaggtgtcaatgtcgtctatgattctgttggaaaggatacatacaaggcttccctggagtgcttggcgtcccgcggcttcctggtgtcgtttgggcagtcgtcaggcaaacctgacccaatcccaacgagcgacctggcttccaagtccttgttcctcactcgtcctagcctcatgcattacactgctacccgtgatgagctgctggagtcagccggcgaggtgtttgccaatgtcgctaacggggtgctgcacgtccgggtgaaccacacgtatccattgtcggaagctgcccaggcccatgcagatctggagggcaggaagacatcagggtccatagtgctcatcccgggatagactcaagggcatgtgaatgaataaatggggtgatctggttatgggaacggcgtaataataattatatctatgctgtttatgcggtatgttcgagtctgtttctgagttccnnnnnnnnnnnnnnnnnnnnnnnnnnnnnnnnnnnnnnnnncgctgggctgccatccctccaggagccgacgctgccgacctatcgctggtcaggttagtgatctgaaattctgaagtccatccctccaagctccagtctgcctgtcaggtactcaggttagtgatctgaaattctgaagtcaactagatggagttcaacttacaagatgttgcatacttgtatagcttataaagaagccattgaaacatatgctgatgcagatttaaagtataaatgggaacctacagctgaagagtgggatttgtttattgcaattgaaccaattctttcatctttataagatatttgatgaacatcaagttgtgtttgaattagaagatattataagatatttgggaacctacagctgaagagtgggatttgttgattgctactattcttgatccaaggtataaaatgagatttattgagtggtgcttcaataagatatttgatgaacatcaagttgtgtttgaattagaagatgttcgtagtgagttagaaaaactttatggggattttgatgtgcaacatagagagagagaagagtctcaaagcaaatctaatgcttcctcatctttgagtattgaaagatcatgtagtttgccatccgcttcatgtcaattttagtctttcttgtcatcaactcagtccaacccatcaaagagcgagttgcttatctatttggaggagactaatgtcagtttatcggacaaagagtttgatttgttgaattggtggaagcttaattcacatagatttccagtggtgtccagaaggcaaagaaattcctaactatactggcgacatctgtgtcttcggagttacttttagcacgggaggtagaactctagatgattatcgtagttctctgaggccttcaatggtagaggcattggtatatatgctcttctagctggatccgaggaacacatgatggaggcatgatatatgtgatatgcttatcttgtatatttcttaaagttgtattatttcacacattaattgaactttgtattttatcaagaagaagatgatgaggacaatgttgagaacattctgtttccaaaaagcttggtggaaagcaacttaatttggaagaattggatggagacaagacaaactaagctaaggacgtcaagagaaaagatgcatcatttgaattatttttgtcattgaaactttgagatactgaatattttctgcttatcaatggattatgcactactcttgtagactttgagatacnnnnnngctggatactgctgctggtttaaatgtcgccttgctgctattatgttgaatatgttttgaggacattatgttttgagctgaatatactgctactgtttcctagtgctgaactgctgaatatatactactctttgttgaatatatataattatatactactctttct

SEQ ID NO: 124430 - DNA, 2436 bp, Zea mays
  Clone ID: MRT4577_44959C.1
agctggggcggtgggctgccatccctccaggaacaaacactggcgccctatcgctggtcaggttagtgttatgaaattctcaagtccatccctccaagattcagtctgcctgtcaggtactcagatttaaagtataaatgtgaacctacagctaaagagtgggatttgtttatcgcaaatgagccatttctttcatagtttataagcatatttgattatcggcaagttgtgtttgagttgcaaaatattataagatatttgggcacctccagctgaagagtgggatattgctgagcgtttctattggtgatccaagaagaagatgatgaggccaatgttgagaacattctgtttccagaaagcttggtggaaaacagcttaatttggaagaattggatggggccccgtcgtaataagctaaggacgtcaagaaaaaagatccatcatttgaattatttttgtcattaaaactttaagatcctgcatattttatgcattatcaaatggattatgctcgacgcatgtaagggaaaaaaaaaaaaaaaaaaaaaaaaaaaaaaaaaaaaaattaaaaaaaaaaaaaaaaaaaaaaaaaaaaaaaaaagggtgcttggtctgtgcctgccctgccaggtcttgcttactcgtttggctcatcaactcaccactgccctagatagccatccgggctcatccaatttaagcccaccggcggtagaagacagaccggccgggattgataacagatgtcggcattctcctcgctcctgctgccatcgtttttcctttttcctggacagccactgcaactcctcccaaatcctcccacccggtttagccggctccgctgccaccgccgcgactccacctctgtcgccaccatggtcaagtccaaggccatcagggtccacgagctgggcggccccgaggtgctgcggtgggaggaggtggaggtcggggagcccggtgaaggggagatccgcatcaggaccaccgccgtcggcgtcaacttcatcgacatctactttcggaagggggtctacgccgcgcccaccatgcccttcaccccaggaatggaagccgttggcgtcgtcaccgctgttgggcctggcctcactggcaggaaggtgggcgatgttgttgcatatgccggcaaccccatgggctcctatgctcaggagcagatccttccagcggctgtcgctgttcctgttccaccttccgttgatcataagcaagcagcttctgtgatgctcaagggcatgaccgcccatgttctgcttcgccgggtattcaaggttgagagtggccatactatcctggtccatgctgctgctggtggtgtcggctcactcctttgtcaatgggcaaacgcccttggtgccactgtcatcgggactgtttccaatcaagaaaaagccgctcaggcagctcaggatggatgccaccatcccataatttacactagcgaggatgtcgtcgcaagagtcaaggatattacatcaggaaaaggtgtcaatgtcgtctatgattctgttggaaaggatacatacaaggcttccctggagtgcttggcgtcccgcggcttcctggtgtcgtttgggcagtcgtcaggcaaacctgacccaatcccaacgagcgacctggcttccaagtccttgttcctcactcgtcctagcctcatgcattacactgctacccgtgatgagctgctggagtcagccggcgaggtgtttgccaatgtcgctaacggggtgctgcacgtccgggtgaaccacacgtatccattgtcggaagctgcccaggcccatgcagatctggagggcaggaagacatcagggtccatagtgctcatcccgggatagactcaagggcatgtgaatgaataaatggggtgatctggttatgggaacggcgtaataataattatatctatgctgtttatgcggtatgttcgagtctgtttctgagttcctaaatctgaatgaataagtggcgcccttgtgttgttgggtcagggccgtgccggaattatacaggggccgaagcgcccctcctatcactaaacagtatagaaatctgaatttctgaagtgcatacctccaggctccagtcggcctgtcgggtcctccggctgaagggtgggatgggttccttccgccgatgcgtgggccttggtttttgctgtggttccttgtctggcgcctctataagatatttgatgaacatcaagttgtgtttgaattagaagatgttcgtagtgagttgggaaccctctgcgggggtgtgggtgtgcttcattgcgactgtgctgggtcccaaagcaaatctaatgcttcctcatctttgagtattactaaactcttggttacataaattttacttgaacaactttgttcttcttgtgttccttgaaataaattcctcaactttcat

SEQ ID NO: 124431 - DNA, 462 bp, Zea mays
  Clone ID: MRT4577_4495C.1
aaaccaacacaaaaaccaaaaaaaccacaaaccccctctcggaattgaaaaccgccaaggcgccaaggcccgacctttgtttttaaattttacttgggggactcaaaaacgctagggtgatcatcggcagtcacccccaaaaatggacaattaaaggctaattaatggtgtacttaaacgtgggaaataagtgggttatattaaacaatgggaaggaccattatattttaaaatcggtcgacaaaaatgcgcaataaaaaaaaccgtttaattttaaaattttccgaaaaaaaagatacgttgtttaaaaaattacgtgtaatttttctaaaccttgggtggttttgatcttctttgttaaattgtggaaaaaattgtctttggacccgtggccgttgttaaaaaagctttttttttgttttgttagcaaacttgaaaatagggggacaaggccataaaaag

SEQ ID NO: 124432 - DNA, 146 bp, Zea mays
  unsure (1)..(146): unsure at all n locations
  Clone ID: MRT4577_44960C.1
cggatcaaggagggcatggnagacctgtcgtccgcctgcatggagctcgccttgaaggagagccaggacgccagagagacgccgacgccgacgcgtgcgaagtgggcgagcagccacggcgatggagagtcgaggatgctgtggcg

SEQ ID NO: 124433 - DNA, 245 bp, Zea mays
  Clone ID: MRT4577_44961C.1
ggggttaaaccattcctttccaaccttacttggggcttaatacacctgaagggcacaatccaacttaaaagggacgggcgccactttattacatccttgggccttggtctgtcggcaaatatgtgaaaaccggaagcaaaaaaaggggaaaaaaaacacattgactctctggcaaattcaccccataaatccaattttccccatttgtgggggaagaaaccatctccttgggttaaaaccataaa

SEQ ID NO: 124434 - DNA, 504 bp, Zea mays
  Clone ID: MRT4577_44962C.1
ttttttttttttttttttggcaagaaagtagtgcataacggcagttcaagttagcttgaacatggtttacaaacaatccatctgaccatctctaagcacaaagccattcacaatttgagatagaatacgcaattcccttcaaactctatttataagaatcagacagtaagttccctaattgcctggaacagggtccagtccgttgtaaagaatgatcagcgccctaataaaaccgacaaaaacgaactttggttaaaactctgtacagccaaacagaatgatctaataattcttcagcctcttgctaggtaaacctccagaagttttcctttcccattcgattgtgagctccttggttgaatactgtactcgattctcttcctgtattccatggctggagttttacttccaaatgtaatttgatgcagctggaagaaagcaagcacacttactgcaaacattgcagcgttaccgagagcaccaccaatcttggccctcgtgtcg

SEQ ID NO: 124435 - DNA, 270 bp, Zea mays
  Clone ID: MRT4577_44963C.1
ggtgacaaagggcattgccttgacggggaattatacaagttgaaagattaagtaacgtgaagtcttaaaacctttgtgggagtggtataaacccgggcacccaaaaaggttgggacgtgcaacaaccagatctgaaaatgggatcacggtcacgcgcgcgcacacccaaacacatgattaaacacaaagggagcacgacaccacgaatgcttcaagctcttgcttgacggctatacgctacactctaactggaaaacacgatagctgggt

SEQ ID NO: 124436 - DNA, 532 bp, Zea mays
  unsure (1)..(532): unsure at all n locations
  Clone ID: MRT4577_44964C.1
aaaggggtaacagccaggagcccaggccaaagcatcaattacatacatgattagatcctgttgtttccatctccctatagtcaaacaatgtggctgtgtaaggaatgaaaatgacttgtaattttgaatggatttaattcttttgcaggggatcattgcactgaccttccgctttctatacgtatgtacacatttatgttctttaaacctaacattgagttcaaacaactatgtcttcctctgtagcatctccaatattaattctggtttcctacacgccctattttccgtattacctggtgagatgcccatgttggctctatttttgttgagttcctttggtttagttgaatacttcatgatcttcagcctcttcctccccaaacccaccgagacattcacagatccatcatacctctcggccgtgagatcagtaggattggatgtgatgactgttttcctggagctatcaagagcctttcttctatgcattaataactcagcanattcagaaattaagcaaccagggtgc

SEQ ID NO: 124437 - DNA, 444 bp, Zea mays
  unsure (1)..(444): unsure at all n locations
  Clone ID: MRT4577_44965C.1
tggaacctttgggctgatttatgtgcttgtggatgtgcgggtggatgtgcgggcccggttgttttttataaggttatctatttggggggtcttatcttctgattgtattgagtagaggactatacggtacttgttgccctgtcctcttctctgtttttgtgttcgtcttattgtgatggtatactttgttcttctagtactttgtactggtgggcttcttctgttgtttttaataatgtgattttctgctggtcttcggtttttgtgttgtgtgttcttaataataatgataatagtggggttgcggaggtgtttgattgttctgcggttgtggctgttcattcacatttgccttctgatggtgtgtattatgggtgtccntcctctatgtagccttttcctcctggtgtgtcgtcttgtttgtcggtttttgtggtctggtct

SEQ ID NO: 124438 - DNA, 497 bp, Zea mays
  Clone ID: MRT4577_44966C.1
atccggctcctggtaagctcaccactcctgtttttaacactcgaccggggcccgcaaccctacgacaccgctgtattaccagcggggatgtacctgtgcccaaccatccggatggctagatgatgccggtcttcgtgatcaacccgcactatcacaccccctactagcagctagcctggctcttataccgttgcgggcgtaacgagcgcattaactcacattaagggcctaccactgcatgtcatatatccagcagggctaccaaactgctcccatgcaataaccagtccatcattcgcctccactagaggccatttgctcattggccacgaggcagactggtactgctaccagagcaactttaacagaatgattccaccagacccattatgcctgacagagccacggctagcggtacaaccaacatggcaccatgctgcgaggactacattgctaagcagcatcgtatctaggcacagatgtgcatggtgtttggc

SEQ ID NO: 124439 - DNA, 1371 bp, Zea mays
  Clone ID: MRT4577_44967C.1
cgcagctcctggataaatagagagagggggtgcagcccctagtggcggccaaccctaggtcgtccactatgggccgtagttgggctggtcatctattcttctgggccctcattcttcagtagcatgacgaagttaagatctctggcacaggcccgagtgactagcccggctaatgaaggaagtggcgcttgatgtggaggtgctgctggtgtagtcgtactcatgttgcaggtgatgtcctcatcaataaccttgggaaagccaagccccaatccacttttattttcttaattctttttctttttcgcttacgcttacccttacacagatgacttctcacgagtcctcggaaggagggaacgcacattcccacacggacggacttgcgcaagagggttttccctgcattttgtgggaggtgctgtagggagccggttatctggtgcagttgttcgaggagcaccgggtaccccgctgtagggtgaggatgaccttggagcctcatcccttgcagctgggctggcgttcgttggactccgagtctttcggataccgggctgaagacactattgaggccattgctctcctcgggctaacgaccttttatggctttcaccccttggagctgtccactcatcccattggcttgttccccgctgaaaaggaggacaagccaatgtggaaggatcgagtggtgcatgccaaggatgtgtgggctctttacccagagcagactgctcacctgacggtgcgatgcatgaatgccatgtaccgtctgcaagcagtgcgaggtgaggcaatgtcctagctgatgagcttggtggaggctaccaagatcaccctggataacagggaggaccttatggtagacctatccactgagctggtggagaaggacctcctggtggagcagatggccacccagatccaagagcttgagtagctagtaggagccagggagaacaccatcgaggttctcgaggatcaacttctgaacactcagcagcaacttgaggaagccaaccagcacctggatatgcaccatcaggagatccaggacatggaggccgaaggggccgacgaggatgttgacatcgagggaggagaggagccggagcctgcatccagcttggacactgctggctcaggaagaccaccttcccccaagtccagtgttgccttgtttgtccattaggtttcagaaatttggatagaagtgtgcagcagtagaactcctcaaagctagcttagcttttgcacctttggggtactaggctaggaagagttgagtcttttaagcactgttgtaaccgttagaaaactcttttggatttatgaatgatggatgatgtcgattttaagttatgaagg

SEQ ID NO: 124440 - DNA, 199 bp, Zea mays
  Clone ID: MRT4577_44968C.1
aaaagaatcctaaaggatatatacgttcgcagaccatttggcacaccagcacaccagggatcaattcaatcgcattcttcggttaccgacggagagctggttttggccaaattttcaaagaacttcgggaatgccactttaaaagacccggctttcttaatagcccccaacccctttttccttggcaacgggaggcttt

SEQ ID NO: 124441 - DNA, 772 bp, Zea mays
  Clone ID: MRT4577_44969C.1
tgttactgagccatctgatcctgatactccattgttagcaacacattcatcattaatggctaattcaacgcccctagtcatggacttttcagaagtatctgaacagatatgtttgaaccaagaccaacttttaggtttatttgattatccagcaagtgttgatttttacaaatcaaaaaatatgaccatctttggccaacaagttcaagacaccattacagtcgatcctaacactcaccttacaccacaaaatgagttgttctcgtctgggagttcaatgcagcttcagaaaagtgtaggttatgctgaagctgtgctgaagttgatgcaagaagtgcaacacctcaaagttatttatgcttccatactgagagtgagaggagtgtaccagatcctttcaactgtgataaacttggcgccgacaacctcccttcttcaaacactgctccaaagccaaggatgcgctggacacctgagcttcatgagcgttttgttgatgctgttaacaagctcggtgggagcgaaaaagcaactccaaaagcagtccagaaggttatgaaggtcgatggattaactatataccatgtaaaaagccatctgcagaaacaccgtatagttcaacatcattctgaaacatcgtgtgcaggtgtgactggaaggaggggcagacatacccaagcagatgatgactccatcccgcaatcaaaaggcgaagggggcattgaaggaggactagtgtcccagattggcttgcagaaacaacttcatgaac

SEQ ID NO: 124442 - DNA, 1060 bp, Zea mays
  Clone ID: MRT4577_4496C.1
aaatttacatctgaaatcccagactattgctaaatcatcataaccaattttactctctctctctctctctctctctctcttgtatatttgtatcaggaaccctgtcctaccttttattctttcccacatccttccacctttagattggcgaatggatacaccgtgcatttatctgcgcgattggattgtttttctcaagtgcagaaagattgggagttgtcggaggacattttttcaatcttgccaaataaatcttaattgggagtgtgttttggaaactattggagactttataatgagtacataaactagagagtacaatctttattatgtagctctaggcatttcatcgacagacaatggtagaacttgagcaactgttaccagatagatatattgccgactatttagtttaattatgttgtcctatacttttcactgtttcaaatgttcacattttattgctatactagtcagaaaaaggtcgtatcctatgcaacaggtgtccaggtggaaccttggaaagttaaccatgggcccatggccattcagttttagagcgatggatgacgttgatcaattagatgccttattcacaacaatcttttgactgttggggtttgccttgtatcatgaacactacgcaagctcctatcatcaccatgaattcatgcttgtagacatgcttgtataattaattgcccccattgactcactgcattcttgcttgactaagatcactgaacacaagcacggtccatgtcgatggtggctgcagacacatttttgttggaactggaccctagtagaccctaagttcatgtcctatgtctttttctagactagtcaccactcaattcacactcttaaaccttgcctgaaataaactttgaagtactatattcaaatatcaacagctgatccatttgcatgtttcagtagggattatatactcacaagaccggttcagtagttttctttttaacttctacagaacatgtaccatggtagatactacatataacctcgatgaatacctgagaaatcagggaatgatatg

SEQ ID NO: 124443 - DNA, 184 bp, Zea mays
  Clone ID: MRT4577_44970C.1
atgtcttttattttaacgcaagacctctgtttcttcaaaacaactttagccacgcgcaatgtgcctaaaatcgaaactaggaaggcaagccctgaaaaaaacccaaaccgccacagtcctataaagaacagcacccccggaagaaaaaacaccttcacgatgcgctgtcccgaatcaccctcaa

SEQ ID NO: 124444 - DNA, 490 bp, Zea mays
  Clone ID: MRT4577_44971C.1
tgtgttgagtcggcagatggagtaaccggagtgtctactccatcaccatgggtggctagtgtgagcaatgacctgaatgaaccattgaaatggaaaggaataatatatagggaaaaaggtgtttggaaaaaaaaaaataaaaaaaaaacaaaataaaaaaaagaaataaatataaaaaaaaaaaaaaaaataaacaaaaaaccttgtgcccgctttttttttttacagcttattttcagttttttattctattaccatttggccagaaaggcaacttttttttttgggggggccaaaacacaacaccaaaaacttttttttttgaattccaattatagggtaacctaaaaaatggcccccccctgaatcagttgttggcaaaaggccaattggttttgaaaaacagggtggacaagtgccaacaactcatcattggggaagaaattttggggattgcttataaattgtaattaaaaaaagaagttttttg

SEQ ID NO: 124445 - DNA, 314 bp, Zea mays
  Clone ID: MRT4577_44972C.1
gcaaaacccagactacgtgcaacactacgtggactgtcccaggacgcctgcccaccgaggcctagcatggcgcgaggcataagacatgcacggctcagcaggtcacagctctccatatgtgctccgacggcatcctaccagctatcgacggactccacatcctccatcacgagacgctgatgctgaggcactgtgacggcaaccacgcgagtgcatggcccactgtgctgagcactgcggcgatcacagacgaggttagccagctcgacacaaccggggcgaccacgttaccggactcttccatggtcggtccg

SEQ ID NO: 124446 - DNA, 273 bp, Zea mays
  Clone ID: MRT4577_44973C.1
tcgataaaatctgtagatgaaagccattgggtggtcggtttggatgcaaataatatattgctgcgagggttattcaaaacggctcggtcttatccacatgtgatgcccaatcctgtgcttagcatacttgagctgttattaccactagcgtcatcagatcttggggctaataatttgcaaaatgagttcttgatgaggaatatacatcttttcctgattcaaaataaaatggatgaaatggctgtattgggcctttacaccacttcatatgat

SEQ ID NO: 124447 - DNA, 612 bp, Zea mays
  Clone ID: MRT4577_44974C.1
tcgatgttaaattgaagtttccaaaacattcccctggagaaacaagtatgaaaaaatccatcatcagaaaaggaatagagaagcttcctgcagggtattcccctagagggaacactccgactggtgaaactaaacagggaccctacaaaggaacgagacaggaagggacagaaagctagatccaggaccagacctaccgcgtttaaaaaaaaatgtttcaaagaagcagattatcgagggtgtgttgttcggcttcgttatcaactgaccatgggcttccaccggatgcttaatacaatgatatttactggcttgtggcttcccttttttttctaaaggaacttcttttcttgggatctcccttttatgctttccatgccatcattggtaccgataattttgtctcctaggctacaatggaagatcatgccatcattgtcactcataattttgtctcctaggctacattgaaagatcaaagtatgcactcatactcactggaccatgttttgtacaccttatgtatgtatttgttatgtaaatctgaaacttgaaccgtgtatttcaagcttgaagagaactgtagaagcgaaaagatggacgccatattgt

SEQ ID NO: 124448 - DNA, 228 bp, Zea mays
  unsure (1)..(228): unsure at all n locations
  Clone ID: MRT4577_44975C.1
tgagcttgtttcaagaaccgtttgagtctttggaggaggtgctaaccttgagatctagcatgtaactgatgaatgttnaatattcagatacatgtggaaaggatcttatttagatatgggagattgaaacatgctactagagtttttcatatgattacccatataattaatagttttcgaatatgttagtgtgtgtttaaccatattttttatgtgcacaacaagcct

SEQ ID NO: 124449 - DNA, 381 bp, Zea mays
  Clone ID: MRT4577_44976C.1
acaaaaaatcgagagaacggtgtcctcctgtctcatcatacattgacttaaaacgaaacacaccataagtaaactgttgtggcggtacagtgcagtcgtactttaggtgctaacgcaaaacaaacggagctggatgcctggatggatatgatatcacaaatactgtcactgattgcttctccttgccgtgtctagggaaccggaactcgtcatcgtgtatgtggccgtgacgttttacagtgagtgacgtttgatacgacgtacgtgtagcgaggaacttttacatgaccgacacgacacgtacagtcactcagcagacagtaaccgtgcagtctttcagactagtgcaagccgaaacatatcgtcagctagcgctgcaaa

SEQ ID NO: 124450 - DNA, 723 bp, Zea mays
  Clone ID: MRT4577_44977C.1
tttttttttttttttttgacgagggttaaatatcttttatccaaaattaaatataaaagtatttaatttcctctaacccctacaatccaacaagctctgatacagcgcagcagaaggtagacgggctcgttcgtgtcttcttatttgggctgcggcttactgggcctttggacgcacaggtcccttttcccaaagatagcactgtttttctgggcccgcggcccatttcctgcagctcgcatgtccatgttttcctatcaccttttcgtgtgccgccctcgtcctggggttcccaatcatgttcctctgggtcgtggttcatgaactcgtgccctataaattgggagcatgcgcacaggcagcatcgcctgcttcttcttgttcaaaaccgctaccactatttcgccgtagctggagcgtggagccaaagaccagctagcataagcaactatagcaggcgttgcccgtgcagtgcacgccaaaatctgcgacttgttgttcgaacttcgaagaaccagcaggtggccattgacttgtggcgttggactttttgccttctcttgctcgtgcgtgcaaatgcccatcgtccgcgccatcatggttcggctggcgacgccacgtgttgcacggccacaagtcaaaaaggaagactaggtagcggcgatccatctaccactcgccgcgttcgtcgtcggcgaaacagagtcctgctctggcttcgtc

SEQ ID NO: 124451 - DNA, 1331 bp, Zea mays
  unsure (1)..(1331): unsure at all n locations
  Clone ID: MRT4577_44978C.1
cagggcgagctcgtcgccggccgggatattgtaaataactgtactattgcaaagagcgaacggggcgacctccaggaaaatcgcagagaatgagggggatcctcttcgggccccggcggcagccgccgccgctcccgctcttccccgccgccaagcgctcctcggcacccgcgaaccttcttttcgctcgcctctatcgcttcctcccggccagccccatcctccggctccttctcctcctcgcactcctctccctcatcccgccggccttcttccacctccgtctccgccgcttccaccaaatgcgcgagaggaagtgcgggtggatcgcgaggccacccatggtgtgcgcgcacggcggtgactccaccaacgccttccccaattcgatggacgcatttcggatggctctcgacgcgcgggtcgactgtgtggaggtggatgtttcgaggtcctatgatggtgtgctctttgctctgcatgacagggatctacaaaagatgtctggtaattctacagcaaaagttggccactggaccacagatgagataaaagcactaaggacgaggtttcagttgtcaaaaagagtccaaaatgaggaagttcccatggcagaggaagctctggcgatgatatcacaatcatttaggcaggtcgttcttgatgtgaaagttggacccccttcatttgagaaaggtttagctgaggatattttgtctcttctcaggagaacaaattgcaagaattgtcttgtctgggcaaaaagtgatgatataggaagagagataattaaattgtctaaagatgttattgttggctatgttgtcatggtggataaatttaccaatagaagaacggagttagtgaggattgaaggggctaaagttgctggcatatatcatcctttgatccatgagaaggttatgaaggtcatgcgcaggcatgacaggagagtttttgcatggactgttgatgatagcagctccatgaagaagatgctgtatgagcatgttgatgccattgtgaccagtaacccttctcttctgcagcagcttatgcaggagaccagagctgagtgtatggaagatggttttgccttaccataggaatttctagctgtcagaacataagggtttaacttctcagcagagaggaccaactagcgagttgagtttgagggattattcataaattagatgataattactttagtttttggcacattccgcacttctgtcatataattgaaataagaaaatatggttagcttgtcatgaaaaaaaaaaaaaaaaaaaccaaaatcgagcacntaaaccaaccaaagcnagagg

SEQ ID NO: 124452 - DNA, 227 bp, Zea mays
  Clone ID: MRT4577_44979C.1
acgcacaaaaacagatttagggtaacaggtatacaacagcaatgtttgccctttgattattgctaacattttgttttaaagacttgataactattcttttttctaaataattgtcttagaacattcaacacgatactgtaagtgaatatcatttgtctagattattaacagttgaacttcattaaaactgtgatacatctggtgaattaatgggactataaattaaa

SEQ ID NO: 124453 - DNA, 311 bp, Zea mays
  Clone ID: MRT4577_4497C.1
tttgcccgcagtgcttctgcttcttctacttcttcttctacttcccggccggcgggcgagcttgggttagtggctcttcttttcggagacctgtgaggagagccattatcatggccgctgttgagactgttgttctcaagggtgctatgtcatgccagggctgctccggggctgtcagaaaaatgctctcgaaaaatgaaggggttgaaaccttcgacatatacctcaatgagcagaaagtgacagtcaaaagcaatgttaagcctgtagacgtctttcagaccggtttcaaatttgggtaaaagaccttc

SEQ ID NO: 124454 - DNA, 337 bp, Zea mays
  Clone ID: MRT4577_44980C.1
gacccacgcccccaataataaaccgcggcagcaacaggacagcgggcgggaaaaaggaagagcacccgaaggggcaccacggcgcacgcagaagacgagcacgcgcagaggacgaccgacagccggcgaacaaccgaagacggaggcgaccgccgacggagccaagaccgacagcaagcagaacgacaaggacgacacaccgaacccgccgagcccaggcgaaaacccagcaagccgcaagaacacacaggaggacaagcagaaaaaagcagcggaacgaggagagccagcaccccaagaagcgcccggaccagcaaagggagcaagggaccacaaa

SEQ ID NO: 124455 - DNA, 132 bp, Zea mays
  Clone ID: MRT4577_44981C.1
aattgataacacacccgagaaaaggagatctggagtagggctaaccacctaaaggtcttagcatatggcaattcttagtaccagcacatgtagataaagtaagatgcatcttattccctagcaaaagaagga

SEQ ID NO: 124456 - DNA, 530 bp, Zea mays
  Clone ID: MRT4577_44982C.1
gcattaaaatcgggatttataaaggatagctccagcacgtatacttatgttcgtactagggagggaggcacaacaaatgggagggagaaaatcgaggaccctggtgcacttggctatgtcaagaacaccaaaacaaaaagaatggtgaacagaacaaccaggaacacgatcagcatgatctgacccttgatgccggccttcttcatcaccatggccactcttttctgcacgaaatcaagtctgttggaagtagtctccatctccaagcttaagtcgtttaggatcctttcctgtccagacagctcttcgtgtatggttagtcctacgccaccaatcctttgaacactttcactgagctcgtcaagttcttcatcctgctgcctgtgtaaaacatgtcaaaatcaatgcaaaaacatgtgacctccacatggctaccctggaatggaactatgcataactatacatgtaatctgcctacgaaatttgagtttagtcagggtacactattcttatctcttttcattactgac

SEQ ID NO: 124457 - DNA, 1422 bp, Zea mays
  Clone ID: MRT4577_44983C.1
ccggcccggcacacacgtctagaatatcaaaatctcataccattttattgagctgtccaaagttgtaaaagaaatacagatgattaaacttggaataggagacctaatatttcttagtcgcatatttcccatggtaaccatgtgagtgtgaggatcataacttcatatgtgttttttctgttggtttatgtctgtactgactttttcttctggcagcaaggttaagttttttttaatctacatagttttataaaatctattagctctgttgttgttttcttaattctggaagatggacgtgtactaccagaggcggagccagccgggctctgccgttgatgagcgcacggagataacgcagtaacgaggccaaaggcgatgttacgccagcgcctgcatcgcatatagaggaagaaagttgaaggagagcatattggacacgaggacgacgtcctgtctagctgaaaaactagcccagccaaaggcccacacaaaagaggcccgtctgtagattggttcttgtttgttcatgggtgagccaggaagtaaaggagaggcgattggttcttgtctgaagaagacggaacagatgaggcaagcgagtttgattggctgaggcgctgaaccgtggcatccttcctgtcacatgtgcccgggctctctaaaccacctggctccgtcacgttattcctgataatttttgtccctgtcagtaatgaaaagagataagaatagtgtacactgactaaactcaaatttcgtaggcagattacatgtatagttatgcatagttccattccagggtagccatgtggaggtcacatgtttttgcattgattttgacatgttttacacaggcagcaggatgaagaacttgacgagctcagtgaaagtgttcaaaggattggtggcgtaggactaaccatacacgaagagctgtctggacaggtaattgctgttgacatggagcaaagttagtagatttgtgcaggagcttttaccgggaatacatgcggcgactgtttacaggaaaggatcctaaacgacttaagcttggagatggagactacttcccacagacttgatttcgtgcagaaaagagtggccatggtgatgaacaaggccggcatcaagggtcagatcatgctgatcgtgttcctcggttgttctgttcatcactctttttgttttggtgttcttgacatagccaagtgcaccagggtcctcccccctctccctcccatttgttgtgcctccctccctagtacgaacataagtttacgtgctggagctatcctttattaatcccggttttaatgcaatttgttctgcgtaagatcaccgtcattggaacggtgttaatggtaatgataaaaccaaatcgctcagtcccaaaacaaaaaaaaaaaaaaaaaagcggcc

SEQ ID NO: 124458 - DNA, 444 bp, Zea mays
  Clone ID: MRT4577_44984C.1
gccaagggtccgtacgcgacgcaggggacgggccgtgggatggagtatggctcgctctccgtggacacggtgaaccaacagtgtgtcgcgcctataccactgcgtctcgccgtgccggcatgttcatagatgtgcatgcagaacacggtcaggtgccgaatcggatgtacctcatctggcgtcactcctcgtctcccgaaggccacgtgcaacatgacgcacagtcccatgtatgcgacagggagccgcacgtcctggcggcttgcctagtggagacacgatcgctcggcgcctatggactcttgcacgcttgtgtccccgtgccgcaatatgcagtatgcacgcgagatcattcatgccagtagcaggagggccaaggcccaccctaaccattcttctaccagggccaggtggcaacgttccacaactttccggcagacagag

SEQ ID NO: 124459 - DNA, 393 bp, Zea mays
  Clone ID: MRT4577_44985C.1
gggggcccaaaaaaacaaaaaattccattttttttttttttcaaggccaactttttttttagacctggggggggggtcgatttttgggccgaaccaggccggattcccccaaaaaaaagggaaacttttgggggggggttaaattaaaacccttaaaataagggggccaaaaacctttttttttttttaataaacccggaaaaggggcccggtttaattttgggcttaaacccccttttgggggggggggggcaaaaaaaaaacaggggaaaaaaaccaaatggacgggcccggaattaattttccaataattggcccggccccccctaattgttaattctaaaaaagggccccccttaaagggttggttgaactgccccccacgggggacgg

SEQ ID NO: 124460 - DNA, 1268 bp, Zea mays
  unsure (1)..(1268): unsure at all n locations
  Clone ID: MRT4577_44986C.1
gggttctcggttaggtgtagttgacatggcgaggnggacgtgtgttttaggaagttgttgtgaggtgatcacagtgtcacttagtagaacaaggagaccattcgacctatagaatctcatgatgttttagatgaaggatctctgggtattcaagttgaggacaaggatgtcagctcttcacaagtacttggtggcacacaagatttatcttctaagaagccccaggaagacaatgttaatattgtgcccatcgtacctgtctatgtaaatgatggtttaatgatgcccaattctgttgatgatgaagcaagtttgccgttagaggaaaccaatcctgccgaagtgttacagcacattggagcaggggaggagaatccctgtcctgctcaagagttcgagtccattggagcaggtggggaggaagagttgaacctcctaagatctatgggctgggatgagaacgaagatgttcagcctcttcagcaggaggagattgctgattgtctaaagcagaacgtcaggctgcagcagaagcttcaagaatgcaagggctgatcgcagaatcaatggagcaacgtcactgtgcctcaccacactgagggggtgtttgatacctgggctaaagtttagtccaggttttggatgccaaatgggaggactaaacatgagctgattataaaactaattacataaacagtggctaattcgcgaaacaaatctatttggcctaattagtctactattagcacttgtttactgtagcaaaacatgagctaattatagattaattatgcttgataaattgtctcgtgaattagcaaaaacctgtacaattagctctataattagatcatgttcagttctcctaattggcatccaaaacccagaccaaaccttagtcccggggatgatccaaacgcatgtggagctgggttttgggaccttccggtcaaccgatcagagaatgattgtctagcttagcaaatggagagttttgtttttgttaatgcttgttcagcattgtggggggaggttccatggtagagctgataattttcccccattgataagaggttttagggtttttcttcctcattttcccagaaggaatacaccaaatagaagccttgtctggtgtcggaggcacgtaggtgtgtgttgctctgaaagaagaataggttgcctttcttttggtcgccatctttttttcttttgaaaaggaagggaaaaaataacgatcgagcttaacatggaaaaggtgcacaggg

SEQ ID NO: 124461 - DNA, 3024 bp, Zea mays
  unsure (1)..(3024): unsure at all n locations
  Clone ID: MRT4577_44987C.1
gccggccgggctggaacaacccaccggaggcacagaaatttcccaggcaaggaaaaatcccgtccgaaatccagcgctccaaatccgttcgtctcctaggcgctcccccgaacccgtcacgaatccctcagatccccgctgaaatccctcaatcctccgtgctcaccgccgccgcctcctccctgcgaccggcccgcctgctgtcgcagccgcggccgcggatttccacccgagggtttcgtctcgctctcgctctctccgctctactgcctccacagattggcgcgaccgacccgtcatcgaggaccttcttccgcccgagaggccggggctcctcccgcggaaattcactctcgttcagaggcggcgctctcctcttcatcgccgcccccgcgctctgcttgtactggagtggcgcggggtggagatccacccgggcgtggatcgattcctcttcgtttcttcgttcggtggcgcggaataccaatctatagaagtgcacgaggagtttttatatccccgatttttagggggttcaactgaactcccatgccccacgctaagtccgcccctggtggtggtggactgaattggtggacactgttgattttgtcgtgggcatggagcgaagtgagccctcgttgaagccagaatggctgctgcggcccacagtacctgccacgacccataagccggtgacttcgccccgtgcagatgatcacggcaggggtgcttcatcaagaaaccgttcatcgggacgagatcgtgatcggagctcccaactgtcctcgtctcggaggggttcaagctctagtggttcaaggaggaatgatcgcgatggtacagggaaatcaagaggctatggtaattttggaaagcacagcaaggataggatacaagaaaaggacttggattttcgtgaacgggagagtaggttggttcaaccagatgatcctttacgtgacggctttgagtcctttagctcatgcagatctgaaaaggacaggcttaaccgtactcgttcaaaggtggccataccaaatcgggcagtgagtaagtttagacaatggtaatgtatctaaaaaagataatggtgtcatctcctttgagcgggaattcccacaccttggttctgaggacaaaaatggaaagcaagacataggtcgagttccatctcctggaattagcaccccaattcagaacataccactggtagtatctgatggctggaattcagtgcttgcagatgttaggggatccaaacattaactctgtttcctcttcctcaacacccgctggttctagtaaaccgactgaagtgtccaactctgggagtgcgttaagcatggctgaaacagtgatgcagtcgccgttaaatatttgtaccacacctcagttatcaattgatgcccagaagattgaagaaagaactatgaggcagtgcattttaagacctctaacaccatcgtcaaacaaaatatctgcatctatttccttggataagttattaaaatccaaaggtgcaagagctggagagtctaatggacctatcaaggttgctccacagctgtcaatacagccatctagcaactctgttcgcactccagtcaaaactgagctcgtaaagcaatctcaatcaggcagccttcaagtccttagccgtgagcagaatggtactgtaaatactgctgccaaagacatcaccagcaacaatcctgtgagccctgttttgggtcgatcttcttcaatggaacctatgagaaagtctattgtcaacccaaagcttaaggttggtactaatggccgttctttgcatcctctgcaaggttcatttgcagacagaaaagcaagtgcaaaagacaagtacaaattttttgagttgttgcgaagtaagtctgtaaatggttcgagcgctgctattgagtctccatctagcctgactgatgatcagcagaactctaatcttgatttgcctttcaagtttattgaaaatgggagcagttcctgtgaagaagcaaattcttgtgagggatcacagcgacacttgtcggacaatgaggaaactattccaccttcagaatctcatgacgttttagatgagggatctctgggtattcaagttgacgacaaggatgtcagctcttcacaagtacttggtggcacacaagatatatcttctaagaagccccaggaagacaatgttaatattgtgcccatcgtacctgtctatgtaaatgatggtttaatgatgcccaattctgttgatgatgaagcaagtttgccgttagaggaaaccaatcctgctcaagtgttacagcacattggagcaggggaggagaatccctgtcctgctcaagagttcgagtccattggggcaggtggggaggaagagttgaacctcctgagatctatgggctgggatgagaatgaagaggttcagcctcttcagcaggaggagattgctgattgtgtaaggcagaacgtcaggctgcagcagaagcttcaggaatgcaggggctgatcgccgaatcaatggagcaacgtcactgtgcgtcaccatgctgagaagatgtgggccgcgtggagggagctgggttttggacttttggtaccttccgggcaaccgatcagataatgattgtctctagcttagcaaatggagagttttgtttttgttaatgcttgttcagcattgtgggggaaggtttcctggtagagctgacaattttcccccattgagaagaggttttagggtttctcttcctcattttcccagaaggaatacaccaaatggaagtcttgtctggtgttggaggcacataggtgtgcgttgctctcaaagaagaataggttgtctcttacttttcgccgctatgttttcttttttggaaaaaagggaaaaaagaatgatccagcttaacatgaaaaaaaaaaaaaggaaatgtcgtgcatattactgaagcgatgattactggnagttgtaaatcttaccatttccaccacctttttccttttatagctaaa

SEQ ID NO: 124462 - DNA, 1680 bp, Zea mays
  Clone ID: MRT4577_44988C.1
gagcgtggtgacatagtcttactccgccgcgacagccgacaaccagtgtcggcggtgctttcatccaacgaacatctgacagatacagagaactctacgtgtaacatactacacgacaccgcaccaggctgcttacagtcgcaagcgaaatgctgccatcggcaacaagtgaaatcgccctcccactctacagtaaacccactacttcacgccaacacaacacgtatgacgtatctggtccgcacagacgagcggactcttcatatctttgctgggacagctatcgggatgatatcgaatatggcgctgctgccgtcgaccaccattcccttgaccacctccacgccagcgcgatcagccgcggacgccgttgccctcttagctccggcaacgtggtgcgaccggcggtcgaccagcagggccctcccgatcttggacgggctcgacagctgcgccggcgagaagctcggcgtggcgtacgccgtcgcgtacggcgtgcccgaggcaggcaccgccgtggcctgcttgctgccgttgctcttgcacgcaaccttcgcgtccgctccggcggacgggatgctgtcagctggttgcttgctcagctcgtcgacgttgagcaggtcgtcgatccgcgcgatgatgttggaggccaggctctccaggaccctcgagtagctctcgaggatcgatttgcccacgtccttgttgtactggatcttgctcatgtccaagctcgtctgagtgagcccggggaaccgctgcttgagggacatgagcagcgcctccgcgcgctcggcgagcaggtccctcttctccgtgtccatgaccatgtccttcacgatgccccaggacgatctggcgccgccgccccccttccggcgccacacgtagatggaggcctcgacgcggttggcgatctccagcgcctggtattccgacgacaggtcgaggcagtcgaggaggcagtcctgggagaactggtccgaggtgatgtaccggtagatgacgtcgcccagcgccgcgcgcccgttctttggcagcgagtcgaggtaggagaccggcacggccatctcggccagtgcgttgctgttgatggccatggcggccttgaggatctggctggcgcagtcgcgacggtgctccagctgcctccgcgtggcctcgcggagaccgccgtggggcacgtgcggcaccggcagccaccacttgtcgtcgcggcggtggaacgttctccggtaggacgcggagctgtcgcagtccggcgcacagatgccctggtccacgtaccagaactcgacgtccctgaaaccttccaggatttcgaggagcatgttgtctagcttcccaagcgccggcaggttgatgtacagatcagaccgcggtctgcttgtcatgatctcaagccttgtaccatccgggaatgtttgccacgtgggcaccagctccacgatgtggtcgctgacgcagagcaggcagtccaactcccgccgccacatggccttcttctccggcggcagcggctccagcctccacagctggccgaacaccgtcgctgcagacacaggcacgtacgggcgtacggccgagcggcgcgcagacgcccttgccgctcccggacatgtcctcgccgagcagcagcttggagaaccgctccttcatcatctccatctctgatgctcc

SEQ ID NO: 124463 - DNA, 293 bp, Zea mays
  Clone ID: MRT4577_44989C.1
gcaaactatcctccttccggacgcgggggcgccgcccacagcaggcaaccaggcgagcaaacaagcgggcacaagaaaagggggcaaggagcggaagagacgccagcgacgagaagcaaccggccgaacagagactacgcagaacaggaggcgggcgccgcacatggagggaatcaaaggccgcagaacagaccaagcagagaacgacgccgacaacacagacaggagcggagcaaaccgacaaccgatgcacgggaaggcaccaaccgataacgagcgaacctacacgctcg

SEQ ID NO: 124464 - DNA, 225 bp, Zea mays
  Clone ID: MRT4577_4498C.1
attcggctcgagctgcgaaggggttattttgaatgtggaccggtgcacgcgcagatgaggtacgctgggtaaagggcttgacgagatggccgtaaagctcagcgatactaggaggaaactaggggagaagttaacgaccagaccgtgtgctatgaagggccctaccgagaaggcgctaacctacttacaaggggacatctcatatgatatagtggacttcaatac

SEQ ID NO: 124465 - DNA, 133 bp, Zea mays
  Clone ID: MRT4577_44990C.1
gtccgcgtagaagtgacttttaggggcaggtttaccaacgtgagattgattgatataggggtgaataacattattcaggggcttcaacatttggcagattgaaggggggaaagggaaggaaccattggcaaac

SEQ ID NO: 124466 - DNA, 948 bp, Zea mays
  Clone ID: MRT4577_44991C.1
ggggtaccctcgaggctggccgggaagacggccgccatctcccctgttcggttttaggagacctgcgccgctcctccggccacgcgagcacgccgaaatggtcgcccacaggttccatcagtaccaggtggtgggtcgcgcgctgccgaccccgaccgatgagcaccccaagatctaccgcatgaagctctgggccactaacgaggttcgcgccaagtcgaagttctggtacttcctgagaaagctgaagaaggtgaagaagagcaatggccagatgctcgccatcaacgagatcttcgagcgcaaccctaccaccatcaagaactacggcatctggctgcggtaccagagcaggacggggtaccacaacatgtacaaggagtaccgcgacacgaccctgaacggcgccgtggagcagatgtacaacgagatggcctcgcgccaccgcgtgaggtccccctgcatccagatcatcaagactgcgacggtccacttcaagctgtgcaagagggacaacacgaagcagttccacaactcggcgatcaagttcccgctcgtgtaccgcaaggtgaggccgcccaccaggaagctcaggaccaccttcaaggcgtccaggcccaacctgttcatgtgatgggcctcggcgggcgggctgtcgcgcacctctgttttgtgtcttagtgtccagagagataaaggtttttgcctctgcaagatttgctgccccgtggactgagcaattcgatgattttttggatgatgtattgcaaacccttgacttttgtcctactagttatgagcaggctgctctttacttgccctgtctcgcattgcctgaatcttgggaatcttttttttttttgttttgtattgcgacacctcagttggagccatgtttggctgcgaagatttcgttttgaaaaaaaaaaaaaaaaaactcgagcccgg

SEQ ID NO: 124467 - DNA, 328 bp, Zea mays
  Clone ID: MRT4577_44992C.1
acggaacgagataaaaacccaccccatctgcggcgagggtttgcctctaagcctcccatcagcggcgagaaagaagcgcgagggggaactctggtaacaagaggcagcgattgatccatgcgcatcctagaggccaaaagcactggaacgagcgccaaaggtgcttgagcagaaaacactcccatctctaattctgatgacgcgagggacaacgccgccacaccaatctgcagtagagcacacaacctaaaagtgggcaatggatggcttcacctccgtgctctacaagaatcaaggatggacatactgcaacgtatgcgagctcatg

SEQ ID NO: 124468 - DNA, 493 bp, Zea mays
  Clone ID: MRT4577_44993C.1
gggtacctcgaggccggccgggccgggaatacagcgaaccatctcctcgcatttcttttatcccccttcgcaacccaaaccccaactcgccccgcatcgatggcgcccaatgttgagaagaatcccgcggcgaagaagccggcggaggaggagcccgcggccgagaaggcgcccgccgggaagaagccgaaggcggagaagcggatccccgctggaaattccgctgccaaggagggcggccagaccgagaggtctacctggacccgcatgaccagcgcgcccacgaactacctgtcggtctacttcccggtggactacggctgcgataccgttgggttgtctgcggacccggagacgttcttcttaatcggtagctggaggtcatccactcccgctgggccatgctgagtgcgttgcgctgcgtgttcttggagctgttctcccgttacgtcgtccatgttccgcgagttcgtgtggctcttttttcggttcc

SEQ ID NO: 124469 - DNA, 866 bp, Zea mays
  Clone ID: MRT4577_44994C.1
cattgggaccctcgaggccggccgggaagacggccgccatctcccctgttcggttttaggagacctgcgccgcccctccggccacgcgagctcgccgaaatggtcgcccacaggttccatcagtaccaggtggtgggtcgcgcgctgccgaccccgaccgatgagcaccccaagatctaccgcatgaagctctgggccactaacgaggttcgcgccaagtcgaagttctggtacttcctgagaaagctgaagaaggtgaagaagagcaatggccagatgctcgccatcaacgagatcttcgagcgcaacccaaccaccatcaagaactacggcatctggctgcggtaccagagcaggacggggtaccacaacatgtacaaggagtaccgcgacacgaccctgaacggcgccgtggagcagatgtacaacgagatggcctcgcgccaccgcgtgaggtccccctgcatccagatcatcaagacggcgacggtccacttcaagctgtgcaagagggacaacacgaagcagttccacaactcggcgatcaagttcccgctcgtgtaccgcaaggtgaggccgcccaccaggaagctcaggaccaccttcaaggcgtccaggcccaacctgttcatgtgatgggcctcggcgggctggcgggctgtagcacctgtgttttgtgtcttagtgtccagagagataaaggtttttgcctctgcaagctttgctgccccgtggactgatgattttttttttggatgatggtattgtattgcaaacccttgactttggtcctactagttatgagaaggctgctgtgttacgtgccctgtatcgcgcattgtttgatgcttgtgaatctttttttt

SEQ ID NO: 124470 - DNA, 918 bp, Zea mays
  Clone ID: MRT4577_44995C.1
cttggggtaccctcggagctggccgggaagacggccgccatctcccctgttcggttttaggagacctgcgccgaccctccggccacgcgagctcgccgaaatggtcgcccacaggttccatcagtaccaggtggtgggtcgcgcgctgccgaccccgaccgatgagcaccccaagatctaccgcatgaagctctgggccactaacgaggttcgcgccaagtcgaagttctggtacttcctgagaaagctgaagaaggtgaagaagagcaatggccagatgctcgccatcaacgagatcttcgagcgcaacccaaccaccatcaagaactacggcatctggctgcggtaccagagcaggacggggtaccacaacatgtacaaggagtaccgcgacacgaccctgaacggcgccgtggagcagatgtacaacgagatggcctcgcgccaccgcgtgaggtccccctgcatccagatcatcaagacggcgacggtccacttcaagctgtgcaagagggacaacacgaagcagttccacaactcggcgatcaagttcccgctcgtgtaccgcaaggtgaggccgcccaccaggaagctcaggaccaccttcaaggcgtccaggcccaacctgttcatgtgatggggctctgcgggcgggctgttgccacctgtgttttgtgtcttagtgtccagagagataaaaggtttttgcttctgcaagatttgctgccccgtggactgagcaattcgatgattttttggatgatgtattgcaaacccttgacttttgtcctactagttatgagcaggctgctctttacttgccctgtctcgcattgcctgaatcttgggaatctttttttttttgttttgtatgcgacacctcagttggagccatgtttggtggaagatttcgttttg

SEQ ID NO: 124471 - DNA, 303 bp, Zea mays
  Clone ID: MRT4577_44996C.1
attcggctcgagctttttaacctgaaattatttcacacacaggcgatactaaagtccccgaggcgttcttccttgccaccgggggatcctgcaaactgaaaacagcaacggatgtgataacactactaacagtacatgtaaaagaaatgactgaaaggatctgttctgtaacatgtgacatgatgaacatttcacgcctgatgggcgagtcaacggcctaactggggagagagaaaaggatgcaatatggacatctggtcacaggatcctctgatcaattgtaccaaacatgaaactacaaag

SEQ ID NO: 124472 - DNA, 493 bp, Zea mays
  Clone ID: MRT4577_44997C.1
tgcggaagctaagacgcacctaccaggcgcaaatgatggatatgactcaggcgatttgtaattactttcctaaaatgaccagagtatctaggccaaaaggaggctatattctctggattgaaatgccagaaatagttgatactcttcagctatacgaggatgcattacgtcataatattgccattgctccaggtagtatgttttcttcatctggcggttatcgtaactgttttcgacttaattttggtttgccttttacagaagagattcagcaagcaatgattgtacttggacaacttttgcatgagcagacaaaataaactttacaattcaaggcaattttaaattaaagagaatttagagaaaaattattatggataccgtggttcataaattaaaaggtcaattttggggaaggggacagtgaacgctatttggcccaactgagtagctacgaccatttatgggcaaactggcggaggaaccacttagt

SEQ ID NO: 124473 - DNA, 304 bp, Zea mays
  Clone ID: MRT4577_44998C.1
ggcggggaacagtttttcctataggaaccggagccaacactcttcacgctcaagggctcagctctagcaatggctgcctccaccatgggggatctcctccacggtcacggacggaacccccatcaaggtgggatccttcggcgagggccgcagcaccatgcgcaagaccgtgggcaagcccaaggcggaggcgtccagcagccccagatacggccccgaccgcggcaagtacctcgaacccttctccgttgagcacccgagctacctcaccggcgagctccccggcgactacgactgtcacacc

SEQ ID NO: 124474 - DNA, 420 bp, Zea mays
  Clone ID: MRT4577_44999C.1
aaaaaccccaggggtccataaaaaaacattggcgtacaaatttattttttaactcggccctgaagcagggaataccatcaacccattacaaccttttttttttcctgaggcaacaaatttgacaaactgtacagcctgaacgttttacaactggtactaaactaacgtccaagttcctacattttcgaatccctgccaaaaaccaaaaaacctaaagttggcagtattatcgggagagctgcaacccccacaagtttgattggcatgccagggaccaccatgtccctgaaggggatgtacccggggccaaacccgacgactttccccggggttggggggggcaaaaggaacaacagctgccccccaacggtgccggggaccatgaaaagcagcgggtgccccccgatggacttgcccagc

SEQ ID NO: 124475 - DNA, 509 bp, Zea mays
  Clone ID: MRT4577_4499C.1
cgggacgcccaggctaagggatacctttagctgtatctacgacgcgtcgcaggaagacccgccacgctcgctgagcgcttcctgcacgaggcgtcattcaaccgctgcaaagtgccaacgccacctgcacgcagacgggctgcagcggcgactgacatccaccgccggctaaacaatcaccgcccccgatgaatcggccatctgcaacggaagggacgcgagcgatgcctgacactgcggcgggccacctgccgacgccaagccaaccgccaccagcccctcatgcgacaaactgggtgcacatggcgactgcaccatgccacgacaacacgcaaccaaccacgacgaagcctcattatgagacacacggatgcgcggaccaacatgcatatgccactgcgagccagatgatagaaaactatctctgggagactacctattctctgggccagagcgtcgagttcctgaggcatcagtgcggaccgacggagaagcccggccgctaggcc

SEQ ID NO: 124476 - DNA, 196 bp, Zea mays
  Clone ID: MRT4577_449C.1
attacgctgtctctgatatattgtggtgcagacgactgggaaatcaagctaccatggtgaggcgaacacgggtcgtacgaacacgaccggccttatccctcgctaggggaggacccgagctacctgttgaggtccaagcccgcccgtcagatcgtgccacgacggaccttggccagaatgtactgaggaatttcag

SEQ ID NO: 124477 - DNA, 2997 bp, Zea mays
  Clone ID: MRT4577_44C.1
atggcgcccaagaggaagacctcgagttcgtctgctgtggtgattcctccaatcgatcccaacagccagttgcctttcgcaggtaaccacatgtccgtcatttctgagactgaacttctccacctcgtatctatcggggttcttcctccgcgggaactctgttcttggcggatttgccatgggtttactgttccgactgaggatacccatgagtccgttgtctatgcctctttccttctctgtggccttggccttcccatttctcccttttttcgtggcctccttgatttctaccatcttaacttgacccatttgaaccccaattctatcctgcaaatctccattttcgttcatttatgcgaggcctttcttggcgtgctgccgcatttcggtctgtggaaatacttgtatcattgtcgccctgggatggccgggggacaacatcagttggttgggggtgccagcttggagatgtgccgtgggaggaagactgaatatctcgagatccctctcaaggacagtatcaagggatggcgcttggagtggttcatagttgagaattatgggaattatctcccctcccggtcgggaagacagtcggacgttcgcaccccaagctggactgagtctcccacaaatcaggaggtagctgaggcaggtgtgttgctagctgaagttggactgctgaaagagaggggtatgactgctgaagccgtggttactgattttgttttcaagaatattcagcaattgaaagacagggccgacccagcttatctgtatcgagggctagccgactcaactcgggttactaacagaagaattccctctgcagacttggtgagccgactagagatgatccttatgggcaaagtatcaaatgttggtgctctagtggcgtactcggcctggaaccttcctcctcccaaagctttcaccctttttgtgtcgaatccacctgtcactgatggcagtttgggccttagagtgcgaccctctgctgaagaagttagtgccttggttgcctcgcttggggagattcctgatgacgaacgacaggtccattttgaggtgcccctgaaccctagtgatgcagagataagcgctatgcttgatttgctggctgaggattcttccgacgctgctcctgctggggcgttggtagtggcgcccctcccggaggctgatacgactttggatactcagaagcctgtcagtactcgcccgaggcgcccttgccgagccaatcagcctgatccttctgctaatgagcagaagaagaaaagaagacgcctccggcgagtatccagtttggatcgggacgctggtacctcagtttgtgctactgaagaagtgcctgcgactggatttactgatgctgaccccaatgggtgtacccaatccgctgttgatcccaatgtgggtgctccatctgttgttggtcccaatgggggtgctgcttgtgttgccaatgtggacgacgaggaggaagaagatgaagttcctttgactcgaaaaaacagtcggcagttcatcgccagcggtgaaagtagtggagttccctctcctgctttgtctgccctcattagtctgcaagaattgtccctggccaactttgatcagactcttgaggatatggttccagaggacttgttatcggagccagtggatgatggtgtaatggaggcttgcgctgacgtgcctgatgctgggttgcggtcatcccgtgcctcgtcgaccttagagcgcgatctcgagggtcgggagactgacttggatcgtcctggtcctatggaagtagctgagggcccgtcaaccttagaggtggctactgcagagaacttggaccccaaggatggtgctgacacatgcctagcccccgaggatgtcgacggggatgacttggctcgggtggggagtgtaagccactgcccagcccccgagggtgctgccggggatgatccggctcaagtgggcagtgcaaactacgacccagcccccgagggtgcccgagcggggtctccctcctgtacttccatggacgttcatgcgggatctcctccacactctggctgtatggtggtagcccaaaccttggaccagggagtcgctttagagggcagcgtccccgctgaccgagtgtttggatctgttgaaggcaccgagctgattcctactggttcgttgcaagctgcttcgggtggtggccttacgcctgcttatcaactgatctctcctgatttggggattccttcgttcttttccaacctccaggctttggtggatgggatggctagccagctgagattacagggtgcttccgtcccagaagtagcttcgtctcttgcatgttggaatccagtctcacttcaacatcgcatctctgaattggaggcgaccaacgctggaatgactcggcagatttcaactcttgaggaaaaacattcccaggatcaggctgaattggtctccactgccttggatgacgccaatgcactgagttcttctcttcatgctcagctcaattctgaaaaggaagaaaagtgtatcctcgctgcctctcgtgacagtcttgacagattgtatcgtgattctagcaactcgctgaccatcttggagaggagtcaccactttacaatggaagaattggacaatcaacgctgtaagctgcaggaatctgcggatgaagtgacccgcctcaagcagttgatatcagcaaaggatgctaccatcaaagaactccgagcttccaagaaatccattgttcaggagttagaaactgctcgactggctgctaaggttgccgaagaaacttctgttactctcagagcccagcgcgacagagccatggacaaggctattcgggcggggcgaatcttgatgaggagacccggcgtggttgttcctgaagacataagggctgatgtgaatgctgcccctgattcctcaagtcgcccttcttcgtcggtcgctcctgagaaagatattgcgaaatag

SEQ ID NO: 124478 - DNA, 446 bp, Zea mays
  Clone ID: MRT4577_45000C.1
acggtgtcctggattaccggtcgcctcccttccggtcccctgcctgcctaatccctacggcgcaccccgaaaccgctcgctcggtcgctcgctccccttgcgcagcaattgacagggactcatctggttgccatctttctgtgagctcttgatgttgaacctctacgagtcatgcacgcaacatgtttcatactgttgttagtcttggtcatgggctcttggaactgtcatgcgttcactgggtcagaacccaacggaggctgaactgcatgacataagcaacgagagggatgtgttatgtattggaactaggaccctgaacatttttccctcctaatgcaaattacacaaagcccttgaatcttcactaaggttccttacgttctttttggttggtttctgcaatcataccatgactttagcatacagatccattacctttttaa

SEQ ID NO: 124479 - DNA, 265 bp, Zea mays
  Clone ID: MRT4577_45002C.1
tgagaatgtcatttgctaatgaattttaaaagcatatataaaacaaaacaaacaacctgccacaatgtgatatgtgtaatatcatttcataaaaatccctcttcctccaaagcctgggcagaaatgtgctgcaaagagttatatgacttcttgttcatgttttgctaatgctcgtatctccttgattacataatgttagtagcactgagacccccatggtaatgtaacttaattataagctatgtcactaccctcctgtaaaata

SEQ ID NO: 124480 - DNA, 548 bp, Zea mays
  Clone ID: MRT4577_45003C.1
gggttggggttgaaggatttcttttccggccgttaataaccctttgcaaagaaactccttttaacgcccgggcgtttttaataaacaaaaacttaacttttttaacacccgaacttttttaataatggcaaaaaaacccccacataatagcttttttggagggggtttttccaaatggaaacagggtccggggggggcccgctgtttaaattccaaaggggtccggggggggcttgcttaaaagttaggggctcaggaacgggcaaattacagggggacagggatgttcaaaactagctcccaaaacactttgcccctggctggggatgattagcaaaaactagccgcttttcaattcgttttcaaagctcccaggttgaaaaacaaaatccatgacaacgtcggtcaaaaacattgcattgaatttgccggtttttttccaccagggacagatcctttagggattgaatagcgccaaggggggggaatcaaaaactacagttggacagtctttcggttttcaggtttccggaaaaaaacacaaattt

SEQ ID NO: 124481 - DNA, 807 bp, Zea mays
  Clone ID: MRT4577_45004C.1
ctcgcggccggccgggactctcgatctcactccatccccagtcactcgtctcactgcgaccgaaacagcgcggcctcactaaactaacccagccatgctggccgtgacggtgagccaggttgtggcgctgctctccaaggcggcgggggccgaggccgagcgctggcggcgacgttgcggcggcggccacgaccgctcggcgccgtcgccggcggtggggtactgctgcgtgtgcatttcggcgtgccgcgacgacggggacgacgtccggaggctgccctgcggacacgccttccaccgcgactgcgtcgaccgctggctcgcgcgctgccgccgcacgtgcccgctctgccgcctgcacgtggccggcggacctaccgtgggtttcgtcgaccagcagcagcttcagctcagcgacgacctcgtcatctggttctcttcgctcttcgtcgccggcttgtagttgtaggtagctacagggctcgccccgcccgcgcacgcacccgccgtagggataagctagcaatgtgcctctgccaactgcctgcgtacgcgcataaaagtattaaagcttttcctgtggttattaaaaaaaaatgttcggaggacaaaagtctcttcggtcctgctacatcatttctatatcgactcctccaaatctaccgcttggtttaaattatgtaaaccaacacgttgtatagtggaagagttgttttcgaaatctatcgtaactgcttccacaatgtatataaagatggttggtttaattccctgataaaaacctcctcaacggcaacctttattttt

SEQ ID NO: 124482 - DNA, 481 bp, Zea mays
  Clone ID: MRT4577_45005C.1
ccgggaaaaaaaaaaaaaaaaaaaaaaaaaaaaaaaaaaaaaaaaaaaaaaaaaaaaaaaaatcagcctccatcaatcagctaccgaccgaagtaaatatatgaactaggcttgcaggcaaacaaaaccattcatatggatagggggggtgtacctaccggccggccagctggcttctatccgcgcttgttagcaacaagggttgcccacccagcggaccaaaaaacaaacggaatgaagggcggttgggtcaaccaagcccactgaccgaacaagaacgaacaagcaggggggggattcatcgaccttcaattaggtggcaagcaaaagaacgaacaccgacggtttaataccaaccacctccctgagggagacaaacacggccgctagatcgatcccctccctgctgacctacttcctgaggaaggacagctaaatcaagactgattggttcaggcacacacacagggcaacaaacaat

SEQ ID NO: 124483 - DNA, 461 bp, Zea mays
  Clone ID: MRT4577_45006C.1
tcgcccttcctagcgtcgcgtggcctccttccgttactctcctcccacctctctcagatctacccacccctccccgccttgtgttgccaccggccccaaaccctacccccgactcgttggatcgggtcagacctcgggctggcgccacgaggagcagcggaggcgcccgctgcgtcgatgcggagctgtatcgcgacctaccgggagagcctggctcggctcgccggcgaggaccacgacggcgctgccgactaggcccctgggccgtcgctcgccccagcagataggggcggtgacatatgcgccacgccaccgccgtcgggaaggcgccgacggaactgccgacctggccccggctccgaagccaccgagcgcgaggagatttgtaaactgagggatgacattcataagcttcacgcttctgaggttgaaatggaggcactagccaccaattatgctgc

SEQ ID NO: 124484 - DNA, 302 bp, Zea mays
  unsure (1)..(302): unsure at all n locations
  Clone ID: MRT4577_45007C.1
gttccaactaatccattaacgtagcttcatctccatcttcctcaattctccaccacttccaccagcaacgactcgccgagagcgacagcgagatgggcagggtggcggccaagcagccagggttcggtggcggcctgagccggttatatcgtcgagccaggcgcgctggaactcggcgacgatgacgcggtggtgcttagcggcagtgagggcgcctctggagcatgatggncgccaggctgctccatcagcccgccgctcggcttcacgtgtagcagccgtcgccgacggcgaccccaccc

SEQ ID NO: 124485 - DNA, 262 bp, Zea mays
  Clone ID: MRT4577_45008C.1
tggccagttagaataccctaaatagggttgactctcatcacatcttatgaaactacagggactaccttcgaggactggcagatcacaaattcatccctccttagccccagaggccaaggtgccactcaaccatggcaggttaactcatttccatgtgggaaagcttggtaagcctgactgtcgaccaggtgctgaaggagcctgaggtgcttgggggcctggcatgcgcactcgaggattgggtacccttggatggactgcc

SEQ ID NO: 124486 - DNA, 287 bp, Zea mays
  Clone ID: MRT4577_45009C.1
gaacaaccgcagtcgaattgttcgtgaaggctggcagtgatggggccaagattgggaactgcccattctcccagagactgttcatggtactgtggctcaagggagtcaccttcaatgttaccaccgttgacaccaaaaggcggaccgagacagtgcagaagctgtgcccaggggggcagctcccattcctgctgtatggcactgaagtgcacacagacaccaacaagattgaggaatttctggaggcagtgctgtgccctcccaggtaacccaagctggcagctctg

SEQ ID NO: 124487 - DNA, 694 bp, Zea mays
  Clone ID: MRT4577_4500C.1
cgattattgagctacacaggcacaattcaccatgatcccatcccccactcaaacctgcaaaatcctgtagccgaacatctcgatggtctcacgtgccattcctttctacaggaataggcctataactgatttcaataagtttatgctgcatttcattcagtgtgtttggatgcatatagagaacacgaagtttaatgtgtttggtgcataatgagaattgaggaaatgggacattctagcatgctatgtgaattgtgaaaggctatagattaatgtgtacaggtgggaattcattatcggtttactaattatatagctgtttttccctattatctctctcaatttactgtgtataatgtactactaatctggaaattgatgtatgatagcattttttatgttggaactgcctacatttatgttggtgccgctcccacgagcgcaccaggacgccggcttggaggtacttgcacacaagggtcgagctcggacgtcgtagcggtgcggagggcctcggccgtagcatgctccgcccctgctggcagcccggctcggggtgtgagcaaaggccacaaggccgagcctgctgcctttaatcttctacgctcacagaactcacgctttaagctgtcgcctcacgatgggtgcttcttcaccctagtattcaaaggcccgttattatgagattgtgtag

SEQ ID NO: 124488 - DNA, 3147 bp, Zea mays
  Clone ID: MRT4577_45010C.1
atgccgcgcacgaagaatgtgtcggcgccagggggaggtgatgatgaggatcctcgtcgccccttcaggcaggtcaagggcaagacagtttacttggagcagcaggaaggccgcaagaagcggcgtacggacagagcagcccgtgcagcggcagcggcagcagcagccgctgcgcaggccgagcttggagatcagccacagactccatcagatcagattgcataccgtgttcgtcgtctcgcctcccggcctcgcccctccactcacaccactgcttccactcctccacccactctgcctgctcccgtcaccccagttgcaccatccaccaccacagccatacccgctacctccactatgccagcttccactgctcctcctgctcccgcttcagctcctcctgtccctccacctcgattccgggagcgagatgagactgaggtacgaccacttgctgtagatcccagactttttgaccttcagcgtgctacagcggcacgggtacgtaggttcagatacgtacccgtggagtcttggttaccagctcagagggatcctgcagcagttgacctatttagcacccgtattcaggagtcttttttcagagctcagatgtctgctcagatagctctgcgagtgcactggctcttggaccttccagcttttctgctcgccgccggtgctgactctgaggcgcacctcacatatctgcctggccttctgacccttttgactaccagcgacagcatctgctacggcacctatgaccctcctcgtcgccctcacggcggtgtggctccgggtacagctcacgtcgcggctctgttccgcccgcccttctccgatgggtcgcgacgttcaccggcagattttactacagcagccaagtacttatttgagcttatcagacggactcttctgccgaggatgggatacagggaggcaaccacacatattcagctctggctccttggtgccctggtctctcactctgagtttgacgtcgtggatttccttatttgtgagatcgaggacaccgttttggatggcattcgtgctcgtcgacagttgtcatatgctcactacttgtgccacatctttgcgcagctgattcggcctccacagtttcagggcacgcttgaggcctcacgccttgtgtttggatcctaccgtcctacgcctgaggctcctgtgccagcttctgctccagtttttgactctcaggacgaggatgcaactcttcgtcagttcaacactcaggatacagtagttgatgatgatgatgatgatgatgatgatgatgatgattttggggttcctcctccgcctccgcctcctatgcctccacgctcacatgatcatgaggctgggagttctagtgctacccctgctgctcctccggctattgaccctgctattgcttcgattctccagtctctcactcagcagcaggctcacctggcagccgagcagacccggttgtccgagaggatgctcacgatgtttcagaccatacaggacagacatgattcacttcagcagcagctacttcaggattgggctgagagcagggcattcatggctcttatgctacaacattctggtgtctcagttcccccagttcagtctgctccacctcctccgcttcaggctccagttgtgccagcgattcagaccggaccccctattccttctgttggtccttctccgctccggccggtcacttttggcttttacgtcaccgagacaaatgaaaagcccaattcaccccccctcttgggcatcgtgatcctttcagcatccatccgtatcgcccaatgggcagccgaactctctgaataccacatcaccttcgagcccaggacaacaattaagtcacaagtcctcgcagatttcatcatcgactggacagggccggcacggcagcaagaagagccctcagagaaggtgtggaccatccactgtgacggcacatggtgccatgcgggggcaggcgcggctgcatatatcacatcacccacctgcgtcaagcacagatacgcagcatgcctcagcttcgctctggaatctgacaggtgcataaataacatagcagaatccgaagccattatcctaggccttcgcaagctgaaagcactcggcgtgaccacctgcataatcaagacagactccaaagtcgtcgctggccagatcgaaaaagactattcagcaaaagaccccacacttctgcagtatcttacggtcgttcgcagtcttgagaagcaattcaagggtttcaccctgcagcatgtggatcgcgctagaaacgaagaagctgacgcgttagccaaagcagcagctagaggcgaagccctgccctccgacgtgttctaccacgtcattggcacaccagccttccgtagcccagagggtctgcaaataaccaccaacgccgagggccatcgcattgtcgacctcatcatggccgaagactggcgggccccaataaccctgttcttgcaaggatattaccatccaagtgatgtcaacgaggccaagcgcctcaaacaccaaagtcaagacttcacacttattgagggccagctatacaagaaagggatcagtcaacccatgctcaaatgtgtcacagagaccgaaggcctccagatcatgcgcgaagtccacaacgatacttgcggctctcactcggggcctagggccctcgctgccaagcaaaacattatctgccgatttggagtcccgtctgagctcacagtcgacaatggcaaacagtttgacagccaggacttcagggacttttgcttctccattggcaccaagctcgccttcgcctcagtatatcacccacaatctaacggcgtcgtggagcgcgccaacggcaagatcttcactgccatcaagaaaatgctcctcgacgacaagaagggtaaatgggccgacctgctacctgaaccagtctgggcactgaacacgaccgaatgccgggcgactggattcactccctttcgcctgctatacggattagaggccatgaccccgcaggaaatcaaacatgggtcaccacgaacaagcgctttagtcgtccccaacgtagatgaaccaacctccaaagacctcatcgacggagaccgtggcttcgccctgtag

SEQ ID NO: 124489 - DNA, 1416 bp, Zea mays
  Clone ID: MRT4577_45011C.1
atgacggagttggaaaaaattgcctacgcagtcgtcatggcatcacgcaagttgtgccactacttcgaagcgttcaaggtgcgggtcacctcggacaggggactcggcgaattattcagaaatccggaggcatccgtctgtatcgccaaatgggcagccgaactctccgaataccacatcaccttcgagcccaggacagcaatcaagttgcaagtcctcgcagatttcatcgttgactggacagggtcggcacggcagcaagaagagccctcagagaaggcgtggaccatccactgtgacggcgcatggtgcacaaacaacatagcagagtacgaagccgttatcctgggccttcacaagctgaaagcactcggcgtgaccacctgcataatcaagacagactccaaagtcattgctggccaagtcgagaaagactattcagcaaaagaccccgcacttatgcagcatcttacgaccgttcacagtcttgagaaacaattcaagggtttcaccctgcagcatgtggaccgcgcaaggaacgaagaggccgacgtgttagccaaagcagcagccagaggcgaagccctggcctccgacgtgttctaccacgtcatcagcacaccagtcgtccacaatctagagggtctgcaaataaccaccaacgccgagggccatcgcatcgtcaacctcaacatgaccgaagactggcgggccccaataaccctgttcttgcaaggatattaccttccagtcccgtccgagctcacagtcgacaatggcaaacagtttgacagccaggacttcagggacttctgcttctccattggcaccaagcttgccttcgcctcagtatatcacccacaatctaacggcgtcgtggagagcgccaacggcaagattttcactgccatcaagaaaatgcttctcgatgacaagaagggtaaatgggtcgacctgctacctgaagcagtctgggtgctaaacacgaccgagtgccgggcgactggattcactccctttcgcctactatacggatcggaggccatgaccccgcaggaaataacacatgggtcaccacggacaagcgcttcagtcgtccccgacgtagatgaaccaacctccaaagacctcatcgacggagactgtgtcttcgccctgcaggccctcaacaaataccaagctcaaacgaaggcctggcgcgaccacgcagtcatcccaagagaattcgacgaaggggacctcgtactcgtccgaacaacccggacagagtcacggggcaagctggagccaaagtgggagggtccattcattgtcaagatgaaggcgtcccccagcgcgtacaggctaacaacgccatctggcgagaacctagagcattcctggaatatcgataatcttcgcaaattttttgtttga

SEQ ID NO: 124490 - DNA, 390 bp, Zea mays
  unsure (1)..(390): unsure at all n locations
  Clone ID: MRT4577_45012C.1
ncgctcgcgtctctccgccggtttttcatccacttccgacaacaactacttgccccgggcttctcgcggatccaccgtgtgtgcttggcgctctatctttccactgtcgctgtacgatgttagcccaatggctctgctcgccagttgtacgtgggacaagtcgctgtccctctgttccatgatcgcacttggagctacatgtgccatcccggtgttccggaccctcgtggaccgcatcgattggggagcggcggctttctccgtggcggtctactgctatgtcgtgcttatctagcacctgctttcaatgctggagaacgcggtcccatcgccggagttcctctactagttcttctactactacacatgatgcttaagcgctgctcatca

SEQ ID NO: 124491 - DNA, 2135 bp, Zea mays
  Clone ID: MRT4577_45013C.1
gggggggggggcgcgtccggtcgcggtcgaggcagcagagcgaacgccggcggagggtcagagtcagtctcggatcaaggatctgcggtagaagctggagctggtactgactcggactgaggccgcgctgcaggagctgccggaacagaagaggtcacagatactgccatagcagtagtggtaacagcagatgctggtggcactggcggctgcgggcagacagagctaacaaccggagaggtgaaagccaaagtgaccggccggagcggagagggaccaacagaaggaatagggggtccggtctgaatcgctggcacaactggagcatgaagcggaggaggtggagcagactgaactggaggaactgagacaccagaatgctgtagcataagagccatgaatgccctgctctcagcccgatcctggagtagctgctgctgaagcgcatcctgcctgtcctgcatgttctgaaacatcgagagcatcctctcggataaccggtcctgctcggctgctaggtgagcctgctgttgagtgagagactggagaatcgaagcaatagcagggtcaatagccaaaggggcagcaggggtagcactagaactcccagcctcatgatcatgtgagagtggaggcataggaggaggaggaggaggaaccccaaaatcatcatcatcatcatcatcatcatcatcaactgttgtatcctgagtgtcgaactgacgaagagcagcatcctcgacctgagagtcaaaaacaggagcagaagctggcacaggagcctcaggcgaaggacggtaggatccaaaaacaaggcgtgaggcctcaagcgtgccctgaaactgtggaggccgaatcagctgcgcaaagatgtggcacaagtagtgagcatatggcaactgtcgacgagcacgaatgccatccaaaacagtgtcctcgatctcacaaacaaggaaatccatgacgtcaaactcagagtgagagaccagggcaccaaggagccagagctggatatgtgtggtagcctccctgtatcccatcctcgacagaagagtccatctgatgagctcaaataagtacttggctgctgtagtaaaatctgccggtgaacgtcgcgacccatctgagaatggcgggcggaactgagccgcgacgtgagctgttcccggagccacaccgccgtgagggcgacgaggagggtcagaagtgtcgtagcataggctgtgaagtcgagtcgtcgactcgggaaatccaaagagctggcgaatctgactggcagtaatggtgacatactctcgctcaaaacgaaacctcatccagtgatgatccgggtctatccatacagacgcgtagaagactcggacccactcctcaacatacctgccgctggtagtcaaaagggtcagaaggccaggcagatatgtgaggtgcgcctcagagtcagcaccggcggcgagcagaaaagctggaaggtccaagagccgatgcactcgcagagctatctgtgcagacatctgggctctaaaaaaagactcctgaatacgggtgttgaataggtcacctgctgcagggtccctctgagctggtaaccaagactccacgggtacgtatctgaacctacgtacccgtgccgctgtagcacgctgaaggtcaaacagtctgggatccgcaacaagtggtcgtacctcagtctcatcgcgctcccggaatcgaggaggagggacaggaggagctgaagcgggagcgggaggaggaggagcagtggaagctggcatagtggaggtagcgggtatggctgtggtggtggatggcgcaactggggtgacgggagcaggcagagtgggtggtggagtggaagcagtggtgtgagtggaggagtgaggccgggaggcgagacgatgaacacggtatgcaatctgatctgacggagtctgtggctgatctccaagctcgacctgcgcagcggctgctgctgctgctgttgccgctgcacgggctgctctgtccgtacgccgcttcttgcggccttcctgctgctccaagtaaattgtcttgcccttgacctgcctgaaggggcgacgaggatcctcatcatcgcctccccctggcgccgacacattcttcgtgcgcgacat

SEQ ID NO: 124492 - DNA, 286 bp, Zea mays
  Clone ID: MRT4577_45014C.1
acaaaaaactctacaggagcggcaaaattgaggagcatattcgcgtcagaacagattacaacatgaaatctgcttgggacgggtaatcccgagatcagcaattctgcataagttttgagatcattgccaggttatcaaatttttttaaaaaaaaaaactcttatccaatggaagttacacatatgggtagtttcactgctattggaacaccttccaacccttcaggttcttaggtgctatttcagatgcccctaattgagctatatactaccataatggacctgac

SEQ ID NO: 124493 - DNA, 267 bp, Zea mays
  Clone ID: MRT4577_45015C.1
tgaaacatagatcagatacaggctgtcataagtgatggaattatcgctcctttgttcacaaatgcttcaaggagcacagtttgatatcaataaagaggctgattggggcatctcaaacgcaacctctggtggttcccattagcaaatcatctaactggtgtctgaatgctgcatcgtgccgttgtgctacctacttgtgtgccctgatccgataattgtaacagtttgtctcgatggtcgtgagaatattctcaaagtaggtgagca

SEQ ID NO: 124494 - DNA, 1321 bp, Zea mays
  unsure (1)..(1321): unsure at all n locations
  Clone ID: MRT4577_45016C.1
cctcgaggccggccgggactccaccctctctctccattgtctccattattttctctctcctccgtctccaccccctttattctctctctcccagctcctcctccctgtctgctcccctccactgctgtggcgctctccctctcccgtctcccctcaccttctccacctcccccattccgccaccgcacaagccgacctccctcaccaagaggagaaaagaaagggagagcgaaggaggcaaaccaggtgggacagcaacgcgacgtgcttgctattctctcgaggagctcatgcaaggtgtaagtcttactgcaagaagggcagctgtgcatgttaagacccatacatagcctctcttgattacacagcacggggggtgaaaacttgagatacagttgatctcctggttcagagtatgggttcaaggtttgcatcgcatcagctgagcaatggcctgtatgtttctggtcgacctgagcaacctaaggagaaggccccaaccatttgttccactgcgatgccatatactgggggtgacatcaagaaatcaggagagctggggaagatgtttgatctccatgttgagaagtcaagaaaatctggtcctctaggaaatgctccttcaaggaatacttcatttggaggtgctgcttccaactctggacccgtatccaatgctggcggtcggtccaattactctggttctctttcatcttcagttcctggtgctggcggatcagccagagcaaaatcaaactctggaccgctcaataagcatggagagccaacaaagaggtcatctggtccccagtctggaggagtgaccccaatggcacgccagaattctggcccccttcctcctgtgcttccgacaactgggcttatcacatctgggcctatctcttcagggccacttaattcgtctggtgctccaaggaaagtatctgggccacttgattctgctgcgtcgatgaaaatgcgggctacttcctttgctcacaatcaagctgttactaatctcaacactgaagatggttactcaattcagggaagctttccgaagccaatactctgggctgtgattttgctctttgtgatgggttttatagcaggtggcttcattttgggggctgttcacaatgcaattttgctgatagttgttgtggtcatatttggttttgttgctgcacttcttatctggaatgcttgctggggtagcagaggtggaattgggtttgttagtcgctaccctgatgctgatctcagaacggccanagatggacaatatgtaaaggttataggggntggtanttgtggaaat

SEQ ID NO: 124495 - DNA, 936 bp, Zea mays
  Clone ID: MRT4577_45017C.1
ggtacccctccgaggtccggccggggatcgtctacctatattattttatctccccccgtctccagctccccctatattctctctctcccctcctctcctctccccagctacgccagtcctcctccctgtctgcttcggtgcttcgctcccgcactgcgcttggccgcttgccctctccccgcaccttctccacctcccccattccgccaccgcacgagcagagctccctcaccaagaggaccaaaaaaaaaaaaaacgagggaggcaagccaggcgggacagcaacgcgacgcgcttgtcattcactcgaggagctcatgcaaggcgtaaatcttattgcaagaagggcagctgtgcatgttaagtctcaaatatagactcacttgataacactgcatgagaggttgaaaacttgaggtacagttgatattctggttcagagtatgggttcaaggtttgcatcacatcagctgagcaatggcctgtatgtttctggtcgacctgagcaacctaaggagaaggccccaaccatttgttccactgcgatgccatatactgggggtgacatcaagaagtctggagagcttgggaagatgtttgatctccatgttgagaaatcaagaaaatctggtcctctaggaaacgctccttcaaggaatacttcatttggaggcactgcttccaattctgggcctgtctccaatgctggtggtcggtccaactactctggttccctttcatcttcagttcctggtgctggtggatcagccagagcgaaatcaaactccggaccactcaataagcatggagagccaacaaagaggtcatctggtccccagtctggaggagtaaccccaatggcacgccagaattctggcccccttccctctgtgcttccgacaactgggcttatcacatctgggcctatctcttcag

SEQ ID NO: 124496 - DNA, 277 bp, Zea mays
  Clone ID: MRT4577_45019C.1
ttcttaagcagtggtaacaacgcagagtacttttttttttttttttttttttttttttttgttttttttttgttattttttttttcatttttccattcttacgtatctattttgcctacagtagtgcgttcaggagggttgaaaagggaagaaccacatgcccttggagcaaatcagttggggggggcggaaaaccaagacgggtcgctagggcaagtcacttgacggaggggggaaaccaagacaacctttgggcgggctgcgcaagggggccgcg

SEQ ID NO: 124497 - DNA, 443 bp, Zea mays
  Clone ID: MRT4577_4501C.1
cccaacccccccccaaaaagataaataaagggccaccaaaaaaaccaggaggggggaaaacccggtttttttaaaggggccggcccggaaaaaaaaaaccgggcgcccaacccagaaaataaacccgaccgttaattttgggaaaaaaacaaacccgccgggggcggggttaaaaaggccctcgcccccccgggggggcaacccccaaaggaaaaataaccaagagttttcccgggcggaccctgggggggggggggggaacaaaaaaaaaaaaacaagggggagggaaccccccagaaaaggggggaaccccagccaatccccaaaaaggggtcctgggccaggggaaaggcccccgtttccccccacggcccccggggaaagacaaatttccccatttccggaagggggggcccttggttcgggaaaggggggaacccggg

SEQ ID NO: 124498 - DNA, 408 bp, Zea mays
  Clone ID: MRT4577_45020C.1
gccacgctttcgaccattcgtccgccacgcgtccggacgccgccctgagccacgggctgaggcttacgaaggggggttccccccccaccagcacccaagagttgtgagaaaatggctgagggcaaagacatgcagcctgctgtaagcaacaaaccgggggggcaccggcgcgcgagttctacagaacggactacaccgacctgaacgcgaccaccgactctgtagtgacgggatgcaggaacagagatccgtacgaccctgaacctgggacgaacgtacagagctccagcgagacaggtccatcagatataaatctataaaaaaaaaacggcccattattgtaactatgaacatctatcgaccacaaaggaccggcatgcaaggccagaatcaacgctgaagcaacat

SEQ ID NO: 124499 - DNA, 154 bp, Zea mays
  Clone ID: MRT4577_45022C.1
cacccgggaagggcccgttcgagaacctcgttgaccacatggccgaccccgtaaacaacaacgctggggcctacgccaccaacttcgtccccggcaagtgagggaggcgcccgcggtgacctttaggtgtccggatgcatgtgagcgcacgctg

SEQ ID NO: 124500 - DNA, 446 bp, Zea mays
  unsure (1)..(446): unsure at all n locations
  Clone ID: MRT4577_45023C.1
cgacgccacgaccgtccgcaaccaagggcaacgatatgaaagttggtaatctctatgtagcacacaaatatgacgcaaccaagtggcggagcgcaacgatattattcgcctgcgcttatcgcatccattcgcttcttttcatgcaatgatgttcgcttaacccgcgaccaannttttcccttcaatctgctcaccaacgcgtcctatacgcttaccctttacttccctccataccccttctcatcaatgatacgcttttcacgtatgtgaaaaaccccacgctctttcaacccctatatggctccaacccaagcaatcgcagcaatgcaaccaatacctttatcancccttgtttcaacacatctgccagctctatctttggtgcagtcattggtacaaaccatcagggcacaagagctgcagcaactcgtgctacctgtgatcaa

SEQ ID NO: 124501 - DNA, 253 bp, Zea mays
  Clone ID: MRT4577_45024C.1
gtttaccaattaaactaggaaatcttgtctcataaaaacaaccctcctatacacctccttgtacttctaggggagaatgtttctaaaaccctagtatcttctaaaggggttcaactgtcaaagattcgtacgcccttttggatgctcagggccttcatgaatgcaaggaatgaacaatagaaacacctgggctcaaactacagcagcagggcggagtaaccaaccagatcgcacattgggcacaaaagctgtg

SEQ ID NO: 124502 - DNA, 368 bp, Zea mays
  unsure (1)..(368): unsure at all n locations
  Clone ID: MRT4577_45025C.1
tgcgtgggggggatcgtcgtacagttcagggtgttgatggtcatggttctcgtcgtgtgcctggctctgtcagctgccagcgcctctgctntgcagatgccctgcccctgcgcggggctgcagggcttgtacggcgctggcgcctgtctggcgacggtgatgggcgcctgggggctgtgccccttcgcggtgttcctgaggtagtgcgagtgcattccgttggcggnggtgccctactacgccgggtgtgggctgacgagcgccatgttccagccggtccggcaacggtgctgccggctgctggtgagggtgatggacgtgcatttcgttgcgcagcatctgttgatgatgatgctggttgagcgtgc

SEQ ID NO: 124503 - DNA, 1118 bp, Zea mays
  Clone ID: MRT4577_45026C.1
ctgttcctgtatggaacccttccttcttgttcctggaacccaattcgcaacccttcgccaccgaccctcgagtcccgaagggcgcagtgtccagaatcatcccccacccggtcctcggcgatcgcgcggaagctggcgacgcggtagagggagaggcagcgagggttagctggaaatggacggggcggagaagctgcggtgggccttctcggacggcagcgtcaccgatctcctggacgcccgcagcctccacggctcccccgacattaagaaaaaagtacagttccattcttctctagtgcaaaagcttgctttggaaaaggagatggagggtcacgtaggttgcgtgaatgccattgcgtggaactcaagtggttcgcttcttgtatcaggatcagatgacactagaattaacatctggaattataataaccgagagctggtgcatgatattgacaccggccattctgcaaatatcttttgcacaaagtttgttccagaaacatgtgatgaagtagtagtctctggagcaggagatgcagaggttcgcgttttcaatatgtctcgattaagtggcagaaggcctagagaaatttctatggaaccaacagcagtttaccagtgtcactcaaaaagggtcaagaaactagctgttgaacttggcaatcctaacgtagtgtggagtgcaagtgaggatggtactctgagacaacatgattttcgggagtgtagttcctgtcctcgtgcaggatccgctaatcaggaatgtcacaatgtgcttcttgatctacggtgcggagcaaagaagtctttagccgatttacccaaacatccattggcactgaagtcttgtgacattagctctgtttgtccccatcaaatcattgtcggtgggagtgatgcatttgctaggctgtatgataggagaatgcttccaccattgagctcgtgccaaaccaaaacgaatccgccaccgtgcgttaaaatgttctgcccattgcatcttgctaacagtaagaagacatatttgcaccttacacatgttgcattcagcccaaaagggagggaggttcttttaagttacagtggagaacatgtttatctggaagatgttgacc

SEQ ID NO: 124504 - DNA, 1010 bp, Zea mays
  Clone ID: MRT4577_45027C.1
ttttcttttgatcaaaattacttctcttcaattataatatagaataaaataaaatgcttacaactagctcgtaagtcattgttggaactaccctataaaggtcatgcagccaaatcaaactattcgtgcgctcaagacacgaagcaaggagaaaccccgtacaaaagcgaatggcgagaactagctatcagaaaaaagaatgcagttaaccagacatggggaacaaaaaatatggatcttcaaatcctcattgtccgctccagaaggctgtagaagttacaaaattgcctcacaaattccccgtgtcacacataaccggagctcaaaaatcatctgtagtgccctccaaatttgtattgcttgcatgtatcccagttagcctcaacaaattttcttttgtgccgtggctgcagaagtgcaggctggatggatggacgttccactgtaatgcaagacatcaatctactctacaagtcctctttcacatcttttagtcggattgggtgaattgcgactccattttgagccgatcgaactcgtccccatcttccaaggcgaggctcctggccaacaccagcaacaataaaacgtccagattttgctatggcaagagaattaacaaatccatccagtttcaaatcgaataatggctcggctcccttagaatcaggtttgatagcccagagacgaactaaaccatttcctgctcctgatgcaacaaagtcagaacctcttgttgcagcaacagtaccaacccatgactgggctgcggatggcacattttccggtttatgcattccattttctttaggtgactcgtcatcattgtcaactgaattaaggttagtacacaatactggatgagcattttttattataaggataggctttttcctcattatgctccaaagctcaatgcttccatcatcagatccagacaaaaactccttgtcatcaatgaagcagcagcactactaaagatgcggcagcaggagcacggaacactaacc

SEQ ID NO: 124505 - DNA, 385 bp, Zea mays
  Clone ID: MRT4577_45028C.1
aacagaaccacgactttttcaaataaaataaaacaggtggttttttgggtttacaaaaactgggcaactaattcaactaactgggcggggccaacctcaaggtccacatccttttcatcaaaattaaaattcccttcatcacttacggggggggaatcttacctgccccatgggggtgggtggttatttttttgccggcccattggtgaactttggggggaagaaggggtccccccctccaaacccatttttgggggacggggctggccatttttcagggtttttaaatttcaactcaacaggggtagaagccaatgccttttcaactgattttgcgtcgaactggtcttggaagaccctgtctagccttaacttcatgaaaggg

SEQ ID NO: 124506 - DNA, 709 bp, Zea mays
  unsure (1)..(709): unsure at all n locations
  Clone ID: MRT4577_45029C.1
gggggggggggggggtttttnggtaggttttntcaattgggtacctcgaaggcggccgggccgggttcaatccataaattgaaaccttttcttgtgctctgcctgtgcgtttccaaagcaaacgaaagaggtcgaggatgtcttgcatgtgcggatcaagctgcaactgcggatcaagctgcaactgcggcaagatgtaccctgacctgaacgacaagagagacgtgagctctcaggtcagagccgccgacgacggcctcagcgatgcccctgagacgaagaatgctgagcagatcgaggcggcgttcgagtctggcgaggccgcccacggctgcagctgtcatgacaactgaaagagcaccccctgcaactgctgatcctgctgcgatgcttcgaattgcgacatgcatggatgtcaccttttttttactgtctgctttgagcttgtggtgagtcaagaatacatgatggagccatcgtgtggtctgactctgggtctccgccatggatgcttggtgtcgtgtctgctgcgcttgtgttcggacatgtaatcatatggtatctgtacacaccatgcatctctgatctcttagcgccagcgtgtgcgactatgtccctgcaactattggatcactgattgaatatatatacgatactgttttactagtctcatcataacaaaaaaaaggtccctacgaccctgcaaata

SEQ ID NO: 124507 - DNA, 218 bp, Zea mays
  Clone ID: MRT4577_4502C.1
catgggcaaacaacagaacacctggtttttgacaacactcttcctactaataaacggggtggactgctaaccaaactaaatccactagagtctataacattttgatggacaggaaaactcacacgaatgtttagatcactgacccgccttactcatgagagccgtgattcttttactttagagcatccaactctcttcaagcagacgatatttggcag

SEQ ID NO: 124508 - DNA, 2143 bp, Zea mays
  unsure (1)..(2143): unsure at all n locations
  Clone ID: MRT4577_45030C.1
ccacgcgtccgctcgcctttccgccgcccgtcgcttcccccaaactatcgtgttcaccaccgacggcggcggcgaaacaccttgtcgccctctaccgaaatcccagcccaagcgtgagcgcccgctccccaccagtcaccatggcgccgcgctcccgcaagcgggcttcgcgccccaagccccgcccaggctcccgacgtggtggcggcggaggggacgacgaccccttcttcgagtccgcgcccaagcgccgccgcggggaccgtgacgaggacatagagagcgaggacagcgacgacgacggcgtggctgcgcttggccgcggatttgatgaggatggggacgagggcggtaaggaggatgaggacgaggaaacggtgggggagaagaagatgcggatagcgaaggagtggctgaagaaggtcactgaagtcgctaagagggggcaggaggatgacgatgaggatgagaacgtgtcgggagggagacgggtggcggagatcctgcagagaaagcagctcgaggagagcggcaggaagcggcgggagattgccgcgagggtattaccaccaggccctcaggatggctttaaggttcttgtgaagcaccggcaacctgttactgctgttgctttatccaaggatagtgataaggggttttcaggatcaaaagatggaatcattatgcattgggatgttgaaactgggaaatgtgagaagtatatatggccaagtgaagatgtgttggtttcacatcacgctaaaccgccagtatcagctaaaagaagcaagcaagtgctggctttagctgccagttctgatggtcgttacttggcgagcggtggcttggaccgtcacattcatttatgggatattaggtcacgggagcacatacaggcatttagcggccatcggggaccaatatcatgtcttgcttttgcgccagactcttcagagctattctctggttcttttgatcgttcaataatgcagtggaatgcagaggataggacatacatgaactgtctatatgggcatcagaatgaaatcttgacaatggatgcacttagtaaagagaggattctaactgtagcacgggaccgtacgatgcatctttggaagattncagaagagtcgcagttagtgttccgtgntcctgctgccgnatcttnagagtgctgctgcttcattgatgacaaggagtttttgccacatctttagagtgctgctgctttattgatgacaaggaggttttgtctggatctgatgatggaagcattgagctttggagcataatgaggaattagcctatcctcatagtaaaaaatgctcatccagtatcatgtactgaccttaattcagttgacaacgatgatgagtcacctaaagaaaatggaatacataaacctgaaagcgtgtcgtccgcagcccagtcatgggttggtactgttgctgctagaagaggttctgaccttgctgcatcaggagcaggaaatggtttagttcgtctctgggctatcaaacctgattccaagggagtcgagccattatttgatttgaaactggatggatttgttaattctctcgccatagcaaaatctggacgttttattgttgctggtgttggccaggagcctcgccttggaagatggggacgagtccgatctgctcaaaatggagttgcaattcacccgatccgactaaaagacgagaaagaggacttgtagagtagatgattggtgtcttgccccgtagatgtttatgaagatcacacaggcattacagtggagagcgttcatccatccagcctgcacttttgcagccacgccacagaggaaaatccgtttcgagaagctaaatggatatctgcaagcaatgcgaatttggagggtgctatagcctacagatgattttgagctccggacatgtggcaagagaatttgtgaggcgattttgtaacttctactgccttctgaagcgacaaaaaaaaataatttatgaaacaaggaggatccatattttttccctggttgagggcattcttttttttttctattgactagatctccatcagctattgaagtggcattctcttttttatattggaaaatccacagaaaaacaaagactcgagggggggcccg

SEQ ID NO: 124509 - DNA, 319 bp, Zea mays
  Clone ID: MRT4577_45031C.1
aatacccgtcccgacgcactcattctcacactctttagttactttttaaccaccttatcagacaacatccatacgagactcttagactattaccaatacctgtcaaattctatatcatccctactactcttctacaacaatccacaacaaatctgacctactctgcttctctcatccccttcatcactcttcttatctccctattccatctctattctaggccatgaccatcaactcctaccgactcatcaagttcttcacagttttatacttcaccgtataaaataccatcattctcatattctacaccatcaacaat

SEQ ID NO: 124510 - DNA, 393 bp, Zea mays
  unsure (1)..(393): unsure at all n locations
  Clone ID: MRT4577_45032C.1
cacaatgcacattatttgatgcacttatcaatctatgtgtccctgatatatccgaggattgcggtgaacttgtaggctaanataanataaactacaataaaatttgaatattcattagcacaagcaaatcattacacactggatactaaacttcaactcttctacgaatcagacaatagaggatagcggagtaccagactgaaataaaaaaagtgaaacattacattgctgtactaggatccgcatagaccaatgaacgagattttgacccaagatttccttatagcaccactagtataactgttgacttaccgctacatactgttgatagagagatgcaccaatggaacagattgttcgctcatgtactctacaactacaactgacataact

SEQ ID NO: 124511 - DNA, 504 bp, Zea mays
  unsure (1)..(504): unsure at all n locations
  Clone ID: MRT4577_45033C.1
ttttttttttttttttttttttnttttttttttttttttttttttttttttttttttttttttttttttttttttttttttttttttttttttttttttaaagggggggaaaaaccacttaaaaaaaaaaaaaaaaacccccactggggggtaagggggacgggaaaaaaaaaaaaaaaccacccaagagggggggggggggcaaaaaaaaaaaaaattccaaccccttccaaaagggggggggaaaaaaaaatttaacccccccccccggggaaggaaaaaaaaaaaattaaaagggcctccccccggaaaacccaaggggggaaaacaccccctcaaggggaaacgaaaacttccccaccaaggtcccaccggggggtttgaaactgggaacgggccaaaaactgccgggaaactccttttcctaaagcccaacccttggggggtccccccgggccaagttaaaaaccacctaaaacttgggggtaaacgggggggggaact

SEQ ID NO: 124512 - DNA, 365 bp, Zea mays
  Clone ID: MRT4577_45034C.1
acgcgccacgcttatttgcagcacaactattaccagttttctgttagctactgacgactttcagcaagaacaaggtttttcattcaacgactcgggcgaactgaaccccgatgcttatttgcaggagctgaatactactaccattgagccagcttgctgcggcataccgtgcttccttcttgacacagtatccgttgctgactttctaccagcagtttgaggctaacctggcctccctatgacacctacaagatttgatgtccttcggtcaacttgctatacacaagcgcaccggcctcttaccaacaacacatcattggtggtgccctcctttaaattgcttattaattggaatccaataataa

SEQ ID NO: 124513 - DNA, 355 bp, Zea mays
  Clone ID: MRT4577_45035C.1
gcggccgggacctcgcctgtacgggagtgagcagcacgcgccggcgaaacatgtatttactggtgccggatctgcactcgttgcggatgcgggtcctggtcatgctcgtcgacgacgatctgctcgtcatcatccgcttcagtcgtgaatgggataacatctgcatgcagatgttcgccgagctaatagcagaaaatgacaccatgaggaactttgcggtcttctacctcggtagcatcacataggagcctgatgtcaccaccatggatgagctgtacgacccttcgacagtgatggtcttcttccagaacgagcacatcatgtgtgatctcaggactgcaaactactccaagat

SEQ ID NO: 124514 - DNA, 558 bp, Zea mays
  unsure (1)..(558): unsure at all n locations
  Clone ID: MRT4577_45036C.1
gccaccttnaggtccgcgnagtggtgccttncnncagccctcgttccaacccaaagccaacatcgatnngaactagctgcagaagcctgaagggcaacctatctccttcactncttcagtggcccattgaaaccatggggtgacgggtctcaacaagnnatggtgggcatctacccagctgcattgacnngagctcactatccttggccggcaaccctaacgtcagnncagaggaagnngcagtggagggaaggagnnctcgatcgcttccctttgtcnnctgcttgacctnnctgcannacgccatgcaagaagaactnttgcagnagcttcaggngtcanngcgtccaaggagatgctagctggcttctcaaagagaaggagactngacgtgtctctttcagnngccaaggttcaaagtcttacgcttcgnncttggcccaagaaaggcacagnnaagctagttcaagnaaaggtcaaagcagcaagggcttgccttctgnacccattgaaggnnatgcaagaaaanagtcaggcttgttggcttttgaagcaagg

SEQ ID NO: 124515 - DNA, 382 bp, Zea mays
  Clone ID: MRT4577_45037C.1
cctaatgcatcacttagctctgcccatggccaatgcaaggctattagacctgatatctggtgctggagtccgccatggtctaactaaagaaactcactcgagatcatgaataaactgaacaagagcacccgtcgtacggagcgagacataaacttaacatgatcagggaggacgacctgtgcatactgccgtacctaaaagcagaacagtgccttgttgtttttttaacaggcacagatgccacataggctctctgtcttgaacctttacgtcaaggtgaaagaaagctctgttcatacacacgaggaaaatgacaactcgtgaacggctgggccatcggcagagacaccgcggtctgggagaaagcccgaggagttcatgc

SEQ ID NO: 124516 - DNA, 222 bp, Zea mays
  Clone ID: MRT4577_45038C.1
gtcattgctcgcgtgacgcgtcggctacttcatcaggcgtcccatcatagggcattacggagggtagatgcgttatgctacagatcatgtaaattcgacctgatcgcaactagagtacctactatatacaatgtgaacctacctagactgtttagatcatctgacatagagcaccactagcttatggatcagacttctatgagtcaggagttactcttgcta

SEQ ID NO: 124517 - DNA, 560 bp, Zea mays
  Clone ID: MRT4577_45039C.1
caaaaccctggttggaaaaaatggcccctttttttttttttttaaaaaaaccaaaccggggcaaaaaaaaaagggccattttggccccggttcccgggacccaaatgggggggtttttttttaaatttttgtggttggcggctgggggggggccttttgaaaaaccttttcttcccaaatttcagggggccccggggggccccaggggagccaccctttgaaaacctgcccctttttttgggcccagccccccaagggggggggggggccgtgggccccaataaaaatcccccccggggggtcaataaaaatagggcccccccctttttgggggggggctttttccgggggggggaactcctccttttgcggggggaaaaaggccagggcgggccccccctggggggttggtttccccccaaggggttggggccccctgaattcccccccggggccccaggccccttttttaaagggcaaaatgggggaaagcttgcccacaaaaaccccccctccaaggccctccaggtttttgtgggcccccaggccccccccccccc

SEQ ID NO: 124518 - DNA, 326 bp, Zea mays
  Clone ID: MRT4577_4503C.1
aaaaaaaacagctttttttttgaaaaaaaaaaaacaaagccaaggaacagttaaaagtcaaatgcccagttccaaaaaacacacacccagtccagttctccaaaatccagtttgggaaaaccacagttttgatccaagttaatttaaatcccaaacttcaacgaagggggtttcaaatgacatgggtaaaaataataaattgtgacaaattggccatgtccaggggttcaccccaaggggattggaaatttcaacaggcccaaaaacaccaagtttgggcaaaacgccctgttttttagacagcatccatttcctaaaaagctgcc

SEQ ID NO: 124519 - DNA, 115 bp, Zea mays
  Clone ID: MRT4577_45040C.1
cccacgcgtccgatcctactacaattgctccatcaatcttgctcacactgggggggcgcagaatttctttttcacatatcgcattatggatgcacatgaagtcatattctctgtt

SEQ ID NO: 124520 - DNA, 183 bp, Zea mays
  Clone ID: MRT4577_45041C.1
aattcggcacgagggttgaggcctccatcatctatctcctctctcgtcgtgctggccgaccggcgacgacctatagctgctgccgcctgacgtggaacgcgccatggccggcaactgaacaggtaccaagcatgcttataagcgtatgttgacgagcctgattaagcctggggggggggaata

SEQ ID NO: 124521 - DNA, 350 bp, Zea mays
  Clone ID: MRT4577_45042C.1
tacattagcaccgttcatgacggtgtctttttggtgggtgcggtaggaaacacatgccgcatcaactgatgcaggacctgttcacggaaaggagctgtccaagaacatttaccccggtgaggatgaaatctcggcgctgatgtcccggctgccctcctatgcagtgtgggcgatgaaaaggtgccggacctgcttttgattgacggcacccctttgtccctgcgtctgctgactgctgctggagatttgacacaaatcattcagtggaacactcaccatttggaccaagaaggagcaggtatagtggagctactcttacaacacagcccggggtcctgatatatgtttac

SEQ ID NO: 124522 - DNA, 161 bp, Zea mays
  Clone ID: MRT4577_45043C.1
gtattatcatcatgagttatatgtccattttttcttattttggagcggtgtacacctaatcgcaccaatgcgacacaaagtgcccaactgccagcgcctgacggacggcggctctaacaaggctggctgtatctgatcgtaaaaacgactacataatgatc

SEQ ID NO: 124523 - DNA, 1948 bp, Zea mays
  Clone ID: MRT4577_45044C.1
cattgggtatctcgaggccggccgggcataagagatctgatccgacccctcaggccaggcaaagactctccgccctcccactcccacctcgccacctcctccttcctcgctcccaattttcttttttcccttccccttcggcgcggcaggattttctccatctgctttccccatttccgccgtattttattcgatttcgaggtcggttttctgttgcacagggagaaaggtcacgtccaaccgccgcgaactgcgcatgtgaactgtgcccgacgaggcgcgctgcggcacgggtgaggggagctgcgccggagcaccagccctagggttttcaccgccctgccgcgagatggacgtccgggacctgcaccagcagccgcagcagcagcaggctccgccgcgcgtgggatccccgccgcaggccggcgccggcggtgtcatgatgcagcatgccgccgcgttcggcgcggcgccgccgccgtccgggttgccgcaggcctcggcggccaacgttatgcacgggatgtcccttgcctttaaccctatggcttcgccggacgcctcgtcacccataagcagcatgaagattgtggacatgccgctggggtctatgtaccgccctgattccggcgcgacgggcttgcagcagcagcagcccggctccggtggcgttggtgccagcggtggtgctatcgtcgccgtcagcggcggggaccttgtgaagaagaagagggggaggccgaggaagtacggcccagatgggagcatcggcttgggactcaagaccgccgcggcgggggtcactgaagcgacgggtgcccagtccggtggaggcgggtctacccctaaccccgacggcaagcgtagagggcgtcctcctgggtcaggcaaaaagaaacagctggatgctttgggatcttcggggacgtcgtttactccccacataataactgtgaagcccaatgaggatgttgcgtccaaaataatggctttttcccaacaaggcccgcgcactacatgcataatttcggcaaatggtgctctgtgcacggcaacactgcggcaaccagcaacctctggtgggatagtgacatatgagggccacttcgatatactctctctttcgggctcattcttgcttgcagaggatggtgacactcgcagcagaacaggtggtttgagcgtggcactggctggaagtgatggacgcatagttggaggttgtgttgctggaatgctgatggcagcgacacctgtgcaggttgtagttggcagtttcattgctgaagctaaaaagccaaaagaagagcaacccaaacgtgagccaacatcggtgccaccgcacacagctgtctttggggcggcctcgactgccagccccccatcggatggcacatcaagtgagcactccgatgatcccgggagccccatgggaccaaacggcagtgcattcaccagcgcggggcttcccctgcactccacatatgctgcagttggttggtcactatcagaggaccaaagccgttatgatccagatctaaagatgatgaccgactgatgggtgccgtttcgcagcttccttgttagcagttgacttagctgagtaggctcaataactaaggaatcctgagagtggtaaaaccttcaggaaggagtagatcacgagtaataattagtaccagtgcatgcctttgtcttgttatatcgtagttagcagtttgtatttgtatggtttcactgtcagaaagtctatgcagcattccttctggtttccatctgtatccacgtagtgcaacaattctcatccatggattggtattgctcaccccacatcatcgtatgcttgtattgcaattctcctcttgggttcaaaaaaaaaaaaaaaaaaggcccctacaccccacatcatcgtatgctaaaaaaaaaaaaaaaaaaaaaaaaaaaaaaa

SEQ ID NO: 124524 - DNA, 585 bp, Zea mays
  Clone ID: MRT4577_45045C.1
ttttttttttttttttcctgttgagatttgctttgatgaattaccacgtttaagcagcagcggcgtcggcctcggggagcttcatgccggtaccgctgaggttgctgaccttggcgttggggttcttggtgtaataatctgagatggcagacttgatggcatcctcagcaagcatggagcagtgcagcttgacggggggtaagcagagctccttagcaatctcagtgttcttgaccttgccagcatcatccaagctcatgccgcgcacaagctcagtgagatagctgctggaggcgatggcggaaccgcatccgaacgtcttgaacttgacctcggagatcttctgggtttcagggtcgacgcggatctggagcttcataacatcgccgcaggccggggcgccgacgagaccggtaccgacatcagcatccttcttgttcatggagccgacatttcgaggtcgcgagtagtggtcaaggaccttctcgtggtaggagcgggtagcgttgacggcgacggcgggagagatctggcgggcagggaggatggtaggacgggccaggggagcagcgacagcagctcgcc

SEQ ID NO: 124525 - DNA, 210 bp, Zea mays
  unsure (1)..(210): unsure at all n locations
  Clone ID: MRT4577_45046C.1
gtgccggggtctttggtggttgatttgtggttttgcctgggggtcttcttgtctcttccggcggtgtggccntgggcccttcgcccgggatgtgctgtgtgtccttcctggtggcgggggtgtttgcggcggctgctgctccgcngagtcagccgaagcaaggcatgcctactggttcgtaccatccgtcttacattgcagaatatgtgg

SEQ ID NO: 124526 - DNA, 1952 bp, Zea mays
  Clone ID: MRT4577_45047C.1
gcgtccaaaataatggctttttcccaacaaggcccgcgcactacatgcataatttcggcaaatggtgctctgtgcacggcaacactgcggcaaccagcaacctctggtgggatagtgacatatgaggtacattcaggttcaactgcccagagcgcagggtgatgcttttattttactgctgggtcatttttgaagcaacaacacatgtttaaaattgaagctgatttatttctgttttcttacattttttgctagacaaaactactatttttttttctgttagcatgtttttcctgggatgccaatcgagtaaagcatgactgtgcaattgagtagggtcggagtcaggacctttttgtgctgtcacttgacagcattagattctacgaattcatggctatattactgttgagctaacagaaaacaatgataataatcatgtttcttacactggtgacatcaataattatcaactctggatccgccctgcagttgaccatggagaggccttgcaactatcagcaatctattttcagttgcattgtgccctagtaaaatttctatgaagttaattaccgtatagcattatccacttgcatattttcattatttttctcttggctatacatgtttacatttgtctgcattcttccttttttaaaataaaaatatgccctgctttttaggaaaacacatataaggtagcttgcctgctttctttgtcaacttggtttggcaaatatatggctgtatttgttatcagttttcatctcatctaggcaggataaaacagggaacttaggagcgcatattcgttgatgcctgagtgcaatgtgcaagagcacgtcacctactgaattttacatatttctattagttttctctttgggggttccatttgacttcaatcgttgtcgacttgatttctgatgaaaggaagaatgactatgttatattataagctttccttctcagctaggaagataatacaaaaaaaaaactgaaaagaaaggtttggatagcctcttactctgattcattgcaagtaactaaatgcgatgcaacagttcatttgtgaatcaacgatgacagactgcaaaacccatccacaatattgaaacttttattttcagaatgtcgtgataaatttattcattcacatgatatgaatccttttatggtgacttggtgcagggccacttcgatatactctctctttcgggctcattcttgcttgcagaggatggtgacactcgcagcagaacaggtggtttgagcgtggcactggctggaagtgatggacgcatagttggaggttgtgttgctggaatgctgatggcagcgacacctgtgcaggttgtagttggcagtttcattgctgaagctaaaaagccaaaagaagagcaacccaaacgtgagccaacatcggtgccaccgcacacagctgtctttggggcggcctcgactgccagccccccatcggatggcacatcaagtgagcactccgatgatcccgggagccccatgggaccaaacggcagtgcattcaccagcgcggggcttcccctgcactccacatatgctgcagttggttggtcactatcagaggaccaaagccgttatgatccagatctaaagatgatgaccgactgatgggtgccgtttcgcagcttccttgttagcagttgacttagctgagtaggctcaataactaaggaatcctgagagtggtaaaaccttcaggaaggagtagatcacgagtaataattagtaccagtgcatgcctttgtcttgttatatcgtagttagcagtttgtatttgtatggtttcactgtcagaaagtctatgcagcattccttctggtttccatctgtatccacgtagtgcaacaattctcatccatggattggtattgctcaccccacatcatcgtatgcttgtattgcaattc

SEQ ID NO: 124527 - DNA, 148 bp, Zea mays
  Clone ID: MRT4577_45048C.1
cggttcggaatccccggctcgacccacgcgttcgatcacactttcttccatacattttaattatagtcatgtatctccattctaaagtatggttcaaatattcatctttgttacacaacatttgtccctgaatattcctaattataac

SEQ ID NO: 124528 - DNA, 211 bp, Zea mays
  Clone ID: MRT4577_45049C.1
aggacgctgcggggaccagatgagcgaagaacacgaacgcggtcacgctgcgtcaataacgcccagatcagtgcgcagatgcaatacagaggctgccgttggagaacgtcgcgaggtagaaaacccaggcgcgaggtgacgaaattgtcgggcatgttatgcagctttcggaaccgggagtaacagcgaacagtgccgcagtgaatggacc

SEQ ID NO: 124529 - DNA, 831 bp, Zea mays
  Clone ID: MRT4577_4504C.1
atgaccaagaccgaatgcctcagtatagggagcttcgtcaggaaagcccattcaacgaagacgaatggtacgacgacttccatcatgggcttccagacgaagccagtcactgctgaggctttgtttcagtgcacgcaggatcatgaggagtacttgcaggcgtatgttcgaagcttcttgcggctgagagctcaagcgcctacaatgcccaatgaaattgtcattgaggtcatgatcatggggctccggccaggacctacaacacaatactttgcaagaaagccaccacaaaccttggagaagctcctccagaagatggatgaatacatccgagctgacaatgattttcggcaaagaagggaagaagcttacagatactttgagatgactagggcttcagaggaagactccatcctaggcaagttaggtcaatccataatcccagctcaagcggcgacaagggaaatcctacccaagggcagcagcacagctctcaatcgtcaggagcacaacaaagctcttttaggccaccgactccaacaggcagaggggggagaagcttcggaggaagatttggaaattagcccaggagactgttttgtttattctatggtgaagataaggggcataccacaaggacatgccagccattcccaagcttcctgggctcagttgccaccaccaccaccaccaccaccattggtgcctgcccaaaaccatgatcagcagccagaagggcaccttcagcctcaacaacaacgtgatctccgggagcagtctgaggctgacacagctaatagcactatgcccgaatccagacacatctactga

SEQ ID NO: 124530 - DNA, 308 bp, Zea mays
  Clone ID: MRT4577_45050C.1
cccacctgtacatgcagtggatagttagaggtttgtaatctttagcgagaatatacatgaacgggactggatggacgaattgggaagtgcagtgtctctgggatatgtacacgaagaagcatcctgatatgaacgaggaacagggaaacgctgcgggctatgaggccgactgacgtaggttatcgctcgctacgtgtgcaacgacgctatagggtaacttggaggcaaagtacactacgaaggttgctctacatcaggagcagcgaactctacgaacggacgcaacggggcaggactactgagaaaaa

SEQ ID NO: 124531 - DNA, 512 bp, Zea mays
  Clone ID: MRT4577_45051C.1
cgggccgggctcgctcgtgcccttctctcctggcggcgacggctgggcgagcggcgcggcccgttatcacttcccaggtcttcggcggcgacgagtttccaccagatggtcaacaaatgggcctctgcgagcaaagtataatgcaaaaatggcaggcatgaatgcacctattgctaaaccaaagggaagtaagaagctgaaggattgggatgcaaaatgagatgccaggttagctggtattatctaagcgttataagaactatgtagccaaaaagtgcaaacaatgcttatgcagatgctttcttctcattttgactgcataaacaatgtgacctttatgtgctattatctgttgaagtgtcccaatagtatgatgtgatgatccatgaatgatcattattattgaaaaaaaaaaaaaaaaaaaaaaaaaaaaaaaaaaaaaaaaaaaaaaaaaataaaaattggaaggacataactatatacattttttgggctacggcttatgtaacatt

SEQ ID NO: 124532 - DNA, 227 bp, Zea mays
  Clone ID: MRT4577_45052C.1
catccccaagacgaccacgacacccaaatcaccgtcacactccctcaccccatcatactgccccgaccccatgctgtacctgcacccactgtcctaccatccaccgacactacctgcaccctaccaattcccgcaactactaccactcctcacaccgacatcactgtcgaagaaaccctcaacacactccgccaaacaaccgagcagctgagaggtgatccacctcc

SEQ ID NO: 124533 - DNA, 247 bp, Zea mays
  Clone ID: MRT4577_45053C.1
ccctgtgcatgcccgttgtggcctgctttacggtggttgttcatcgggtccttgggcttgggcgggcgcccgtgcccgcgccccgatggcggcgacaccggcgtgccaaagtcccaagccttaaagggtccgcccgcagcccgcgcttgggtggcgcgtacaacgcctcagcattgaaccagttgaaataaacgaagacagttcttggggatgctttatgcgcgccatttgcgcggccataagcgac

SEQ ID NO: 124534 - DNA, 1724 bp, Zea mays
  Clone ID: MRT4577_45054C.1
caggccggccgggccgggattctaaaatctcccgtggcctccttcttctccggttctcgctcgtgcccttctctcctggcggcgacggctgggcgagcggcgcggcccgttatcacttcccaggtcttcggcggcgacgagtttccaccaggctgaccggaacgcagtgggtggagaaccggtgagcagctgcagccatgtccgtggcggccggcgtgagcgacgcggccatcgcggtgcgcgacaagctccgtggaaagattggtcagaccaaggtcaaacggtactggccggggaaggcgcctgagtgggccgatgacgtcgatgaggacgtcgacctcaggacggcacgggtctccctcgacaaggcgttccccagggacgaggacggcgatgttcccgccaaggatgaccgccggctccgccggctcgcggagacccgcgcggagaataaggaggagctgagggcggatcaccgccgcatacggcaggcggagatcgtgtcaaccgcggaggaggagaacgagaggcaggaggctgacgccgacgaggaggatgaggaggcccaagaggagaggaggaggagaataagggcaaggcagctgctgagggagcaggaagagctgcttcctcaggaagaggaggaaccggtggaggccgaggagtctgaggaggaatctgagtacgagacagactctgaggatgagcagatgggaatggccatggtgaagcccgttttcataccaaagtcacagagagacaccatcgcggagcgcgaacggctggaggaggaggaacggcagcttgaggagctggtcaagaagaggctggaggctaggaagatcgagactagacagattgtggtcgaagagattagaaaggaggagcacatcgagaaggcactgaacgaagaggccaacatcgaggatgtcgatacagacgacgagttgaacgaagcagaggagtacgagtcgtggaaaaacagagaaatagcaaggattaagagggacagggaggaaagagatgcgaggttgaaggagaaggaggagatcgagaaagtcaggaatatgaccgaggaggagcgtcgcgaatgggagcggaagaatccgaagccgcttcgtcagacgaaacagaagtggaagtttatgcagaagtattaccacaaaggcgccttcttccaggaaggtgctgatgatgttatccagtcagcgggtaaagaggatatctacacccgtgatttctctgagcccactggagaagataagatggataagagcatcctgcccaaggtcatgcaagttaaacatttcgggcgcagcggcaggacgaaatggacgcatcttgttaatgaagacactacagattggaatgcaccatggtcaacaaatgggcctctgcgagcaaagtataatgcaaaaatggcaggcatgaatgcacctattgctaaaccaaagggaagtaagaagctgaaggattgggatgcaaaatgagatgccaggttagctggtattatctaagcgttataagaactatgtagccaaaaagtgcaaacaatgcttatgcagatgctttcttctcattttgactgcataaacaatgtgacctttatgtgctattatctgttgaagtgtcccaatagtatgatgtgatgatccatgaatgatcattattattgacttcctgtgatgttctatcaagtgtatcccatgtatttttttcctcgg

SEQ ID NO: 124535 - DNA, 526 bp, Zea mays
  Clone ID: MRT4577_45055C.1
gatcttagcaggggcaaatccattttatacatgggggtgatggcgcgcacccacaatcagctggacggtgaccaaaaaacctaatttattttcggtaccacacccctatccctaggcctgagaagccgatataaagaccgttaaccagaacagggagcccaaaccaccttttgactatctcggagatgacaccagattaaccaaccttgtttcttgaaccagagtgccaccattaagaccctgacatcttgtgcgtccacagaaggtaccaattttataaccgactgcagctttagaaatgttgacaggcttttgttagccagacacgagcatggcaaggcggcttgcttgttgtatcgaaaaaacgggcatatccattactgagagagctcttgttataacttcatgatagctcacttgctccacatggcggtcattaggattttgcctggtggccgtataatacacaccatctagatttgttggtttcagcactacctgtgcattgatttcggtacaacggaga

SEQ ID NO: 124536 - DNA, 341 bp, Zea mays
  Clone ID: MRT4577_45056C.1
ataacagtgcgattagaatgtaagttcattttcaggataccacataacaatcatgcactgcacactcaactgaaagctacggatgagagcacggcagtccacggaagaaaaaaaacgaaacagttatgccagccaaggtatgcagcaacagacggtgactgaactagagcaaaccacgtgccaaccttcaccacatgtcgttgactagacaatgacaatcgagtcctgagctcataacgtcagagctcaagcaacggacggctcgggtttatattcctcccaattcaggagaaacatctgtatgttagcccccaattttcaagggttgcaggacgcgggga

SEQ ID NO: 124537 - DNA, 639 bp, Zea mays
  Clone ID: MRT4577_45057C.1
gaggcatttgtttctgcaatatccctttgtagagcgttggggttccttaatgtgcattcttgagcgaagatcaatgctgcggattttggcagactccggctgggttgccccagtctgaagcgcatgcagagcagcctgatctcataatacagaggctgctaccatataaaggcgggcaagtcatgcaataagccgatgctcagatttgaagaaaaaaacaaggggatgtttggtttctagggactcatttttagtccttacatgttattctaaactagtctataaattgctaaatatggaaactaaaactctattatagttttggtatttggcaattcaggaactaaaatggaactaaaatatctggcctaaaaattagtctctagatttcaaacaccaaggtaggaaagctcttctctttgagcttttggacattgttccccatcattttccggattattgtagggcatgttttttttggagccgggggcatttatttcccttttgtccgtccattaaggttctggtaaagttttttggcaaactttttttttgcgggtgtaaacaatattttttaacttttttttttgtttttttcgtgaatcgcccataggggctttttcttatttttttttaaat

SEQ ID NO: 124538 - DNA, 590 bp, Zea mays
  unsure (1)..(590): unsure at all n locations
  Clone ID: MRT4577_45058C.1
cgggcgtggtacaacgggcaacagatgttcccgacgctgcaggctatgactttttgagcggagggtgggcaagctggggagccgggtgcctccttcggcgtcttcgccatcctgacgctcaccgtctgggttgccgtgtacgaccgcgtgctggtgcggcccctgttccggcttaccggccacgcgcgcggttttaacctgcggcagcggatgggcgccggcctggtgctcttcgccgtggacatggccgtggccgctcacaccgagagcgttcgccgagccgccgcgctcgccgaggggctccgtgactccaacccgctgacgggggaacgcccggtgcgcatgtcagccattaatctggtgccgctgcactgccttacggtgctcgtccagggcctgaacctgatcgggcagatcgagttctactacttcgagttccccaagaccatgttcagcatangggtgttcctgctcgccctcggacttgggtttggcgcggtgctgggcaacgccatccatggggtcatctaccccgggaccccgagcggtggcagtcccgacggttggcttgctagctaccttgaacaggg

SEQ ID NO: 124539 - DNA, 1372 bp, Zea mays
  Clone ID: MRT4577_45059C.1
aatcccgcgtttgagacccccttcttcagccaaactagaaactacgtaccttgaaccaaaaccctgggtcatctagcacaaatatattttttttccttttcgcctcgatatatacgaacggcagtcagccaaactaattccacaatgtatggctgttccatggcgtgcagatgacgagagtttagtggtcatgcaccgtttccttgagaagattgagggggaggtacttgagtattcgtccaaagatgtcaacgaaaccgaagtgggcatgtgataaagactttagaccattagtacttgatgttggcgaattcggctcgaggcacgagctgaatgaacacccgacaacccggaccagaacagccgcgtcgaggcggccctcgagacccccggccccgacccatcccaccaccacccccacccccacctcgcctcccggatccgcacccgatgggcagcctcggcggcgacgcggagccgcagggcgcgagggggcggccgcggttcctgtgcctgcacgggttccgcaccagcggcgagatcatgcgcaagcaggtgctcgggaagtggcccgccgacgtcacggcgcgcctcgacctcgtcttcgccgacgcgccgttccccgccgagggcaagtccgacgtcgagggcatcttcgacccgccctactacgagtggttccagttcgacaagagttttatggagtacaggaatttcgacaagtgcctggcctacatcgaagagctgatgataaaagacggccccttcgacggactgatgggtttctcccagggttccattctgtcggcggcgcttccggggctccaagaacaagggctggccctgactagagtcccgaaggtcaagtacctcatcatcatcggtggcgctaagttccagtcacccacggtggccggcaaggcgtacgccaacaagatcgcatgcccctcgcttcacttcatcggtgaaaacgacttcctgaaagtccatggtgaaaagctgatagaatcatgcgtggacccattcgtaatccgtcacccaaagggccacacagttccgaggctcgatgacgagagtttagtggtcatgcaccgtttccttgagaagattgagggggaggtacttgagtattcgtccaaagatgtcaacgaaaccgaagtgggcatgtgataaagactttagaccattagtacttgatgttggcgaaaaggctatacttgtactatttatttacagaatgaacatgtgatgtaacctcgattttcatgaggcatgattatgaaaaatacagaataattgttttatattctatattacttgaatcaaaaaaaaaaaaaaaaaaaagaaaaaaaaaaaaaaaaaacccgcggcc

SEQ ID NO: 124540 - DNA, 785 bp, Zea mays
  unsure (1)..(785): unsure at all n locations
  Clone ID: MRT4577_4505C.1
cctcgaggccggccgggatctcttaccctagtcgcctgctccattctcagacgccgccgatcccgtctcgtgctccgctgcgctgagtgagaacaagagatggccggcaagggcgatggcccggctatcggcatcgatcctcggtacgaagtactcttgcgccccggggtgacagcacgagcgcgtccagatccttgccatagaccagcgtaatcgcaccacgccctcggacgtccgcttcaccgactccgagcgactcatcgaagatgcggccaaaaatcagctcctcatgaaccccatcaacaccgtctttgatgccaagaggctcatctgctcgaggtgcagcgatgggtctgtccatagggatatcaggctgatgcggccttcaaggtcatttctgtacctggtgagaagacactgattgttgtcccgtacaaaggtgaagagaatcagcttgcaactgaagagatctcctctagtggtcttatccagatgcgtgagattgatgaagcttaccttgctatcacgatcaagaatgctgtgtgcacagtccctgcctacttcaatgactcacagaggcaggccacaaaggatgctggggtgattgctggccttaatgtgctgcgtatcatcaacgagccaacagctgcagctatcgcctatggtcttgacaagaaggctaccagtgtcggtgagaagaagtcctcatctttgatcttggaggcgntacctttgatgtctccctcctcccattgaagaaggaatctttgaggtcaggccacagc

SEQ ID NO: 124541 - DNA, 555 bp, Zea mays
  Clone ID: MRT4577_45060C.1
gtggtgcgcgtgtcgctggctcgtgcgacgcacttaccaacttgacctttataagcacttattactaccaaattccttatgtactgtacaacgcaaaacagagttttatggagtacaggaatttcgacaagtgcctggcctacatcgaagagctgatgataaaagacggccccttcgacggactgatgggtttctcccaggtaacaagccgcacagcacgggttgagatgagaccacctccccttcaatttctgtgggcgatgaaccagctgctcgattaacggttgcgaattgtggtgcgccgatgttggttccagggttccattctgtcggcggcgcttccggggctccaagaacaagtgagagatcatgtggttcatacaacactcgaagcagagcaggttctgtattgcttgctgctagttcttactctgtcgcctttgtgttttcgtggcaggggctggccctgactagagtcccgaagatcaagtacctcatcatcatcggtggcgccaagttccagtcaccgacggtggccagcaaggcgtacgccaa

SEQ ID NO: 124542 - DNA, 1259 bp, Zea mays
  unsure (1)..(1259): unsure at all n locations
  Clone ID: MRT4577_45061C.1
aattcggcacgaggcgacaacccggatccgcacccgatgggcagcctcggcggcgacgcggagccgcagggcgcgaggcggcggccgcggttcctgtgcctgcacgggttccgcaccagcggcgagatcatgcgcaagcaggtgctcgggaagtggcccgccgacgtcacggcgcgcctcgacctcgtcttcgccgacgcgccgttccccgccgagggcaagtccgacgtcgagggcatcttcgaccctccctactacgagtggttccagttcgacaaggtccgccgccgcgtacgcgcacgcgcatccgcccgcccattacccgcccccctctcctccccgatctcgtcgtcctgctgatttcgtcaaactaattgtggtttccctagtttttttttgtggtgcgcgtgtcgctggctcgtgcgacgcacttaccaacttgacctttataagcacttattactaccaaattccttatgtactgtacaacgcaaaacagagttttatggagtacaggaatttcgacaagtgcctggcctacatcgaagagctgatgataaaagacggccccttcgacggactgatgggtttctcccagggttccattctgtcggcggcgcttccggggctccaagaacaagggctggccctgactagagtcccgaaggtcaagtacctcatcatcatcggtggcgctaagttccagtcacccacggtggccggcaaggcgtacgccaacaagatcgcatccgcctcgcgtccggtgaaaacgacttcctgaaagtccatggtgaaaagctgatagaatcgtgcgtggacccattcgtaatccgtcatccaaagggccacacagttccaaggctcgatgacgagagtctagtggtcatgcaccgtttccttgagaagattgagggggaggtacttgagtattcgtccaaagatgtcaacgaaaccgaagtgggcatgtgataaagactttagaccattagtatttgatgttggcgaaaaaggctatacttgtactatttatttacagaacgaacatgtgatgtaacctcgattttcatgaggcatgattatgaanagttcngaaaaaaaaaaaaaaaaaaaaaaaaaaaaaaggaaaacgatataaaaagaaacaaaattacagtacacatgcatacaaaagaaataaataatactatagaagggggcgggccttttttaaaagttccaattttatttacaccgtgcgtgcacaggtaaaaccttttttt

SEQ ID NO: 124543 - DNA, 2203 bp, Zea mays
  Clone ID: MRT4577_45062C.1
agtagtaattcacgacccccggcgcccccgtctccgctcctttattaatatcgccgcggcctcgcacctccatctgttctatatcgccccattgctcgctcgccaagagttcttcttgttaggcaaggcaaaagcagaagcaaaaaaagaaggcaaaggtcttgttgccgatggggagctcagggttctcgtggacgcttccggaccaccccaagctccccaaggggaaaccggtggctgtcgtcgtgctggacggatggggcgaggccaaccccgaccagtacaactgcatccatgtcgctcagactcctgtcatggactcgctaaagaatggcgctcctgagaaatggagactagtgaaggctcatggaacagctgtgggtctcccatctgatgatgacatgggcaacagtgaagttggtcacaatgcacttggtgctggtcgaattttcgcccaaggtgctaagcttgtcgatcaagctcttgcctccggaaagatttatgatggagatgggttcaactacatcaaagaatcttttgaaagtggtactcttcaccttattgggttgttgagtgatggtggtgtccactcccgtcttgatcaactgcagatacttctgaaaggtgtcagtgagaggggggcgaaaaaaatccgtgtgcacatccttaccgatggacgtgatgttttggatggaagcagtattggtttcgtggagaccctagagaatgatcttttggagcttagagcgaagggtgttgatgcacaaattgcatctggtggtggaaggatgtatgttacgatggaccgttatgagaatgactgggatgtggttaaacgtggctgggatgctcaggtgctcggagaagcaccctacaaattcaaaagtgcacttgaggctgtgaaaacactgagagcacagcccaatgctaatgaccaatacttgcccccatttgtgatagttgatgacagcggcaatgctgttgggcctgtattagatggtgatgcagttgtcactatcaacttccgagctgatcgcatggttatgcttgctaaagcactagagtatgcagattttgacaactttgaccgtgttcgtgtccccaaaatccgatatgctgggatgcttcagtatgatggtgagttgaagcttccaagccgttaccttgtttccccaccagagatagatagaacatctggggagtacttggtgaagaatggcatccgcacctttgcttgcagtgagacagtgaaatttggccatgtcacatttttctggaatggtaaccgctcgggatactttgatgaaactaaggaagagtatgtagaagttcctagtgacagtggtattacattcaatgttgcacccaagatgaaggcgcttcaaattgctgagaaagctagggacgctctcctaagtggaaagtttgaccaggtacgtgtcaacctgccaaatggtgacatggttggtcacactggggatattgaggctaccgttgttgcttgcaaggcagctgatgaagctgttaagatcattctgaatgctgtcgagcaagttggtggtatttaccttgttactgccgatcatggcaatgctgaggatatggtgaaaaggaacaaatctggcaagccgttgctcgacaagaatggtggtatccagattctaacctcgcatacccttcagccggtgccggttgccattggaggccctggtcttcaccccggagtgaaattccggaacgacattcaaatccctgggctcgccaatgtagccgcaactgtgatgaacctccatggatttgaggcccctgctgactacgagcaaaccctaattgaagtggctgacaactaaatactggccagctatgtccaattttggttctatagttttgagaagggatatggccatgccattcaataatttctgtttgcaagcacgttgctcaaactcaccaaaacattgagaaacgccttttgacttgcatttagatgctctatttataccgttgacaatcgtctcttctggcttttagcagtttgatggctatctttacttagctatataatgtatctgagactgcaaactttgtgtcagtcaaactgctcgaggttatatgctgtttgtgtgggtcatcacgtgtgattaccttcgcacgcattgacgcatgaattgtgttcaccattctaaaaaaaaaaaaaaaaaaa

SEQ ID NO: 124544 - DNA, 2379 bp, Zea mays
  Clone ID: MRT4577_45063C.1
gcgggccggttttcccccaagaccggcggcgacattccttttcgcctcattcgaagcaaagcccgtattttcctttcccttatttataaattattaaaataaaacatctcatcttttgtgcgacatttcccgtccctcgcagcaccgatcctgccgttcacctgttaataaatcgcctgggtttagtcgaaacacaatcgttaaaatgcagtaaagtaattcacgacccccgggcgcccccgtctccgctcctttattaataatcgccgcggcctcgcacctccatctgttctatatcgccccattgctcgctcgctcgccaaagagttcttcttgttaggcaaggcaaaagcagaagcaaaaaaagaaaggaaagagaaaggtcttgttgccgatggggagctcagggttctcgtggacgcttccggaccaccccaagctccccaaggggaaaccggtggctgtcgtcgtgctggacggatggggcgaggccaaccccgaccagtacaactgcatccatgtcgctcagactcctgtcatggactcgctaaagaatggcgctcctgagaaatggagactagtgaaggctcatggaacagctgtgggcctcccatctgatgatgacatgggcaacagtgaagttggtcacaatgcacttggtgctggtcgaattttcgcccaaggtgctaagcttgtcgatcaagctcttgcctccggaaagatttatgatggagatgggttcaactacatcaaagaatcttttgaaagtggtactcttcaccttattgggttgttgagtgatggtggtgtccactcccgtcttgatcaactgcagttacttctgaaaggtgtcagtgagagaggggcgaaaaaaatccgtgtgcacatccttactgatggacgtgatgttttggatggaagcagtattggtttcgtggagaccctagagaatgatcttttggagcttagagcgaagggtgttgatgcacaaattgcatctggtggtggaaggatgtatgttacgatggaccgttatgagaatgactgggatgtggttaaacgtggttgggatgcccaagtgcttggagaagcaccctacaaattcaaaagtgcacttgaggctgtgaaaacactgagagcacagcccaaagccaatgatcagtacttgcccccatttgtgatagttgatgacagtggcaatgctgttgggcctgtattagatggtgatgcagttgtcactatcaacttccgagctgatcgcatggttatgcttgcgaaagcactagagtatgcagattttgacaactttgaccgtgttcgtgtccccaaaatccgatatgctgggatgcttcagtatgatggtgagttgaagcttccaagccgttaccttgtttccccaccagagatagatagaacatctggggagtacttggtgaagaatggcatccgcacctttgcttgcagtgagacagttaaatttggccatgtcacatttttctggaacggtaaccgttcgggatactttgatgcaactaaggaggagtatgtagaagtacctagtgacagtggtattacattcaatgttgcacccaatatgaaggcgcttgaaattgctgagaaagccagggatgctctcctaagtggaaagtttgaccaggtacgtgtcaacctgccaaatggtgacatggttggtcacactggtgatattgaggccaccgtagttgcttgcaaggcagctgatgaagctgttaagattattttggatgctgtcgagcaagttggtggtatttaccttgttaccgccgatcatggcaatgctgaggatatggtgaaaaggaacaagtctggcaagccgttgctcgacaagaatgaccgtatccagattcttacctcgcatacccttcagccggtcccggttgccattggaggccctggccttcaccctggagtgaaattccggaacgacatccaaacccctgggctcgccaacgtagccgcaaccgtgatgaacctccacggatttgaggcccctgctgactacgagcaaaccctcattgaagtggctgacaactaaacactggccacctgtgtccaattttggttatatgtagttctgagaatggacattcaataatttatgtttgcaagcacgttgctcaaactcaccaaaacatcgagggatgccttttgactttggcatttacagcattttcgtttggctttaatccttatcggtttctattgcttctgtttcatttctatgtatcatagctgcagtagttcgaacaactgtctttgcacaactcattagatgctctatttatataccgttgacgattgcctccaaaaaaaaaaaaaaaaaagcggcctcgagtacca

SEQ ID NO: 124545 - DNA, 2303 bp, Zea mays
  Clone ID: MRT4577_45064C.1
gccggccggtatctcgccacttgttaaatcccctggttaagtcgaaacaccatccatttttttattcgcaccccacacgtcgccgtcgcttctcgttattaatatatcgccgtcgcctcgcacctccctttgttccatcgcccccccggcccccattgctcgccaagagttcttcttgtttaggcaaaggcaaaagcaggagcaaaaaggtttcgttggcgatggcgagctcgtggacgcttcctgaccacccgaagctccccaaggggaagccggtggctgtcgtcgtgctggacggatggggcgaggccaaccccgaccagtacaactgcatccatgtcgctcagactcctgtcatggactcgttaaagaatggtgctcctgagaaatggagactagtgaaggctcatggaacagctgtgggtctcccatctgatgatgacatgggcaacagtgaagttggtcacaatgcacttggtgctggtcggattttcgcccaaggtgctaagcttgttgatcaagctcttgcctcaggaaagatttatgatggagatgggttcaactacatcaaagaatcttttgaaaatggtactcttcaccttattgggttgttgagtgatggtggtgtccactcccgccttgaccaactacagttacttctgaaaggtgtcagtgagagaggagcaaaaaaaattcgtgtgcacatccttaccgatgggcgtgacgttttggatggaagcagtgttggtttcgtggagaccctagagaatgatcttttggagcttcgaggcaagggtattgatgcacagattgcatctggtggtggaaggatgtatgttaccatggaccgttatgagaatgactgggatgtggttaaacgtggctgggatgctcaggtgctcggagaagcaccctacaaattcaaaagtgcacttgaggctgtgaaaacactgagagcacagcccaaggctaatgatcaatacttgcccccatttgtgatagttgatgacagcggcaaagctgttggacctgtattagatggtgatgcagttgtcactatcaacttccgggctgatcgcatggttatgcttgcgaaagcactagagtatgcagattttaacaactttgaccgtgtacgtgtccccaaaattcgatatgctgggatgcttcagtatgatggtgagttgaagcttccaagtcgctaccttgtttccccaccagagatagatagaacatctggggagtacttggtgaagaatggcatccgcacctttgcttgcagtgagacagtgaaatttggccatgtcacatttttctggaacggtaaccgctcgggatactttgatgaaactaaggaagagtatgtagaagttcctagtgacagtggtattacattcaatgttgcacccaagatgaaggcgcttcaaattgctgagaaagctagggacgctctcctaagtggaaagtttgaccaggtacgtgtcaacctgccaaatggtgacatggttggtcacactggggatattgaggctaccgttgttgcttgcaaggcagctgatgaagctgttaagatcattctggatgctgtcgagcaagttggtggtatttaccttgttactgccgatcatggcaatgctgaggatatggtgaaaaggaacaaatctggcaagccgttgctcgacaagaatggtggtatccagattctaacctcgcatacccttcagccggtgccggttgccattggaggccctggtcttcaccccggagtgaaattccggaacgacattcaaatccctgggctcgccaatgtagccgcaactgtgatgaacctccatggatttgaggcccctgctgactacgagcaaaccctaattgaagtggctgacaactaaatactggccagctatgtccaattttggttctatagttttgagaagggatatggccatgccattcaataatttctgtttgcaagcacggtgctcaaactcaccaaaacattgagaaacgccttttgacttgcatttagatgctctatttataccgttgacaatcgtctcttctggcttttagcagtttgatggctatctttacttagctatataatgtatctgagactgcaaactttgtgtcagtcaaactgctcgaggttatatgctgtttgtgtgggtcatcacgtgtgattaccttcgcacgcattgacgcatgaattgtgatcaccattctaattgctaaggcattttgatgggctctaatgtttgggagcaagataatttcagccccttcattcgcctagctctccc

SEQ ID NO: 124546 - DNA, 774 bp, Zea mays
  unsure (1)..(774): unsure at all n locations
  Clone ID: MRT4577_45065C.1
ccggccggggtcctccgactccgagaacgacctccccatctcgccgcctcacattcgatcgcagcagtgacggtctagctcgcccataatgtttgctaggtcgtgtttgcgctcgacgcgcaccctcaatggccttcgcaagggcccttccgctatcgccaagcgtgctgcttcctcaagcgccaacgccgccggcgatgccactgccactcgactgaacctggccgccgccgcctcgaccactctcgccctcggctccatggcctggtactaccatctttatggacctgtggcttttgccatggactcctgctgaggagggtcttcaccctaccaagtacccttgggtccacaaccagtggttcaagaccttcgaccaccagnctcntccgccgtggtttccaagcntaccaggaggtttgccagtcctgccactcccttagccgagtcccctaccgagnctctcgtcggttccatcttgaccgtcgacgaggccaaggcccttgccgaggagaacgagtaccccggtgagcccgatgagcagggcgagatccagatgcgtcccggaaagctggccgactacatgcttcccccttacaagaacgaggaggctgcccgatttgccaacaacggtgccctgccccccggatctgtctctcatcatcaaggcccgcccacggtgggctgtgattacatcttcagcttgctcactgggtaccccgnagagcctcccgctggtgtccaggtcgcccccggcatgaacttcaaccctac

SEQ ID NO: 124547 - DNA, 139 bp, Zea mays
  Clone ID: MRT4577_45066C.1
tatttgacgcccacgtttgggggattataataaaagataggtctgagggaggaggacaggtcgccgtcgcaagctgagcaacttgctgccatggccccacgcgctattgctgaccgcgaacatgctctcgcgaggctcg

SEQ ID NO: 124548 - DNA, 208 bp, Zea mays
  Clone ID: MRT4577_45067C.1
atatttttataaatttttttgaaaacgaaagcgacttctcttctaaaaaaaccatgtaaacaaactgtaagtttacggcctgggcatgtgaagtcacacaccatccatactaccactacattgtgtgtgagactgtgcgtgatacaagtaatcgaaacagcctacgcgtacgcccacacgttcgaccacccgtacgaccaagcataca

SEQ ID NO: 124549 - DNA, 276 bp, Zea mays
  Clone ID: MRT4577_45068C.1
aattcccggtcgccgactctacggctttactactgccagtaatcctgttattataatactctcctactgtaggggaatttatggtttctttcaatattctgaatggactgaatctgctgtatgttttcagaaagtcagatttgctaaacccaaaccttgatatgggatttcaactagggagcttcacatgcaattatcgttataaacactactatattcaatttgtatacacttccatatattctccttacatctattcttgtcattttatttttc

SEQ ID NO: 124550 - DNA, 541 bp, Zea mays
  Clone ID: MRT4577_45069C.1
aaaaaaaaaaaaaaaaaaaaaaaaaaaaaaaaaaaaaaaaaaaaaaaaaaaaaaaaaaaaaaaaaaaaaaaaaaaaaaaaaaaaaaaaaaattaaaaaatttaaagcaaaaaaaaaaaaaaaaaaaaaaagtttttacctccccgggggggcaaaggggaaattttgaaaatttcaataaaactggggggcgttaaaaaatgaatttaaagggccaaattccccttaaaggaagtggtttaaaaattaattggccgtgttttaaaaacgttgtaattggaaaaaccttgggtttcccaaattaaataccttttaaaaaaatcccctttttccaatttgggttaaaaggaaaaaagcccgaaccaatcccctttcaaaaaatttgccaaccctaaatggaaaatgaaccccccctttaacggccaataaaacccggagggtgtgggggttaccccaaaagaaaccgttaaatttgcaagcgccttaacgcccgttcctttaatttttttcctttcctttttcgcaaggttcgccggtttttc

SEQ ID NO: 124551 - DNA, 574 bp, Zea mays
  unsure (1)..(574): unsure at all n locations
  Clone ID: MRT4577_4506C.1
aaaaatcaaaccccccttttatttttgataaacccatatgcggccgcacaaaattttggggaaaagaaaacacaacgggcccttgaaaccggtttagtcacgactcacgacccaaaccatacaaattttttaaaaaacagtcccctccgtgggcagggggagaaaccctggaaaacccaaaaacagggggggtttcaacgagggggggtttaaaaccccccgggaagacggacccccagggggggggggccctcctttgggatattgaagtcgggaggggggcaaccatcctccagttgtttgccgggaaaaaaaaaaccctggtgggcggggggaaccccctccttggcggggattttacccttcccgttggcgggggggccaaacccttcaccccccagggttatggttttgccagccagggttttcacaaagatttgcttacccccctttaggcggggccccagagggggggggctctcctttggagtggggggagcgaccaggggggaacattccttcaggtgttgggcgggaaaaataanccggtgggtggccgggggggaacccctct

SEQ ID NO: 124552 - DNA, 341 bp, Zea mays
  Clone ID: MRT4577_45070C.1
ctgcggccacgcttgcggtagatctatggatcacgcgcaacggaccagatcggaacgaggatgatggcatccatgctaagatccgcactccactgaagcatgaagacgtttccaacagcagaatgaatgcactatgtgcaatccaacttttgacatggtgactaatcctagctgatgatggcacctcatcatgccatattctactgttatcctgcttaaatctaaggatgtcctgaaacatcactaacttacgatatggctgatggtctgatcccaatgcacaatggactcctactttcttgatcagacgcctgagagactcctgattccataccatattc

SEQ ID NO: 124553 - DNA, 157 bp, Zea mays
  Clone ID: MRT4577_45071C.1
agaaatgtacttttttatttttgggaggccccaggcatgacccaaaaatctcgatccgggacctagtaggtgatccgaaattttcctatagggagccaccaatgatggggtggtggtcgaacgcttaggggtttgctagaggaagttggttgccggg

SEQ ID NO: 124554 - DNA, 654 bp, Zea mays
  Clone ID: MRT4577_45072C.1
ccacgcgtccgtgatgcctttggtgttaggctacatgcagggaagcaagcagaggtatgacaagctttctatgttgcagccactgacaagcgagttcccttttcgaatcatgtgaacatctttctaagtggcaaataatgaccaaccactaaaaccgggtttcttttattcaagcagaatggttaacacctacgccaccaatgacaacaattttgtattatcagatgcagtccttcgtgcctgtagtgtcgctgttgcccaatcgtttatatgaaaccccattgattgtgtgaacgaaaataaaaaacctagacctgaagtgaaatggcctttctattgagaagcactatgttgctaacctaacctgctacagttcagatctaactattattaaatgccaggtcttgaaccagattgtgtacgagcttccatcagaacatccactagctgaaacaagaccgctgcgagagctgctagggcacacacctccacaggttcgatcttttgctcctcctggattgagctgttgggaacaaggaatgtctgaattaaattttgttaaccaattggcttctcctcaaatcatttcactggaaaatctattgtgtgtggatatttggtattcttactctcacatgccacacggtatcatta

SEQ ID NO: 124555 - DNA, 188 bp, Zea mays
  Clone ID: MRT4577_45073C.1
ctgaggctgagcaggccacttccctggagctgaccccacagctgtgtaggtacagggtggccgtgaacacttagggctctctcgggctgtgcgcttcttgttcactgcaaggagcagggtgttggctcctgaccaagccctgtcactgcgtgccagccacacgtggggccccttcacccacccctgac

SEQ ID NO: 124556 - DNA, 373 bp, Zea mays
  Clone ID: MRT4577_45074C.1
atccgctgaccgccgctgttatggtgttcaacgtgttatatttcatcgctgtgttcgagttggtgttgtatagttatatggtggccaacagggattggctcttctcttcatatacgcgcaccttatcggacgaggcatattccacagccggcggcagcggtgacggcgattcggacttggagtacgactacgggtcgtttatcgttgactattgacatttccatccggtcaacaaccccaagccgaagatgaaaataccccacaaaaacgagtagataaaatatttgatcaaatgggataagaatcacgatgacaaacttacactggaagagttccgggagggaagcaaagcggatccgagaattgtgcaagc

SEQ ID NO: 124557 - DNA, 145 bp, Zea mays
  Clone ID: MRT4577_45075C.1
gtgagttgctgtagacatgctttgttactctgcaaatttaggttgcatccgtgaataatagtaacttctgcgcgccctgcgcgcacaaaaaacgttacacaatatgtagtgtaaatgacatatttatacttagttatatatgctg

SEQ ID NO: 124558 - DNA, 620 bp, Zea mays
  unsure (1)..(620): unsure at all n locations
  Clone ID: MRT4577_45076C.1
tttacgcgtccacaggacaccggcacgggacgggccacggctataaataaccacacaccctcaaggctgaaccgaaccaagcaacgacgtcaatcacccactgtactactaacagctactaccagcaggtggctttagacagcagaagagagcgagaggatggcgctaccgaagccctccactgcggtcctgctgctactggcggagggggccgtgctggctctggcgcgcgcggacctgacgcactacaactgcctgaagaacaagaaggagacagggcaaaacctgagcacacacgacgtgacactgacgctggaaccgctggccaacagaaccgtcgctgatcgtggtcacctacacactgcacccgctcagccactccaaggtccaccagtgctggtggacagtgcacctgcgcgcgcccgacaccgaccagttggatttgcacaacgggaccaacagtggatgcttctacctggcccacaacgcgcactcagtgcagcacatgccgagattcgacacacnccacggctcaccgatgcatgggcgatttcccggcgatggctgcgccatgcaatggcgattgtctgtgcaggagctgctcagctgcttactggcgc

SEQ ID NO: 124559 - DNA, 148 bp, Zea mays
  Clone ID: MRT4577_45077C.1
ctgggggtagtccccttttaagaaacactccctgacatgatgcgaggaccttagtgggagcgagcagagcagaccgcgcggacaccagcaacagacataaggacccgaccggataccacaaagactctaggagaagacgacgttaaaa

SEQ ID NO: 124560 - DNA, 493 bp, Zea mays
  Clone ID: MRT4577_45078C.1
tgtgcgggcgctcgatgccggccggactctaccatcacttatcatatgtggctctacatttcttctctctctgttcttcatgctccgcctgatccatactatataggtatcgtcatgtacggactcgcgtggagcaccacttctagatcgagggccgatggtgtgccgcctctgacctacccgcagaaggctggcaccggacgtaataacggtttcatctgcctcgagaaccgaccctgaagggatgtgcaggtatctacctcccatactggtgagcatggtcacgcacagatgacagtttgtcgtcatacactatattcgattggaaaaagcttgaagatattgctctgtacatcacactactgcaagattccttatgtgaactgtactgagtatcaagtgattgatatttctgaggatgtatctgatgaccttcttacttctgatggatgcactaaggatgatcttagactcccatctgatgagagtcttg

SEQ ID NO: 124561 - DNA, 214 bp, Zea mays
  Clone ID: MRT4577_45079C.1
atcgacccacgcgtgggctgaaaacagccgtggaaaagttggttctgaaacggtgcttctaatcaaagggtccaaatggcacaggtgctgctgcttactgtggttttgcaaccaaaatactccaaaacaatcctgttgatcaaccaggacctaaaagtaacttggtttccaatgcataacttaaagggtcccatttttccacccatattaaatt

SEQ ID NO: 124562 - DNA, 365 bp, Zea mays
  Clone ID: MRT4577_4507C.1
tcgcattctttcttcaccccggtagccgtatacgtcctttgccgtcgcgccccgctcctccgacacggaccgactcgacccctagcgtacctgctgagagacgtcggcgtgggtgtcgctgcggttgacgacactgtgatggacgccgagcataacctcctgatgttccaagacgaatgcgtttcggagcacgagcaggacaatgctgtttttcttttctcacaagcacacctgccatctgatggagaagactgactatctcatatctgctacttagacgcacttagtgcgctccttatcatctccaacctgagctgctcttcagctatgcccgggacagaggttacctttactttatgatagga

SEQ ID NO: 124563 - DNA, 496 bp, Zea mays
  Clone ID: MRT4577_45080C.1
ggtgggtttttttttttttttttttttttttttttttttttttttttttttttttttttttttttttggcctgcaaaaaacccaagtcccataccttcaaattgggggggacacagacacaaaggttcaagccactttttttaaaaaaacaaaaagggaggcttgggcgtaacccccaggaaaaaacaaaccccccctggcaccaaccctacccttgaaaaaaaccaacccgttcatgaaaacacaaccactggttttctgcacattagctcaagggcgcctcccccgggactttttgaacgaaccaccccaagaccgggtaaaggccaccccccgtgatggcacaaaaagccacgatgtgccagttgggggacaaaaaggtgcggagcgagagggaaaaattagaaccccccgggggccatggggtgctccaagaactgcttattcgtggaaacaaagaacacccccccctccaagtccacatgttgtaaaagcc

SEQ ID NO: 124564 - DNA, 3457 bp, Zea mays
  Clone ID: MRT4577_45081C.1
gggccggggagactccactccacgtctgtgtcctcttcatcgcaactgcctctgcctgctttcgtttctgtttgtttgtgtgtcggagaacctcccggctccccgcagtccccctggcctcgcagatccgcggcctgcttcgttgctgccttgccagcaagcagccgcgctcatcctcgcggacgccagcggcggggcagccccctctcctgtgatccactccggcgcccgtggccgcggttgctcccgtaggtgccgccgccgcctcctccccctcttcatcctcctcccagatctatccccgtgcccgcggcacctgccggcgtcgtgaaatcaagtggcttgacggcaaaaggaccctttcaatcaaagagaatttggtcgctgaggctggaaaaaatctggatgtgtttaacttttagggcttactatttttgagaggtggtctgacatagactatccacaattcagcgccaggtctcagggagcgacctaccccaaggtggggagttcgttccttttccagtaacgaggagggcaaactcatattccatcatgatggaagaggacatggaaaatggaaggtcgtatcaagaaagaccaaggactttttcaacagtacgaagcaagtcatctatcccgctggccttacgtttgttgatgaggataaatccccgtgccttgattattctttctcttttggtattcagtggtgtgctatatgtgggagccagtacatcaccaattgtggtctttgtgttctgtatatgtactctcagtctattcttctctctctaccttacaaagtgggttcttgctaaggacgaaggaccaccagaaatgtctgagatatctgatgccataagagatggtgctgaagggttttttaagacacaatatggaactatttctaaaatggcatttattctggcctttgtcatccttggcatttatctctttcgcactactaccccacagcaggaggcgtctggcttgggaagggcaacactagcctatattacagttgcttcttttcttcttggagcattatgttctggaatagctggctttgttggaatgtgggtgtctgtgcgtgcaaatgtacgagtttcaagtgctgctcggcgctctgcaagggaagcattgcagattgctgtccgtgctggtggtttctcagccatcgtagttgtttgcatggctgtatttggcgtggcaatattgtactcaacattttatgtttggcttggagtagattcacctgggtcaatgaaggttactgacttgcctcttctccttgtgggatatggttttggtgcctcttttgttgccctttttgctcagttgggtggtggaatatacaccaaagctgctgatgttggagctgatctggtcggaaaagttgagcagggaatacccgaagatgatcctcgtaacccagctgtcattgctgacttggttggtgacaatgttggagattgtgctgcccgaggcgctgatctttttgagagcatagcagcagaaattatcagtgcaatgatacttggaggaacaatggcacagcgctgtaaaattgaggatccctctggctttattttgtttcctcttgttgtgcattcatttgatttggtggtgtcatcagtcggaattctctcaatcagaggaacacgtgactctgggctcatttctcctatcgaagatcccatggcaattatgcaaaaaggctactctgttactattatgcttgctgttcttacgtttggggcgtctactcgttggcttctgtacacggaacaagcaccttctgcatggctgaattttgcattgtgtggcttggtggggatcgtcacagcatatgcttttgtttggatttcgaagtattacacggattataaacacgagccggtccggcttttagctctttcgagttctacaggacatggaactaatattattgctggagtaagcttgggaatggaatcaacagcactaccagttctagtgataagtgttgccattatatcagcatattggctggggcagacctctggcttggtggacgagtctggcaacccaactggtggtctttttgggacagctgtagcaacaatggggatgcttagcactgcagggtatgttctcaccatggacatgtttggtcctatagctgacaacgctggtggtattgttgagatgagccagcagcatgaaagtgtgagggaaatcacagatgttctagatgctgtgggcaacacaactaaagctactacgaaaggatttgccatagggtcagcagctctggcttccttcctcctgtttagtgcatatatggatgaagtagcttcttttgctcaattgccattcaaggaggttgatatagcagtcccagagatttttgttggtggtttattaggctcgatgcttatattcctgttcagtgcatgggcttgctcagcagttggcaaaactgcacaggaagttgttaaagaggtcaggagacaatttattgagaggcctggtatcatggactacaaagagaagccggattatggacgctgtgttgcaattgtggcatctgcatccttgagagaaatgataaagcctggagctctagcaattatatcacccatggccgttggcgttgtcttccggattttgggccactacactggtcagcctcttcttggagctaaagttgtagcctccatgctgatgtttgcgacggtcgctgggattctcatggcactcttcttgaacactgctggcggcgcctgggataatgcaaagaagtacattgagactggcgctcttggtggcaagggcagcgagtcccacaaggctgcggttactggcgacacggttggagacccattcaaagacactgctggaccgtcgctgcatgttcttatcaagatgctcgccacaatcacgctggtcatggctccgatattcttgtgattaaccaaccactcatcaagcttgctattaaccctgcggagatgtacctatgcgaccaggtagatgaggtgtgtgtgtgtgtgtgttacctgcatgtgatgatgtaacggtccaatcggtttgtgtcacgacatgctgtacccagagaaagaagcggcgatctatacccatgtctcacggtagatattatactgatgatgcaaatgccgtgttttgttactgaattagtggcctgaaagttgcgcttgttgattgatgaaacattatggtagcgtacttgtatgctgcatcccacaatggattttatgatgtggaccccgaatgttttgcttatacaatgtttgctatgcatacatggacgcttgcgtgttcagaccgggctcgggtgatttaaaaaaaaaaaaaaaaaaaaaaaataaaaattccttaaaaaaaaacgggggttgagtaaaaaattataaaacaaaatataccttaaaaaggggggggcctccttgggggg

SEQ ID NO: 124565 - DNA, 369 bp, Zea mays
  Clone ID: MRT4577_45082C.1
cccaataattgaccgccgcctcctggcggcccaccttctcctattataaggagtcttataacagctcgtcatcatcatcatcatagctgcctgctggaaaaaattatcctctcataacaacacaccacatcctacccgccggcatcataaagagagcctcctgtgccgcctaaggaatcatcctaccatcattaactgcgcgctgactactggctgttcaccaggcaaaccacccgtgccacctgctttattaaataatccaacaccccgcgagaagcggcttgcttattattcgccaccatggttgttttttttatcaccaagacgaccaacaactgattatcgttcatcacctgctcctcataaaag

SEQ ID NO: 124566 - DNA, 402 bp, Zea mays
  Clone ID: MRT4577_45083C.1
aaagcaaaaattctataacaaggtttgagaccttgcgcttgggtctatttctctttttgaatactaccgccacttcattgcaatgggtcctttcctagatctaaatgccgcggaataccgaaattaaaaaaggcctctcgtataaaaatggaagaatagcttgccatatatcccacttggacacaacacagtcgaagcaattttctcttatcctcctttggtccttcctttacctttagaataaatactccaccaccctccttacaattgctaaaaaatcgcaatcgggacctcaacagacttcaattggcccacccccgaaatacgccaactcggcagctatttgatcaatgccccgcggagtaaacaactggtcatcagttcgagccaagggaaagaacc

SEQ ID NO: 124567 - DNA, 1072 bp, Zea mays
  Clone ID: MRT4577_45084C.1
gtcccggagatttttgttggtggtttattaggctcgatgcttatattcctgtttagtgcatgggcttgttcagcagttggcaaaactgcacaggaagttgttaatgaggtcaggagacaatttatcgagaggcctggtattatggactacaaagagaagcccgattatggacgctgtgtcgcaattgtggcctctgcatccttaagagaaatgataaaacctggggctctagcaattatatcacccatggccgttggcgttgtcttccggattttgggccactccactggtcagcctcttcttggagctaaagttgtagcctccatgcttatgtttgcgacggttgctggtattcttatggcactcttcttgaacactgctggcggcgcctgggataatgcaaagaagtacattgagactggtgcccttggtggcaaaggcagtgagtcccataaggctgcggttacaggcgacacggttggagacccattcaaagacactgcaggaccatcgctgcacgttcttatcaagatgctcgccacgatcacactggtcatggctcccatattcttgtgattaaccaaccagatttatcaagcttgccattaaccctgcggagatgtatctatgcgacttgtagatgaggtgtttacctgcatgtgatgtaatgatccaatcggttttagtgtgactacatgttgtacccaaagaaagaaagaaagaaagcagcgatctgtacccaggttttaatggtccaatcggttttagtgtgactatatgttgtacccaaagaaagaaagaaatcagcgatctgtacccaggtttgacggtagatattattctgaatttctgacgggtagtgatggtgcaaatgccatattttgtgacggacgtcactgaactagtagcccaagtgttttgtgattgtttattgctgggaacattatgacatccgttgagcttagctgtaagaaagaaacgatccacgatggattttaagatcgtgactggatctacaccgtacctttgactcttcccattaacaaacaaactgatatgttaaaaaggtggt

SEQ ID NO: 124568 - DNA, 277 bp, Zea mays
  unsure (1)..(277): unsure at all n locations
  Clone ID: MRT4577_45085C.1
ctctgttttcgggggtggcctgccgttccctggcgctccttcgtcgaaggggcggcggctgagatcatgcgagcgtgctagccctngcggccctgcggggtcctgcgctttcttttctgcnctgcgcgcgcgctgctacttggtgaggcactctgcgctgccgctcccccgcaaccaccagcgcctccctctctgtgactcctctnncctccccgccagtctcccttgctgcgactcttgcctttagaggccggcctccatcttctctgtttaggac

SEQ ID NO: 124569 - DNA, 237 bp, Zea mays
  Clone ID: MRT4577_45086C.1
tttttgtttttttgtttgtggaagatcctaggttttggtattgctcacgtggcacaaacttaaatgtctgtatttacctgaccgtcttggtattatctccgtaggaaaaggaagaccgtccttaggtttgcacaaacccagtgtgggtttttcttttctgttgtagcaaccggtgtaggggacgccggattcagtaaccttgtcgttgggtaagggcagggcgtcatcataaaaacc

SEQ ID NO: 124570 - DNA, 260 bp, Zea mays
  Clone ID: MRT4577_45087C.1
gtggctgcttgaagaattactagctgcagcaatactttcttttgtggcacaaaatacccccccgaaaactaacatgtcacacattaatctgaactttaaattgtatttggcagtaccaatgctcagataaaattgtaactttccagggttcagaggagcacttgtgtttgcaaacagattcacaagaagtgttcaagtggactgaacttttgggaaggcccttgtgtgacgaaaacgagtgctgctgtaaaagcagatgc

SEQ ID NO: 124571 - DNA, 1119 bp, Zea mays
  Clone ID: MRT4577_45088C.1
cggggccggccggggtatagacctgcaccatcatctaaattctaccggcatacttattctcccaccataaacccctcctcaaccctcactctctcgctccctgtgcgcgcggcacacaccactcttctccttgttagcagagggctagctagctcatcccccacagcccttatgctgaatctagcaccatttgagagagccgcgcgccgccgaacccgccgcctcctccagcctccgggcacatcggagcacgccagccaatcgcaccccgacacggcggcaccggaggaacccctccttcttggtcgtagcctccgtggcctccctcccctcaccccttccggtgttggattgagggtggagcggagatccgccacggcttggattgatccctggatcgatacgccatataatttgggattctaaggtcccggtgcagcttcttctcgcagaagtttaccctctatgcccctctctaagcccacccttgtgattccgccgtgacgcctcatccacgggagaaacgccatgatgtcaaggtttgcccacttggggaagagcagaaaactcgctgaaacccttttggttgcctcaaagcccaatactgctagtggccaaaacattgcttcaagctttgcattcggcttgggttattccagcagggcatttttgcatgggaaggttcataatggtccaaacacctcctacatgctgggaagagcaaatgatagcttacattggagcactggtgtgaggaaattctcaattctttcatcttgtagccagaatgcatttcagaatcagcttgcttggaagcgacttgtagcactgggttctcgtgcaccaaaagcatctccaatttttagtaaggttgcttgtgccattggcttggctgtgagtaggtctaatataactccttaccttgtcgcttttattgcgggagaggtaatgctaggtcagaagacatctgcagatggagaatactacccaatacgtgagcgagccaggatggccgtatttacgttacctctctaatatattcggcagtagaattggtaattataatcttcagatcaatatatttggcattgctgttcactccaagtatactgatggccc

SEQ ID NO: 124572 - DNA, 391 bp, Zea mays
  Clone ID: MRT4577_45089C.1
aaaaaaaaaaaaaaaaaaaaaaaaaaaaaaaaaaaaaaaaaaaaactacaccaacaatatagaaaatccaaacttactagacacactcatttctaattcattcctctattttcgccctccctttattataattcaatattcatctcctcacaactcccacatctaatttttcccttaaattccccaaattaaaatctcttcacctctttttaccaacctccaactttgaaaaaccctacatttccccaattaattcccctttcaaccaatccccatttcccatctccctttataccaaaaatccccccccccataacctttccaaaaattttcccaaccctaattataaatcgacccccccctttatccctatttaacccacctttttttt

SEQ ID NO: 124573 - DNA, 496 bp, Zea mays
  Clone ID: MRT4577_4508C.1
tccgaaaaaaaaaaaaaaaaaaaaaaaaagggagaaaaaaaaaaaaaaaaaaaaaaaaaaaaaaagaggaggaaaaatatagaggatacaaaattaaagaacaaaaaaatggcaacgcagttctagcgttattctaagtgttacctgccttgcgattccactggccgtttgttcttcatacgtcgtgtacttgggatagccggggggtccccccattttaatcgccttgcactgcatccccctttgcgcctgccggttttgttgcgatttggcccggtccgattgcccttcccttctgtttttccccctggttgccgaatgggacgccctctgtgccggtgccttgatcgcgtgggttgtgggggttcccctcatcgtttccgttaactttgccagctccttggggccccccccttttgctcccttcctttcctttctcgcctcgttccccggctttcccgttcgttttcttaattgggggctccttttggggttt

SEQ ID NO: 124574 - DNA, 369 bp, Zea mays
  Clone ID: MRT4577_45090C.1
acggtgcgttacagcgtgggcgctgcacgcactttctggcatcaaggacaggctcctcgtctgggggcctttgctaccgtcgaagcgggcgctcgcaccactgcccgtgggccgctgtaacacgcgccggactgtgcacgtctgacaatccaagaacgcactggaccaaattgcagtggctgactagaagaactgtgacaggttgctgatggcgtgcgagactccactgctcatggagttctgggcgctctggtgagtaccgtgccaaaagatcgcgccgatgatctacgagctacccaatgactacaccaacaagatcacctgctgtatcgtgaacactgacgacagcttatacatggcgtctaccta

SEQ ID NO: 124575 - DNA, 331 bp, Zea mays
  Clone ID: MRT4577_45091C.1
accggatctagatttccgtctttgtcaagatcgatctccacgtctgcttgggcgtttctgctcccagctttaatttctcaagagccaaatgtcgccttcgtggaacggcttcgtcagtgattaatattacggcagcaactcatctgcaggggcattgggcaagcaacagacgaagcagaacatcatagcagaacgaatcgagaacagccgaacatcataaaaatttaagcataaaaatcttatctagtaaactagttaagctcaaatttgagcggtctacgtattcccaagaaagcgggtgatcttatatctacaagtagggacgtatgat

SEQ ID NO: 124576 - DNA, 598 bp, Zea mays
  Clone ID: MRT4577_45092C.1
cattgggtacctcgaggccggccgggacagtcctgagcgaacctcgccactcgcccactccgctcccaaagaagaagaagacgacgacgacagcaaggtgccgccgtcacgagatccgtccgaggtgaccatgtctacgcctacgaggaagcgtcccaggaaaaccaacggctccacgtcgtcgtcgtcgtccgcgatgcgtcggacgacgagcctgtcggacctcgcgccgccgccggatctctccgggaggcccaagacgcgggcggcgagggggcatgcggtggcagggccagggaccgcgtggggcgccgagataacgatgacgcactcggcggacttcctccccgccatggagacggcagccttcctcaaggcctgcgggatctgcaaccgccgcctcggccccggccgtgacaccttcatctacatgggtgaggtggccttctgcagccaggagtgtaggcagcagcagatgaacctcgacgagctcatggagaagaagtgctccactccggctggcggcggtggtggtggcgtcggcggcggcggcggcggtggctcagatcagcccggcaagagcagcaccgtagcggcc

SEQ ID NO: 124577 - DNA, 637 bp, Zea mays
  unsure (1)..(637): unsure at all n locations
  Clone ID: MRT4577_45093C.1
cagaatcactgccgtcatatagactgcgcctacacncgcagtagcccgcgcgagagcctcgtacttcattctctccgtctccgtgacgaggccgactctttcacaggtgccagtgctactgatacacgccgtcggccccacggcattctgcaacccttaactccggtgatcctctcgcccacgatgcgtagctcacccagaacgctacagtgaggtgctctctctcaccatttccacagctcgatgacgaaggttaccacaagaagactttctccatgacatactgaaatgagatagtctcttcttcgacaaatgatctccggataccagagccagcatgtatacccatgccgacatgaattacgcagaccctcaagagatcagaaactatctctgctccgagatgctctcagttccaaccatataccccttcttccacgactgatatgctcgtgatcctggccatctgcgtctacgctacttctccaccgcaaccgcctctccgaacaccgaatccaacaactcatgacggctgtgctcgttgcacgaatgctctattgcatctcggcggacgaggaccatcactacatccgcacggacgagacaccgnatggtgtgcgatgtcatgttctacctg

SEQ ID NO: 124578 - DNA, 624 bp, Zea mays
  Clone ID: MRT4577_45094C.1
aaaagcagaagaagcatccagcatcagaggtttacaaaagaccatagacttaagagcatacacataaagagaggagacatctcttcgatgccaaataacttacagatcggagaagacgacatggcgtgtgttcttcaaccaaagcattgaaaaactttatacattatacttaacttaggactagtaatcacgtatacgagtatactgtttctcactacctaatatatctatggtgtgcgctacaagaggcacttaaaaccttctaacctgaagctactagatacacgcgcgccaacagaagcgcgaactgaaaacctgtggcgccatattatatatatatatactttacatctgctcgaacgacgccgacaggttgacggcgatgctcgacaggttcgtgtcccccaggcgcgacctcgcaaccctgtgttgcttgggcgcgccggggcccttcgtcgtcgtcatcgccgccggcggtttccctcgtctctaaaaccggacttcgccggcggcgtcgagaacttgaaatgctgctccctagcaacgatggtcgcttcgttgaccgatttcgatgtcagggaggaggttcccggacgcgtgggcggacccttgggtcaacccgga

SEQ ID NO: 124579 - DNA, 425 bp, Zea mays
  Clone ID: MRT4577_45095C.1
gggaaactagcctggggtattttcattaaattaaaccatcccccccgacctgccgaaaaagggggggttccggcaccaacagcaatataatttccttggcagggccagccaggatcaaaccaaaaagggttccaaacatggaccccacacttcctgaccattttgatgacacacacatacaatggatggggatgacaatggggacaaaaacaggcaagtctcactagggctggttgccttttggcgggcgacacacggggttcaacttcttggcggggtcaggccaatggggctgggtgcggcacatgaagccgtaccaggagttttccctttccgaagaatttgggggaaaaaaattttggggcaatgatccccggaaccagtagagcaggaaatcaacaaacttgctgtaacaatgggtgcaa

SEQ ID NO: 124580 - DNA, 947 bp, Zea mays
  Clone ID: MRT4577_45096C.1
gcggccgcttcgagggcccggccgggccaaagacaccaacacataccaagctctctctactctctcaagatgtagctctagtagtagttagtcttggtgggagctctgctaggagtctggagtagtcttcaagagtctgaattatctacatgagcataagaaatatcaacagaaagcaggccctaaaagataccaaacctatagttgactcgaaagcaatgtctttggaaaatgaaagcgcactacagacggtgcacgtaagaagaggtggaagaaaatgtcaatcctatgggagctatcttactggaaagacttagaggtccaccacaacatcgatgtcattcacgtgaaaaagaatgtttgtgggagtttgcttgggacactcatgagtgatagatggaaaaccaaggaccatgcaaaagcacgagctaaccttgaagaattggacataaggcccgagctctatcctgacagtaccagtgcccaaccacctttatccagaatatattgccagaaaaaacccgaatggcaatcatgaacctctacttatttaatgtaatctctcagaaggtccttgatgaaggatcactggatgatcatgaaatgaacatgtgtgagatgatgtgtcttcccgagcttacttctcgctgactttctttgacatatccatcctatatttggttaaggagatcaggtttcttgcaccgatgttcctccaccacatgtatctgtacgagagatttatgagtactctgaatatccaaacaaaagaagacttttgataatcagagtacaaacccctttgttcagttgtgtgctaacaaacttagagagtgatctctacccttttgctcttgggttttccttcggggagattacagaagcgaccgcatcatcgccacccaatcagtgctcctgatccattgattctaggttgcgtaggttgg

SEQ ID NO: 124581 - DNA, 2165 bp, Zea mays
  Clone ID: MRT4577_45097C.1
gccggccaccttcccggaggggctcaaaagcttggacctttccgggaaccggctgagcgggggaatcccgccgggtctggggagctgcgcgacgctccggcgcctgcgcctgtcctccaactggttggctggaaccatcccgccgcggatcggggagctcgcgcggctccgcgttctggacctgtccgggaaccggctcaccggcggcgtgccgccggagctcctccattgcaggggcctcgtcaggatggatctcagcaggaacttgctccacggccggctgccctcgggcctcgcgcagctcaagaacctgaggtttctctccctctccggcaacaatttcagcggcgagataccttccggtttgggccagctggggtcgctggaatttcttaatctgtccaacaattctctatcaagggaggttcctgctgatcttgtggcactgcgaaatcgcactgtcttactgcttggcaacaacaaactatctggggaggaggagataactgctgctgctcccggctcaccagttcatgtagttactgctcattcagttacaggtgaactgtttcctgtttctcctatagcaacagctatccgtaagctgatcgatacaggtccaggcacttctaatggcagcaccacgaccaccagcagcagcaatggtggcgatggtggcttgggaaccaaagagattgctgccatagcttcagcatcagccattgtggtgcttctgttagttgcactcaccctgtgcatctgcacaaggaaatggcgtctgaaaccatcagagcgctcctttgcgagcaaagaagtcaaggttttcgctgatgttgatattggagcccccctgacatatgagaccgtcgttcgcgccactgggaatttcaacgctagcaactgcattggtaacggcggctttggcgcgacatacagagccgaggtggcacctggagttcttgtggcaataaagaggcttgctattgggaagcagcacggcgacaaggagttccaagcagaagtgaggatcctcgggcaatgccgtcatcctcatcttgtcactctgttggggtaccacatcaacgagtccgagatgttcctgatatacaactacctgccaggtggcaacctggaaaggttcatacaagagaggggcaggaggccgatcagctggagaaggcttcacaagatcgccctggatgtcgcccgcgctctcgcctacatgcatgacgaatgcgtgccccgcgtcctgcaccgggatgtcaagccaaacaacatattgctcgacaacgagtgcaacgcctacctttccgatttcggattggcgaggctcctccggaactcggaaacgcatgcgacgacggacgttgccggtactttcggttatgtggctcctgagtacgcaatgacatgccgcgtgtcggacaaggcagacgtgtacagctatggagtggtgctgctggagctgatttcagacaagaaggcgctggacccgtcgttttctccatacggaaacggcttcaacatcgtcagctgggctgtgaggcttatccagagaggcagggtccgcgagttcttcgtcgagggcttgtgggagaaggccccgcatgatgatctggtcgagttcctgaacctggcggtgcggtgcacgcaggagtcgctcgcttctaggcccacaatgaagcatgtccttcgatgcttgagggaactccgtccaccttcgtactaggaagacaaggagcgcccccgggcgcctaaatacttaactaagaagagctgatgggctgacagctaggtcgtctccctgcgacgccaagggggggttgggtagtagctgtggtgaggaggtgccatcaattttgatctcctctagcagcctcctctccaccaggttttactgatgcatcacattctaggtagatggatgcttccttcctccccctctctctctctgtccgtctctcaaaaagaaaaaaacaatgaaaaacatagaaaaaaaaagcgaaaagaaagaagaaaactgaatgcttcaacagttgtgcaattagataacatttgagcaacattactttctttcctctgcatgatttgaggaacaacaaaaaaagaaagaaaggggggtaatgacgctcaaatggtatgtagctgcagaaccctggaaagca

SEQ ID NO: 124582 - DNA, 277 bp, Zea mays
  Clone ID: MRT4577_45098C.1
atgacctcgagcgcgcgcgagccacacagggggcgagcatacataaggcgacggccggcacccgccggcacgatggcgagggagccaacagctagacgcagcaacggagggagcaccaggacagggagaaccaactcgcgggacaacaactcgaacagagaagacaccacctaccacgcggcaagagaggaccgccgcacgacagctagatacacgacccggacacgtccacagccaacatacctgcaggcgcaacgagggaagaaggcgaccacgc

SEQ ID NO: 124583 - DNA, 192 bp, Zea mays
  Clone ID: MRT4577_45099C.1
gaacacgaatgaatgccatgattgacgacacaagcgacgacatgcaaggcacgctaggaaagccccacaactgatactctacaaaaggacaccttccattactaaggcacgagacacctatcatgtttacagaaaacactacctaatacatatgggcgagcatgcacaccgccttgaatgatggcgggggac

SEQ ID NO: 124584 - DNA, 433 bp, Zea mays
  Clone ID: MRT4577_4509C.1
aatcggacaaactggtgctaacaactaatacttgtagatgagcactgccatacaacaataactctcaagccaaaagcaaagttgggcctcagaaaccaacacttactagtgttaaaagacacatgaagacatcctctaaaaaaaaatagggtgcagtataaacgtgcacatctgaaccagctcaagatgatgaacgaatgtaccatggttcttatttaatacactccaaatcaggctccataagtcttgggatggtcaataagtactgagataaggcagatactgaagaactagctgttgaaggaaaacacgaagaacttggcatcctcctcaagagaccaagaacacactgaggccctgcgtagccttgttagtactggacatcaactaggcaaaaccttgttggaagggaggaatgaaatgtgattaactc

SEQ ID NO: 124585 - DNA, 396 bp, Zea mays
  unsure (1)..(396): unsure at all n locations
  Clone ID: MRT4577_450C.1
ctctactgactgtgcctagctgcgagtatcggcccatgtcttctcccgaactggacgggcgcgtgcacgtgctcctagtcgctcgtccgcacatttcgttccgcgggagcttgctggcgcgtgctttggcatgtgcgctgtgccagttgcataccaagccctaccataccaggggtgcgtctggctttgttgctggcctcccgcctggccgcgctttttgtgtgtaggcttggcgtgcctccactctcctccttgtatccaccgatacacttgtactcgccgctcatgatgcattttccacactgntcttaccttacagcctgatacaggctccactgcctgcgttgatccattcatcaatctctttgatgtgctctgcacttcgcgttgctgaca

SEQ ID NO: 124586 - DNA, 822 bp, Zea mays
  Clone ID: MRT4577_45100C.1
aaaattccgcttctcctcacagataaccacacactcgtcttggttctgcaatggaggcgaggtgcctgctgctcctggctgtgctcctcctggcgggagctcatggcggggaggcgcagccgctcgtgccgggggtcttcaccttcggcgactcgtcggtggacataggtaacaacgactacctccacaccctcatcaaggcggacttccctccctacggcagggacttccccaaccgcgtggccaccggcaggttttgcaacggcaagctggccaccgacatcactgctgataccctggggtttactagctacccgcccgcgtatctcagcccgcaggcgtcagggaagaaccttctgatcggggccaacttcgcgtctgctggatccggctactacgatcacacggcgcttatgtatcatgccatccctttctcccaacaactggagtacttcagggagtaccagtccaagctgacggcgtttgctgggagcagccaggccaagtccatcatcagcggctcgctgtacatcgtcagcttcggtgcaagtgacttcgtgcagaactactacatcaaccctctgctcttcaagacccagaccgtcgaccagttctcggaccgcctcgtcagcatcttcgtcaacagcgcgacgcaactgtacggcatgggagcgcggcgcatcgcggtgacgacgctgccgcccctgggctgcctccccgcggcgatcacgctgttcgggcacgggagcaccgggtgcgtgtcgaggctcaacagcgactcccagcggttcaatgggaagatgagcgccgccgtcagctcgc

SEQ ID NO: 124587 - DNA, 340 bp, Zea mays
  Clone ID: MRT4577_45101C.1
aaaacaaaaaaaattgctcttgcatttgggaggagggggggttctaatacaaaaacaaaaatttttccctttggccaaacaaaagggccaaaaattggaagcctatataaattggcttgaaccccctaaaaaaagggggctgggacaaaaaaaaatcaagagttgggaagggacaccttttttgttagtaaggggggggccccccccgcctcacaggaaacttgcccaacaaaactttttcaaaaacaacgggttgcgggcccaaaaacatacggaattctttcctttcaaggccttggctgaaagcaaaagaattgtaagggccttggattaagcagcc

SEQ ID NO: 124588 - DNA, 333 bp, Zea mays
  Clone ID: MRT4577_45102C.1
taggggccttttttttttttttttttaccaagatggatgcataacttggtgaacatgattagaagacccgtataaatgcccgcttcatccatgggcggaggaattgcatgcatacccaaaggtctgcaatggagaaatggcttaacttgactgggatataggagaacattactgctccttgtagcatatataagcataattcggaagtggccttcaacttgaaggagacggagaaggccaccactgagagcgatgaggtactcccccagcaagacctagatacgcaccgacgaagaatcctcacctgaacttggtccaacacgacggtgtgct

SEQ ID NO: 124589 - DNA, 550 bp, Zea mays
  Clone ID: MRT4577_45103C.1
gatagccgctaagctcttctactaccagcgccgccgcccgccaccgcttccggagcccaccgagccccgcggtctcgactcctcctccgccgcccgccgccgggttcaccccattcgctccgcgcaccacaggccgggctatgaagttgttcgaggaaaccagatagagcgaagggcgtctagcggaagcataacggaacccacaaggaacgtgctcttcagcacaagacacagcgccaccgcatcaaatgaccgacttcctgatgcggttcagcaagccaaggagaggcttcatcaaaggctccgaagtgtagacctattttcagggagaaggcaaacatcaccagccgtaggaaccatttgggccggacctgatcttccttctgaatgtgatatctgctcatcagaggatggctggttggcccaccggactattcgcttcaactccagcgcctccctgtcagcctacaaagataaacagatcacagcagagacgttcagcaacgcggcggtggtagcaccacacgacctgaggcctgtctccaaacta

SEQ ID NO: 124590 - DNA, 271 bp, Zea mays
  Clone ID: MRT4577_45104C.1
ggtatgcacacacccaacacctaaggattgcaaaggcctaaagcacattacataccgtttgaagatttgcagggaaaggtttttgaaaaaaagaaaaaaacggaaacttggggagtccaacatatctggcaagaaagcttggaatcggaatgtttttagggtaaagaactctaaagcttttgtgcaagggcctgatagaaaaaataactccaaaacaaacaaacagtcctacagggggccgggggggttaccaaccacccttttgcccttg

SEQ ID NO: 124591 - DNA, 248 bp, Zea mays
  Clone ID: MRT4577_45105C.1
ggaagaatgattacttggtgtggttattcaaaccaaaattaaccaaaataatatgatgactaaaaccactttggtgttttctctccctcttcgtattaaatatttttaacactagttccttacttgaaatcataccttttatttttttggtgacttagccttaagccctcataaaaactgtcctttgatttcagccttttttcttcttcaaaaactgttgtaggatggaatgctaaaacacaaaggta

SEQ ID NO: 124592 - DNA, 1126 bp, Zea mays
  unsure (1)..(1126): unsure at all n locations
  Clone ID: MRT4577_45106C.1
acttctcgtcagcttttgcagtggtagacataatttgttgagcaagcaacaactcagtgatggcctttaatttgttcttaccttattggaagatactctaagtgatgctccaagagccaccgagtaccttggacgactttttgcaaggtttgtggaggaaagcatattgctcttggaagaggtaggtaaattgattcaagaagttggagaagcacgaggtatctaatacgagatggcatcgccgctgacatccttggtgctgttctggattccataaaatcagacaaaggggattcattcttgaatgaggttaagtcaacttcgagtttaaaattggttgatttcagaccacatcatcttaagcgatcaaagttggatgccttcatgtagctacatgagttattattacctgattcaccaatgggtgcggccgccaagcagtttactttgttcgcacgcaaatacccatcggcctttttgatgtactgtgaaaaattcctctgatgctactcctacttgctgtacctgatcgtgcactatttataagatggaaggcgatgggtcacccattttttcagagttgatgctggttgtaaactactgtcaatgaagggtcatgggtgggaagcagctagctaggcccccataagaggatcagggaatatttttgcgatcacagggagaagtctgctaaccaatattagttggtagttgggggaactgtaggttgaacttaatgcctcctgcgggcttctgaccaaatactcctttgtgatcagaattggtagtcggttaacttagcggcattttcgtgatagccaatgtttctcgtgatggtctgaatatgttgatgttgcttaaattttgctgtaatttgctatttttcctcgttctttgtttttgtacttattgagaattgatgcctcggattctctgatgtatgtatgattgggctccaggctcagggcactttgccatccctattttgtcatttcggttcttccttctcgtggaacgtaatgagtgtgagaaagtaaaattggtgaaagtgaaaatgggaactgagagcnnnnnnnnnnnnnnnnnnnnnnnnnnnnnnnnnnnnnnnnnnnnnnnnnnnnnnnnn

SEQ ID NO: 124593 - DNA, 590 bp, Zea mays
  Clone ID: MRT4577_45107C.1
cctgcgttacctggaggcgcgcgtcgcggggcgtggcctgctcgtccgggggtgggcgccgcagctgctgatcctgtcccacgacgcggtgggcggcttcgtgacgcactgcggctggaactcgacgctggaggccatcaccgccggtctgccggtggtcacgtggccgcacttcgtggaccagttcctcaacgagaagatgaccgtggaggtgctgggcatcggcgtcagcgtcggggtgaaggagccgctgacttaccaggtcacgaagaaggagatcctggtgggacgggacgtggtggaggcggccgtgcggaccgtgatgggcggcagcgaggacgccgaggagaggaggcggcgggcgcgcgcgctggcgtcaaaggcgcagctggccacgcagatcggcgggtcgtctcacggcaacctgcaggatctggtgaagcgtttcgaggcatagcgccaacgtgccgagacgtgaccgattgccaataaatgccaagtctctgctccggcgtttctacgaacttctcccatgtttgtattgatgcacagaatccaagtctcctgtttgcactacgcaagattatgat

SEQ ID NO: 124594 - DNA, 252 bp, Zea mays
  Clone ID: MRT4577_45108C.1
actgggagcggagagagggcggggggagcatttaccctgctggcagcgtatcacccctgggagggtaaggaacaaccggcacgcgcggacctggacaccagggagaggactccgtgggcaacggacgacatatcctacgaccatatgtacatctgcatgtgacatagagaaacacaaccagcaaggataagcacgcatagatacagacacacatatatagatacaaaggcgcggtgacgcagagagcgcaca

SEQ ID NO: 124595 - DNA, 592 bp, Zea mays
  Clone ID: MRT4577_45109C.1
cctttatctgggcactctatggccttggttaaataaaagtggtatgttgttgcaaaaaaaaaaaaaaaaaaaaaaaaaaaaaaaaaaaaaaaaaaaaaaaaaaaaaaaaaaaaaaaaaaaaaaaaaaaaaaaaaaaaaaaaaaaaaaaaaagggaaaaaaaaaaaaaattttaaaaaggcccctttggccgctaacaaccctaaagggaaaaattttaaaaataccaataaaattagcgggccgttaaataaaaaatctaaagggccaaattccccttatattaaacaaaataaaaatttattggcagtcgttttaaagataagaattgaaaaaaccttgatttaaccaaattaaatccctttaaaaaaaatccccttttcacaatttagggaaaaaaaaaaaaagcccgaaccaatcccctttccaaaaattggccaaacttaaatggaaaataaaacccccctttatcgaataataaaccccgttggttttggtgtttaccccaattggaaccgttaaattttaaagcgcccaaactccaaatctttaagtttttttcctttcctttctcacaactttaaaaggttttcc

SEQ ID NO: 124596 - DNA, 519 bp, Zea mays
  unsure (1)..(519): unsure at all n locations
  Clone ID: MRT4577_4510C.1
tcgctgggntgggggcatatggtggccttggaattggtggaggctctatgtaccgcatacaacagggagcaggtgggctgcctgcaggcgcatttggtgatggagggagctacccacctccaggttctggtttccggggccagtacttttatagtggaatgtctcctcctggtccaggtggcagggctcctcctatgtatcccaacgtgccaccttatttctaaggtgtttgcctcttgggagcatatttcttgtgctgaattcagaagtgttgttacatggatgtcttgcatattctggctacttctgatctgaaatgtggaatgagtttgcactcccaaattttgctgctaagggatacatgaagctagtttgttgtgatagttgtgataatgcttcacatgtacttatgactgctttgcagtttcattttctatatagataaaagaccttgcatgaagtgtatgttgtgttgattatcattgtattatcatatgaaatccctttattttcatggtc

SEQ ID NO: 124597 - DNA, 107 bp, Zea mays
  Clone ID: MRT4577_45110C.1
tacaaccacggagaggcggaaacccatcagaactaatccccaaccccaaagctacaagccacccatcctctactcatgcaatccgggcggacatggcctgctccttc

SEQ ID NO: 124598 - DNA, 416 bp, Zea mays
  Clone ID: MRT4577_45111C.1
cttccctttcggtcttttttttttcaataacaaccggccggccggctttttcttcaacaatggcccgtcgtggaataagggccagttcaagccttttgctttttgccttgtccaagggatccgaaaaaaatgggcttcgaagccgacttgcaccggatccagggcccctggaacccccaagaagaccaaccccttccgccggttctggaaccgcaccgccccccccacttgaccgggaaccggccccaaaaccccgggccggccggccaatcctgcccgcttgcggggggccacccacttgccccccaaggtgaacccccgccctttcccggcgaagaagaacccggccttggtccggcccaccccccccttgggaaaccgttgggccgcattgggccgcttcttcccgggccgaa

SEQ ID NO: 124599 - DNA, 685 bp, Zea mays
  unsure (1)..(685): unsure at all n locations
  Clone ID: MRT4577_45112C.1
aactacgctcctcaaccttcccgagatctggtgggttcggagcaccctccggcttccagttcctttgttcctcgcgaagcctcaccgcgctgcagagcgcatcgccgagcccccgcctcacctcgaattcttctcgcgtagttcgttgccctcctccttccccttctctcctcgacaagtacacggcggcttggatctatacgaattcggcatctgtattttacctcatcggggatggaggtgcaggtgtttgatttgtcttccgactccgagggcgaggtgacggcgcactcgcccgatcacaagcgcccttctcgacagccgggtgcagaccctaatcgcgggggtggcgagacaggttccagcgccctggacagcctcttcgagcaagcgggcgcggcgaagccacagcgtcaccccagtgacgcgctgaagaaagggaaggagaaggccgtcgagggggagagcgcggggcctccgaagcacagtggagaattgctcggtgctgctggccgcgtcctgggatctgggagtggtccgtggagcgcactgatgagcaagtgcaaggctggagacggtgggaacaatggagctgggtgttggggtagttggggtgaccggngtgatcagcttactaactcaacccccatgccgcgtctagggtcagagaggaagggtttgatga

SEQ ID NO: 124600 - DNA, 439 bp, Zea mays
  Clone ID: MRT4577_45113C.1
gcgctctcgttcaagcatgcatagagcaataccttcaaagttgctgagcagcctgctttgaggacaaaaactaatggcattgcgctgctaccggtgacctgcatgcgggttgtgacacacctgcacctgcttgatgcaacagctaacaatgcagttgctgatctgagacgacgatggtgaaattaacatgactatgatcaacacacatatcatcgcagtggaccaatgaatcataaccaaaagtttatgcgaagaagtatgaacaacacccacatattcataactcaaccatgtaaagatcacagaaagtagcggtctgcccaaggcaaagacctggttcttccataccaaccgcgtcaactggagtggccgctcaaagtacaggagatgttacactatcaactccacattgtgtcaaaataggtctgcttgaaacatt

SEQ ID NO: 124601 - DNA, 330 bp, Zea mays
  unsure (1)..(330): unsure at all n locations
  Clone ID: MRT4577_45114C.1
ggtgagaacagctgcattgatcgatgtgtttctaagtattgnantaatgtttgtttctatgttcttggtccattccatattgaacattcatcttgttttcggtagttttatagcttttattagtgaaaagatattgcccctgtttggttcagcttctggtcggtttctggccgccagaagcagaagctggaagcaaacgctcagattttggcgcggcttctgcccgacgcgcttcggttagaagccccccgcgcacgggctggaagcggccttcacttggcttcggatagaagtctgtccacttcgctagggtactcgcccaagcacgcg

SEQ ID NO: 124602 - DNA, 714 bp, Zea mays
  unsure (1)..(714): unsure at all n locations
  Clone ID: MRT4577_45115C.1
tccctccggcctcncggtttatagagaggagggagccaaggtggggctcctagcggctcctcccccactctccatcttgcctttctctcgcgccaagaggagccgttttatgaggcgatttgttaaaaaacactagctcctttagaggaattgctcttgaagagaagacaaagttagagtcattttcagtggagccgaagtcgtgacaaacataccctaaatacatcaagttcttcatcaagaaaggcgtcgagtggctagagtgccttagcaggaccggatcatcggtgcaacttgtgttgaaggattgcaagggaatccttcaccacaagtttgacctcctaaacaggtctccaggatagataaagcttgagaagtttgagatcaatggcaattattggttactagggtctccctgatgatggtttgaacatgtttaatggagttctccatgggcaccaatgcttaatgagattataatgtgcgatagtgatggaaaaagatgtaggggggagatcaaagttgatgtgggaagagacggtaaaagaagacttacanagatgaaatataataaaagatttaaccttaaatagggtgaattgaaaatagttatccacatgactgaaccttgatctgtgggctctgatgggttttaactttagcctatccaacttacttgggactaaaagattttgttgttttgtttgtgttgtt

SEQ ID NO: 124603 - DNA, 578 bp, Zea mays
  Clone ID: MRT4577_45116C.1
tccggcacgcgtccggccacccggtagcggccacgcgtgcgcccactcgtgcgtccacgcgtccagacgtatgttgctgctatggaaacactctgtctaaggatccaacttatactattgccttgcagatcaacagctgcacaaacccttcacatttttgattcgagggaagaattaccttgaaaatctaaagaagtttaaggcaaagggcacattgatgcaaatggtcgatgcagattgggtaagatctgacaaacgacaacatgatctacgagggcgtcctgggggcattcggcaggttctcctttgttattatgccatgagttacctgtaaactcaagctgtacttgttgcattgtgcaatatggttgattgtaaatgcgaaaattggagaacttttacgagtcgtttatttgcagaaatatgctgctcggggagggccatactttttcttcattggaaacatacaggtgccaggttcaacaacatataggctagcactatactatatgatgaatactcctgtggaagattcacccttgctacacaactgtgtcaacggagatgatgcatataga

SEQ ID NO: 124604 - DNA, 466 bp, Zea mays
  unsure (1)..(466): unsure at all n locations
  Clone ID: MRT4577_45117C.1
attattatattttccccnnnnnnnnnnnnntttggggttgttttttttttttttttttttacatcacaactgaaaccagagcactggaacacacttcggacaatataaatcatggggcaagggtgccaaccaatttaagggcccatacctacctacataatttttacacaggtaacatacccagggggggggcatcacccatccttggtattggtgggggcccgccgctaagggtttagggcgatcacttgacccccattaactgggcatttttaaaccaaaccaaacttttaaaagacgcattatcaaattttttttggaaaacctatggtacaacactttttccttccacggattttttttctcaagggagaactggcgcccggaaccaaatggggggcttttttgggaacgacaaggtacgccattatggtttaggaggaaccattttctggctgccccgggc

SEQ ID NO: 124605 - DNA, 365 bp, Zea mays
  Clone ID: MRT4577_45118C.1
cccacgcgttcgaaaaaaaaaaaaaaaaaaaaaaaaaaacaaaattacaaaacaaataaataccggcgtatacatattatgtggcgtctctctaaatttaattcactctccgttcctttacaacgcattcaactcttaaaaccctgtatatacccacctaaatcccattgtatgacattcccttttcaccacctttactactaatgaccaggtcctcaccaattgaattccctaacagcttctcaccctttatgcagaatgaaactcgccctgtagccccccattaatcgctcattaaatcctgtttacgcgcagaatgaccacatcactccccccttacttaacacctcaatcttcccctttct

SEQ ID NO: 124606 - DNA, 527 bp, Zea mays
  unsure (1)..(527): unsure at all n locations
  Clone ID: MRT4577_45119C.1
ttttctattgaccccgaaacgataaccattagatcgttgtgaattgcatgaaggtatgacaccatctatgctccttcgttgtgcaaagcttattaacaatatagtttgtatattgttcttctctcttctttgttacctttgcacaacaacataataactaacaagcaatttaggcacaactaatcctctcttcttgtttgtatacaaatagttgttttgcgtacataagaagggtgtcatcgcttttggatcaagaatgcttttatctacatataaccaaactgttgaagcctttccaactctgtatatgttcatgcgaccccggcgaatgaactctaattaactcttggtgtaggctactcaaatgctacttaatattaattgtcgtctaagtttactctacaactgatgtaagtgctagaatctgcttaagtttggctttgtacttatgtacttatatgctccataactattgttcttgttgtacatatgatcgcgatacaatatccaatccaacatgctcanna

SEQ ID NO: 124607 - DNA, 1066 bp, Zea mays
  unsure (1)..(1066): unsure at all n locations
  Clone ID: MRT4577_4511C.1
cattgggtacctcgaggccggccggggtccgctgccaccgcttctcgacaccccgcccaacactcccagccgtcacgccgtcgccgccgcgagtccttcattcaccatgatcatctccaagaagaaccgccgcgagatctgcaagtacatcttccatgagggggttctatatgccaagaaggactacaacctggccaagcaccccaagcttgacgtgcccaacctggaggtgattaagctcatgcagagcttcaagtccaaggagtatgtcagggagaccttctcctggcagtactactactggtacctcaccaacgatggcattgagcacctccgcagcttcctcaacctgccgtcagaggttgtgcccaacaccctcaagaagtcctccaagcccccgtcccgtccctttggctctggcccaccgggtgaccgccccaggggtccccctcgctttggggaagacagacctaggtttggggatagggatggttacagaggaggtccacgaggtgcaatgggtgattttggtggtgagaagggtagtgctcctgcggatttccagccatcttttaggggtagcagacctaggtttggccgtggtggcggcagcgcttttggtgccagtggatcttccatggagtgatctatcaacttaaggccttgttcggttattccntacaccacatgtattggatgggattggaaaaaattagtagagattttgacttgctatggatttaaacccacagaatcacatccaatccacatggattcagctgaaaacgaacaagccctaagcgggaaaattgattcaggataggcacatgtttgttgatctttgaacttttgaggacaatgagattttggtttaccgagctgttgccgtggcttgacatggttttgtgatcctcctttttttgttacattaaattattaaagcagcaagtcatcattcgcatcaaaaaaaaaaaaaaaaaaaaaaaaaaaaaaaaaaaaaaaaaaaaaaaaaaaaggaggaaaaaaaaaacccaaaggggggaccagaaacccaaataacccttgg

SEQ ID NO: 124608 - DNA, 259 bp, Zea mays
  Clone ID: MRT4577_45120C.1
acccgtccggcaacgcgaacaaccacaccctcgaaaaaacatcattactactttttcgaaaaacatcaaacactaatgacaactggacaatatatatccataacatcaacagactcccttaccactgacatatccaagaatgaattgcataccttctctagcactacagatactaaagccttcccctacatatagacggttcactcttagaagatcattacacctcctttatgcatcctctaatcaaactacataacta

SEQ ID NO: 124609 - DNA, 228 bp, Zea mays
  Clone ID: MRT4577_45121C.1
atgatcgaggaccgtaggtgatcacgctacggagctcagtgttcgcctctagctactacagacgcgccacagctatgatcatgacggcgcggagcatcattgaaaagtactatacgcgcctctgcaacgacttccacacgagcaagcgcgtgagctcggagatcgacgtgctcgccagctaacaggctcccagtacgatagcaggttacatcacgcatctgatgatgc

SEQ ID NO: 124610 - DNA, 2192 bp, Zea mays
  Clone ID: MRT4577_45122C.1
atttcgcttcggcgactggacgggttcacaattggaatggcatccagcaagagatcacgggcagggtgcagcggaaagttctttatgagatcagttctgctgttcgaatatttgggagtgccaatgatactgaagtgcgtgctactctgtgggtacaagaatatggtcgtgagcgatatgtgggactggccaaaaaccagacttctgatcagcaatggacacatttgaaaggaaagttcctccttcatgctccctttaccaaagctgttattttcatagaagggcctcctgctggaattgacattcttgtagatggtcttgtcttatctccagcaagaaagctccaagctgcaccatgcccaaaaattgagaatgttctgtatggaactaatctattgcacaataatggcttcactcgtgggctttctgggtggagtcctatgggttcatgtcgattgagtatccagactgaagcaccccatatgttaccttctatcttgaaagaccgtgcaagccagaaacatataagtggtcattatatccttgccacgaaccgcacagatgtttggatgggtccttcgcaggtcataactgataagctaagattgcatgtcacttacagagtatctgcttgggtacgagttggttctggaggacatggacgtcaccatgtaaatgtctgtcttgctgtggataaaaaccaatgggtcaatggtgggcaagtggatgctgatggggatcaatggtatgaaataaaaggagcattcaaacttgaaaagcagccatccaaagttactgcatatgttcaaggccctcctgcaggtgttgatctcagagtcatggactttcaaatatatgccgtcgacagaaaagcacggtttgagtatctgaaggagaaaacagacaaggtgagaaagcgtgatgttgttctaaagttccaaggatcgaatgcagtgaatcttctaggttcatctttgaggatacaacagaccgagaatagctttccatttggatcttgcatcgcgagacacaacattgagaacgaggatcttgctgagttttttgtgaagaacttcaattgggctgtatttgagaatgaattgaaatggtaccatacagaagcagaacaagggcgacttaattataaagattctgatgagttgcttgagttttgtgagaaacataagatacaggttcgtggccactgtttattctgggaagtggaagacgctgtccaaccttgggttcagtcattgcaaggtcaccacttaatggctgccatccaaaatcgtttgcaaagcctattgtcaaggtacaaaggtcgatttagacatcacgatgtaaacaatgagatgctacatgggtctttctatgaagacagattgggaagggacattagagcttacatgttcagagaagcacataagcttgatccttctgctgtcctatttgttaatgattacaacgtcgaagatggatgtgacacaaaatctacccccgagaaattggttgagcaggtcgttgatctccaagataggggcgctccagttggtgggatcggtgtgcaaggtcatatcagccatccggtaggagaaatcatatgtgattccctggacaagctcgccatactgggtctcccgatctggattactgagttggatgtcacagcagagaacgagcacatacgagctgatgatctagaggtgttcctccgggaagcatttgcacatcctgctgtggggggaatcatcctctggggattctgggagatgtttatgtttcgagagcacgcccatctggtcgatgctgatgggacaatcaacgaggctggcaggaggtaccttgctctcaaacaagagtggctgacccgtatgaacggcagtgtcgatcaccaaggagagtttaagttcagaggataccatggttcgtacacagtggaagtgaacacgccttcaggcaaggtagctagatcgtttgttgttgacaaggatagcccggttcaggtgatcgctctgaatgtttaatgtgtgggaaatcatgcgcctgtcctgtattttagcgatgtactgaggtgttgaacacagatagtttcatagctgatgccacgccttcagtgtacagaaatattttcacgtttattctctgttctattttttgggtgattataacgcgatatttacattgccataaaa

SEQ ID NO: 124611 - DNA, 346 bp, Zea mays
  Clone ID: MRT4577_45123C.1
cactattgttttttttcttcttttttattatttttgtttttttttttgggcccaaaggggggggccaaaggcagggttttttgccgccaaaaaggactcctcttgaactccattggaacaactaaatacttcaatcaattaaacgccaggaaccgcagttcccaaccctggtggggcccttttttccaccccacaccgaaggccactaaaaattttttaaacgagagactccctccactcggcccaccaagggaaaaggctctggggaaaacccaccccgacctcggtgatacgaaggaaaaaatgcgccaaacccccactccctaacagattgggggcctagcgc

SEQ ID NO: 124612 - DNA, 608 bp, Zea mays
  Clone ID: MRT4577_45124C.1
caggagatacgtatggatctactctgcagcgcagttcctcttcatcgtgctcttcacgcacatcttctacagatacgtgcggctgcaagccgtgatcgccatcatcctgtccgccttcgccggcttcagcgtcgccatctgcaccaattactccctcctccagattctcagatggaggcgggcgagacacgctgtggcatcgcccacctcaaccgctagagctgccgacgacggaggcctccatggttccagtcccagggatccaccatcagcaccagtggcagtggcagtgacagtggcggaggtggaccttgagatggctctgcctcctacatatgcaccacctgcccatgcgtagagagagcgctccccttcactatcatccagccgacgagttcactccagctccagctatacatccagtctgtgtgtgtatatatatacagatccactgtttgttttctgagacctcgatgtatactgaaagaaaaagtaaagacagcaaaacagacgcataaaggaatagatttgattatatagctgatttcgttccactatttgttttttgagaatgctgtagtatttaagatattgtgggttttttcagt

SEQ ID NO: 124613 - DNA, 576 bp, Zea mays
  Clone ID: MRT4577_45125C.1
ttgggtacctcgaggccggcctggatcacccaatgacccaatcaatcgctaacaacccaataaaccgcggacgcagcagaaaagaggtagaggggcggcgaccgatggcgcggcggggcacggaggcgttccctaacctgggcgcgcactgcgacaagccggactgcaaccagctcgacttcctgcccttcgactgcgacggctgcggcaaggtcttctgcgccgcgcaccggacctacggggaccacggctgcgccaaggcggcggaccagggccgcaccgtcgtcgtctgcccggactgcggcgacgccatcgagaggctggttccggggcagggcgagcgggagatcctggaggcgcacgtgcggtcgcggcgctgcgacccgggcaagaagcgcaagccccggtgccccgcgcggcggtgcagggagcagctcaccttctccaacacccaggactgcaagggctgcggccggaaggtgtgcctcaagcacaggttcccggccgaccacgactgcgccgccagcgcaccaggagctgccgcggcggcgaggagggccagcggggagtgcggcc

SEQ ID NO: 124614 - DNA, 398 bp, Zea mays
  Clone ID: MRT4577_45126C.1
caagcgtgtgatcgagaggttcgagaaggaggctgctgaaatgaacaagcggtccttcaagtacacgtgggtgctcgacaagctcaaggctgagcgtgagaaaggtatcaccattgatatcgctctgcggaagtttgagaccaccaagtactactgcacggtcattgatgcccctggacaccgggacttcatcaagaacatgatcactggtacctgccaagctgactgtgctgtgcttatcattgacttcaccactggtggttttgacagctgtatctccaacggtggccataccccctaacattctcttctttggttaacccttgggatgaagctattcatttgctgctggaacaagatgtattcaccctcttgcaatttcttcatggttcgttttt

SEQ ID NO: 124615 - DNA, 255 bp, Zea mays
  Clone ID: MRT4577_45127C.1
acacctcgcctgtttcccaaaaagcctccgccgcgtcacagcaccaaccatgcaagcctactgcggaaagacaaggaagagctcatcaagaatgctgcccacaccggcacccctggcaagggcatcctcgctgctgatgagaccaccgacaccattagaaagagcctttacagcatcaatgcccagaacgtttaggacaaccgctttgtactcctagttctcctattctgctgcccatgcagctctccagcaaat

SEQ ID NO: 124616 - DNA, 180 bp, Zea mays
  Clone ID: MRT4577_45128C.1
cggatgccagattttatgtaataaaatcctacactgaagatcacattcacaagagcataaagtataatgtttggggcagcactcccagagacaacaaaaagttaaatgctggttatcatgaggcaaaagcgaaggaagatcattgtcctattttcttgtttctctcggttaatagcagcg

SEQ ID NO: 124617 - DNA, 374 bp, Zea mays
  Clone ID: MRT4577_45129C.1
ttggatatccactgtatgcgatatatatgtagtattgcttgacatgggccatggaccggccttattacaaccctagggagtacacattttatctaccctacacacttgtggaccatcctcccctttgctctgcatatacgtgcttatatcttgttttagtatgcataataatgatgataataatcacaatctacatgaaacacgagaccacagtcctgaaaatgcaacgaaaaattgaactggctcctgccttttagcctgttgtgctttcggtcaaaacgctacgattgccttggtcgtcggcgacccgctggaccctgatcgggaggcccttggtgaagtacacgaaagggtacacgaatgcctggtccggc

SEQ ID NO: 124618 - DNA, 198 bp, Zea mays
  Clone ID: MRT4577_4512C.1
tttctgccccagcaaaaccagactaccgggggagatgttgatatgaagagaacaccttctgttactgctgcacttgaagatgctatgactattcttggctaggataccgaggatatgactgattatcatggacatacattcatagcggacgcttcacgaagacaactgtttgctggatctacaatctttgaacaagat

SEQ ID NO: 124619 - DNA, 276 bp, Zea mays
  Clone ID: MRT4577_45130C.1
acttgtgtgctcgttttcttttgaggatccattttttttttctcgtgcttgctttttaagccggcaatttggtggtatatacacaaagggggacttccgggggggcccccgcctttaaatgggcaccggccagaggggttcacatacaaaccagcattgtttggtggtttgctcgcggttagcaaatgatcaaacaaaggcgtcaaaaattcccccctcaacggttgcccatttttaaaggtacaataataaaacggtgcttcaacttcccaccca

SEQ ID NO: 124620 - DNA, 400 bp, Zea mays
  Clone ID: MRT4577_45131C.1
taggggccttttttttttttttttttctttttttattcccacatgtgaatgttttctacgacaaaggcaagaacaaaagagcccaatacaagtctaacacaaacactggctacaagcatccaaacaaaaaagatgaggccagaggaccaacatctaatgagcttccaatctgaaaggaaatgaagactgattgaaaataacgaaatactcccctcttaaattctaccaagcgcgcataaggcgacctcccctcttctggcggccttgcacccaggcaccggaggggccatcaccaaatgggcaagggcttgccctcccactccttgagggagcccaccctgggggcgcagaccttggaccctctgagggacagaaaccccttggtgcactccttggcggg

SEQ ID NO: 124621 - DNA, 645 bp, Zea mays
  Clone ID: MRT4577_45132C.1
cctcgaggccggccgggatagacttcccatgcggcgagcggaggcgaccgttctactccgtagtcgagatcggcaagatgcgtacaagagatgacgctcccgtggatagccacttgatggacagcaggcggtggcactcgagggcgagggcgctgccaggcgctgcgctcccggggacgcggaccaggttcagtgtcgacgaggacggcatccagctcgagaatgctatgtactatgtggtgcgatccatcaaccaagaccggttcatcggtagactggacacgacagatacttccaccccgctcatcgcgcgagatctctgcgacctgacggcctatcggaccgccgtgatcccggtgctgctgcgcgacgaggtcgtcctcggccgcggctatcctcctcgtcgggctgttcgagctgaccgttgcgatgcgcgacacccacgtgtacaaccagatgagcgagctcgatggcaacggcctcgacgtcatcatcagcggctgcctcaccatgtacgacgacagctccttctaagtaggggacacgtgcatgggatccacgatcaagctcaccagtggcaagaacgacggcgacaaacatgcagagcgtcgtgggctggcccgagttcgccgtaggactcttcat

SEQ ID NO: 124622 - DNA, 655 bp, Zea mays
  Clone ID: MRT4577_45133C.1
agtaaagagctagagagaggaaactcgtggagattggagacacgcacaacaacattgtacatcattttcggcggccaagattattttcggcggccagagtttagccgccgaaaataagcttaattccggcggctactgacacagctgtcatacaagtttgcagcgaaggggctagctagctaggtttacatatgagctcctctccctgtgctctggtctacagcgacaggtgcacttgatgctgatcttgggacgagaaggagcttgtgctttcgacgcgctgtcaatccgaacacctcagtcatatcaatattgctattgctatcctccccttccgctagctcccagtcgaagtggtagactaggtttgccaacatgagctcaatggaaaccaatgcaaagtttaacccagggcaaatcctccgtcccgacccgaacggcagaaactggaagtcgtttcctctcaagtctacagaaccattattatctatgcctcccatgtcgtcgtcgtcgtctacgatgaacctctcaggcatgaactcatctggggcgttccacaccctcgggtcacgcccaatggcccaggcgttgatgagcacggtcgtgccggctggaacggtgtagctgtccaagtcgcagtcctctagcctcgtgc

SEQ ID NO: 124623 - DNA, 1089 bp, Zea mays
  Clone ID: MRT4577_45134C.1
cccacgcgtccgcccacgcgtccgcggacgcgtggggttttgggatggcagaacaacagagagaatgtggatgacatatctgcaactttggctggtatttcaactgagatagacattagcatattctaccgtggcctagatcaaggaagcaaacacaccctggtgtcagtggtttgttactatggccagcattatcattgttttgccttcaaggatggacgatgggtcatgtatgatgaccagacagtcaaggtaacccaataaccatactactttgagcatcctttttactgttcgtactaatgtggcccaattttggttccatgttatttgtgcaggttgtaagtagttggggtgatgtgctcgtgatgtgtgaaaagggtcacttgcaaccccaagtgcttttctttgagtctgcaaattaatcattcttcagagtcgtaaagtgttgtgcagtggttaacatgccctcaaatatagggtttttacctgtggccgtgaagattagaaatagagtagcaaattcgttttgagcgggggtatagagtagcaaattcaacagctgcgttggtctctgagctttggtcgagcccctcgtaataagtagtcacctgaggattaaaggagagctgtttacccctctgtttttttaacctttggtatacttgctgaacttcggatccttcatctgccaatgagatttcactgccgatcaagttggtggggacgcattcgacatgaactgccatccaacaattctagccggatctgcctaaagctcttcattatgcaccagttatgtatagaattttgtgcttacaatgaggtgacaggtataggagtgtgactgttttgaggccagaaggtttagagaatggaaggaaatggaattgttggtgcggtgtgtatctgtggagtactgtttgaaaagaggaacgatatctggaatacggtagactttgagaaatctgtagtacacgagtctatgtaaacagggactcgatgagattatgtgagatgagtatagcgatgaataccagactccttatcactactatttaaaatttaaacattttaaatgcagattct

SEQ ID NO: 124624 - DNA, 290 bp, Zea mays
  Clone ID: MRT4577_45135C.1
gcacaggaattcttaccgaggggttcacaaacattgagggggaagctacacagaccaatgattacccaccaagcatatggatcattccatacttgtatcaatcgctactcaaatttcaatcctataaagcatgggaccccaccataagtatggctcatcaaatcaaatgcacataaacacacccccatttcaccagttagattcttgttccgccctatcaggatacaatagtagcagtaaaccagttatgatgatccttaacaccttaaaacacgacatcacaccttctt

SEQ ID NO: 124625 - DNA, 360 bp, Zea mays
  Clone ID: MRT4577_45136C.1
caggccggccgggggctttaacctatctgtcgtattctatcagctaagcttacactagtcgccaactcgccgcaacaaagaaccaccatcatgcacctgctgatgctcccttggctcgccttcggccacatcgtgccgttcgtgcagctggcgcggaggctgctgtcctccacctcctcctccgtccgcgtcacgttcctcacggccgctggcaacgtcccgcgcgtcgaggccatgctgtcctctccctcgtccaccggcgaggcggccgtcgtcgtgtcgctgcgtctgacccacgtgacgggactgaccgaggacatctcatctctctgcaacctctccaccgattattttttttct

SEQ ID NO: 124626 - DNA, 625 bp, Zea mays
  unsure (1)..(625): unsure at all n locations
  Clone ID: MRT4577_45137C.1
tgggaccctcgnagccggccgggccgggaatgctcgccaataaggctcacttcagctagcatatcgtcccacctgcattcgagcacctctcacgctctacttaatagccacctcgacatcagatggcttctgccggcgacgacccggtgaagatgtccactgaagtgactgcctgcatcctgatgaccacccctgatgcccatgaacgaccaagctatgtaaatgggtagatttgctccctgcagtgtgagtgacccttctgcgacagctttgctngatggacacagcacgctcaacacccaccccacaatttgaacatcgacaacgtcttatctattccatcccatcgtgttcccgatggtgatcatctgaatgcaatacacatcatgcgatacgagcgagattcactccttgaactgattgatgagaaagtaacgatggcggcagaataattctgattgctataccaaccattcacgactcttccgcatgcatacacacactgcagagtatagctgaccgatcaagcatgcaacaagcttacacgatgatctacctactatatataccacatttccttagcatatatcactgaagtcagatctgtcgagattgtgtcgttcag

SEQ ID NO: 124627 - DNA, 486 bp, Zea mays
  Clone ID: MRT4577_45138C.1
ggtccataacatattggggggttaaaactaaaaacaagggggaacaaccaacaagggacaacaaaaagcaaacacagggggggggacaaaaacccccaaaaccccaaagccccaacccacgaaaaaaaacaggcgacaccaaaaaaccccaaaccccgggaagcccaaaagcaaaaaagggggggaagaaaaaatcaccgaaacagggggggaaccgggaacaagggaggaaatggaccaggggaagggagcccaacagcgaaggaaaaaaacaagacacccctcaaaacttcccagaaagcagggaggggccggaccgaaaaacgccccgggccccaaaagccgcgggccccaccagggggagggccccgggccccactgggcaatgggcccccggcaaaagtaacccgctccaaggagaaaccagccccgaaggccaccaaatgagcatagcctgccgggggcacaattgacacggaggggggg

SEQ ID NO: 124628 - DNA, 506 bp, Zea mays
  unsure (1)..(506): unsure at all n locations
  Clone ID: MRT4577_45139C.1
agacaacacaacagttgaatggaatctatgcactctttgcagtattgaggcttgctgttgttgatacaaaagcagatggtgccattctgaaggagaaactgtggacattgattgctcaaaatgaaccctcgttaatctctttatagttggtaattctgttgttctgaattttccactaagaatactttgttatcccacaaaaataacacgaaagtgcatgtatggatgtacttcagcatctcagcacctttttatttattatttagagatcctgatgagctacttatggaatatacatttatgtaaattgtgtttggagaaataattcttagtggttacaagaaaaaaaaaaaaaaaaaaaaaaaaaaaaaaaaaaaaaaaaaaaaaaaaaaaaaaaaaaaaaaaaaaaaaaataaaaaataaaaaaaaaaaaaaaaaaaaaataaaaaantaataanntnttttttannntatttttaatttaaatttaattttntttttttttt

SEQ ID NO: 124629 - DNA, 150 bp, Zea mays
  Clone ID: MRT4577_4513C.1
caaggtgggcatcgccccagtccagcagcgtctcatctttgctggcaaacagggggatgtctggcgcacgcgtgcagactacaacatccagaatgagatcaccctccaccttgtactccgtctccggtgtggtcagtacgtcatggagtc

SEQ ID NO: 124630 - DNA, 368 bp, Zea mays
  unsure (1)..(368): unsure at all n locations
  Clone ID: MRT4577_45140C.1
tcgctgcgaccctgccttggtcccaggctcctcacgctctgcaccggcccgggcgcgggccccgcccacctcgcctacgcccgccaggtgttcggcagggtgccccaaccgtcggacgccgtctggtacaacaccctgctccgcggctacgcgcgctccccctcctcctcggcggcggcggtgcgggtgttcgtgcggatgctggaggagggcgtcgcgcccgacacgtacacgttcgtgtcgctgctcaaggcgttcgccgcggcgcgcgcgggggagcacgggcggcaggcgcacgccgtggcgggtaagctcggngccgcggggcacgactactttcggcccacgctcattaacatgtacgccga

SEQ ID NO: 124631 - DNA, 339 bp, Zea mays
  Clone ID: MRT4577_45141C.1
aattgcaacaccttaagtctcatttaccctatatgtctctcacacacacacatggaggactcgtcaaatcttgacacacaagtgggcccttgtcttatataccattcgatcgtctatgatggtcaatacttacctactactgcttccagcttcttcgctcttgtattgtaagacctaaattgaaagtaccggccgtgcaattacatcgtagcctctggaaatactccagactgaccaaacttacttgcttatcttcatatccacctttaacaacatgaccaattatcaaatatgccattcctatttgacctatccaagactttcacagccagtattgcc

SEQ ID NO: 124632 - DNA, 435 bp, Zea mays
  Clone ID: MRT4577_45142C.1
atcgggcgcccgggccgggtcaccacctaggcccaaggcaagaagagtggatccaactccgtcgtaacctgctggcaaggggggatccaactatattcccaaaaacggggggggggggaccctaactaggcggtggctcgtagcctgaatcggaaatttttttttcttagactggtttgaaccggtcacactggcgttactcgactctaaatttgcgcgcgcttcagtgggcacgcttggcaatcaacggtgttacgctaccaagcacttttcacggataaatactctagggagatcctttgtgaacctctatctgtgggggctgtctctccctatctaatattgttcacactggcccactttcaattattattcgatgaaaaatccatagcgaggtgaaaagatggtcttaaaaatgatattttatggaagtag

SEQ ID NO: 124633 - DNA, 504 bp, Zea mays
  unsure (1)..(504): unsure at all n locations
  Clone ID: MRT4577_45143C.1
tggcttgntggtagctgccngagcagtgtttgagcaggagggaggagagaatgctgtggcttggaacttgatgattgctgggtattttcaggacgggcagatcgacaaggcgttacacacttgccgaagatgctggaggctaacctcaagttcgactgcgtgacgctggcgtccattatcatggcctgtgtgaagtcctgcatcacgttgctgggtatagctgctcatggttatgcagtcagaaacggtcttgattcagataagacggttgctgctggcctgatagacttgtacgcgagtactgggaggatcgaacaagcgcgtcgagtgctcaatgccacgagtcccagaaatccggtcgtctggaaagcattagtttctgcttacgtcgactgtggcatgaactctgaggctcggaatcttttgaatcagacgcaactttaaggcatgtccccaaatgcaacgtgttgggattcggtaatcgctggttttatacagaaaggc

SEQ ID NO: 124634 - DNA, 305 bp, Zea mays
  Clone ID: MRT4577_45144C.1
catctcattgttcttgctgtggctgggggtttttttttagtgaagagcagcctccatgaccaggtgtgacaccaaattgacagattgcttttacttgggtgcgaacagccgcacgagaggtgttgcctggcggatcaaaggagaagcatttgaccaatggggctggcaaacacacatattggacctccacatgatgtggggggcccacttgagtgttatgaacgcccgctggtaaaacgctcctactattgatgaaacctggcacaccacttcgagagccgtttgctccaaaaaaaaatctagct

SEQ ID NO: 124635 - DNA, 362 bp, Zea mays
  Clone ID: MRT4577_45145C.1
aaaggaggttaccctttgtctttctgttcattatttccatgttcgcagtgtcaaattgtcttatggttgtagtttttttgttcaactttcagatgtcaaaaatcaatatgctaaggtcatgcaaaggaagtgtttactggatggcacctgaggtaaaagttacagtttaacttctgagtgacattcttgcaaaagacaagaaaccaatggaaaatccgcaatagccccttaacattcttattacttttgtgtgactactattctttgtattgaaaattatctatttcaatgttatttttcacaagataatacttgtgtatctcttgcctggaacataccttgtcattttcaggttattaatc

SEQ ID NO: 124636 - DNA, 506 bp, Zea mays
  Clone ID: MRT4577_45146C.1
cgcctgcgtgaaccgggctcctattacacggccgaccctagcgttcgttttacacaccatgggaacgcctaaccacgactagaccattggttggaaacaatgagcccttcttggccccattgccctttcatgagagcgcaaatgaaaacattgtcccacaaagctgagttgctgctagggccgtgttatcaaagatattgcacgaatggcttcaatgggctttgctcattcaggcaaggcaagcatacatggtacaactagtgcttgcggagagagcctcagaacaacctgttgcccaatcgcaacaacaattctcgcaacatgtaaccttacaaaccattgcaagcggaacaacaagcaactagcatcatgtcactgccatctctgatccagctagcccaggtgaaccctgcaacctacttggaacagccgttggttgcttgcaacccactagctctgtcgaacaaagctgcataccagcaacaacaacaggtgcaacagtttat

SEQ ID NO: 124637 - DNA, 328 bp, Zea mays
  unsure (1)..(328): unsure at all n locations
  Clone ID: MRT4577_45147C.1
tttgtttttttttantcctanncctggaacgcaccgaagacattgttatgcgatgtatctgcgccacagaaacattgaacctgggggagcgagttccccaagcttgtaagttcattatctatggaacactgaccggcttggcaaaactgccattgatctttcatagagaaaaaggggaaaacctcacacacaaaaaaatatgtgaatacggcatagattgaaggagagcatcaaacataatagtgggacttcattcaatagcatacaaatatggaaaatcagattcctgtgttttgtatcaaaccattcaatggagagactggaacct

SEQ ID NO: 124638 - DNA, 389 bp, Zea mays
  Clone ID: MRT4577_45148C.1
ttttttttttttttttttttttttttttttattttaaaaaaaggccgggcccactctttcttgctaaaatcaacctttactttgaaccttaaatgtttatacggtgatggggggtttccaataccaattagttcggataccaattaggacgactaaacacatgctaaatataaaactaaatgtttaaatcccaaaaccaaactattaaaacaggatttgcttatattttgcgaaactaaaaatgtgctaaacataaactaattaaacctaatacaatcgggttgcgaaataaccatggcttaacaattaactttataattttaatcttaatctggaactaaaaccccggcttcagaaaaaacaaacaccttcttaatggggtggggctt

SEQ ID NO: 124639 - DNA, 422 bp, Zea mays
  Clone ID: MRT4577_45149C.1
ctcgtccacccggcctccgactccatggagctggacgggacgacagcagccgcggacggctgcggcggcggcggccgaggcggccccgcggagttcgagttcgacaagggccgcgtcgtcactccgtgggaaggcgagcggatccacgaggtcggcgccgaggagctcgagctcacgctcggcgtcggcgccaagtgaagcgaagcgaagcgacgacggctgccgtcgcgctcgcaagcaaggctctgatctttgagctcccgtactgcaaatgccgcgattggcagggaaaaaagtgtgcgtactacgtagcgtcgtagccgcgtgaagaatcgtggatgcattcgtgctgagtttcgatcggaggcacattcggtgtagggcgtaagtgacgcttgtgtttcattcatggacagctgatc

SEQ ID NO: 124640 - DNA, 1185 bp, Zea mays
  Clone ID: MRT4577_4514C.1
ccaggctgcaatcacatcacgagcaccagctaattgcccacaaaaacggagaaaccgaaagggtaaaaaaaatgaactttcttggcagtacaaagttctcaacgctaattcataaaaatttaaaaagacaagtgagcccggctgagctgtgaatcaaactaacatcgactgtccttgtggagttaacaacagagtacgatgacaagccataatcaaggaccatggtgcccacgcttcgtacaagggtcgtctattaccgattgatgacgtggatagcaagagctcggaagcgtttcacagcctcgcgatgacggcttccacctcggcaggggtgtagaggtggtacttgggggcaaccttggcaatatcgacgttgtttggggtcaccttctcttccataacctgcttcaggatagaaagggctatggtctccgcctcctggagggtcaattccttgttgtactgttcctgcaaggaactatcagctccctcagaacctgatccaattgcctttgcgttgcattgccaaaatgtaccagatgggtcagtgtagtacaggctaggtccattctcatcatgtccagcaattaggagagagactccaaatggccgtgacattgactcttcgtcaccttcgccaaaacgcagagctaagtcacagatagcttgtgtcgaagattctacagtcattggctctccgtatgagaacctatgattctgagtttcaacacgagcatgttccactagtgttctagcatcagcaataagtccactcatggcacagcctatgtgctcatcaatttccattattttttccacactgcttggttccaacagtggtgaggtcacacgtttctcaacggcgaggacaacaccatcctttgtcttcaaaccgatcgcagtggatcccaacttgatggcctcgatggcgtactcgacctggaacagccgcccctccggagagaaggtgttcaccccacggtcgtactccgtcctcgtgagaaacatcctgtcggaaacagcggcagatgcaggatggagaaaggactcggcgtcggcgcggcggcgcctccctctctctctctctctctctctctctctctctctctctctctctctctctctctctctctctctcagcctcgcttttgatggcttctgttctgagcttcttgcgaacgaagt

SEQ ID NO: 124641 - DNA, 805 bp, Zea mays
  unsure (1)..(805): unsure at all n locations
  Clone ID: MRT4577_45150C.1
cattgggtacctcgaggccggccgggaaaaccccacaccttccgagatacccctctttgcctgtttacgagtgcgttcaagatgtccaaccccacccagatctttgcggaggatgtcacagaggagaagggcgagaatgcgcgtctctcggcctttgtaggagccatcgccgtcggagacttggtcaagagcacactgggccccaagggcatggacaagatattacagtctgcttctaccggcgagatcatggttacaaacgacggcgctaccatcctcaaagcgattgccctcgacaacgccgctgccaaagtcttggtcaacatctcaaaagtccaagatgacgaggtcggcgacggaacgacatcagtcactgtccttgccgccgaactgctgcgagaggcagagaagctggtcgaccagaagatccacccccagactatcattgagggctacaggatagcgagttctgcggctctcaaagccctggagaagattgccgtggaccacagcagcgacgagcaggctttcaggaaagatctcgaggccattgcccgaacaactctgagctcaaaagtgctctcgcaggaccgactacagtttgcgaaacttgccgtcgacgccgtcctcaagctggggggatcgaccgacctcacgcacattcagatcatcaaaaaggctggcggaaagctgaaggactcgtacctggacgagggattcatcctggacaagaagttcggtgtgaaccagccaaagcggatagaanacgcanagattctggttgccaacacagccatggacacgg

SEQ ID NO: 124642 - DNA, 188 bp, Zea mays
  Clone ID: MRT4577_45151C.1
tcggattcccggtcgacccactctctcttcatctagcctctaaacatacaaatatatttacacgacttctacgttcataacggtcgttttcttaactcggtgtcccataattattctctatgctctaacacatcattctcccttaccttcaaactgtcctagcatatacctacgcatcacaactctct

SEQ ID NO: 124643 - DNA, 394 bp, Zea mays
  Clone ID: MRT4577_45152C.1
cggcgcgggaatctatccagtgctcatctaacctctacccagacataccgtagcgatccaccgctagcagcttctacgaggcctctgctgccactcgatgatcccgctaggtggagtgtttgtcgactccgcaaggccggcggccgagaagacggggccgccttcctctccgatcccgtgcaccgacccagtggaggccaagatgagtgacggctgtctccttcgacaagttcttgtaggagaggatcaaggaggctatcgcagaggttcggggatctgagcgactccggcatcatatctctcgacaagtatgtgtgacagaagcatctgacgtatctgcctcccagattcaccaggaggacttgcccccaaatgcgtggaagacgcgccaacg

SEQ ID NO: 124644 - DNA, 471 bp, Zea mays
  Clone ID: MRT4577_45153C.1
ataaaaaaaaaaaaaaaaaaaaaaaaaaaaaaaaaaaaaaaaaaaaaaaaaaaaaaaaaaaaaaaaaaaaaaaaaaaaaaaaaaaaaaaaaaaaaaaaaaaaaaaaaaaaaaaccttttttccgcaaccacctttaagggaatttttttggaaattttgccttaaaatttggggggcgggttagaaccatccttttaaaagggcccaaattgccccttttagggggttggtttaaaaatttaatagagccgcggtttaaaaactctttaattggtaaaaaacttttggtttcccaatttaaatactttagaacaaattccccttttcccattttgcctatttagcaaaaaggccaaaaactaagcctttttaaaaatttaaaaaactttaaatggaaaatgaaacctctttcaaccggacatttaaacaaaagaggggggggggttactccaatgggacccattaattttt

SEQ ID NO: 124645 - DNA, 1033 bp, Zea mays
  Clone ID: MRT4577_45154C.1
gctgatgcctgctcaccaaatgcgacaccgacacgccgccgccatgatgaacgtcgtggccatcgggctcatcctctccacgctggcagccgcgggggtctggtccccagcgccgcagccgaccgcggccccacatcatggcgaccgcatcgtccgggagggccgacgcgtggtaatcgtggagtacgagcgcgagctcccgctgtcgaccgatggcggcggcagcgtcaaggtcaaggagacgcgcgtcctgcccccggacgcactggacggcgtcgagggcgacggcggaacctttgatgaggccaggggcgtggtctcagacgcggccggcaaggtggccggtgcggcagaggaaggcaaggagagattgtccgacgccaaggagagcgccaagggcggtgtcctcggtaccgtcaagcggtgcaaggatagactctgcggcgccggcaggaaagtggaagagggagccaaggacgcggtgtcccgcgtcgaacacggcgcggaggacgcggcgaggggcgccatggaggcggtctcggatgccaaggacagcgccgagaacacggcgttcgacgccgtgcagaagggtaaggagacgatgaaaagcgccaaggacaaggcgtcggacgccgagcagcgagggaaggatgccgtaaggagcgcgaaggacaaggcgtccgacgctgcgcatcaggggaaggagacagtgaagagcgccaaggacaaggtctgcgaaactgccagcaaagcgaaggagagggcgtcaggcatccagcacggagcagccgaagcggcgaaggctgcaaaggagagggtgtctgcggcagccaagagcgccaaggacaccgtccagagcgccagggacagcgtctccgacatcgcccagagagccgaggagtgcgcggaggacaccgccgagcgcgcggcggacagggccgcggaggccgaggaggaagcgaaggcgagagcggccgaggtggccaagaacctgaccgacatcgcgcggcgggcgcgcggcgtggcgtccgac

SEQ ID NO: 124646 - DNA, 769 bp, Zea mays
  Clone ID: MRT4577_45155C.1
ctctctctctctcactcgctccgcccggccgcccgactttgaccgcctcctcgtctccgctcccacgcccgcgggagagaggcgaccggcggcgcgcgaggagggcctacccatcccaccaccccgccggcgaagatgttcggccgcgcccccaagaagagcgacaacaccaagtactacgaggtgctcggggtgcccaagaacgccgcccaggacgacctcaagaaggcctaccgcaaggccgccatcaagaaccacccccgacaagggcggagaccccgagaagttcaaggagctggcacaagcctatgaggttttgagtgaccctgagaagcgtgagatatatgatcagtatggcgaagatgctctcaaggaaggaatgggtggaggaggtggtggtggagttgatccatttgacatattttcatcatttttcgggccctcttttggaggtggtggtggtggcagcagcaggggcagaaggcaaaggaggggagaggatgttgtccatccactaaaagcttctctagaagatctttacaatggtacctcgaagaagctctctctttcccgcagcgtcctctgctccaagtgcaagggcaagggctccaagtctggtgcttccatgaggtgcccaggttgccaggggtcaggcatgaaagtgactattcgtcagctggggccttccatgatacagcagatgcagcaggcctgcaatgattgcagggcaccgggggagagtattaacgacaaggaccgctgcccagct

SEQ ID NO: 124647 - DNA, 329 bp, Zea mays
  Clone ID: MRT4577_45156C.1
gaattcccaccggcacctacgcatccttgaccactgtttaacttcattttatttccgcactatatctccctagatcaggctgggaccatctacatactacatggcaactaaaccaattattgactatccagccatttatgaattaagaacaaccaaaacgtattccaaaaaagcaaatctatgcacacggatgagctgactctgatcctaactcaagttcacgagcaatatctcttaaatgtgcataggcatctgtataagatccacaatgtccgtaacgctttaaacgctaactgacattctaacattcacgaaatgtacaaggatct

SEQ ID NO: 124648 - DNA, 386 bp, Zea mays
  Clone ID: MRT4577_45157C.1
gttgtgttaggcatgttgtgcagattattgatgttgatgattatagaccatgacacacatggaaatcgtgttgttttacaaggtagctggtgatagggaacttccactgaggatcggaagttgcactatgaggatattgctttcctgcccaaagattgctaaggagtgtatgcactagttccaggacttactaagagaggacgtgcttgttcaatcagaccctgctggacgtctggttatcacaggggatccagagcaccctgataatgcttgggggatcactgactccaacaaggtggtcaacttggcatacagaatcgatcctcaccaaacatgcggtgttgccacgcttgataggcagctattcgggcgtgcaccatttgggc

SEQ ID NO: 124649 - DNA, 327 bp, Zea mays
  unsure (1)..(327): unsure at all n locations
  Clone ID: MRT4577_45158C.1
gtgcggcgctcgaggcggcgggtgcgacaacccgatccgcgaatcacgtaccgtctatctcagcttgctgcgctgcactaccctgccctgccatcatatcgtacgtgagcccggccgagcgagagcgagggagaggcatggctgctccgaagctcgcgacgctggcgctggccggctcctggcggcgaccgggtggctcccccggccgcgggcgcgcggcgatgcgtgtccccggtacgacgctgnatgccgtgcctgccgttcgtccagatgggcggggccatgccgcccccagcccgtgcctgcgtcggtatcccgcagccctgc

SEQ ID NO: 124650 - DNA, 565 bp, Zea mays
  Clone ID: MRT4577_45159C.1
ggccgctttttttttttttttttctttttttttttctttttttttttttttttttttttttttttttttttttttttttttttttttttttttttttttttttgggggcagaacacattccattcattacccgcgggcaaaacaggcataggggaaaaagatagcccagtaccacacaaaccaactaggcactactatatcctagggggggcgggatatatatcacccaccccaaaacaaagggaaacttaaacgggggggtttttatcctcaaacccccggggaacaggaacaacaatccccaaaccccggtttttatttgggggggaccacctataaaagagcaggccggcgttttaaaaaaccccaggggccagcaaacatggcctgacaaaaacaccgggccttttaactggccatttcgcccgaattaggggggggggccccggggcccccccctggaaagccagcccaaaacggggggggagttgggctgcggcccgccaaaaaggggggcccccatccccttgggggcccggttgctccccggggggaaaaccctggg

SEQ ID NO: 124651 - DNA, 1352 bp, Zea mays
  Clone ID: MRT4577_4515C.1
ttttttttttttttttggcaatagccagcaccaccgctgccacttcacgaaggattggaaaatccacacgagtatcagcttaattgcccacataacggaagccgaaacggtaaaataaaaaaacaagtgtaggcactaggcaatccgacaacggaaccgggctgagatgtgaatcaaagtaccatcgactgtccttgtggagttaacaacagagtacgatgacagccataatcaagaacaaaagatgtccacgcttcgtacaaggatcgtctattaccgattgatgacatgaataacacgagctccgaaagcgttttcacagcctcgcgatcacggcttcgacctcggcaggggtgtagaggtggtacttgggagcaaccttggcaatatcgacgttgtttggggtcaccttctcctccataacctgcttcaggatagaaagggctatggtctccgcctcctcaagggccagctccttgttgtactgctcctgcaaggagctatcagctccttcagagccagatccaattgccttcgcgttgcattgccaaaaagtaccagatgggtcggtgtagtacaggctaggtccattctcatcgtgtccagcaattaggagagagactccaaatggccgtgacattgactcttcgtcaccttcgccaaagcgcagagctaagtcacaaatagcttgtgttgaagattctacggtcattggctccccgtatgagaacctatgattctgagtttcaacacgagcatgctcgactagtgttctagcatcagcaataagcccactcatggcacagcctatgtgctcatcaatttccatgattttttccacactgcttggttccagcagtggcgaggtcacacgtttctcaacagcaaggacaacaccatcctttgttttcaacccgatcgcagtggatcccaacttgatggcctcgatggcgtactcgacctggaacagccgcccctccggcgagaaggtgttaaccccgcggtcgtactccgtcctcgtgagaaacattctggcggtggatgcgggatggagcaaaaactcggcgtcggcgcctcccctcggcggcttctgatctgacttctgagcttcttgcgaacgaagttgaaagagaagacgagccaagccgggagtccccgggaggggcatccccagcagcatctccatctgatccatcctcagcatgcattagtccaattaaatcggggggtgtactattattgcatgcagaggctgcttgtcgaataaaacgtactatatgtacgattgtattgtacatgtgtgtcaatgcaacaagaggcacgtttgagacaaaaaaaaaaaaaaaaaaaaa

SEQ ID NO: 124652 - DNA, 280 bp, Zea mays
  Clone ID: MRT4577_45160C.1
ctcacgcctaatggtttgtattgatcaaattcctgactaaaggggggaacatgaacctaaagcagtggttatgcacactaataatcagtgctcccttattgactgaatggctcactgtagagacacacggagatttgggggatcataatctttacctgcggatgcagagctcatgcagtcacagccttagcataactatgctcaggatgctgtcatcactgttatgcaagctggaaactcacacttgggacatgacaagaacggtattgtagcgaacaga

SEQ ID NO: 124653 - DNA, 402 bp, Zea mays
  Clone ID: MRT4577_45161C.1
attatgcttcgttccactcaaggtttgttatctatcgaagattcctcatcggaggggcttactactggagggggggcgacccatcattacaagcacctacactgttgccctaaaatcgtgaatctcctaagccccaatacagatctcttctatgaacgcaagaagtatgattttaaaaatagatcaccaagacaatggaactatttatgtttcactttacctgaatcttctcatctatatcactaaatactgaaagtacgcagctcatacaccagctttgtattcctgttatggttccataatttatactcacatctcaaatacagctctgatatgcgttgtaataactaattccaactttatgatgcatgagacttcttatgtaacctatgcttgatggta

SEQ ID NO: 124654 - DNA, 2850 bp, Zea mays
  Clone ID: MRT4577_45162C.1
gggtgttgtcgcttgcttggcagcggttgaaccctcggggccggccgggggccagagccgaaaccaaatattcttccgccgccggccgactgctgcattcaattccccttcgcgccccgaaagccgaaccaacgagcctcgcaggtcggcggtctcgattagggaggaggaagggagtggcccctgatctgggtggcgggcgagatgaggctactgcgggtcgccacgtgcaacctcaaccagtgggcgatggacttcgacaccaacctccgcaacgtcaaggagtccatcaagcgcgccaaggctgctggggccgtcatccgcgtcggccccgagctcgagctcaccggctacggctgcgaggaccacttcctcgagcaggacaccaccgcccacgcatgggagtgcttaaaggacattttaactggggactatacggacaacatcttatgcagcataggaatgccagttattttcaatagtgtgcggtataattgccaggtcttctgcctaaatcgtaagataatcatgatccgaccaaagatgtcccttgcaaatgatggaaattatcgggaattccgttggttttctgcttggacatttaaaggcgagattgttgattttcagctccccgttgaagtctcagaggcaatatcccaggatacggtgccttttggttatggatacatgcggtttatagatgtgtctttggctgctgaaacctgtgaagagctctttacagcaaacgctcctcggattgacttagcattgaatggtgttgaggttttcatgaatgcaagtggaagccaccatcagttaaggaagctcaatcttcgtattgattccataaggagtgcaacccaaacatgtggcggtgtttacatgtatgctaatcagcagggttgcgatggtggccgcctttattacgatggttgttgctgcattgcggtaaacggtgatttggtaggccagggatctcaattctcgttgaaggatgtagaagttctggatgctctggtagatcttgatgctgtatcgagttatcgagcatctgtttctagtttcagagagcaagcaagccacaaaacaaatgtaccttttgtgaaggtaccatataaactttgccaaccatttcggagtggaatggttccgacttctccagttgagattatgtatcactgtcctgaagaagagattgcatttggacctagttgttggctatgggattatttgaggcggagtcaagcatcaggatttttgcttccactttctggtggtgcggatagttcatctgttgcggcaatagtcgggtgcatgtgccaacttgtcataaaagatatagagaaaggagacgagcaagttaaggcagatgctcttcggattgggcagtataaagatggggcaattcccatggatagcagggaactggctaaacgtttgttttatactgtttacatgggaactgaaaatagttctgaagatacccgatcacgtgccaaaaggctagctgaggagattggttcattccacttgaatgtacccattgatagtatagtatctgcttttctttccttgtttgaaacattgactgggaagcgaccacgctacaaggttgatggggggtcaaatactgagaatctgggattgcaaaatattcaagcccgaatcaggatggtgttagcctttatgatggcttctctaatgccatgggtccacaacaaatctgggttttatcttgttcttggaagctccaacgtcgatgaagggttacgtggttatttgacaaagtatgactgcagttcagctgatgtaaaccccattggaagtgtaagtaagcaagatctgagagcttttttacgatgggcagcaattcatcttaagtattcttccttggccgaggttgaagctgcaccacctactgccgagcttgagccaatacgagcaaactacaatcagttggatgaaatagacatgggaatgacatatgaggagctgtctatatatggaaggttaaggaaaattttccgatgtggtcctgtttcaatgtttcagaacctgtgccacagttggtgtggaagattatctccgtctgaagtggctgacaaagtaaagcacttcttcaagtactacgccataaaccggcacaagatgactgttttgaccccatcttatcatgctgagagctattcaccagaagataataggttcgaccttcgccagtttctttacaactcaaggtggccctaccagtttcggaagatcaatgagcttgtgcaagagatggacaaagatggcaaatggggaacttctgcagaagggaagctgggagcgcagacaggtgcacagggaactggaatgggagtggtggcagcggggtctgccaatcccagtgccggcttctgaagagaaccatactaacgcgtggaagctagttcctccagtttttcggccttgacagaataatgcaccagccgtccagcccccaccccaggacacgggctgctaatgttaatttgtctgcttggttcccttgtactgcatcacttctccctgctagagagctggaatccccacaaaattttaggctaccagttctgtttcttccatttgtcatagtacgatctacaaagtatcaaccaaagaacatgtgaaaaataagatggaatccctttaatcagattgtttgtccgaagtggcatggcgatgaaaaggaaaacatcagtataaagaactagttactcataattctttgttctgtaaagagtcctttctaaataatgctgtgtgcatgatgatgatgatgtgatgtgatttctaccatgacttcaaagaactcaatatttgcacctt

SEQ ID NO: 124655 - DNA, 107 bp, Zea mays
  Clone ID: MRT4577_45163C.1
gcgcgcgtccgatgcatgccttgtggccgatcgtggtgcgtgcgaatgtggggcgactgccggcggataggatgtctttaaattttggtacaatcgcgttcgtggat

SEQ ID NO: 124656 - DNA, 2290 bp, Zea mays
  Clone ID: MRT4577_45164C.1
gccaacttgtcataaaagatatagagaaaggagacgagcaagttaaggcggatgctcttcggattgggcagtataaagatggggcaattcctatggatagcagggaactggctaaacgtttgttttatactgtttacatgggaactgaaaatagttctgaagatacccgatcacgtgccaaaaggctagctgaggagattggttcattccacttgaatgtacccattgatagtatagtatctgcttttctttccttgtttgaaacattgactgggaagcgaccacgctacaaggtatttcttcaacatgacatcactttactagattactgcaatgcagcgaacataaaaaaactagaccaaccaaggaggaactaggtggcatttcattaagaagaaaatagtcacccaaatttggacttgaacagctttctgtgcaagaacaatagatttgaatttatgtttattcaccttttcatagtattttagtttgtggccaacaaagattgttgaactggaaatttttcttaataccccttaacagtatgccatgcatttttttgctataattatgaaatgtggcctcgggactgggtagttaggcaggcacttaggcttaggtggtgttgccgtgttggtcactctcagccttttctcttatgggttatgttctcttgtctcactggcattttgggcttctgcgaggaaatactaaccctgacctcaagatacaaggagtcaatgaaaaagggtatcatgaatataagttaccacccctacatctaagaccatccatataaagttaccagtcctagatctatatgcttttaaatatttccagattagtatcataagtacaaagggtttcgatgatattgttgtggccaaaagttctcattagcaatggtaatagattaaaatattggtggtagccagccatttgtcatctggctagccttcagcagtaaacattatcagaccaatggtacatatgagttttttttcttgaacaatgcaggagagctgcatgtaatttcattaagaatatgatttttaatttacggaggaagtccattttactactcgaaaacatttcttgtttgcttcaggttgatggggggtcaaatactgagaatctgggattgcaaaatattcaagcccgaatcaggatggtgttagcctttatgatggcttctctaatgccatgggtccacaacaaatctgggttttatcttgttcttggaagctcgaacgtcgatgaagggttacgtggttatttgacaaagtatgactgcagttcagctgatgtaaaccccattggaagtgtaagtaagcaagatctgagagcttttttacgatgggcagcaattcatcttaagtattcttccttggccgaggttgaagctgcaccacctactgccgagcttgagccaatacgagcaaattacaatcagttggatgaaatagacatgggaatgacatatgaggagctgtctatatatggaaggttaaggaaaattttccgatgtggtcctgtttcaatgtttcagaacctgtgccacagttggtgtggaagattatctccgtctgaagtggctgacaaagtaaagcacttcttcaagtactacgccataaaccggcacaagatgactgttttgaccccatcttatcatgctgagagctattcaccagaagataataggttcgaccttcgccagtttctttacaactcaaggtggccctaccagtttcggaagatcaatgagcttgtgcaagagatggacaaagatggcaaatgggaaacttctgcagaagagaagctgggagcgcagacaggtgcacagggaactggaatgggagtggtggcagcggggtctgccaatcccagtgccggcttctgaagagaaccatactaacgcgtggaagctagttcctccagaataatgcaccagctcccaggacacgggcagctaatgttaatttgtctgcttggttcccttgtacatcacttctccctgctagagagctggaatccctacaaaattttaggctaccagttctctttcttccattttgcattatgcatagtacgatctacaaagtagcaaccaaagaacatgtgaaaaataagatggaatccctttaatcagattgtttgtccgaagtggcatggcgatgaaaaggaaaacatcagtataaagaactagttactcataattctttgttctgtaaagagtcctttctaaataatgctgtgtgcatgatgatgatgatgtgatgtgatttctacc

SEQ ID NO: 124657 - DNA, 638 bp, Zea mays
  unsure (1)..(638): unsure at all n locations
  Clone ID: MRT4577_45165C.1
ggatctgaaggtcttcgtcggatatgtccaaactatctcaaccggtgtcgggcaagaacctgtgccacagttggtgtggaagattatctccgtctgaagtggctgacaaagtaaagcacttcttcaagtactacgccataaaccggcacaagatgactgttttgaccccatcttatcatgctgagagctattcaccagaagataataggttcgaccttcgccagtttctttacaactcaaggtggccctaccagtttcggaagatcaatgagcttgtgcaagagatggacaaagatggcaaatggggaacttctgcagaagggaagctgggagcgcagacaggtgcacagggaactggaatgggagtggtggcagcggggtctgccaatcccagtgccggcttctgaagagaaccatactaacgcgtggaagctagttcctccagtttttcggccttgacagaataatgcaccagccgtccagcccccaccccaggacacgggctgctaatgttaatttgtctgcttggttcccttgtactgcatcacttctccctgctagagagctggaatccccacaaaattttaggctaccagttctgtttcttccattngtcatagtacgatctacaaagtatc

SEQ ID NO: 124658 - DNA, 210 bp, Zea mays
  Clone ID: MRT4577_45166C.1
aaggcttgaggcattatagtcggccctggataacaccgcaccaagctgcgaaataaactgacaaatcgctatgggggtccatggagaagccaggaagatttttgccccaaaattccacccatccattcaggaacaaattttcccgaaaagagaaagggaacatgaacacgtggtgttccggggctcccacgcaacggaattctatagcct

SEQ ID NO: 124659 - DNA, 366 bp, Zea mays
  unsure (1)..(366): unsure at all n locations
  Clone ID: MRT4577_45167C.1
gggtacctcgaggncggnncgggaactagatccgcggcgaccatgcggcgcggcggcggtcgccggttccccaagccctccttggcgccctccaccgcggacgaggacaccccggatctggacgccagcgtcatccgaaacctcgactccgccttctcccgccgcgactccgacgccaaaagcctctgcagcagccgtcccgattctaccgccggcgccatcctcaaattctccgaccgcgccacgaaggtcgccgcgctccgcgacgaataaacattcctcgccaccgccgaaacgataacgggggaactctgaccgccgcgcgagaaataaaggaggagaatacgcctcctagaagaacgtatc

SEQ ID NO: 124660 - DNA, 458 bp, Zea mays
  Clone ID: MRT4577_45168C.1
ccgttaaaccaaatggggctggtccatgttcaaatttttaataccaagcttgaaaagaaaaagatggctcattagccaggacaccatttcctgagtgctataattagatagaaaatacgaatgctttattttgcaacatggaaaatgtgttttttttaaaataaatttcatatttttcacgttatttttaaaaattttctgttaagcattagtctgaattttatcataattgaaacatatagttccaaacaatttaattttaaattgcttttaaagctctattcttctctacacttacagtcaaaatgaaaattcattgtatagtatttggaaatgtatttcacctgtaaagaaagaatgtctacatttcaaatggtttcaagtgaatacagaggaaccatcccctccagaaagtcagactacaattgtttacttttgtttttatgaatttttactca

SEQ ID NO: 124661 - DNA, 320 bp, Zea mays
  Clone ID: MRT4577_45169C.1
caatcaacagaatcacatgtttcatgtaatgagtattggacttatatctatccccctcacataatgttaattgatgcttttataaggtacaaacgggattcatatctctaaatccttaacataagttcgaagacgccgatgacttttttcgaccaatcaggcgtgaggatttctgctctactccgaaactgccgcctcatccacctgctttttctggcctaagtttgacggacacggctctgaatctgccgccgccgtctacttatggccttccttcgacgccgtggagtcggaggcggcttcttgggcctgaaaggcct

SEQ ID NO: 124662 - DNA, 140 bp, Zea mays
  Clone ID: MRT4577_4516C.1
aggaggggtttaaacaacaggaggatccttcattttattatcttttgcattcatagaaacctacaagaccacacccaagttcatacatacgcgggcgagcataaaaatcttcaatacttgcgggggtgatattaaacaac

SEQ ID NO: 124663 - DNA, 278 bp, Zea mays
  Clone ID: MRT4577_45170C.1
gtcctttttttttttttttttttttttttttttggttgggttttttttttttttttttgggaataattataagctcaggctaaagaacaaatgccaaaggcccattcaacacaatgttgctatgggttgatcttaacatggaatcgggggggttaaactaaccaaccgtttgctgggctcaaattccacgaaaaagctgtgaccttgccatgaaagaaccaaatctcactggctgtttggcccggacacctgggctgaccccttggcggacccctgga

SEQ ID NO: 124664 - DNA, 242 bp, Zea mays
  unsure (1)..(242): unsure at all n locations
  Clone ID: MRT4577_45171C.1
cccacgcgnccgnggnnanggcaaccgngaagaagggaaagccngagcnaagagggaaggggangccagcagaganggggaggcagcgcaagccanggcgccgaaagganggngncnacangnacnangaagacaaagcaggagngaaggagaacccaaagggagagaagaaaggggcngccancacngggcccaacggaaaggagngagcagancacaggcccaagagggcaagcgcggca

SEQ ID NO: 124665 - DNA, 453 bp, Zea mays
  Clone ID: MRT4577_45172C.1
ccaaaaatgggaaggaaggaaaatttccaaaaactcccatccttcccccccaggagtcctggggcgcgggggggccacctaccccaacccattttgttacccccaccacttgggggggtttttttttccgggccccccaaattttgtttggctgaaagccccccccccccgagatgaaaaaaataaaaggcccttgtggaacccccctaaaaaaaggataattccatcgaataacccccccccgttttgctaaaccctttaacttaaccagttgccggcaattcctttacccccctcccccccccatggaaatttaaactttccaaaaccaacctatccctgcttaaattagggggaccatcccaaaaaagtaaaaaaaaatctgggcccccccaccagaaaaaaaaccctttcataaacccctacctgttgaattccatgttccttggggcc

SEQ ID NO: 124666 - DNA, 298 bp, Zea mays
  Clone ID: MRT4577_45173C.1
ggggcaaaaacaaaaacaacagaataaaaaaaaaagtgtggttgaaaggtaaaaaaaaaaaaaaaagggggacctggtaacttcgcacaagaaagtttggggggaagaatttaaaatgtacaccaacaaaaaacaggcttggaagggagtgtgggttataaaggaggaacaggggggtttacaaaattttgaagaaacaatacaaacttttttgaggggggggggcaaggaaacactgggtgggggtttaaattaaagggcagggggaccaggaagggtttttaagcttcgaagaaac

SEQ ID NO: 124667 - DNA, 351 bp, Zea mays
  unsure (1)..(351): unsure at all n locations
  Clone ID: MRT4577_45174C.1
gtgnttaggatgaggtatgtggccaaccagaaatcagaagttacagcgccagatcctctaatttaacaccaaaggaaaccaagaaaaaagccctcctagacgctaaatgccctaaaagtgaagcgcaacaaatgcgtacattattccacagcgctcacttgctcctagagccattataccacagttcctcccaccagttactaaaatgggcttcgaacatccagccgtgcaagcctacaggctacaactagcgcttgcgtgcagcagcctacaacaaccaatggcccaattgcaacaacaatccttggcacaaactaaccctacaaaccatatgcacccaacaacaacaac

SEQ ID NO: 124668 - DNA, 287 bp, Zea mays
  unsure (1)..(287): unsure at all n locations
  Clone ID: MRT4577_45175C.1
ccggaanncccgggcggaccacacccgtccggccaactaaccctacaaaaaactttccatgtctacttttaatgcttcgcaaccgcaaccaaggtgttggtcggtttttctgtgatgaagaagtaaatgtccttaaccgcagtttcaatccaagctaatattaaatttggtgtaacgtgagccctcaaaataaaggttccacatgtttaaatggttttaatgtcagtcctaacctcaaaaaaaaaaaatatattattatataaatttatatttattaatatatatat

SEQ ID NO: 124669 - DNA, 299 bp, Zea mays
  Clone ID: MRT4577_45176C.1
ttttttttttttttttttttttttttttttttggtgggttggaacaaagaccaagttttttttttataacgaatcgcatgcacaggaaatcaaattgggctagtcccaaccaatccttgggacctcacaggtcacaactcacaagcaagaacatgggtgttcaaatgagttcactctttactgcaagtgtagccaaccaagctagagtggataaactaccacttctggtgctatatcaccctaaaggagttttggatatgagattctgccatacatattgcttccatgagcttggttac

SEQ ID NO: 124670 - DNA, 358 bp, Zea mays
  Clone ID: MRT4577_45177C.1
cgtgtcatttgaaactcagaagacgatagaggtgagggatatccattacatatcgaaacccaagaccaggtccaacttcgtgcgcaacagcggaagcagcgccggattctcggcatgtcaccggtgatctctgcctgacgacgatcggctctgtatccgactcagcgtatttatttctgtactaactagcggaagaggtctaccgaaattttaggaagcactctcttgttttcccaatttgatgtgtagccctgcagtctaactcactgatattatgtggatatagatagtgcctagtccatgaggctacgcttttgtacctctcgttgagattggcgaacatgaggaaagcagagtg

SEQ ID NO: 124671 - DNA, 332 bp, Zea mays
  Clone ID: MRT4577_45178C.1
ggacgcgtcttattaccatcaactatatctactccataccgtttaaaaacccaaccgacaccatgggggtaggtgtctttttaactcgctctcctgcctctcaatgcaatcgccacctacacacatacaaacaatggttacaactaccaaccaccgtcttcggttcatctaccgtctcacccgcatctatccacctccagttaacctaccaccttcaatgcatcttccaccgtctgtacacctgccgccaccagttcacctgccaccgcctgtccatgtgacgactccgtttcatctgtcaacaacaccatgccactaccctactcaaccac

SEQ ID NO: 124672 - DNA, 135 bp, Zea mays
  Clone ID: MRT4577_45179C.1
attcccggctcttcccacccgcccatattatccccctccatcctcgactagctccaggaacccaaaccactacggcacttctacaaaaatccatctcccataaactatcccccatcctgtccaacctcccataat

SEQ ID NO: 124673 - DNA, 479 bp, Zea mays
  Clone ID: MRT4577_4517C.1
taatgctcgtttttctggtccatatgcctgcatcattagtcaactcaaacgtgttgtcgtccttgaaactgcaatccaaatctacgcaaccgttttgcatgccactgtttgtatgtggatgcctggatggcaatcaaggacatagtggcatcttttgatctcgctgttcatggaattggtttacttcagcagcaactcatcaagaaccctgaaaccccccttgtgtcctatatatatccacagctgatacggggcgtgaaggtaaggcccccgccggcgcaagagcaaggcagtggttccagcgggggaggcaagcacaggcccctctgtccagcaggtccagggagagccgcagccgccggtgctcctgaagacgccgtcgtcgacggggtcagcggcgcctgcaaggggaggtctccggaaggcgtgcggcgggttcggcagcagggagccggcgccatgagccagatggcggtgag

SEQ ID NO: 124674 - DNA, 278 bp, Zea mays
  Clone ID: MRT4577_45180C.1
ttcctcatccatttcatacatttactctgactattatacagacatgcacagtgacattcaaatatagggatcgactaatcatggctatgccccatcccttcacacgacctaaccctcatcaccaaccttttatgaatgctgaactgctagcaacatacggactctaagctcactctaacatctatcatattgagctataacctcaagctgaccctcttctagtacgacttagtcaaagtccattattcaagcttattaatcatcataacccacttcta

SEQ ID NO: 124675 - DNA, 238 bp, Zea mays
  Clone ID: MRT4577_45181C.1
gagctccactacggacctggtatagagaatggtctctgctgaaatagggcagagtctccctaacaaagaagctatcccaggacccctcattccttcaacttgtgcctggtacagagtcgtgttcgaacgcagccacactcttctatgaccaagcatgagataccgctataggactgagagacattgaagtcctggcattagcttgcggccagagaaggcactggaactggagaggaga

SEQ ID NO: 124676 - DNA, 402 bp, Zea mays
  Clone ID: MRT4577_45182C.1
ggcccccggtaaaagacacaagggaccttttattccccaatgggggaccaacattttcatgggttattggaagagagcatttaactccccataagaattttaaaaatccaacaaatccttacaaatttttggcccttgatgttgtgatcttttaaacaataataaaaatttttcaatttgttgaggcccacgtttttaggttccaccaagtttttttttttttttggaggggggggggattttgcccttctaaaaaccatatgtgctactttgtgactgccaaaacatttttaatcttttcgattttttggtcaaaaggtaatgctcccttaaagagataacaagggttcccatccttgaattttataaaaggggggaatgcttcaatttttttacgacctt

SEQ ID NO: 124677 - DNA, 169 bp, Zea mays
  Clone ID: MRT4577_45183C.1
gcataattgattttacacctcattactggtggataatttatgtgatgtggattgctggtgtccagcatgaccataaacaggtcagaagaatgatggaatgttttagaataaactcctgcttatagtatactatctctttcaaaagatgtttaaaatgcttttgtattta

SEQ ID NO: 124678 - DNA, 272 bp, Zea mays
  unsure (1)..(272): unsure at all n locations
  Clone ID: MRT4577_45184C.1
atttcagggacgtgaagaaagccatgggacgcgagtacaagcaggaggtgacggcgcagaacctcgccgacgtcatccaccgcttctgctggtactactcgcccttcgccaccaagaagcccgccccggacagcccgttcaaggacgtcgtggccaacaaggagatggcggcgaacgcacgctcctggactgcctgcacatgagcgtggtgaagccgtcgtcgcactcgcacggcaanggcgggagcggcggcatcggcaggccgtctcgca

SEQ ID NO: 124679 - DNA, 281 bp, Zea mays
  Clone ID: MRT4577_45185C.1
agcagtggtaacaacgcagagtacgcgggtagcttcgtcgtgctccgcatccccttagggacggctatcgagcttcttctctgtttcttttttttccttttcggcactcgatggtgcgttctcagtttttacatttacatctctgggggattttgctcttatagaactaaaataaaaaaagaaattacatgtgatggccccattaaaaacctttctcccccttcagaaaggaaaagggtgccaaaaaaaaaaaaaaagtactctgcgttgttaccactgct

SEQ ID NO: 124680 - DNA, 796 bp, Zea mays
  Clone ID: MRT4577_45186C.1
ggccgctttttttttttttttttgggaattctaaaaaaaatctaattcaagatctttggaaaaaaaatttacatacttctcaaaatgagattttgaggtgttacaatagccaaccctctagattaaatcagggtcatagatgaatcgaccatcatccccgatcgccagatccgacatcaacagatgagatacaaccacgcctcggccttgatctaagccattcaccaacgcatcgacgatccagatctaattacaggaactggtaagtttcgatttaatactgaccgtgaattccaggttgaacggccgagagtcgtcttccccaatccagccaacatcgctcaacaaaggacgacacccgcgcagtggtgacggcgagcgacatcgctgacgaggcgattcctcaacccaggcgcacagaaatggcgcggcacagagcactgtcgacggaagaacgagcacatggcggccctcggtactccgacgaacaatcccccggaattccgttgcacttgcgtctgatgcttcgcacgcgcacgattccaacccgatggcgagtccccgcgactctacaccgagcactgaccaatggccaggcgagatgtcaagagcggcggcctcagcccttctcttctcccccgcggacggcgaattcacactcacttggttaatcgggtcggttggacgaggcgaagggaagggagcacgtgggcgtatggtccgcttttgaagctacgacgagctggagccgcggatagcgcgattccgggaagggcgccccggccggcctcgaggg

SEQ ID NO: 124681 - DNA, 214 bp, Zea mays
  Clone ID: MRT4577_45187C.1
ttttacctgaagttaaaccatgggaacatgaaactgacatgggcaaactccaagaaactgttaagaatgtccaaattgaaaggctgctccggggcgcaaccaaacctggcccaatttggtaagggaaccagaaactggaaatccagaagaacaacctccaacaacctggccccggccaaaatcccaattaagaataaccgttcgcctaaccaat

SEQ ID NO: 124682 - DNA, 314 bp, Zea mays
  Clone ID: MRT4577_45188C.1
gttcgtagcgaaggcagcatcagcttctactgttggatttgcaatattcattattgggttcttgactcagcttgttaccacctttgggttcccttattcggctgactacaaaaagttgtaccggacattgtggtctttatttcctcctgatttatttgccaaagccctcaacattctaggcaaggcaacagccactcctgaggataaaggtgttagctggaatcagcgtggggagtgcccatcttatgagactgactgtgtcattactattgatgatttatataagtggctcatattcacatctttcttgtggt

SEQ ID NO: 124683 - DNA, 477 bp, Zea mays
  Clone ID: MRT4577_45189C.1
cgggaatgtgaccctggttaatgcatgttatgtatggataccctatgtatgcgtgtgatcaaccaactgggcaactatgccatcttagtctttcctaaaccttgggctgacctctcatgctgagatccaatgtactaatgcaagcaagaatgaggtttcctaaaacccatggcccacctaaaaataaccttaggcattggtcatagcaacgtttccatcaaacacataatcttttctcatctggaaagccatcatcgcccacactagtttcatagctgctagtcgttggggggtatcaaataaatcgtaccaggggctcctccaagcctaaaccttaccccaacttcgcctggatgcatcgggctcccgtgccccttccagagcctaaagtaaccgattaggtactctgacacggatgagcgaaatatggtgaaacagcgagctcactacaaaaattcgtcatagtcagcccctttg

SEQ ID NO: 124684 - DNA, 317 bp, Zea mays
  Clone ID: MRT4577_4518C.1
tcgtggtcgctgtggaataatatcctcaaaccctatcttccgatctcgatggcgaaccctcgcgtcttcttcgacatgaccgtcggcggctcccctgctgaccggatcgttgatggagctgttctcctacgaggtgcccaagaccgcggagaacttccgcgcgctttgcacggtcgagaagggcgtggtcaagtccgggatgccgctccactacaagggctccacctttcatcgtgtgattccctgggtcatgttccatggctgcgactttaccctcggtatcggtaccgttggctagttcatttacggcgagaagt

SEQ ID NO: 124685 - DNA, 486 bp, Zea mays
  unsure (1)..(486): unsure at all n locations
  Clone ID: MRT4577_45190C.1
agcaggggtaacaacgcagagtaatatttgtttcagtgttttaaaaaaaaaaaaaaaaaaaaaaaaaaaaaaaaaaaaaaaaaaaaaaaaaaaaaaaaaaaaaaaaaaaaaaaaaaaaaaaaaaaaaaggaaaaaaaaaaaaaaaaaaaaaaaaaaaagnactttgggttgtaacaactggttaaggggaaattccaaaaaactgggggccgttaataggggatccaagctcggaacaaaacttggggaaaaaaaggaaaaagttgtttcctggggaaaaatgttatccgttaaaaattccaaaaaaaaaaaaaaccgaaagaaaaaagtgaaaaacctggggggcctaaagagggagctaactaaaattaattgggttgggctaactgcccgttttcaaatcggaaaacctgtcgggcaacctgcataaaaaaatgggcaaacgcgggggaaaagggggtttgggaattgggggcttttccgttt

SEQ ID NO: 124686 - DNA, 639 bp, Zea mays
  unsure (1)..(639): unsure at all n locations
  Clone ID: MRT4577_45191C.1
cctcgnagccggccgggagaacatagcaacccaatccaaaccaccacaagcaaggaatcccccgatggatcatcgcgttctcctcctcctctctctcgcgacgggcgccgcggttgccgccgacgtcgatgcggaggacccgctgcatccggcaggtggatcccggtggagatgacgacgatctggagatgaacgcggagtcccacttcctgatgttcacgaatggtgtcggcaaggcctacaaggacgccgacgagcacgcgtaccgggtgatcgttttcgaggccaacctgcgccgcgcgcgacgtgaccagctgctggacccggcggaggagcacggggacgctatctactctcagctcacggcggctgagatcccacggaactacctcggactccggaagactcggggcgctctcctcgaagaactcggccagtctacgatgaaagagaccgggctccgcagcgagggcctactgcgatctactgactgtgactcaccgcgatagacgccttccacattggaacctttctatcaagccaaatatgctgatggtacaaagcgacatggagaagtggacgtcgagctctacctcttgactgcttatatggaggtgatttgcgagcttggcgtcaatc

SEQ ID NO: 124687 - DNA, 550 bp, Zea mays
  Clone ID: MRT4577_45192C.1
ccggggaatgctaatcttaccgtttgtcccagtgctagacgctaatccatccaatcgcacctatctaacctaagccggcaccgagccaaaccctagcgcgcacccttactgatatatgcatagctactgcgaccaactgcggcctgcatgactgcgctggtcgccagacctgcgtatggcactcgttccccgtcgaccatgaccaactacccagatttggacccaacccctcccgtacgtgcgcgccggccggctgggtgccgccacgaatccctgctcaaccctgtgccaaagctgatcatggtactgacttcacggaggtgcagatgtagcatgcagcgagagagatatcctatgattcagcgtacggacgctctcacagatccagaagtcgcgtactactcgctccatatgcgtcgattccactactcaaccttctctgattgacttactgcatacactggcaatgcatgcctgacagggcatgtcaatggcaagatactgatcactgcctacaaaactactaatgctgaactagtaactgacactg

SEQ ID NO: 124688 - DNA, 845 bp, Zea mays
  Clone ID: MRT4577_45193C.1
tggttgattgccctaacggggagattcttggacacacgaagatggtgtccgcaggcccaacactgtccttggtgtgatttgtcgctagtgcttcccagggtgggtcacgttgcccggtgagggccgggttccagagctaggaatgacctgggagcactacttggctgccccggccccaccggagcatagggtcggcgatgtcgagtgcgacacggtggccgacattgtgatcgccacgttttggaccttctacaggtgtgctgagggataggaggaggccgcggctcgggttatcaacgccgagtgcaggcgcctacttggaaactttcggcacgaggctcggatgcaggctgttcgagactacttagcacagactggtattaggaggagaaaagagaagtgccgggacaagtatctgagtaaggagaagtacatgaaggtgcccccgagatggtgtgcggacaagatggactgctgggaggcgttggtggatgagtggtgctctccccaatggcgcgtcgcccacaacattgcaaaggagaagcgtctcaaaatggaaggtgtgccacaccatctaggcagcgtcaacctacatgggtacgggaaaaactggtcaaaacacaacaaggctccagtgccagagctgttcgacctctatggcatgtccaatattgcaccgtacaagaaggccaaggcattctctgagtctgacctcgaaaatgcagagaacttcagcaacaagggcctccaccacaagatggtgcagtacgttaagcaggggaaggcgaggaaagggcggactttaaccgagctggcctcttgatctagagctggtgatgatatct

SEQ ID NO: 124689 - DNA, 450 bp, Zea mays
  Clone ID: MRT4577_45194C.1
accgagacgaagaggatactaaacatcccccagctctaaggaaacggtaccgtccccatgcggcggcccatagccaacccgtaccgtattgagcggcggcagagattgcttaaactttctactaggagaacggcatttggtattacctgacctactcgtagcggatatcacgaggaggtcttcggagtacgtcggcgccttcgggtatacacacttatcactaccgtcgcgtcacgaggccacgttcttattataatatgccgagcaagagaccggtgagtatagggcgacacttccttacggagtatgtccgctagcaatctacgatacaaatcacggagataccatcgtctacattaagaacgtcgactacggaagggagtcacctataaacattccgcataatccagacgccaattagcataacgcgtctaaactcgtcactcccag

SEQ ID NO: 124690 - DNA, 540 bp, Zea mays
  Clone ID: MRT4577_45195C.1
tcgtcacgcgtccgcccacgcgtccgctcgagacgagagccagctctcccagcacacgagcacatggcgtccaccaccctcctcctcgctgtcttgctgctcgtggctgcgtccgcagcggcgccggcgcggtcttgctcacctcgcgacctgcaggcgctgttgagcgtgaagcacgcgctagggaacccgacaacgctgtcgacgtggaccccagcgtcgcccgactgctgctcgtgggaccacctccggtgtaacgacgccggacgcgtgaacaacgtgttcatcgacggcgcggacgacgtgcgcgggcaaatcccgtcggcggtgggcgggctgacggagctcatgtcgctgaccctgttccggctggcggggctgacgggccccatcccggcctgcctggccgcgctgtccaacctgcagttcctgaccgtctcccacaccaacgtgtccggcgccatcccggagtccctggcgcggctgcgcggcctggactcggtggacctctccagcaaccagctgacgggcggcattccg

SEQ ID NO: 124691 - DNA, 202 bp, Zea mays
  Clone ID: MRT4577_45196C.1
acggacgcgtgcggggagttagcgattagaaatatcgcatgaggtcagtagagccagaagaatgcgcaggcagaagatagaatcgggtaaagatatgagtaaatggacgaagggcaaggtgacgagcttttagagcaggtgaatcataccttgcttgacagatgtctcgagcaggaatcatagatcatggtagactacgaga

SEQ ID NO: 124692 - DNA, 955 bp, Zea mays
  Clone ID: MRT4577_45197C.1
agccgaaaacgtgaatagctggataggaagaggtgccagggaggcactcctgttttccatgaaggcccaggccagggaaggcaagcaacaaagcctggccggccatctgaagaactcgaaggtcggttcccaagcattgcagcgatggcgatgatggggcgagcgatgaacaagcttcggccgtgcgagcatcagaagatggggccacttgtggtgtggaagacagattgacctcatatatatatgtttttggaaagaaaccacagcaaccagcgcaaatcagcacgatgcgtcgcgagggccgccagcacgggtgggtgtttaccgtcgaccccagcctggtcgacgcggagggcaagtgccggtcccgcgcggtgcatgtggagggcgcggcggcggccaacggcgggttcgtcagggcgtcgaggaaacccaccaaccactccaagcccgccgtcggccgcgcgtacaagtccatgatcggcaagggagaggccgggtcgggcaagcagggcaggcacaagttcaagcacgacgaggtcaagatgtactccctctacctcgagggcgcccacgacgcctacgcggatgcgatgctggagttcgactcgtagtcctgctgatgacattgggtgtgtgaatgatgaggtgctggagttcgacatgcgccattgccaggactcaggaggtgtacagattcgatgtacgcttctgtgtctgaatccaaatgtgttttgtgatgtgaacagtgaataaacagactggttgtgacgagaatgtcgagatccggaatgtatctcgaaccggaattcgatcaatcttcatatccaaagttcaaatctgtagagttggaattttatttagccgtgtgagtttccgtttttcggtcctggttattttcaaatgtaatactagcttagtagctttcgtgcagttaaaagcctcactttctggc

SEQ ID NO: 124693 - DNA, 118 bp, Zea mays
  Clone ID: MRT4577_45198C.1
ccacgcgtacgcaatagcctccgggccaagtcgctcagcgtcagcaacaagctccccctcgccatctccgtgcacgtcaactactgcggcaagcacgtgccctccagcttccactgcc

SEQ ID NO: 124694 - DNA, 550 bp, Zea mays
  Clone ID: MRT4577_45199C.1
actcccctccccacctgccatcaccgccagaacgccggcgtgctcatccagcagccatcccgccgccgtttccggctgaccgcgcagagaaagcccgggtccacgtccacgagcccgcgcaccggcacgccctccggctcggagtcggacaacgtggtcctgaaggccgcctggtacggctccgaggccctcggcatcgccgcgtctttcttccggccgccgtctccggaggcggacgccggtgctgcagacgacggcacgtcggagtcccagcccgttggccgcgcgcaggtcgccgaggccatcaaggatgacttcgcgcggtcatactttgtttttgggaacctcacgctcggggcgtacgaagacgactgcgagttcgccgacccggcgggttcattcagaggcctgcaacgcttcaagaggaactgcaccaacttcgggtccctgctggagaagtccaacatgaagctgaccaaatgggaggatggcgaggtccaatcgatcgggcactgcctgtccagctacctaatgtggctcccgcgtacgc

SEQ ID NO: 124695 - DNA, 153 bp, Zea mays
  Clone ID: MRT4577_4519C.1
gcggtgagaggcggactcttacctggattgcgccctggttctcggctacggcgcgcctgggcggtgttgagcatcgctcgggcttgcctgtcgggttcttgtgggtgcgagtggctctgggccgggcgggggtctcgcccttctggggggggg

SEQ ID NO: 124696 - DNA, 384 bp, Zea mays
  Clone ID: MRT4577_451C.1
ttgggttttttttttttttttttttttttttttttttttttttttttttttttttttttttttttttttttttttttttttttttaaaaaaaaaaaaaagggaatgtttgaaaaaatgacttggtaccaataccagttaagggaggggatgtcggggtttttatggggatcaccataaaaaatttgggtaaatgtttatttttaaaagggggggatccattattttttaaaaatgatcgcataagggggtccgatagcccaaaaatgggatgcgtttacgggtgccgcctggaaggttttttagttgaaaaaatttaccttcgggaaagccttgcctaaaaaaaactgaagggggggggcaaaaaaaaactttgccataatttt

SEQ ID NO: 124697 - DNA, 239 bp, Zea mays
  Clone ID: MRT4577_45200C.1
aaaaaaaagaaaaggggctccccgttccaatttttgacttaaatccgggagatggggaatgattttccggtctaaaaaatttggggggggcttggggggttcttttggggttttccccccccccccccatggccaatttttaacaccggtcaaacttttttcgggcagaggggggggaacaacgggggggggaatcttatttaccaggtttaacaaaggatggggagcgagcccccccc

SEQ ID NO: 124698 - DNA, 420 bp, Zea mays
  Clone ID: MRT4577_45201C.1
gccgggccggggaatcaccacccaacccctacactcccggcggtccgcacgagcgcagcaccccaggaagcagaagcgccacaagccaccacccgccttctcgccccacagcacaagagaggccaagacccagcaccaccggagaccaccggcgcacggccccccacggcggccaccgggcgaccccaccgagacccagcccggcccggaccaaccccccccgaggccgacggaccccgcgccgccgaacgcagcgccgccgaccgaagacgacagaccgcccgccgcccaccgcgccacgcgcgccacgcccaccagcacccccacagccgccgccgccgccacccccgccgccaccccccgccagggacaccagagcggcccacccccacccccgcgccgaccacggccacccgcccc

SEQ ID NO: 124699 - DNA, 137 bp, Zea mays
  Clone ID: MRT4577_45202C.1
ttaggtgcgggcgtgcgggcccatcgatttgatcatccacaggaaaggagcacaagtgttacacagcacagtcttaaattgcacacgacccattcgggcatacaaacactgaccgcctcctacactaacgttcgata

SEQ ID NO: 124700 - DNA, 226 bp, Zea mays
  unsure (1)..(226): unsure at all n locations
  Clone ID: MRT4577_45203C.1
cttcaagaggctgttcaacttcaagaaggacagggatggttattcggaatggtttgctggcaaccagngctctggtggtgctgctggtgcttcctctttgttttttgtgtactccctggattatgcgaggacaaggttggccaatgatgccaaggctgccaagggaagtggcgatagacaattcaatggtcttgtggatatctacctgcagacactcaaatctgat

SEQ ID NO: 124701 - DNA, 275 bp, Zea mays
  Clone ID: MRT4577_45204C.1
cttccgaggggctggacggctgataggctcaagtccttgctccaggatcagggaatctcgtatgcaacagcaaagaaaaagaagggaatgacagttggttttgtgacttttcagagtgttgaacaactaacaaatgcagttcagatccttaaggagaacccttctggtggaaagcaaattaagatagtagatgccaatcgtaggtcccatcaaaaggcacatgctggagcacctgtatccaatactggaactgcaacagaaaatggtagtagtcc

SEQ ID NO: 124702 - DNA, 1599 bp, Zea mays
  unsure (1)..(1599): unsure at all n locations
  Clone ID: MRT4577_45205C.1
tgcttgtgctagtccggcagctggagttgacctgggtaggcagttccatgctatttctatcaagcacagatgccatgatgcactctgtgtgagcagtgcacttgttagtatgtatgcaangaaaaggaagcatcgagaatgctcagtgtgtctttgagaggcaaacagatagagatttgctgtcatggaactcaatgctatcagggtacgcacaacatggttacagccaaaaggcccttgatgtatttcgacagatggaagttgagggcattgatatggatggtcttacattcctttctgtgattatgggatgcgctcatgctggtcttgttgaagaaggtcagcaatactttgatttgatggtcagagactacgggatcactccaacgatggatcattatgcatgcatggttgatctctatagccgcgcaggcaagctggatgaaacaatgagcctcattgaaggcatgccattcccagcaggtccaacaatatggcgcgcattgctaggagcctgtagagttcacaagaatgttgagcttggaaagttggctgcggagaagctgctgtcacttgaacctcttgactcagctacgtacgtacttctctccaacatttattcggctgcagggaagtggaaagagaaggatgaagtgaggaagctaatggacactaaaaaggttaggaaagaagctggatgcagctggattcagatcaagaacaaagttcatttctttatagcttcagacaagtcgcatcctttatcagaacaaatatatgcaaagctcagggcaatgacagctaagttaaagcaagaaggttattgtcctgatacaagctttgtgcctcatgatgtggcagaagaccagaaagaagctatgctggcaatgcacagtgagcgcctagccctcgcatttggtttgatagctacaccaccagcggcaccccttcacattttcaagaacctgcgggtgtccggggacggccacacagtgatgaaaatggtctctgaaattgaggatagggagattgtaatgcgagattgctgcaggttccaccacttcaaatcaggggtctgctcttgtggcgatttctggtgaatggattttgaaaaaaaatggttgtgcattcaataaaaaaaaaaaaaagcggccagtgtcccccttgaaaaatatcactggtaagttggcttctagatgttttaagatctttcgtatatgaggttggatgttattcctaacagaaaaggagtgagttagctctgggctcagccaaaggacatggcattcctcaagtacgtcaacaagtggaaggattacttaggtggcggtctgccagcggtgggaggataacttgagccactgggtgtcagggtttgcagtagctaagttatttatgatgtgtttggtttgaggtcaaagtggtacaaggcaacggcgacactgtcccttcaattttttaagatcacgccgctaaaaaaactactttggtgtttacgtcgttcctacgtgactctcatccaaaccctatagaaactgagtctgccccattttattctnnnnnnnnnnnnnnnnnnnnnnnnnnnnnnnnnnnnnnnnn

SEQ ID NO: 124703 - DNA, 428 bp, Zea mays
  Clone ID: MRT4577_45206C.1
gtggcacgcatccccgctggcaacacctttgccctgggggagggcacaagggaggggggaccccacaaagccccacccaacccccaaaccggggccaccgcacgggggccgggcgcagggcccgggccccgaccccggggccgcgccccggaacccggccgggcccccccttggggagcgagggggcatcttgggggggggcgggcccggggggaaaacggtgcccagggggaattccgtggcgaatccccccccccagcaaaaagcgagccaacaggggaaccgaaggagggcggggccaaccagggagcgcacaaaaaaaaaattttgcggcccgaccgcggggcggcccgcgggccgggctccccgggggcaaccaggaatccgccaccgcccactgagagggggaaagcccccggggaccccgg

SEQ ID NO: 124704 - DNA, 320 bp, Zea mays
  Clone ID: MRT4577_45207C.1
tgtttgagatgtaccttggatgtgctctatgtggttttgtgatttgaacggaggaagtaataataagataaatggatggcgcaacaagatactttgctcccaaaaaaaaaaaaaaaaaaaaaaaaccaaaggaaaaaaataaaaagccaaaaagggcccatgcgggggccatcttgggacaaaattggggggggctggcgccaaaatactagtttaccggggactgaattgtgaaatgaaagggggggggggggacacccaaattaaagggaaaggccggggcttacaaaactattgccagaaaaaccctggggtaaaaa

SEQ ID NO: 124705 - DNA, 325 bp, Zea mays
  Clone ID: MRT4577_45208C.1
tgtgaggatgccttgccgcctgttctgctggctgctccgaaagctcgcgtgcgccgtgtcctggcggaggcggttggccactaccttctccgtgtacgatggccgtctcccctcgcacctcgaaacacgggtcatgaggcggatggcaccaggcacgccgctctctccgctctcctagtacttcccgcggggcgatgccgctgcccactaacatacacaccccgtttgttctccggaaacgcggccggcaacgctggtccccctttagtggcctcgcctacgagataggtcccatcatgttcagtttaggagccctacaacagga

SEQ ID NO: 124706 - DNA, 608 bp, Zea mays
  unsure (1)..(608): unsure at all n locations
  Clone ID: MRT4577_45209C.1
tgtcctgnatgaatcactgaacctgatgctgcatcacctcatctgtgcctccatttgtataacaggttgctggaaggcatcttcgctggtgacaagttgtcaagacgatggaactgtaagcacacctggcccagggccgtcacaccaacacagttatcctagactctgattggtgctccgaggaaatcttgtctgtaacgtctacgaaggagtcaccacgggatggacgcgtggacacaccagagcggcgaccactccgaaacgcagacacagcaccattgtgccgagtgcggacatcaaccgaccgcagacgccacatctaagatcacataatgcctgctcaagcacagcctgacccactgactctgagacatatctccaaggagaaattgctgccgagtggtgtattcacccaaggatggcaataacagttagaatacgatgaccatcgatgtaggcgtatgcagagcaagcgatgttagccaagtatcctgagcgtgaactttcatatagagatagatcaagatcggaagcttcaaattcttttcttttcttgcgcaaatacatacttcttgcagggcatgaactagtcgaaacacctttctttg

SEQ ID NO: 124707 - DNA, 302 bp, Zea mays
  Clone ID: MRT4577_4520C.1
tcgttacactgttgcagcttggatccgacatgccgaacacttgacccttttccagtgaacgtgggacgttccgactctgccggcaaataccacgctcgcgtacataccgatccgtggtagcacatttgtgttgtaccactcgcttttactccaaagcgagcgatgctacgcgttacgccggagctcgtttgcgccgcggtggatgagagcggactgggaggagatgaaggccatggagcgagctacactgatgaggagcctcctgcacgagacgggtcaactgcgtttactcgtcatcgtta

SEQ ID NO: 124708 - DNA, 779 bp, Zea mays
  Clone ID: MRT4577_45210C.1
gccggccggttccggagaattcttcactcccgcgctatgcctatggccgaccgcgtccaccccatgccatctccctcctccccgccgcttccacctccgccagggcgacggcgacctgacgccgaccccgccacggagacgacgccgctgcacccgtccttcttccacgacatcccgctgtcgccgtccccagcaggcacgtgcatcgtgcaggtgcccaaggaccaggtcctccgcgagccacctccggaccgcgcgcgccgctacaagaagctcgctggccagcccgcgcggcgccgccgcctccgccgcgcgtgctgcctctcctgcgccgcgctcctcgccatactcctcgccgccgccgccgccttcgcgggcgccgtctgcctcgtcttccgcccgcgcgcgccgtccttctccgtgccctccgcgctcgccatccgcggcctcgccaacgccaccgcggtcaacaggggctgcagggtcagggtcaagccgctatggtggtggtggtgatggtgatgtgatagccggcgccggcgatcgtgtgtctatacaacgttgacgttgtgaatgccgcctcaacgtaaacgcctagtaatttataagatctcttatccgcccccccccccctttttatatggtatccaagcagctaaacatcatcatctcttcatttgagtcaggatatatatatgtatacatacatgtgtatttgttctcagctaggccttgaatatacatgcagatagcaaaaaaaaaaaaaaaaaaggccccta

SEQ ID NO: 124709 - DNA, 774 bp, Zea mays
  Clone ID: MRT4577_45211C.1
ggccgggccgggaataatatagtgatgtgatgattccatgaatctcagaaaaggtaggggtcaaggaccttatggcactgcaatcgtgcctgccaattggggcaggacgcgcccccggccgccgctttttttttttaacgttaaccgaccattgacactcatttcatgtttgcttgtaataagataaagagtgctgtcgatagaacatacatacgggacaacatcccactgaaagttccacccatagcaatgagcaatgaaagtaacacaagaaatcttaccatctcatctattatttcctatgctatgattcctaatgatttatctgtttttgttggattactacggaactgtacatctcaaacttaaaggaggaacgatgttagccataaacttgagagtcttgaccaatttgaaagatcgtttggtgtagttgaaataacggattggaacttgtttggtcgagtaacggaaactcaatcaaactcataattgtctcacttccaaaatagcatataatggatgtcatgtaccagctatctctgaaaaggtagaagggccctttagggacagcaagagttgcttagtgctcaatagtgcttgcaaagaacgttcaagatagctgactgactgagctacttccgtaataggggtcctttcttcttcaaatcgcgacctaccctgttggaacttgctctcagcagcaaggaggccaacaagggtgaacggtggtgacaacagggttacgtgctcgggggcaaacccacgcgtccg

SEQ ID NO: 124710 - DNA, 603 bp, Zea mays
  Clone ID: MRT4577_45212C.1
cagagccccctctgcagctggcctcccttcctgggaccctgctccttctcacctcgctttcctttcctccctgcctggctcccaccagggccctggaacagtggtaggcaaggaaggtttgtcacagcagccagaggggtgtaacaggagtgcagagggacaggggcacctctgtcctctgcccacctctgtcaagaccaggggagcagcgggaggaggaactgtggagcagcgaggtgcctgtccagcaccccccttctggaggggtccacaagggaaggggctctgggggcacaaagatgcaggacagattgcacatcctggaggacctgaatatgctctacattcggcagatggcactcagcctggaggacacagagttgcagagaaagctagaccatgagatccggatgagggaaggggcctgcaagctgctggcggcctgctcccagcgagaacaggccctagaggccaccaagagcctgctggtgtgcaatagccgcatccttagctacatgggcgagctgcagcggcggaaagaggcacaggtgctggagaagacaggccggcggccttctgacagtgggccgcctgctgaacgct

SEQ ID NO: 124711 - DNA, 424 bp, Zea mays
  Clone ID: MRT4577_45213C.1
agggccgaaagaacactatcattatcgctgaacaatgttatttaacaaaagtttcaaccacaaataaaaacaacaacccaactttccaatcatagtcacgtccagcaaaatacattcaaaagctatctaaaatctggggaacccacattggcattaaaaaccatgaccatacaattttttagagaaatattatgggcaccatgccttttcaacaatcccctaaacgttgcttaggcatcagcaaacccaagctcggaaagcttttggtgagcctcagcgtaatcagcaaagaaggcatcttcgtccgctgcatatttatcaacgagagggcggaatacagggtcagacaaaagagccttgtcagaaggtagctgaaggagacctttcttcttaccactcaacaactccgtgaagtatgagttgt

SEQ ID NO: 124712 - DNA, 426 bp, Zea mays
  Clone ID: MRT4577_45214C.1
acctcccaaaaaaaccggggcccggagctttttttattggttcaaagcctttccacctaagccgcaaaacccgaaacaggccccataagccccccttttttggggggggcaacacaaaccataagcgcggggccgatcaagaaagaacccccccccgtggaagcccttttaaagcctgattaagcacaccagaccccccaaagcttttttctgaaaaaaagccgccttaggcagaagggttctcccacctgagggggttcacccccccccacgcgaagacaggggggtcccttccaaaatggccgtaggccgccctcttgaggtagcgcccctcgccccctttctttatgtcaagggtgatgatgatcattccagccctgaaatcaaagttctccttgacaatcttgaggatctccttgtcgggga

SEQ ID NO: 124713 - DNA, 409 bp, Zea mays
  Clone ID: MRT4577_45215C.1
aaccggggaacaaaaagggggggggggggggaaaaaaaaaggggggggggtatataaaaaaaaaaacggggggagtagaaggggggggccccaaaaaaaaaaagggggcttgggaacagagtttgtttttcaagggaaggagggggaaaaaatgggacaggggggaaaaaaaataagtatgcgacggtaaaaaaaacacgatccggagggaccattggaggggccccccctacttaccaccggggggggggaaagaggtttatgaactaggggggggggaccaacttcgggggacacaaataacccccaccattttccctcttttaaaacacaccaaaaccccgggggatgaaaacaggaaaaggggggtgaaagttttaaagtggttggagaggacgggaaaaccttg

SEQ ID NO: 124714 - DNA, 174 bp, Zea mays
  Clone ID: MRT4577_45216C.1
acttgtgaccctccctcagccgcgtcgctacgcatcctacgctccaacgctcactctgctcgcgccatgggaagaactacccgaccgtgagcgccgagtacaggcagtgtggcgacggccaggcgcaagtccgagccctcatcgccgagaagagctgcgccccgactctgctcc

SEQ ID NO: 124715 - DNA, 135 bp, Zea mays
  Clone ID: MRT4577_45217C.1
ggccgcccttttttttttttgtcataggcactgagatggtcatccaatgatatcatatgactttgactgtcaacaagtttgtgtgtggacacctataaacatcacactactgataagattattctttggttccat

SEQ ID NO: 124716 - DNA, 429 bp, Zea mays
  Clone ID: MRT4577_45218C.1
tcccggggggggccacccttccgtgctcatcatcattatctgcttgacttcctggacactgagctgatccacatgcggtggggtgttggcaacagccaggatcagctttaggaggtagtgacgcctacgtctaggagcggttggaggaggggagactgggacactactgtgaccggggggaccccgcgcgggtcatccggtgcaggggagtgctcttactccgacgtctgtttggcgcgcggcggatcagctggccaatgtggccatcatgcgcaaggctatgaaccgggtcagcgaccttgatggtttctagaacacgcgcttcttaagctcttgacttttagaacgcgctcttctggaactttgcgtcatcgacctttggtttttctgttattgaatctttttctatttttggctttttctttattt

SEQ ID NO: 124717 - DNA, 332 bp, Zea mays
  Clone ID: MRT4577_45219C.1
acgccagcgtagagacgtcgcttctacagacatttacatctccaatctcctcaccgacttgaagggtacgactgacagctttctacgctccgtctaagatcatcgtcgatcaccactccatcactcaccgacatctaccatgcgaacatcacttacctggaagagctacttctcccgatcctcatgacacacaacagttgacatgtacttgaatggccataaccactcgccttcacctcgtcagcagcagacacagtactcttcagctaccaaccagcgacggcaattccaatgcatcagctcgcaagttcaaacccaccactcacaaaatc

SEQ ID NO: 124718 - DNA, 416 bp, Zea mays
  Clone ID: MRT4577_4521C.1
agctgctggtagtactggatagtacacctccagggggggcttcttaagcatttgttggaacgggcccttaagcaggggcccaacatgagacatgtacaaaggggcatgaatagggcttactcaaaatggctcgggccctgatatcaaggactcaaacagagatggcacttgagccacaaaggaacaaacacggccacgggggccacctccgacctcttgaactctattggtaggacataaactgctgggatccttgcagcctaaggatacccatggcaacaggtctggaaccattagcggcgctatggcttgcagaaagcctgccttggagaccatgttggccagcaatctgcactgctgcagcctggcttaaggcaagctgtctttgaaagcaagaagttcggctgctgtgaaac

SEQ ID NO: 124719 - DNA, 357 bp, Zea mays
  Clone ID: MRT4577_45220C.1
cccacgcgtccgaagacgccaaggtggattccagcgagcccgtcgtggcatcttctggtgccctgcagcatctcatcgccaactacctcaacggcaccctcacaaacctctcggccgccttccaggagtcgagcgagtacatctcagggacgctgggagtcccgcccacatacgtctatagcggcctcgctgcccttgtggcccttcccatcaccatgtcgcgattcggctggtcgctcaaccgtgagcagagcttcggcgccatgcccggcggcgtgccggacatcacaaacgaagactttagctacatccccgcccaggacctagacgatcccagagttgagtatatcgatactc

SEQ ID NO: 124720 - DNA, 262 bp, Zea mays
  Clone ID: MRT4577_45221C.1
aagagtatgacgaaaacgcacgcggacgtatgctcggaattcggctcgtggttggctcctccttctcatacggttcgggttcgggttcgcgaggggggacctttgtaaaggaattagcgggtaaacaaaccgagatggaggcgtctgatgatgagtaccgatgctatctagagtggtcactcctgagccacggactaccactcccttcacaacgacttaagaacctacagcgaggtcctagagtccaagaacaaccttgatc

SEQ ID NO: 124721 - DNA, 502 bp, Zea mays
  Clone ID: MRT4577_45222C.1
aaatataacatatgacaaaaaaaattgtactattgctatcctacatgcgagacaggcgcccagtaaaactgagtgtacctgtaatttccaaaactaacttacaaaatcctttgtttgaaaaagcaaaaccaaacgcaaacggctgaaaaacagacatatgtagctttacacatacaccatatgtttcataggtcctttcaacccaccatctaggaccactacctatatccaaaaaacaaaattcctctaatttcacccaacatcagctgcagaagtatatgcttgatacattgtacgtgctaccgtatgacttgcttgtgcaggcacatctacttctggacacaaagcaagccctggatgcccttgtggcacgatgatccggcacttacaattgaatgatactgtggtccatgctttatgatgtcatttatctttgttcattgagccccttgactatcagtttgttcctgtggaactctgtacacggaaagacctacgctga

SEQ ID NO: 124722 - DNA, 341 bp, Zea mays
  Clone ID: MRT4577_45223C.1
gattaaagcttaatcttcttcctgtttcttatttccttaggagaatgcaatctctaacctgaatacagacgcacccatcgtggatagagcctgtcttgcacaagtttctttgtccccggtgccagtctataaaacaataagagaaactaagtgttaagtcatggtgtgtgtgctgtggaaaagaacaacccacatacacttaaggtaaatatatatttgtttagaagtacatttgtaattgtatcagaaccaaacaactatgcagttctgtttgaatggattccaggacaaaaaggaaaatttaaatttcaggaccaaacagccaacaattttaggacata

SEQ ID NO: 124723 - DNA, 276 bp, Zea mays
  Clone ID: MRT4577_45224C.1
attagcatgtcctaggaaaagaagtgacttatacttgttgcaatgacaagggcaactggtgttaaacatatcatattcatatgcttttgttcatttttcttttacaattccttgcatattaagcaaataattggtttaatattataaggagaaaattaagcaaccattggctttgtacccaggtgtatgtccggttcaaaatgaattttctgatcaagctgacaatacattttgcaatgctttgtcttaattgctgaaacattgtatcggtaacga

SEQ ID NO: 124724 - DNA, 310 bp, Zea mays
  Clone ID: MRT4577_45225C.1
cgtacgcgtgacaaccacgctaggcctggtggttgaagaacaacgtgccagatcttcaacgagggggggctggactacctctgaaacccgaggctcatccaggggcacagtatacttgccatatgagcctaccgggcagggctaatggacgccgtcgacgactggcgcatggacatcatgccgatcggcgaggtcgtcaacgctgtctaccagagcgactgcttcgtcacaatcgtcatagtcgccgaccacaatgccttcgacattctccaggtcaaggagctcaagaacggccgacttgtcatgcttg

SEQ ID NO: 124725 - DNA, 777 bp, Zea mays
  Clone ID: MRT4577_45226C.1
ctgtgcggcgctcaggcggcgggttcgagacatggagcacgcgtccgccttcctcgcgcgcgcgctcaccactccgcttccggcatccgccgccctcccgcggcgccgcccggctcgcgtggccgtcgccgccgcggcgccggagcgcaggccgccgggcgcggtggcgtccaccaccaactacgtcgtgccgctcgacgcggcgccgtccgggatcacgcgcccgctcgtcgagatcctccgcgacctcaacaagcgcgtcccggacgccatcgtgcggccctcctcccggcgcgcctccgcctccgaccccgtcatcccctggtaccatgccaataggatgctcagcttttatgctccaggttcacagggaggctgctggaacagcatcgctgagcgatgaacggttcgacgaccccgtgtctgcggcagaagaggcagcgttctgcaaagcctgcgcgaggttcggtttcggcctttacctgtaccatgaagacgagacaccatagaagaccaacaatttctccacatcgtctatgccggccctgttctgttcagatttgcgcttgaggggctgtgctctactgttgttgatcagtaagtctatcagatacccatcccattgctgctaggtccttgagctgttgtaacgctggtactatgttgtttgctcgttttggtagctttgtcttgcaaaaaaatgttgtcagctacaattggtatggattatggaactattagtatatatgcaatacttttttgttgcttacctctaag

SEQ ID NO: 124726 - DNA, 311 bp, Zea mays
  Clone ID: MRT4577_45227C.1
atataaattgtatcatatattagtcattttctattttatgaagagaacaccgctgaagggagaactaaacatccatttttgattgttggacaagaccgtaaactttctttttcgaatagggtacaaaagcaatatttcactttcctaagttataatggtcaggcttgcggagattgagcatgaagaaaagagaagctcacaaccagatgatctttatccaagagaaacggaggtccatcccagaggttaccagcactatcttgctcttattgaacaatgattacaggttgaattattacgatgacgcgccc

SEQ ID NO: 124727 - DNA, 970 bp, Zea mays
  Clone ID: MRT4577_45228C.1
aaaaaaaaaaaaaaaaaaaaaaaagcaagaacacgtctgcctctcaccaaccgcggcttgccaaccttctaattagcctttgacccacccccccgccgcccgccgccgcagaccatggaacacgcgtccgccttcctcgcgcgcgcgctcaccactccgctcccggcacccgccgccctcccgcgccgccgcccggctcgcgtggccgtcgccgccgcggcgccggagcgcaggccgccgggcgcggtggcgtccaccaccaactacgtcgtgccgctcgacgcggcgccgtccgggatcacgcgcccgctcgtcgagatcctccgcgacctcaacaagcgcgtcccggacgccatcgtgcggccctcctcccggcgcgcctccgcctccgaccccgtcatcccctggtaccatgccaataggatgctcagcttttatgctccaggttggtgtggggaagttcgtgatgttatttacactgacagtggaaaggtgacggtcatataccgcgtgactgtgcgcggaacagatggagaggttcacagggaggctgctggaacagcatcgctgagcgatgaacggttcgacgaccccgtgtctgcggcagaagaggcagcgttctgcaaagcctgcgcgaggttcggtttcggcctttacctgtaccatgaagacgagacaccatagaagaccaacaatttctccacatcgtctatgccggccctgttctgttcagatttgcgcttgaggggctgtgctctactgttgttgatcagtaagtctatcagatacccatcccattgctgctaggtccttgagctgttgtaacgctggtactatgttgtttgctcgttttggtagctttgtcttgcaaaaaaatgttgtcagctacaattggtatggattatggaactattagtatatatgcaatacttttttgttgcttacctcaaaaaaaaaaaaaaaaaaaaaa

SEQ ID NO: 124728 - DNA, 434 bp, Zea mays
  Clone ID: MRT4577_45229C.1
gccggctctcccccgctccgtctccctcccccctcctaatccgttctgctcgcgacgagatgagattgcgtggatctgctgcgctgctcatttcagtcctatcgggaatggatcccctacccactgaagccctcagcgagagaggccatcttctcaagttgaagactttactgtctcgggccatcttactgggctgagggacagacgaaaagaagcaacaccatgaagggtactgacgacgaggtcaacttgtactcaagagatttgatgcagaggacgtagatgagaagggcggacctgacccactacaagagacttacgtgtgtaaatgtgatgaagaacgataatatgctctgaagaacaggcgaagacctgatacgcggaaaggtgcaaaaggaatgctaataaggaatgatggagtgtgcaataccaaa

SEQ ID NO: 124729 - DNA, 427 bp, Zea mays
  unsure (1)..(427): unsure at all n locations
  Clone ID: MRT4577_4522C.1
tccttaattccgtgtcgtctcggcgcgtccnctcctcaaggtacctcatccacaactgtcatgacaagtgaaagatcagatgcctctcaatctagggtaacatctgtgttggggtagcgctttaactgcattatattgtgttcgtgtatccaatgccagttccaatccttacatctgcagatgtccgtatattcatggggccacatggatatactggaggtgagtatatttcttgacggcatgatttgcattttctcatatgtcggagtaggaccctctatagattcttgcttcagtgaatcaatggttgttttcataaggatcctgttggatgcattttccaggcccgtctcaagaggttatctcataatcttattctttttaaatgggattttttattacatttgctttacctttgttatgatat

SEQ ID NO: 124730 - DNA, 244 bp, Zea mays
  Clone ID: MRT4577_45230C.1
cccacacgttcggctaaaggctataggtttcttcaaaggtccaatacaaattcctggactatagactgaagtatggcaggagatcttccaagatctctccagttcaaaggatgggattacgggagcttagaccacagctgcctaagccattccagagtacacaaaggcttacactgatcctataaaatatggcatattctatcccaccacattcaccaaaccttgtatgaaaaggctccacttt

SEQ ID NO: 124731 - DNA, 326 bp, Zea mays
  Clone ID: MRT4577_45231C.1
ttcttgaccattgtaagggcattcttgcccggggggactgtaacattgtttggcaactttacactgcagagatggaggaacgatcacttgcataacaggacctttgttatcgcatacacccgactattccaggcaactatctgatcttttggtctggatgcacctacagaaattcaccgaacctcaggtggtggctgcaacaacagcacatacacatcttaacaagtacctaggagaatgtatgacctgcagtaattgcagatgagtgactataagcagaccctcgatacatactgatggcatactgtaagctacacctgctgatg

SEQ ID NO: 124732 - DNA, 134 bp, Zea mays
  Clone ID: MRT4577_45232C.1
ggcacttcttctataggggaggatccgacaatgctgcatcagatggcggtgacgggggccgatcagatcattgtgatggccatcagggcagactcgccgtgggaggtcctccccaagcgcatccaatcagcgct

SEQ ID NO: 124733 - DNA, 658 bp, Zea mays
  Clone ID: MRT4577_45233C.1
cccggtcgaccacctccgatgaactcctcaggctgttgaagaagcatgttttgctgatgtgctagatgaggattccttcaatatgccagacatgatcttgaagttaaaaactagcactagatcctcaagcctgccattagattcatctactgatagcgagagaaggaaattatctcctgtgtattgttctcatagcataggagatgattcacaacaatcacatggcgaggcacaagtggatatgttttggcagcagaacgtgccattgtcccccaatggatcaacatttccttcatctccttcaaccaattcagataattatcctgtttcttggttttgtttctctcctaagacgcatggaaccggcacatacattcccaatgtgagttatcaaacatacagggagcgtatcatgcttgaaagagataccatacgagcaagaaaacaaagacagaggttacctggtcgccggtattactcagccgagcaaggattttccggttcacaaaccgaagaagacaccatagctcaaagtgcaacgaaccaatcgcccaagaagcaaaacagtgtgcagcagagtggctattcaggcaagagcacagttccggatgcagatttcgtttgtttcagggagcatgtggcaacagaaggtggaacc

SEQ ID NO: 124734 - DNA, 327 bp, Zea mays
  Clone ID: MRT4577_45234C.1
gaccgaaaatcaattttactgcaaatgtttctttttaatgagttagaagagctgaacacggaagcttttaacaggcaactgtgctttgaaacattgtgggaaatcaaagcatgcttgtgtggaaaacctggaagacaacggtcgtcacctgtctcctgatgaacatcaaaatgttagtccaaaacaaactacttgtaagaaattggaagtgtccccttcaatctccacaccaatttcttgggttaaaaaatgtgcttcagtgatattcaaacccttttcaaagaagaatgcttaatccaacaattacataccttcaaaattgggaaa

SEQ ID NO: 124735 - DNA, 497 bp, Zea mays
  unsure (1)..(497): unsure at all n locations
  Clone ID: MRT4577_45235C.1
ggctcctccgtcacagaatctctccgtccgatccaagggtttccgtgttccgtcgtctccgccgccgaaaccatgccgtcccacaagaccttccggatcaagaagaagctggccaagaagatgcgccagaaccgccccatcccctactggatccgcatgcgcaccgacaataccatcaggtacaacgccaagcgcaggcactggcgacgcacgaagctcggcttctgagcggtggaagagatgatggccaacgatgcttgtggaggatagagctctgcaaaagctaggaagctcttgtttaagattttgttgtgttaaagggagctgactgagaatattgttctctctgatggttaaagaactgccttttatgttatgctgaatttatcgtgcctgcattgccttaatcagttgatctcgagctgattgttttgccttaatcagtctgatcgtaaaaaaaaaagaaaaaaaaaaaaaannaagcgggcccttgagct

SEQ ID NO: 124736 - DNA, 176 bp, Zea mays
  Clone ID: MRT4577_45236C.1
gagttagaacccaaatttccgctttcgcgttatgaaatgggaaatggtttctttattttctaccatatatcctggactttcacagtagaaaactaccctggctgggtttggtgtccacattttcaatgtttaagtctcagtccaaatgctttaacgattgccatcactaacagact

SEQ ID NO: 124737 - DNA, 1025 bp, Zea mays
  unsure (1)..(1025): unsure at all n locations
  Clone ID: MRT4577_45237C.1
agcttcggcctcgctcgaggctggccgggatcgtgcgtgtgtgcgcttggacggaaacggcctctcatcctccgacgacccagactcgatccactcaccaccaccggcttattcgtttatacggaaacagattccgcttctgtgcctgcttcagccatggccatgctgcccgtcgtcgtccgcatggccgccatgcccttcatcttccttgtgctcctcgcgcacaccgcctcggcacagcccgacgccggctgcaacgggatcctcctcacctacacgctgcagcgccgggacaagatcaggcctcacgtggcggcgcccaactcccagccctactccttcagcgccagcgccaccgtcgtcaacgccggcacccgcccgctacgctcctgggcgctgctgctcaccttcgtgcacggcgagatcctcgtctccgtcgacggggccgtgctcacctcgggcgccgccctgccctacaacaccacggcgggggacgccgccggcaggcccacgcccacgtccttcaccgggtacccgcagacggacctcctcaccccgatcgccacggccggggaccccgccaagacacaggccacggtcagcctcgtaggcacgctcttcgccgggccggagccctacgtcccgctcccctcgtttctctcgctcgccgacccttcctacacctgcccgccggccaccaacgccacgtcgtcgccgacgaacctcaccacctgctgcgtgttcacggcgggtggggaccccaccggcggcctgggtggagagtggcttcctcccgcgccgcaccggcgacctggtcatcacctacgacgtgctccagtcgtacgacaccacctacctagcgctcgtcacgctggagaacgacgcgctgctcggccgcctcgacgcctggcagctgngccgtggaaggtgggaagcacggnggagtcatcagctccatgcgaggcgctaccccggcgggaggtggacacggccgaatgcctctacggtccccagggccagtacta

SEQ ID NO: 124738 - DNA, 385 bp, Zea mays
  Clone ID: MRT4577_45238C.1
ttggggtacccttcaaggccgggcggggacctgggtttccccctccggccagaccaatcaacaaaagtgacgcgagcacgatcatctctctgttttcccctccttccccagtcgagtgcctcacgccagctgccatgctctctatgggcggaaccggctcaccgatgagcaagacgccgtggctcaagtaggtcttcagcctcttcgaaaaggatggcggacggctgctgccactcaccaagcgagcttcgtaactgcgtatgcgccttcctgggcctagaccccactgaacctagcagctgctgctatgatcaacgaggttgatgcggctgcaatgtgaccatagcttcctaagttcctgatctgatggtagacaggaggcacc

SEQ ID NO: 124739 - DNA, 168 bp, Zea mays
  Clone ID: MRT4577_45239C.1
cccacgcgtccggttagttgtgctgttagagcttagagacagcaggggctaagctagactataccgctgagaaaatcattccttgtgtcctcattgacggacgatggtgaagtgtgcaagttactataatagacggcctgagagctatgcgcatgaacaacatgccct

SEQ ID NO: 124740 - DNA, 1461 bp, Zea mays
  unsure (1)..(1461): unsure at all n locations
  Clone ID: MRT4577_4523C.1
tccgattttaaaataattggntagtttttaattcgcgaacggccgcgccccttttttttttttttggtttttttttttttttttttttttttttttttttttttttttttttttttttttttttttttttttttttttttttttttttttttttttttgggaagatggagcaatctaattacagagaaaaccctcaagtccacatattgatctgagaatgaagatgtcccagggcctcacagttctaaattctttttttttctttcaattttcatcaagcacatcatactctgcacttctccctctgcgacatacaacgccagagaagaacagcaaaacacaatcgcaaggaggggggaaaaagaacttgactttgaacgcggcatagcagtttcccaagaacctaggggctccatgcattggagaacaggtctacgcgtacacagaatgcaatgcaatataatggtccgactcattattcaccggtcaaggggctccgtctggtccatgatgacctggccctcggacacctccgcgagtgaccggaggttgcacttgagcagcgcctccacgaagtagcaggtctcgtccttggtgttgccgtcggggacgtcgacgacgaaggactcgatgacgagcgtccctggccggccgtcgatgacctccgggtggacggtgaggatggaggagtagttctgcagcctgtgatcgcctccaacgaacctgacgctgagaatgcgctcgtcgtcgtctaacagctcgagcctctccgtgcttcttgtggccggcagcccggacttgacgttgacctccctgacgctaccgatctcgatgttccccttcatctcacaccggctcacgaagggcttgaagagctgtggctggtcgaaccgcctcaccagggaccagacaaggtggacaggcgccttgatgtgcttggcgacggcggaggagcactggtggtcgcggggctcgtgccggtggaaccgccgcacgtagtccgtctccatggcgcgcaggtcgcaccgctcgtccgccaagcgccaccgccgcggcggcgccggcgccggcgtctgcgctcctcctcctcctcctgctgctactcccacgcctccgtccatctccaccaccatcaccgccgccgccgcaaagccagacacagccaccacgctcgcagcctcgcacaggcacagcccggtaatggaggcggcaggggcttgtgttccgcaccgaggaaaagcagacgacgaggtgcggagcgaggaggtggggttttgcctttgcctttgccttgctttgcttgttttgtttatgccgcggcgagaccgcgagggcgatggcgagggcgagagggagagagtgacgacgacgacccctgactcgtgccagttcaagaaagcctgtggattccccttgtccgtaccagttctgagtcggttcccggcccggccggcctcgagg

SEQ ID NO: 124741 - DNA, 157 bp, Zea mays
  unsure (1)..(157): unsure at all n locations
  Clone ID: MRT4577_45240C.1
gnnctatcatttactcctgccgatagtgtatgatgcagagcttgagcgggggtaggggctttttgcgacgcctttgctgcccctactaacatcttcgtgcatgaatcaagttccactcatgttccttgcatattcaaaagcaagaaggaatactgaa

SEQ ID NO: 124742 - DNA, 479 bp, Zea mays
  unsure (1)..(479): unsure at all n locations
  Clone ID: MRT4577_45241C.1
ccgggncgacccagcgnncgcggacttttgggcggnaanagacgacccggggacgaagcgagggcaccanggnccnggaggggggcncgncancgnacncngnngnnaacnccacaaggacagncgangnnagnnnganncacagcncagccgggcccacnngncnnnnnaaannnnnangaannagcgnngagaggggggggcngccaaacaaaaaaaaaaaaaaaaaaaaaaaaaaaaaaaaaaaaaaaaaaaaaaaaaaaaaaaaaaaaaaaaaaggggcggccccccaagaggacccaagcnaacgnacgcgggcaggcgacgnaaaagcncnccaaaagggccaccaaaanccaanccacgggccgncgnnnaacaacgncgggacggggaaaacccgggcgnnacccaaccaaanggccnggcagcacaacccccnnncgccagcgggcgaaaaagcgaaagggcccgcaccg

SEQ ID NO: 124743 - DNA, 262 bp, Zea mays
  Clone ID: MRT4577_45242C.1
catcagacatacctttgactgatggtattatttgaagttttataatccaagattttgaactgcatgcaaccaatgtgtgtctgccacctcacctgtgggaaacagtggtggcgtggccaaatcagcttgatatgcaaccaaacagcagccaagtcctgctgctggccaaacatttgacttggctcacattggcccataaccaaacatgcccaaatttccatagaacaaatcagcagaaatacaatttatattccagaacatg

SEQ ID NO: 124744 - DNA, 512 bp, Zea mays
  Clone ID: MRT4577_45243C.1
gggtaccctgggccgccggggcatgcacttcatcccactacattcatagcatgcgatgtgatgagtggcttcgttcattactacatgatgaagagtgccgagtgctctgcgccatgcgtctagtatgtgacagctgccagagactatgacccgcatgatgcactggccctgtaaggttgtgaacaggtaggacagggccattcgtcggcgtgacgacgacgaattgcttgcggccctgactacactcagtgcattcacgagatgcgcaagtacgactgaagcgctactttggtcatagccatgctaaccttacatacagtatggccgccgatccggcagccattgacgactaacttgaggcgttaccgctcagagagcaggtgcctggaggaggcttctgcatcaccagtcctgcggcatgttcggagaccatattgctagggttacagcatttcgggcggatgctggataccaccagtaattatacctagcgcgttggatcctgagatgga

SEQ ID NO: 124745 - DNA, 207 bp, Zea mays
  Clone ID: MRT4577_45244C.1
ggccgcccacgcgtccggggacgagagatcggacgcgtgataagacacatggtcggtcgccgaggtacctatcatggggatgaagaagctggcctcaatctcaatgttaacagctacattaatcgacttgttttaaagtatccggacgggactagtttacccagccaggggctttggaagcatcctcacaagtgaggctagatgcac

SEQ ID NO: 124746 - DNA, 498 bp, Zea mays
  Clone ID: MRT4577_45245C.1
ttttcttattttctttttggtttttttttttttttttttttttttttttttgggatatccttataaaatttttggggggcggaaccccaaaaaaaccttaaggggggttattcaacccccccccgaaggcccgccctttaagttgaaaccgggtgggggcctttataaaaagaacgggggggagttctttttttttgcacccaaatggggggaaaaaaccggtggaccctatatcttaaaacaaagggggggaatttaatttttcccctcccccccaattaatcaaaatggcggggcccttttacttaggggggaagggcaaaaaaaaaaccaaggggggaaaggcccccccccctggggtttctgtggggacccccggggtttcaacttttgggggggaagggccccccaaaaggctttccaagaaagcgcccttttcctcaaattttttgggggcccccggggactggacacaggggaggggtttcccgggggggg

SEQ ID NO: 124747 - DNA, 376 bp, Zea mays
  Clone ID: MRT4577_45246C.1
atcctggatgagttgtcgcggcgtttctctgaacatgactccaagtgggatcgcagagtggccgagcaggagtcgcgttggaacgcgaccttctcggagttcaccactggacaagaccgctgcgtgggggctctagaacaagccactggtgtgctggaagattggcggatgaacatggaagggatgatggatgacctgcgactcgaggtgggcaagatctccaaaaattgggagcgtgctgtagtggacaattcgtccgctatggcgggcatcctcgctccttctccaccggctgtcgagcaacaacctgccggagttccagccaacaggccccatgggcaccgcgtcgaatcgagccaccgggaggatggttttg

SEQ ID NO: 124748 - DNA, 369 bp, Zea mays
  Clone ID: MRT4577_45247C.1
attgtgtgtattaacaaacacaccaagcgtatcgcactagcaacaacctaacgacagtggctaccgcgatattatggctacttgcgctccttgcgctttttgcgagcgcaacaaatgcgtccattattccacaatgcgtgacttgcttctagttccattattccacaggtcctcccaccagttacgttaatggccttagaacacacacctgtgcaagcctatccgctacaacaagcgattgcggcgagcgttttacaacaaccaattgcccaattgcaacaacaatccttggcacatgtaacaatacaaaccatcggaacgcaacagtaacaacaggtcctaccagcactgaaccacctaatcatggag

SEQ ID NO: 124749 - DNA, 280 bp, Zea mays
  Clone ID: MRT4577_45248C.1
cccacgcgtccgtcatgcttttatggatctgttttgttcatttgtcagagtgaatcttttctctgacaagatgccaagaaagatgatcctccaggtttacaacatcttgcacgtaatgctaaagggtggtcgtgattgtgagttttatcaccgactggttcagtttgtggactcttatgatccacctatcaaggggttgcatgaagatcttaattttgtgagcccaagaattggagaggtcctggaagctgttggcccaattatatttctttcaactgat

SEQ ID NO: 124750 - DNA, 224 bp, Zea mays
  Clone ID: MRT4577_45249C.1
gttagttagcatagttttggcttgtctcgtgtacactacacagtcggaaagagaaaccatggatcattttgtactatttgggattttttttaaatgttatttgagaaatattgtacgcttatattgtaaaattagaagaaggaaaaaaaaagaaaacagctacgaagtgtatattgtgtggctgctagttctatttccagtatccaacagtgtttagtttgtat

SEQ ID NO: 124751 - DNA, 859 bp, Zea mays
  Clone ID: MRT4577_4524C.1
tttgggaggggggcaatctagagcgaatttaattacagagaaaccctcaagtccacacattgaccatgggaatgaaaatgttcagggcctcacagttctttttttcctttcatttttcaatactacaatagcacatcatattctgcctgtccttctccttgtgcgacgtacaacgccggaaaaaaggacagcaaacacaatcgcaaggaggaaacttaactttgaacgacgcggcatagcagtagcagtagcagtccctcaaagctcttttctccaggaacctaggggctccattgaagaatagctctgcacatcgtaagcaatgcaatgcagtgatccgaacatatcgttcgacatgtatgtatgtatgtatctcccccatcaccggtcaaggggctccgtttgatccttgacgacctgtcgctcggacacctccgcgagcgacttgaggttgcacttgagcagggcctccacgaagtagcaggtctcgtccttggtgttgccgtcggggacgtccaccacgaaggactcgatcacgagcgtccccggtcggccgtcgatgacctcggggtggacggtgaggatggaggagtagttctgcagcctgtgatcacctccaacgaacctgacgctgagaatgcgctcattgtcatctaacagctccagcctctccgtgcttcttgtggctggcagcccggacttgacgttgacctccctgacgctaccgatctcgatgttccccttcatctcacaccggctcacgaagggcttgaagagctgtggctggtcgaaccgcctcaccagggaccagacaaggtggtcgcggggctcgtgccggtggaaccgccgcacgtagtcc

SEQ ID NO: 124752 - DNA, 308 bp, Zea mays
  unsure (1)..(308): unsure at all n locations
  Clone ID: MRT4577_45250C.1
agagaagtaataattcggatttaattttaccttttaatgtacataaaaacggctatgttattattctaatggcggccaggcaccctaaaaaacnnttaccacatccaantaaggcaccatgctcgcaaattacccaatccttacactggtatgtacttacaataaataacaataccgctcgcattagtgtctggtaattggaatgaatacaatctaaatcccttaaccaggatccattatattgcaattcttgttccagcaaccgccgtaattccaactccaataacgtatatttaagtttttgcaat

SEQ ID NO: 124753 - DNA, 631 bp, Zea mays
  unsure (1)..(631): unsure at all n locations
  Clone ID: MRT4577_45251C.1
ggccggaaattgcaatcgcgacgataataaaacctgtagttacaaaaaaaggagaggatttaaaacaaaagaagcagcccgtccagagtctagaagacggagtccatagcatagacactctccctccctgtctctctccggcgaactcgctagttgcttgctactggccctggtgcccgacggatacaacgcggcagctccatgaccatcgaccccacccacctctgctgtgtctgtgcatgcatggacatgctcactgtgctcggaacaggtggtaggggaagaagccgttcttgtcggtcagcggctccaccagcttggcgatccccgtcatcagcctccacacctcctccttgaactccttctcccccatcttccacgctggaatctcggcgccgccgctcggacgaggcgggaactgctgcggcgggctgtcgccggaccgaggcgggtaccccacctgctgttgtccaccggggaagccgctggggcgaggcgggaactgctgcggcgggctgtcgccggaccgaggcgggtaccccacctgctgctgtccaccggngaagccgctggggcgaggcgggttcggccgcataggctgctgcaacagcgggcgcgggggtggctggga

SEQ ID NO: 124754 - DNA, 286 bp, Zea mays
  Clone ID: MRT4577_45252C.1
cttagagccaccaacccgggatgcaatcccctacgcgggaaatgcaggctatgggcgtcaccagtcagcagatctcacttaacgacatgcgaacgacagtaggtgtggtgcacgacgacttcctggaccatatgctcaaaggcctgccgtcgtctgcatggacggagctgtaaggacgaagatggagggaacgcgccggatgacggtgagcaacggagcacatacagcaccaggcgcaacagttgtgagggggtggcgtgatgaactacgattccgccttgctggc

SEQ ID NO: 124755 - DNA, 321 bp, Zea mays
  Clone ID: MRT4577_45253C.1
cctcgagtctggccggggtgaacgtaaacagtgtctcttttccagtttcagacctgaagaaactccgaccggccggtgggcggtggcggcaggcgtgataatctgtgccgcgatggccacgtcgaacacggccgcggttggaggacggctgcggcgacctggggtgcaccaccaagaagtggaactttatctaccctgtctacctcaactccaagaagacggtcgccgggggccgccgcatctacgcggccaaggcctggccggaccccacctgtatcgacatcgctgactgctgttcggacctcacgaccccccacgccg

SEQ ID NO: 124756 - DNA, 589 bp, Zea mays
  unsure (1)..(589): unsure at all n locations
  Clone ID: MRT4577_45254C.1
cagcattcagcaagcagcggtcgctttctcactgaagaaatattagaaacgacagccatccatgaaccgccnacgaaaacactacacgctgcatgctggtccctcccaaaacgcgccaatggaaatgtgatacgtgccgggccagtctgtgtacgcattccgtgtggcagccccagaaccaaattgtttgtactctgttctcgagacgaggtgcaaatccacgcgtcggcattgctctctctgtgtcgttatcacgtgaaggcaattaggcaaaactcctccaggcggcgagagagaacagcacagatctgttgggctgtttttcctcttccagagcggaacgctgtcacttgcagtacccagcagcaacaacaataaaagtgtacagtagaccggtaaagtgacgttatacgaatacacgaccagagggtcaacgccgtaagcttaaataggagaaaagctcacgtgtacaggcagcgcggctccatcacggcacacttcgagaaaatgcatgcacaattgccgtaaccaatttccatgcgctgctgctcgcattatgaacgcagatccatacactatactccaaaca

SEQ ID NO: 124757 - DNA, 390 bp, Zea mays
  Clone ID: MRT4577_45255C.1
aaaaaaaaaaaaaaaaaaaaaaaaaaaaaaaaaaaaaaaaaaaaaaaaaaggaaaaaagaaaaaaaaaaaaaaaaaaaaaaaaaaaaaaaaataaaaaaaaaaaaaaaaaaaaaaaaacttaaaaaaaaaaaaaaaaaaaaaaaatcttgattttccagtcttaatttaaataaattacaataagcaataacataaaataacataaaaaaaatggatattttaacaaatacacattttgaacgaacaacatttaaaaaactaaaattatataaaaacctacatatgataattcacaattcatgtttttaaacatatatcacacattgtttacattaaaaaatacactattgcctactttttaaacattcacacaaaacatttatatttta

SEQ ID NO: 124758 - DNA, 449 bp, Zea mays
  unsure (1)..(449): unsure at all n locations
  Clone ID: MRT4577_45256C.1
tgaattcngcacgaggcgcacgcgcagagcggcggatacacacctagcacctccgcccgcccgcgccggccgcctacggagtgcatggggaacctctcctccctaaaccgagaagcgggcggggtggactatcgcgctcggggacttcctactttataagcgataacatgcacgcgaggcgggggggggcagattaacgccctggggcgatccaacacctcctgggggccattgccaagggggccggcttcccctcgggcttattggggggtccaccggcagccgcttctcgctacctcagcggactcagcggagacgtactctgtgtctgaatcggggaattaacctcaggagggtgtagagtcactgccagcggcattggtgggacacttcctacaggacctggctgggtgggtaggctaccaacatggaatgagcatttcattcta

SEQ ID NO: 124759 - DNA, 248 bp, Zea mays
  Clone ID: MRT4577_45257C.1
ctagcggccatccttctttgttagccgtagccgagtagcgcgcccatctccctgctcacatcaacaaccttggaccgcgcgctccggcgtccgctcgccatggagcttcttccctgcgcgcgcccggccctagctcggccttctccccggagcccggccggagctccctccagctcgtccatggcagtcgcgccctgtcgaggttgctcccatggtcaccaatgctccctttgctcgtctccatggct

SEQ ID NO: 124760 - DNA, 168 bp, Zea mays
  Clone ID: MRT4577_45258C.1
atcgcgagttattctacaggttgattggttgtgtgctaaatattatgacggtcacagttgtgtagagctatacctgcaaaaatttgtcctccgccactccttgtaacttgtcttatgctcagacctagaacgacaaaaaacaaacggggcatcagccgaaaatgacgc

SEQ ID NO: 124761 - DNA, 324 bp, Zea mays
  Clone ID: MRT4577_45259C.1
tttttctattttttgcaagatcaacatagcccgcgctgctccaatgaaccgggtgtggttacacaactcaccgaaactattcctcctcctatcttgcccatacacaaactctcatactaagataaatttacatctattaactcaatcaaccaattaaactctatccttccactgccactacaaattccaacatttagaacatcataacatatcatcctgtaattttcggacatcaattctaacctatctcctacacactcttataatcctactctcagttctactctaaacctacccccatccattagtctctctccactctct

SEQ ID NO: 124762 - DNA, 1717 bp, Zea mays
  Clone ID: MRT4577_4525C.1
aaaccctcaagtccacatattgatctgagaatggtggtcttttttttttttttttttctaaattcttttttttttctttcaattttcatcaagcacatcatactctgcacttctccctccgcgacatacaacgccggagaagaacagaaaaacacaatcgcaaggagggggaaaaagaacttgactttgaacgcggcatagcagttttccaagaacctaggggctccatgcattggagaacaggtctacgcgtacacagaatgcaatgctatattatggtccgactcatcagccactccttctccttgtgcgacgtacaacgcgatgacctggccctagcacacatcctcgcaaggccgaaacttaaccttgaacgacgcggcatagcagtagcagtagcagtccctcaaagctcttttctccaggaacctaggggctccgttgaagattagctctgcacatcgtaagcaatgcaatgcagtgatccgaacatatcgttcgacatgtatgtatgtatctcccccatcaccggtcaaggggctccgtttgatccttgacgacctgtcgctcggacacctccgcgagcgacttgaggttgcacttgagcagggcctccacgaagtagcaggtctcgtccttggtgttgccgtcggggacgtccaccacgaaggactcgatcacgagcgtccccggtcggccgtcgatgacctcggggtggacggtgaggatggacgagtagttctgcagcctgtgatcacctccaacaaatctgacgctgagtatgtgctcattgtcatctaacagttccagcctctccgtgcttcttgtggctggcagcccagactttacattaacctccctgacactgccaatctcaatgttgcccttcatttcacaccggctcacaaagggcttgaaaagctgtggttgatcaaaccgcctcactagagaccagacgaggtggacgggcgccttgatgtgcttggcgacggcggaggagcactggtgttcgcggggctcgtgccggtgaaaccgccgcacgtagtccgtctccatggcgcgcaggtcacaccgctcgtccgccaggcgccaccgccgtggcgccggcgtctgccctcctcctcctcctcctcccacgccaccgtccatctccaccatcaccatgaccggcgccgccacaaggcagacagccaccacgcacgcacagctcagtaatggaggcaaccggtctgggggcttgtgccgcaccgcccgcaccgaggaaaagcaaacgacgaggtgtggtggaggtggggttttgcctttcccggccgggtttggtttgtttgtttatgccgcgacgagagagcgagggagagaggctgatgccgaccccgcccgtgcgggaggagataattacttgatcagataccaattgtaatgattaagctggtgaccaagatcaatcccccactcatgtaaccatcgaagaaataaaggttccaacagacagaaacaggtcgcggtattaagtattaattaagtagtattaagagtgctacataaagacaccctaaccggctaactgtgcattcgatcgatcaagctgtcctattaatgcacagctgattgatggccacaaattatcacaggaaaacggcaggaacggtgtacaagtcaactaaacacgatcgaagaatatgacagctcttctaatcagaggtacacagtaaactac

SEQ ID NO: 124763 - DNA, 290 bp, Zea mays
  Clone ID: MRT4577_45260C.1
tactaatcaaattcttgttgggatatattcctccaattcccctcctcctcccaacaaggcaacaacaatctgttccggccgccaaacgaaacccagaaaaaaaacacactgcaacccaataatccccatccccccacaaacttcttctctcgcgcccgctcgatcgatcgcctgccgtgccgccttgccacacaccatcacgcccccaaaccatggcctgcaaccctgcctcagcgcgcccccgccgccgcgcccgccgttccgccccgcccccctccccctgctgcccc

SEQ ID NO: 124764 - DNA, 426 bp, Zea mays
  unsure (1)..(426): unsure at all n locations
  Clone ID: MRT4577_45261C.1
aaaaaaaaaaaaaaaagcttgtacaagcttttttttttttttttttttttttttttttatttttcttttttagggggcaccttcaaattaaaaaaaagaacaacagcacaagcttgctccccctgagcactaaaaccccccccgggggggggatatacattcacggaaaccaaatccggcggtgttccttcaactccaaacgcgcaaaaaaacaggccaccttcgcccctaccccgctaagggcaacttacaagggacaaaccgccgacccaaagcaagtttttcctgggcccaaaattttgaaaaaacggggggggcattgnaaactttttggttagggattgggcccgttgttgccgcttttcccccttcaacttctccctgggcgagagcttggcccccctccgggggaacttcccccggtcc

SEQ ID NO: 124765 - DNA, 802 bp, Zea mays
  unsure (1)..(802): unsure at all n locations
  Clone ID: MRT4577_45262C.1
ctcagcaactgtacctttatatatcctgtagaaataacatttacgaagaacaggaaggaagccgtgtatctacaaaccatgtctcatttacaggtttttaatcgagtatatacacttgggcaggtgaaagttgtcatctactatagttctccaggggaacgactgttggcatttacaaccaatggccttaatgacaacataatatacgccacgcagccagcagggtgcgctggcttttggaagggcacaaacagaagagctcgcccttgctacaaccagtgactgcttgctcactgctactggaaatgagtgagagaacagaaatgatttaccctgctacgcactctaaaattttacgttatttcatcttcctcttttaggtgcatagaagaagctgaggatgtgtttcgtaagtctgccattctgcgactactggatgctgaactctggaccctgtgtggtacgctggtggaacatgacccattggcattggcagcggcatggctactgttcctggctgctggaacatcatggctgtgcttcccttcgtacgttgttatgatggcatttgggtcttggggatgatctttcaatatgcttcttcacatcgcacccttgatacgtgcatttgtagtaactcctcgggtgggggattcccctttaccactttctgtccatacttgcgccatcgataaccatcatccagaagatcaacctcactatttgtttgcacaattatcctttgagctggagtgggcacatngtcttctgtttgcatttgtagccaggacatccattgcca

SEQ ID NO: 124766 - DNA, 731 bp, Zea mays
  Clone ID: MRT4577_45263C.1
cactccgaagcaagcagcctttcttctactggcttgacgtcggagaaggcagagagatgaatctcgaaggcaagtgctcaagatcgaagcttctgagccagtgcatcaagtaccttggcccaaaagagagagaggactatgaagtcgtgatcgaggacggcaggttcttgcacaagaaaagccggcggatccttgacacttcgtccgggccgcgagacgccaagtggatctttgttcttagtacgtctaagaacctgtacgttggccagaagaaaaaggaacatttcagcactctagcttcctcgctggaggggccacttctgccgctgggcgactggtcgttgagaatggaactttgaaggctatttggcctcacagcgggcactaccgcccgacggaggagaacttccaggagttcaagagcttcctcaaggacaactcggttgacctaaccgacgtcaagatgagcccagaggaggaggacgaggagttctggggcagagggggatcagcggcaggaggccgagacccatcggaagacgcctcccgggtcgcctcgccactcgcgcgaagcttcaacaaccacccagcgccgccgacagcagcagcagcagcagcaagggggtgcgaggcgtccacgccgagggaggcgctccggtcgcctctgcagcacggagcactggcggcggtggcagctgcagctgagtctgagtgacgcacgcagttgcagc

SEQ ID NO: 124767 - DNA, 820 bp, Zea mays
  Clone ID: MRT4577_45264C.1
cattgggtacctcgaggccggccgggaaaattcccagcttgcgcgtgtttctgtggatttcttcccgcttccctgctcctgcctcctatgggcctttgatccggggcttcgtggatcttgggaagaggaggtgcggtgggcgcctcggcggcgatctggcggggaggatatggccagcgggaaggagccgatcgaggtcaggtttcgtctcttcgacggcacggatatcggacctacgaagtacgatccctccaccacggtctcctcgctcaaggagttcatcctcgctcggtggccgcaaggatattggagaataaccggacacttgcagagtcccgtgttccagtaggagaggtcccaggtggtgtaattacaatgcatgtggtagtgcgacctccacaagctgacaaaaacagtgagaagcagcttgccaattcccccaagcagaacagatgtggatgcaccattctctgataaggcgtctgcttggtgctgtacaatctgtgtgtacacataagattttgtatgtgctttgctgtgttcacacaagcgtggattcgttttgatatccaattcttgaagccatacaaattccagaagtaagaacccacggaatacgaagatttctggatcgttttgttctagagtgtaggattggatgcttcctgctgtataaattgtgttgtcaaaactgaaaaaaaagtctttcttttctgctatattgacttaatatcgattctttctagctcggttgcctttgattcgtgtaacagaaatattgtactcatgtatatgtaacttgcaaaaggagtaatgtatg

SEQ ID NO: 124768 - DNA, 795 bp, Zea mays
  Clone ID: MRT4577_45265C.1
agacgcttgacttcagcgctctctccgcccccaaatcgtcggctccaccccacctatcagccggagtccaccgccgccgccgccatgtcttccggtgggatcgcgcgcggccgcctcgccgaggagcgcaaggcctggcggaagaaccacccccacggcttcgtcgccaagccggagacgctgggcgacggcacggtcaacctcatggtctggcactgcaccatccccggcaagcaagggactgattgggaaggtggatacttccctctcacccttcatttcagcgaggattaccccagcaagcctcccaagtgcaagttccctacgaacttcttccacccgaatgtctacccttcggggacagtctgcctttcaatcctcaatgaggacagcggctggagacctgctattactgtgaagcaaatccttgttggaattcaggacttgcttgatcagccaaacccggctgaccctgcccagactgatggttatcaccttttcatccaggatccagctgagtacaagaggcgtgttcgggtgcaggcaaagcagtatcccgcattggtctgagaggaaggattggcaagcttaatgatccatgctctgcacatccgcatagttattggaagtagatctaaaatgaatgcctctgcatatatggagttagaccaagtacaacccggaaaagggtgccttgagaagtattcatcgtctgtcattgtggaccagtctcgacttaagatccgtgttggttgtagtcgggtttcataacggtgatccctgaactaagtgctt

SEQ ID NO: 124769 - DNA, 131 bp, Zea mays
  Clone ID: MRT4577_45266C.1
tcttgttgctgatcctgctgcgcacgggcacgtgcgccgacaactatcggcgttcgtgtacgcggggtgctcgcagggccggtacagcgccttattcgcagttcgcgtcgggggtggactccgtgcttacc

SEQ ID NO: 124770 - DNA, 271 bp, Zea mays
  Clone ID: MRT4577_45267C.1
cctcgaagccggccgggaccttccatccccagtcccaccaccatcttgtctcaccgtccgccatgggcgtcctccaccgcgagcctcgccgatcacctgccaccacctcggcagcgttggtgcccgccctcgccccccgtccctctccatctccctccgccgccgctcgtcctcttcctctaagaccacctccctttcccactccctcacctccaagtactcggtggcagcagccgacagagccagcaagtcctacatccaaagtgtcgcg

SEQ ID NO: 124771 - DNA, 662 bp, Zea mays
  Clone ID: MRT4577_45268C.1
ccggccgggaccgagaggaggaagcctgcccactaccgcgtatctctctcctccctggctctcatccccccactgagtcgtcgccccctcgctttcaccccacgcggaagcaagaattcgtcgtcaaattcccagcttgcgcgtgtttctgtggatttcttcccgcttccctgctcctgcctcctatgggcctttgatccggggcttcgtggatcttgggaagaggaggtgcggtgggcgcctcggcggcgatctggcggggggatatggccagcgggaaggagccgatcgaggtcaggtttcgtctcttcgacggcacggatatcgggcctacgaagtacgatccctccaccacggtctcctcgctcaaggagttcatcctcgctcggtggccgcaaggtgaggcactgatgaggcttgttgatttggtagcgtacacgcctgtgccgtcccgatctgctgacaagctacggacgcttttgtaatttaggtgcaggggtattccccgtgtcacgagtttcttggatcatgtattgctaattgcttcttttgcgctttgtgctcatgtctcacgagtgcgagtctttctcctaactcatgttattttgcttgtggcgaatggctgttcgtggtatccgaaaaaaaaaaaaaacaaagcggcc

SEQ ID NO: 124772 - DNA, 1085 bp, Zea mays
  Clone ID: MRT4577_45269C.1
ttgggaccctcgaggccggccgggaaatgaaaatttgtgcttgggcgtatccgtcaatacacgcaccgagaggaggaagcccactaccccgtctctctctctctctcctccctggctctcgtcttcctctcctcccccaccgagttgccgccccctcgctttcaccccacgcggaagcaagaattcgtcgtcaaattcccaccttgcgcgtgtttctgtggatttccttttttttggccgcttccttgctcctatgggcctttgatccggggcttggatcttgggaaggggaggtgtggtgggccgccgccggcgatctggcggggaggatatggccggcgggaaggagccgatcgaggtcaggttccggctcttcgacggcacggacatcgggcccaccaagtacgatccctccaccacggtctcctcgctcaaggagttcatcctcgctcggtggccgcaagataaggatataactccaaaaactgttaatgacttgaagcttatcaatgctggaaggatattggagaataatcggacacttgcagagtcccgtgttccagtaggagaggtcccaggaggtgtaattacaatgcatgtggtagtgcgacctccacaagctgacaaaaacagtgagaagcagcttgcgaattccgtcaagcagaacagatgcgggtgcaccattctctgataagacgcctgcttgatgttgtacaatctgtgtagtcttaggattttgtatctgctttgctgtgttcacacaagcgtgaattcattttgatatccagtccttgaagccattcgagtccagaaacatacacactaaaaatccatcgaatatgaaggtttctggatggtagatttggatcgtcttgttccagagttgaggattggatgcttcctgctgtataaatggtgttgtcgaaactagaaaaaaaaactcttttatttcttttttcttttctgccatgttgacgttatatatatatcgattctttttagctcggttgctttgtcttgtgtaacagaaatattgtactcagatatatgtaacttgcaaaaggagtaatgtatggtgttatggt

SEQ ID NO: 124773 - DNA, 359 bp, Zea mays
  Clone ID: MRT4577_4526C.1
actcacacataacacaatgcacaaaagaagactaccagtctcagcaccagaattacccggcactactgactacaatacctgccaaacaggcccacatcactactccctctaactaccttcctacgagagtttatagcaacagttcatgctagctaccaccttgccgtgtgcttaaagccacgcgtgggactcacctcaccactcccaggccaccggttccttaacgattctctttggcgctatctgacaccttattcatacttgtatttttttacatgactgacagtgctgccttcagcctaccttggccaccttctcatgccgtcgtttgtccggtgatggggatcaggggtggatcg

SEQ ID NO: 124774 - DNA, 852 bp, Zea mays
  Clone ID: MRT4577_45270C.1
cattgggacctcgaggcggccgggacacgcaccgagaggaggaagcccactaccccgtctctctctctctctcctccctggctctcgtcttcctctcctcccccaccgagttgccgccccctcgctttcaccccacgcggaagcaagaattcgtcgtcaaattcccaccttgcgcgtgtttctgtggatttccttttttttggccgcttccttgctcctatgggcctttgatccggggcttggatcttgggaaggggaggtgtggtgggccgccgccggcgatctggcggggaggatatggccggcgggaaggagccgatcgaggtcaggttccggctcttcgacggcacggacatcgggcccaccaagtacgatccctccaccacggtctcctcgctcaaggagttcatcctcgctcggtggccgcaagcttatcaatgctggaaggatattggagaataatcggacacttgcagagtcccgtgttccagtaggagaggtcccaggaggtgtaattacaatgcatgtggtagtgcgacctccacaagctgacaaaaacagtgagaagcagcttgcgaattccgtcaagcagaacagatgcgggtgcaccattctctgataagacgcctgcttgatgttgtacaatctgtgtagtcttaggattttgtatctgctttgctgtgttcacacaagcgtgaattcattttgatatccagtccttgaagccattcgagtccagaaacatacacactaaaaatccatcgaatatgaaggtttctggatggtagatttggatcgtcttggtccagagttgaggattggatgcttcctgctgtataaatggtgttgtcg

SEQ ID NO: 124775 - DNA, 1319 bp, Zea mays
  Clone ID: MRT4577_45271C.1
cggcgcccctcgcctccacgctccctcccctcccgtcccccgctgccacatccgcagtaaaaattgtcggcttaggcccatgcctggatacaccgagagggggctgcctgccgactaccgcgtatctctctcctccctggctctcatcccccccaccgagtcgtcgccccctcgctttcaccccacgcggaagcaagaattcgtcgtcaaattcccagcttgcgcgtgtttctgtggatttcttcccgcttccctgctcctgcctcctatgggcctttgatccggggcttcgtggatcttgggaagaggaggtgcggtgggcgcctcggcggcgatctggcggggaggatatggccagcgggaaggagccgatcgaggtcaggtttcgtctcttcgacggcacggatatcgggcctacgaagtacgatccctccaccacggtctcctcgctcaaggagttcatcctcgctcggtggccgcaagataaggatatagctccaaaaactgttaatgacttgaagcttatcaatggtggaaggatattggagaataaccggacacttgcagagtcccgtgttccagtaggagagatcccaggtggtgtaattacaatgcatgtggtagtgcggcctccacaagctgacaaaaacagtgagaagcagcttgccaattcccccaagcagaacagatgtggatgcaccattctctgataaggcgtctgcttggtgctgtacaatctgtgtgtacacataagattttgtatgtgctttgctgtgttcacacaagcatggattcgttttgatatccaattcttgaagccatacaaattccagaagtaagaacccacggaatacgaagatttctggatcgttttgttctagagtgtaggattggatgcttcctgctgtataaattgtgttgtcaaaactgaaaaaaaagtctctttcttttctgctatattgacttattatcgattctttctagctcggttgcttttgattcgtgtaacagaaatattgtactcatgtatatgtaacttgcaaaaggagtaatgtatggtgttatggtaaaaagtaaaggggaaacaaagaggtaataaaaaaagcgtataaaaaaggtttaaaattttacactgatgaggcttgttgatttggtagcgtacacgcctgtgccgtcccgatctgctgacaagcgacggacgcttttgtaatttaggtgcaggggtattccccgtgtcacgagtttcttggatcatgtattgctaattgcttcttttgcgctttgtgctcatgtctcacgagtgcgagtctttctcctaa

SEQ ID NO: 124776 - DNA, 706 bp, Zea mays
  Clone ID: MRT4577_45272C.1
tttttttttttttttttagacacaggggttttccttggatccctagtgtgggttgctcttggctcgtgttgagtgttcagtgttgtttataagggttctatacccattttattcttcttagaacaatgatacgcagctctcttgcgtgctcgagaaaaaagtccaaatatattgaattgtgcatattctaaaacaacgttacttctaactactcatggttattaaggtgctgcctaggtgtccgagcggtttttcaaccaaggcatcgggcttgccacagctttcttgtgtgtgtcgtcacctcccgcaccaagtcgtcgacaaggcatcaggcaactccaaacaagcgccacatgtgaaaaaaggtgcggaggcacaggaggaaaagagccacgtgtaggagaaaaagacgacagggaagaaacgcaaggttgcacgcacgcggcaaaagcgggaagtatgcgccccatgcatacaactctgacgagaagctcctccatccattcacgccaattgagaaagggtcagagggggagcgaaagagaggaacaaagggaagagaagaggggaacctagaaccaatagagctgaattcccagcaaccatgtgcggaagtacagccacgcctctctgctggtgagcgaccagcgtggctccgctagtgagtgactgcacaaccctgcaccactccaccagtctacgcgca

SEQ ID NO: 124777 - DNA, 554 bp, Zea mays
  Clone ID: MRT4577_45273C.1
aattcggcacgaggcaaaaccagaaacctagaagacaaaccttttacatctcggcttatcttattattccgaatctgatttttttgaccccataagataaggcggacaccctccgcgcattggacttgcacgtgtgcagacacctggatctcatggacgccatttggacgaaaggggagcacatggacgggcacctggaataggtcgcaacaataaccagcggaggcgccctcatggcggccaatagcggaatgtggtggcgctaaatagtgcaccattaccgatgacgaggggagtgccttccttaccgccgctgccgtagagttgaagttcgtcgcccgcgggacacgtaccatgctcgcacttggtgatagcggcccggtgccactgctgatggccgtccaacagggcgaggtcgcgcccccgtgtgccgaggtcaaccgtcaccatggctgcctcgagcattcaccgacgcatctcttgcactcttcgtcgtgcaagggagccacgagcagcagcttggatgcccacagctggcgacgtctggagccggg

SEQ ID NO: 124778 - DNA, 314 bp, Zea mays
  Clone ID: MRT4577_45274C.1
cggactcgtgttctccaaggctctacgaatagctgcattggatgtgaagtagccgaatggctcctcaccctgcccccaaaaacgtcctccctccaatctctttctctgccccctgtgacctccctttaacgatctcttgtttttactttactccttcttttcattcctcctctccaatatattacactggtattttacaattgccagtcaacttcatgcccagcgtctggagataactcaagttacacctggatcaagagagcttggtaagatactggagggcgggactgtaacaggatccatcactgagatat

SEQ ID NO: 124779 - DNA, 2309 bp, Zea mays
  unsure (1)..(2309): unsure at all n locations
  Clone ID: MRT4577_45275C.1
gcatgggattgacccacacacccgccctccgccccgcaagccaaatacgccgtggcacgcgtcgccatgccgccccagttccccaccgcccgcctcctcctccctagtcacaggctgctcccgctcctctcccctctcccctccgcgtccctgtcccctgctcctcgcaccctccgcctcccgccgccgcagcttcttcaccgagtcgcccgccgccgcccgctgctgcgcggcatggcctccgccgccgcccccgggtcacacgccgccgcggaagcgccccccgtcgacgtggggggagggggcgctggcgccccgcggcggctcgtcctggaggagctaccctgggaccattccttcgtccgcgagctgcctggcgacccgcgatcggacactatcccgcgggaggtcctgcacgcctgttactccagggtgtctccctctgccaaagtggacaaccccaagctggttgcgtggtctgattccgtggccgatctactcgatctggatcacaaagagtttgaaagacctgatttccctcagtttttctcaggagcaactccactagtggggagtttgccctacgcacagtgctatggaggacatcagtttggtgtatgggctggtcagttgggggatggaagagcgatagctcttggagaggttgtcaactctcgaggtgagagatgggagttgcagctcaaaggttgtggaaagactccatacagcagatttgctgatggtcttgctgtcctacgcagcagcatccgtgaattcttatgcagcgaagccatgcacggcctaggcattcctacaactcgtgctctttgtctagttgaaactggaaaatcagttgtccgagatatgttctatgatggcaatgcaaaggaagaacctggtgcaatagtttgtcgtgtagcaccgtcttttttacgttttggttcgtatcagatacacgcttcaaggggcaaagaggacattgagattgttcgtcgtttggcagactacacgatacatcatcactttccacatcttgaaaatatgaaaaagagtgaaggtttgtcattcgagacagctataggagattccccaacaatagatctcacatcaaacaaatatgcagcttgggcagttgaggtggcggagaggactgcttacttgatagctagatggcaaggtgttggcttcacccatggtgtacttaacactgacaacatgagtgtgctgggcctaactattgattatggaccatttggatttctcgatgcatttgatcctagctatactccaaatactactgatcttcctgggaagaggtactgttttgcaaatcaacctgatgttggcttgtggaatattgctcagttcactggaccactgtcctctgctgaacttatcagccaagatgaggcaaattatgtgatggagaggtatgggacaaagttcatggatgagtaccaatctatcatgaccaaaaaactgggcttaactaagtataataagcagctaattagtaagctgcttagcaacatggcagttgacaaggttgactataccaacttcttccgtcttctttcgaatgtcaatgcggatcctggtattccggagaatgagctgcttgtcccactgaaggctgctctcctagatattgggaaagaaaggaaggaagcatggattagttgggtacagacttatattgaagagctggtggagagcggcgttcctgatgaagaaaggaaagccgcgatgaactctgttaatccaaagtatattctccgcaactatctctgccagtctgctatcgacgtagctgagcaaggcgattacgaggaggttcggcgggtgcttagggtaatgcagaatccgtatgacgagcagccgggaatggagaagtatgcacggttgccaccagcctgggcatacagacctggagtgtgcatgctgtcctgctcctcgtgaaccccatgatgcaagacgtggacattacaaaaatgcttgggtgcttatagtcttcctcctgtataggggtccatctttgtgctgtaatgtgtcaagcatcgcatgctattttttttcccggtgatgcaagtgtgtaagaaccatgtcgttgcaggaatagtgaagcagtgggacctgttattgtgactacctaaaaaatcccgtacggagatggaaatttggcggtttactagtctatatagtgaagctctggcacttgcagactggtcaactagaatggttatgcccaaagtaatgggttaatctctattgggcttctgcatcatcgcggttgcctcacttnctgtgcc

SEQ ID NO: 124780 - DNA, 225 bp, Zea mays
  Clone ID: MRT4577_45276C.1
gagtcagtaaaccataggggggttattataattatgacgcgcagtgatacaagcaacaatgcgaccaaaaattcccagagacaccagttcaaaagacccaagaactggacaggggtatgatggggctacaagcacgcaaagattttgggggaaaaaagagaggagcatactacaacgatttaactgaaacctaacgaaggataagcaagggtacgggaactaagc

SEQ ID NO: 124781 - DNA, 224 bp, Zea mays
  Clone ID: MRT4577_45277C.1
aattgccgggtcgagatttttatctagtcggcggccgtccttttttgtggggggttttaaagagatttgcggcttcttccaccaaaggacgacgccacaccttacagcctcccaggtccccggtacttgacccagagaccgtgatggcagtgacgtaggtctgctttccacactgtgatcaccatcgaggatggccatgcgcttcaagatgttgtcaacgccca

SEQ ID NO: 124782 - DNA, 375 bp, Zea mays
  Clone ID: MRT4577_45278C.1
aacacaaatcctttttttataaaaccaaaatgtaggggggaaaaagtacatggggacacccgggggcaaaacactaaccaccacccggccggggatccaaagcaaccaatggattatcattgggtacataaaaaatcgatcggagggccggtaaaattaaataacacccccaagggaaaaaaaaaaaagatgaaactgaaatggggcgagcagcaacgtcgaggcacggggggggggggacaacatcggcgtgaggacaggaggaaaagtcggattttattttttaaagcaggagggggaggcccgggcccgcaaacgccaccaccggggggaaaccgaccgggcgcgcgcttgcacccgaacccacgcgttcgg

SEQ ID NO: 124783 - DNA, 376 bp, Zea mays
  Clone ID: MRT4577_45279C.1
tagaagaggaagagagaacgaggaacaaagactaaaaaaaaaaaaaaaaaaaaaaaaaaaaaaaaattaaaaaaaaaataaaaaaaaaaaatgtttgttttttttcgggggccccccttggggggaattctgcggaggtcctccacactgggggggggtggaccatccttttgggggggccaattggccctttagggggggggataacaataaactggcgggcgttttacaccccccggcggggaaaaaaattggtgtaccccaccttaaaaacgtgtgggaacacccccctttttccagcgggggggttaccaaagagggcggcaccaaaagccctttcccaccagtggccccccctctagggggaaggggggcc

SEQ ID NO: 124784 - DNA, 333 bp, Zea mays
  Clone ID: MRT4577_4527C.1
gggtgtaccacccttccgccaaccctccctccaacgcttctttaaaagcacacattaaccttacactggtgtaattcttgcgttgggttgcttctttttggcacacctcacagaacagatcttggtcttgtatagtcctcccccggatattgtcctctgtaccccgtgcgtgcaagcaacgcaaggcgaccagccagccgcggcgacgaccaatcatcaacaacatcgatcaccttgtccggcggccgttcggtccaccacaagccgccagcgatggaggagcagctgttccccgtggcggtgacacacctgcttcatcacacgcttcggagc

SEQ ID NO: 124785 - DNA, 356 bp, Zea mays
  Clone ID: MRT4577_45280C.1
gacactacttctagagccctgactgatatcgttgcgccgacatcatgtgcgttcccatttgatcacgaggcttctaatgatactgcaaagcccggcctgattgagaaatatgacatatgccatgtacgccgatgcactggacaagatcatactggacctccacaccatataggacgggatgctggactcattctcgctgaaatgctgccttaattgggacatgtacctaaagatgatcacaatttgtctcaactctacaactgctgttcgtgcgtgggcaagggattaaggccctaaatgtctcgcaccggtaactgctattgtgatgtggcccctactacgagctgaaaagagcc

SEQ ID NO: 124786 - DNA, 406 bp, Zea mays
  Clone ID: MRT4577_45281C.1
gcacgaggacaagatggggttggaagttgaggcatatattaggcgacattatgaaggggaaatttctgacatagaaataattgagaaagaggatttagatctagtttttcacttgctctgcatactgaatctaatattctgtttgacatccataatgaaatgatgtcatggcgataagtttggctctgtttaattgtttatgtctaagatttttctacaggaattttgatcttcttaggtttgtgtcgttgtacttgtttatccattgatggccatccttgtgttatagccatagtgatgttcatatatctctagaatttaactgaagttgaatgctttatatgttcagactgaaattttgatattaaacatgtagattatcgttctttaaatatgagtaagggag

SEQ ID NO: 124787 - DNA, 389 bp, Zea mays
  Clone ID: MRT4577_45282C.1
ttttcatttttcacccgccactctaaaagagcgcaggggtaaataacaatgcgtgccgggttatatcctctctataatctcacctaaatttcaatacactctccgaccctttacaactttaccaactaggaaaacccttaccttacccaacttaataacccggacaaacatacctctttcaccatctttcttaatatacaaaaatccctaaccaaacactcttcccaacaatatcacaacctgaattgcaaactgtactccccttttacccgcacattaaacacaatctattgttttattttacactctaattcatactaatacaaatttccaatacacctaacacctctctactataactttttttcataatatctaactccacattt

SEQ ID NO: 124788 - DNA, 248 bp, Zea mays
  Clone ID: MRT4577_45283C.1
aactcatcactgcactggtggtgcgcgtggagctcaagagagtgaagcgatagctaggagaggcgacgatgctcaagtaggcgttctcttccgcgctcctcctcgactttctcctcaataaagtccacgttgcagctataaaggatggaatgaatgccgttgatagcaccgatgatttggctaacgcaccgtatgtagaagagagatttggtgctgtcgctcatggcacgtgtaagagaatctgaggt

SEQ ID NO: 124789 - DNA, 846 bp, Zea mays
  Clone ID: MRT4577_45284C.1
cggccgctcgaggcgatggcgcatccctctagtcttgtcccctcccgcggctagggtttcctccgcttcgctctcgcagaatgcctcgctacgatgagcgtgatcgttatggcggcaacacaaggctgtacgtgggtcgtcttccctcgcgcacccgcacaagggaccttgaagacctcttcggcagatatgggagagtgcgacatgtggatatgaagcacgagtttgcatttgttgagtttagtgatcccagggatgctgatgaagcaaggtacaatcttgatggtcgtgactttgatggaagccgcatgattgttgagtttgctaaaggggttccgcgtggccaaggaggaggaggtgaccgtgaccgtggccgtggtggtgaccgtgaatatatgggtcggggacctcctcctggttctgggcgttgctttaactgtgggattgatgggcattgggctcgtgactgcaaagctggcgactggaaaaataggtgctatcgttgtggagatagtggccacatagaaagggattgtcagaacagccctaagaacctcaagcgtggaaagagttactccagatctccatctcctcgccgcggaagggtgcgtgataggagctacagcaggagccgcagtaggagctacagccgctctgtttccccaaggagggatgaaaggcgatcaaggagccctcgcgacagtcgcagcccaaggaggagcccccgtgacagtcgcagcccaaggaggagcccccgagacagtcgcagccctatgaagagcccccgtggcagtcgcagccctatgaggagcccccgtgacagccgcagccctatgaggagcgctt

SEQ ID NO: 124790 - DNA, 166 bp, Zea mays
  Clone ID: MRT4577_45285C.1
gctctaacaaagacgcccggactaacgcatttatgtacacttttactgatacatactctggtggagagaacccgagcggcgcggtagaaacccgactagatagctacactacacacttacagatggcctgcctcaggatgaagttcgacgacgtaaacgacatgag

SEQ ID NO: 124791 - DNA, 291 bp, Zea mays
  Clone ID: MRT4577_45286C.1
tgtaggcccagagagatctagctagagttttctgcatccgcctccgccctccagggtctggacctaaatgctcaagcgtacctccccacattatgaaagatgaaaacccttgttttctcctacctctattcgccgtaatcctaataaaaacatgcccaactctcatcttcgcagaagaagcagtcttcctccgcttaaggagatgacaaggagaaaccaacacatttgttatttctagtgtttaatacagcatcagggcgcatcattggcaacgttggttccaccattaat

SEQ ID NO: 124792 - DNA, 778 bp, Zea mays
  unsure (1)..(778): unsure at all n locations
  Clone ID: MRT4577_45287C.1
ggccgctttttttttttttttttttaactgggtatctcggttcaagctatggaccttctttttcgctgctcaactcccgcctgacaagtgatatcaaccaaagcactgacttttgtctgcttcttttttccctcttgttcatgtgaactcttcttctttgcttcttctacactctccatctttgcttcttggtcagcttgcatctgcatctgcaggcagcctaccgtgcatgtgactgaattatttgcttctcccccgcctcaacctcagattcccccattatcatcccgagaccacagcttcacggtgcgatctttgcctccactcacgatccagcatgcgtcccttgtgacatctgtactaaacacgggcccagagtgtccttgcagagtcttgcagtgcgcccaatcgtccgctgagaagatttgaacattcttatcaaatccagacgaaatgacaaaagtcgacgccttcttcggaatcacttgcccttgctcatcttcttgcagcggtatgccgctcgtcggaccatcagtccccttgaaccatcgtagatcagtgactcctcctgtgttggctgcaatcgagttggtctctctcatcgcacgaacgtcccagcatttcataaatccatctcctgatccagaaagtagcccggtggccatctatggcccagtccaatccgtagatgggcttgatatgactttccagcatgtagatgactcgacctgtccgaacatnccacacacgaccaatgctgtccagaccggcacttgca

SEQ ID NO: 124793 - DNA, 675 bp, Zea mays
  Clone ID: MRT4577_45288C.1
ctcgaggccggccgggcaatcaccttctacatttgatacgccgcgcgcggccctatcgacgatcgagcctcattcacactccgatctagctagctagctagtttaggaaagagaaatctgaccacagggatgcggtggcggctgcagccggcgccggcgccggcgctgctcctcgtcctggccaccatcgccgccgtcgagatggtgattagcatgaactctcctgccctcctcccccaccgtgcccatactccaaaatctactccgcgacgctataaacctcgctgcgattcaacttctcccacgtaacccaccattaccaccatgaaactctccacaacctccaccatcacatatatttttttttcacccccccccccctaatgatcgagaccaattgtcctgacatccctacccggtttttgaaaaatgataaaccgattatgttaatcatgcttcaagaaatctctgtcaccactgattatgatatctagagtcacaaaaatatgattgttataagttacaacaaactgctctacttacatgaagacctaacaatgtcatactctgcctcaaatgtgtactatcttctctaagccgctctatccttatgatcctgatacttacaactcattaggttctacataccgacaacaccttcaatgcttttaataa

SEQ ID NO: 124794 - DNA, 223 bp, Zea mays
  Clone ID: MRT4577_45289C.1
aatcctatacacgacagccgccgcccttttttttttttttttttaatcacaataaagggaaggggaaaaataaatggagcgtgatctaaaaaaaacacatacagaaagtgataacttttcaactattaacataactgatacataatcataagcctacatattacaataaatcaaagatcccattgccgattcacacataattacttacttctatacataaaca

SEQ ID NO: 124795 - DNA, 657 bp, Zea mays
  Clone ID: MRT4577_4528C.1
tccgccgtgatagtagcgactgctgcacgctaccgatcctagtctgctgcagtcatgttcgacctccgcggatctctcacccccgtcaatcccacccagctctatcgcgcccgctgttagatgctcaacccggacgaacgcgcttaagatgagtatggtccgcgaccgcacccagatcatgattgtcttccacctgaggagcatcatctccgccgaacgcgtccgcgtacatggaaaagcgtagactgatgaacctcctcctcctcggagccatctcgttgcccaccgtcagcatggtcgtcccctacgaggtcttcttcgtagctggcggatccgggaacggcggcagcggcacctacgccaaggacaaactggtcaaagacatcacggtggaggcgaggctcaacacacacggtcccaacgatcgaacggtcgcgcatgtgctcaagggtgaccccactcacctggtggtggagcaggacaatacgctggccacctacgggatcaacgccgtgtgcactcacctcgactgcggagtgccgtggaacggcgccgagaacaagttcatatgcccatgccacgcatcctagtacaacaaccagggcaaggtgagcccgtgtacctggcgcctctgtcgctggccctggttcacgtcga

SEQ ID NO: 124796 - DNA, 121 bp, Zea mays
  Clone ID: MRT4577_45290C.1
cccgatctgatcgaatctaaagcttcctgcgggaattttaataaccatggcggtcggcacacccgctgctacttccatcagaacgtatgcagcatgacaggccttccttgatcattactac

SEQ ID NO: 124797 - DNA, 1310 bp, Zea mays
  Clone ID: MRT4577_45291C.1
agggacctatcctaaccccagccgcccccccattcccaacccaccaccaaatcatccatctcgcacggcagcccaccagagaggaagaggccgagggagagcggatctgcgcgatggcgacgctccagcaccagaaccagggggcagcggcgccgatgaccaccacgggcggcgggctgcgcgccatggacctctacgagaagctggagaaggtcggggagggcacctacgggaaggtgtacaaggcccgggagaaggcgacgggccggatcgtggcgctcaagaagacgcgcctcccggaggacgacgagggcgtgccccccacggcgctcagggaggtctcgctgctgcggatgctgtcgcaggacccgcacgtcgtgcgcctgctggatctcaagcagggccagaacaaggagggccagaccatcctctacctcgtcttcgagtacatggacaccgacctcaagaagttcatccgcggacaccgccagaaccacgagaagatccccgcccacaccgtcaagatcctgatgtaccagctctgcaagggcgtggctttcttccacggacgtggggtgctgcaccgtgatctcaagccgcacaatctgctcatggaccgcaagaccatggcgcttaagatcgccgacctcggcctcagccgcgccatcaccgtccctatcaagaagtacacccacgagatccttactctctggtacagggctcccgagattctcctaggcgccacgcactactccacgcctgttgacatcaggtctgcgggctgcatttttgctgagttggtcactaaccagccacttttccctggtgactccgagttgcagcagctgctccacatcttcaagttgctgggcaccccgaatgaggaggtgtggccaggcgttgacaagctgcccaattggcacgtgtacccccagtggaagccgacgaagctgtccactcttgtgcccggtcttgacgctgatggctacgatctccttgagaaaatgctggtgttcgagccggggaagcggatccctgcgaagaaggccctggagcacccctacttcaacgacgtgaggaaagagatgcactgactgaagcgattcaataatccaccgaggggtgtgttgagcatgattgccctgaagcagttcttttgctaccagggcctactttaattaatttctgttttctactagactagatgatttttcctgtgtgctgtgaaccgttcgctttggttgtgatggattaaaacactagggataaagtaagttgaacataagccagcaaaatcgtgtttgcgagtg

SEQ ID NO: 124798 - DNA, 603 bp, Zea mays
  Clone ID: MRT4577_45292C.1
gccggccgggccttgagttgctttacttgaaatcctaagaaataaaaaaaaaaaaaaaaaaaaaaaaaaaaaaaaaaaaaaaaaaaaaaaaaaaaaaaaaaaaaaaaaaaaaaaaaaaaaaaaaaaaaaaaaaaaaaaaaaaaaaaaaaaaaaaaaaaaaaaaaccaaaaaaaaaaaaaaaaagggccccaagggccgggcccgtttaaaaataagggaacccccggggtggaggaatttcaatataaagtttttcaaaccggcgacccccggggggggcccgggaaccaaatccccccaaaagggggcctttttccgggggttcatgggcggggttttaaaaacggggggatgggaaaacccggggggtaccccaattaattcccttggaagcactcccccttttcccaagggggggaaaaacaaaaaaggccccaccaaatcccctttccaaaaattggccaaccctaatggggaaaggaaatttgaaagggtaaaatttttgtaaaaatccgggaaaatttttggtaaaaccaccttttttttttaccaaaaaggcgaaaatgggaaaaatcctttaaaaacaaaaaaaaaaacccgaaa

SEQ ID NO: 124799 - DNA, 389 bp, Zea mays
  Clone ID: MRT4577_45293C.1
gttgtgttgatttaaaaaaatgggttcattaaacaagcgcccaagggggaaaaaacaaaaatgaagaaaaaagaggcctcgggggggggggggggaccaaaaaaaaaaggccccgggccctccaaaaaaaaaggggaaaaaaagccaaggggggacaggaaacaaacccgggggaaaggaaaacgaaccgacacaaaaaaagggggcaaacaaaaaaaaggggaaaacaaaagccaaaagattgggcaacccaccggaaccaaaaggggtcaaaaaccggaaggacccaaagggggaaaccgacgcgaccgggcaggcggcagaagggggacccaaaaagcgcaaaaaagggggggggccttaaagagcagccaaccccaccggggagg

SEQ ID NO: 124800 - DNA, 473 bp, Zea mays
  Clone ID: MRT4577_45294C.1
atacattattaaagtttgtggtgtaaaaaatgtgttgccctttttaacaggggcggagcaaaaacaatttatcttccggcactaggttactatcaccaaaaaatgccgatggtttgccaacaccaagaggaaaacatgccataagatgtagcgggccgactagtaaaaaaaaggagccgaaacaaaaggggctgaggacaaaatgaaagacatgggtttcatacccataatataacatgacccacaatccagggggagcgggggagaggttataaccaaaacatggcttactgaaaacaagatgaatgcccaaacagggagcttacggggatctggtgacactaaaaaacccccccacagggggcacctggggatgagacgaggcacacccttattctcgggaggggccccataagccaaagggaaagctttctgaggccctaaacccggggtaaaatttccacccttttttt

SEQ ID NO: 124801 - DNA, 326 bp, Zea mays
  Clone ID: MRT4577_45295C.1
cgctaacatggtttgggtgtactgtgaacaaacagacacatgcttaaaaaatgtgactgaaactaattcatggagcatcaagatcaacaacgtcaaactacattacatgctaacacaagggccctggaaagtgctttagccacacgcgacagggattatgattacagttctggagcggatttttgcaccggggtcgtctctctttggccaccctttcggagctttcaggctttctttttgtctcaacctcaagtttactttgtgaccggcacaaacaacgctgcagcacgcgtgaacaagacagcgtttgccgtcgtcgtgctttg

SEQ ID NO: 124802 - DNA, 439 bp, Zea mays
  Clone ID: MRT4577_45296C.1
ccaaatccataatctctgagtcctgtgtttcagttggaaaataccatgtgaaagaaagcatctcctcaactctacagtcaattttcgataaatatggagacatagcagctaactgtcagttggaatcgtcttccatgcgtgcatattatttagagtgcttgtgtgctgtggttcaagagttgcaatccactccattcaatgaactgaccaaatcaaaagtaaaagaaattttttctgttcttaaggatgtagaatctgcaaacattgatgttagttggctgcgtgctctgctcaatgaaatctcagaagccatcaatcttgctagtcaacgacaaacttttgaagccaaaaaagttaagtatgaaggtccgttagagtctgtaaagaacgaactggaatctcgaatggaaaatctatctcagaaagaaaaggaggctgg

SEQ ID NO: 124803 - DNA, 1121 bp, Zea mays
  Clone ID: MRT4577_45297C.1
tcgaggccggcggggacctcgaggccggccgggaggccctttgaaatgccgaaagagagccgttccctgttgccgaaagcccgaaactagtcttccctcctgctggcggcgtgcggagggccggaggccgggtcgacaagaggagatgacgttggcggcggggctgggttacgccctgatcgcgctgggccccgccttctccctcttctccggcgtcgtcgtcaggaagcccttcctcgtcctcaccctcctctctagcaccttattttggcttataagtttgatagtcctctcgggaatatggagaggatttcttcctataaagtcaggagcttggtgggcatatgtgattctgatccttacatctgtcgcattgcaagaaggcactcgtcttgtgttttggatgctttacaagaaaatggaagagatgctagatgcttttgctgatagaatatctaagccacgtcttagattgactgacaagatgctgatttctttagctggtggtttaggccatggagtggctcatgcagtctttttctgtctcagtcttttgactccagcgtttggtcgagccacattttatactgaaaggtgctcaaagctgccatttttccttgcgtcagcccttattgcacttggattcttggtcatccatacattctcaatgattattgcttttaatgcatatgacgagggaaagaaaagtgatcaagtctttgttccagtaattcatttggctgctgctgcgatgacacttgttaacctcgccccaggaggctgtctcattggtaccccgctgttgttggtcatggctgcgctgaccttgcagcactgctggcgagtggcatgccggagattaactgagcaccggcatcagcagcataacagcagctagttgtaggcttgccatcatgtaattttcccatgtatgtttgactgaatcttctgatgtactatgacagtaaaaatcaggttctgagtcgtgtcgtgtagttagacgaggggttattatagtttgactcgatgttttgcatatgcagtatgtcctccctttcctggagcacttttatatctatctatctatataaccatgattgtttggtacaaaaaagagaaaa

SEQ ID NO: 124804 - DNA, 857 bp, Zea mays
  unsure (1)..(857): unsure at all n locations
  Clone ID: MRT4577_45298C.1
cattgggtacctcgaggccggccgggatcttcattaacacttgaattcactacgcctagtcaagatggcaggcccgccgtatccctctactaccaactttccccgactcgagcatatttcattatacctcaggattttcatcgctctgattgtttttcagttgattggcacagccgtttataatgttttccttcacccgctacgaaaataccctggcccaagacttgcggcagcgacagatcttgtttggcgttactatattgtcaaaggcgaggaggtctcctggacgcaagaatgccataagaagtacggagaggtcgtaaggttaggttcgaacagacttagttacattcaccctcaagcttggaaagacatcgtcggccaccgcaaaggattacgtcaagagaacccaaaagatccccacaatggcgtagtagagggagctcctaacgcgccctccatcctttttatcaaagacccacaagaccatggccgagtacgcaagattttcagcaatgctttcagtgataaagctttacgaatgcaagagccactaatatgtggtcatattaacaagctcatccggaacatagcgcaggctatctcagagaatccagatgttcacttggatggtgtaaagctatacaattgtgcgacctttgacataatgggagaccttacttttggtgagccactgggtatgctcgacacgggtgaatacacaccatggggtaaaagctgtatttggtggccttaagtntggcacggtagttcgtgccggaagtggatatccttggatagagcgtgtggggcgcatgctcgtgcctcatactttacgcacgcatcgagatgcacac

SEQ ID NO: 124805 - DNA, 552 bp, Zea mays
  Clone ID: MRT4577_45299C.1
gaagctgaatctacgtttttttttttttttttttaattaattctcaactcatgtccttccatgccacgctacagtttatttgataacatagtgtatagcatagataatccatctctaaattgctgtgcagattgaggacatatatcatgttgaatgcaggatggagacttttatcagtacttgcgaactaagagttggtcggtaatcagtgcggcacacgacggagggcaggatgccggattgctcatctcgcatttgctgtagtcaaattgtgaagcttgtgcaggtggactgatcacttcgccggcccaacttaagcagcgtcttttccagttcctcgccgctgttccacggatgaacctcagccttgaaaagctgcttgttgccgcagataaaatgccacagggggtagttctcccttgccatgacgtggtccccttcccccagcttgagggacgggcagtaatctcccttcccgtcaccgatgtatatgaagcgccggcgccgcttcttgtcactgcctgttgcctggatcctccccagtatcttgcc

SEQ ID NO: 124806 - DNA, 239 bp, Zea mays
  Clone ID: MRT4577_4529C.1
cccacgcgtccgaaacttttttttttgaccccaaagacaagtgattttgtccagctctatacacaggaagactgtgagataatcaaggttaatgttcattgtcctgttcaaggagacattgtgattgagtgtgtcagtctggatgaggactttgaacatgaagttatgatgttcagagccatgtttagcacagcttttattgaagacaacttgttggtacttgataggaacgagattga

SEQ ID NO: 124807 - DNA, 248 bp, Zea mays
  Clone ID: MRT4577_452C.1
caccgactgacctgagagtggtggataatcgatcggatactgttcctgcaagaaaaggggccctggtgctagcctttagcttgcacgccgaaaaagatgcagggatcgcctaattaatggtgctcgcccccaagttactgcgttaggtaagtaaactctgcacgaacactgtcccagcattgacctaatacacgcaacgctcttggatgcttttaaagccaatgatgtcccttaaggttctataaccc

SEQ ID NO: 124808 - DNA, 1253 bp, Zea mays
  Clone ID: MRT4577_45300C.1
gtagacagaggagagaaccggccggagatccggacgctcccccaaaatctccactcccggagtgagctccccaccaccacctccgtccccaaatgtcccgtcaccatcaccacgccgccgccatcgctgctgccgtgctcttcctcctcacagcgcctccttgcgccgccgaccctaacgacgagcgttgcctgactcacctccaccagtccctctccgattcctccggaaggctcaactggaccaaggcggcgatctcggcgccgtgcgacggcttcttctcgcacctccaaggcgtgacctgcaacaacgggcgcgtgtacaagctagccctcccggatctctcgctcgggggcaccgtcccgccggagctctccaactgcaccaacctccagtcgctggacctgtccgcgaacgcgctgtccggcgccatcccgacggagctctccgcgctgctgaacctcgccgtgctcaacctctccgcgaacgcgctctctggcgccatcccgcgggagctcgctagctgcgcctacctcaacgtcatagatctccatggcaaccagctgtccggccccatccccgaggaactcggcctcctcgtccggctctcgaccttcgacgtctcctacaaccgcctctctggccccatccccgtgctcctcgccaaccgctccggcgccggcacagcagccgtcgggacggcgaggttcaacgccagctccttcgtagggaacaagggcttgtacgggtacccgctgccgccgatgcggacgcgggggctctccgtgctcgccatcgttggcatcggccttggcagcgggctgctcagccttgtgctcagcttctccgccgtgtgtctgtggctccgcgccacggaccggcggactcccaccacccctggcgaggagggcaagatctcccagcccatgccgaactactgaatccatcaaaggttgcatctttggacatataattcctcgtaattgaactgaacacgagatttttcagctgggcttgcaacaaaggttccaccttgaatagattttggttggattcttgaagccagtattggattctggaacgggatccgaggagcataccagacatcttgctgcaggctggttgtgtcagtagtggatcttctaatcgctgtagttttttaataactaatgattttgttgttgctcttatttactaattgacaaaaaaaaaaaaaaaaaaggcccctaagtgaggaatatttgtctgtagag

SEQ ID NO: 124809 - DNA, 435 bp, Zea mays
  Clone ID: MRT4577_45301C.1
aaaaaaaaccatccacctaaggggggcaaaggctaataattaatgtccaggagcaatggcccatatctttgtaaaactaaacagtggcccccacaaataaaccaaggcagccaaatttgtaaaaggggggaagggggatttacaagtccaaaggtcccccagacaaagtaatcataataaaaaacaggggggctcccgaccaccataaggggtttatatataaacaaaaaaccctttttttttccacaaataaaaggggggccaccattggagctacccatgggggggggcccccccattttgtttccaccgccaaaacttttggcatcgacaaaatcactgaataaataatcaggtatgaagaagggcctgcaaaaggctgccaaaaaatctttgggtgggggattaaaattaattggggctggattggaaatc

SEQ ID NO: 124810 - DNA, 3107 bp, Zea mays
  unsure (1)..(3107): unsure at all n locations
  Clone ID: MRT4577_45302C.1
aatgcgctggcgaaggcgattgagcgagttcagcggctaatagattttcagttttatttccgggagaatgcggggtggcggcggggcttcctggctttcgtttcgcggcgtggtggtggaggaagaagaggcggtggtttcggcgccggaaaagccaatgcggcgggggcggcggaggtggggagcggaggtggacgacggctactcgccgagctccacgggcggcggcgggagcagctgctgcgattccttcggctgcgactcgcctttggccgggttcgtgcgcccagatggtgacccagacacagatctggagacagatgggttggccacttccacctccagtgcctttaccgagcggcaggacgacgaagcggaagaggcgctgtacggggtgaaggaagaggagtgggctcagatacaagaaccagccaagaatccggcattccgtgccaccccagaatgccacaaacagcggtaccggacggatgctgctgttcttttgcatggtaggaaggggtcgaaacagcggccggcctcacttgacctcggtagccctgggttccatggagccacgttttctccaagtttcgtgattggtggtgtggggttgatgaacaaaggacttggagcatcagtcatcaggtcagacgtgtttcatagtcctgggacgccgaactatccgcgccaccgtgcatcagtgttagggtgccataaagggtggagctctgagagagttccacatccttctaaaggaaataggcggtacccaggcagcagcatggcatttccttacagcaatgggaggacattgccctcgaaatgggaggatgcagagaggtggatcttcagtcccaattcccgcgacgcgcttggaagaactacggttgctcatgctcggcgaccgaagtctaaaagtggccccctggggcctccaggaagacttggtggacagtattcatctgtttcttcagtgtcattgcttgataatgggagagctggacctattacagcaaattcaccttttgcggctggagtactaatgccggaacatgtttgtgaaggaaaaagtacaaatggaacctattcaagtagaccaattggtaacgaaatcaacattggaagaggagtcaaaatttgtccactgaatggtgggtctcatcctgttcgaacttccagagttcgccagcgattagattatgcagtcgaatcatctgtttcattgcctagcacgcaagaatctgtccaagacgagcaggttgaaatcacagaagattcagcttctactattgcttctataatttctagaaaagatgctgcaacccagaccagtccagagctaagtaggtcctcttcacccaacactagaccaacatttaatggttccttgtcaacagaacaagtgaaagagaaggggagctgtttgtcagatcttgatatcagggatgttcagatggatgatcgagtgactttgactaggtggtcaaagaaaaatgtaacacggtcgtctaacaagaattcaacaaacataatagagtggagcgaaaagacagtggaatcaaaatcttcgtcctggggctttgccaaagcgaagtgcatttctaagattgatagagaggacacagaaattactgcatgggagaatattgaaaaagcaaaagctgatgcagcaattcagaagttagtgattaagttagagaagaaaaggtcatcttcgcttgataagattttgaacaccctcaaatctgctcaaaggaaatcccaggtgatgcatgagcatgagcgtgatgcagtaacagcaaaccaagatggaaaaggctctaggaaggcaaaaaagagagcacagctcagcaagaatggccaaatcagttcactgagtggctgcttcacttgccatgctttttgatacatgtaattccaaaactgagatctataccacactctttatattacatcaggcaatacagcgtcatgttgacagcaacgaaattgtgaaccaaccttttgcggttttgcctataacatggcgaccactttagtagactcatatttgcatagtgttcaaaaattttgtagctgatgtatcatcatggttattttcacatcttcggattgtgctaaaagtgctccattgataaagggcagactcagtgctgaaggctcccccactcatgtggccatgtggggtatgggaaaaggataaaccgaggcaaacttccctcgcgaatacggagagactgctttgaatctgtgacccggtgacttagtgagacgttctcactattgcacccagtgtgcccttaaaaaatgctctattgatgtatacgtaatttttgtaattgttcccacataaaacacccaatttttcacatttgtggaactttctgtacaacacattacattgatcagctccttcagatgtctatcttcttttaaggatgtcagtacataatacgataatcccgcagctggaaatcagactcggatctttccaagatgctagctgcaggctcttcatctgccatgatagggataatgcaatatctgcagtgcccctctgtgttagtttcgattctgccaatgagacagagaaaatggagcacgaaggaaaaggaggaacggttctgcgtacacctcatgtgcccggttgatgtctcctttatcattgtgtcattacctggcctgccttgtagctaggcactgctgatgtcgatcttgttgccaaaaaggctgtatggatcatacattcacacaaagtgcaattccattccaagagacagcgaaatcttcaggtacgaggagaaaacatggtctgcttgtgccgttgtgcgtgtgactagttgggcaccctgctgggtactggaatggaaccacgctcccttgttgcttttgtttggtacagtgctggttgttgctacctacatttgctttacagcagcgtcggtgtgtagctcttttaggaaactgagatgttggtttggcctggaaacttaacaatatcgtcacacacatatatgtacatatggggatgaagatatgatcgtcagtatgccatcctttaaaaaaaaagattctcattttacggcananaannnaaaaanaaaann

SEQ ID NO: 124811 - DNA, 257 bp, Zea mays
  unsure (1)..(257): unsure at all n locations
  Clone ID: MRT4577_45303C.1
cnccgccgtcttctgcggttctgccgtttactcctccactttggcctcctcacttgcaagtttaatcntcgcctccagccatgggtaaggagaagtctcacatcaacattgtggttantggccacgtcnactcnggcaagtccacaaccaacggncaactgatctaaaagcttggaggcantgacaaacgtgtgatnnnnaagttttaaaanganggcgctgaaattnacaagcggtctttaagtaatgcttgggtg

SEQ ID NO: 124812 - DNA, 206 bp, Zea mays
  Clone ID: MRT4577_45304C.1
agcgctccgcattgttgtgataacatatatgcatgatatgacaccccaccttatcacacgcgggggattgcgagtgtgatctttgcaagtatgttatcacaaccaatgaggactgataggaggacaaaccacttggaagatacacgctcggggacggctccgcgggcctaggggggggggggccgcccccccctgtgcgcgacgca

SEQ ID NO: 124813 - DNA, 882 bp, Zea mays
  Clone ID: MRT4577_45305C.1
cctcgagccggggaaagtattcaaaaagcaaaagctgaggcagcaattcagaagttaatgattaagatggagaaaaaaggatcatcttcgctggataagattttgaacaccctcaagtctgctcagagaaaagcccaggtgatgcgtgagcatgagcttgatgcagtaacagcaaaccaagatggaaaaggctctaggaaggcaaaaaagggagcacagggtagcaagaatggccaaatcagttccctgagtggctgcttcacttgccatgctttttgatacatgtaattccaaaactgagaatcaggatctgagaaattccttcgtactgcctacatcaccatcatgttctccacatcaaatctgggtgaacttcagatatctatcagatgtcagtacataatacgataatcccgcagctggaaatcagactcggatctttccaagatgctagctgcaggctcttcatctgccatgatagggataatgcaatatctgcagtgccgctctgtgttagtttcgattctgccaatgagacagagaaaatggagcacgaaggaaaaggaggaacggttctgcgtacacctcatgtgcccggttgatgtctcctttatcattgtgtcattacctggcctgccttgtagctaggcactgctgatgtcgatcttgttgccaaaaaggctgtatggatcatacattcacacaaagtgcaattccattccaagatacagcgaaatcttcaggtacgaggagaaagcatggcctgcttgtgcgtgtgactaattgggcaccctgctgggtactggaatggaaccacgctcccttgttgcttttgtttggtacagtgctggttggtgctacctatatttgctttacagcagc

SEQ ID NO: 124814 - DNA, 940 bp, Zea mays
  unsure (1)..(940): unsure at all n locations
  Clone ID: MRT4577_45306C.1
agtccacacaacgacaccaactgtcctcaatccagcagccctcgagtctcgtccccgcacatcagcagagagacgccactaccaccaccgcaagcgacgacggggagatgtttctgcgacggatcctgaccggcggaggtggcctggcggcgctgagggcggccttgaggtggcgcccaacgcgcgggaggttctcatcgggctctacacgcgtacgctcaaggagatcgaggccgtccccaaagacgagggctaccgcaaggccgttgagtccttcaccaatcaccgcctccagatctgccaggaggaggacgactggaagcgcatcgaggaccgaatcggatgcgggcaagtcgaggagctcatcgaggaggccgaggacgagctcaagctcatcgccaaaatgattgaatgggatccgtggggtgtccctgatgactacgaatgtgaggtgattgaagacgacaccccaattcctaagcatgttcctcagcaccggcccgttgctcttcctgaggagttcttcaagacactagatgccgtcaaatcagatcccgccctccaaggcgatgctcctcctcaagtgaaggcgtaaagatgagtcttcccggttatgtcttatgtcatttcacactttgctgcgctgggtagggactagtttcttgtgtcatttgccatttgccagcaatgtgcttgttccgagcagaataaatttctggcgagtaccatcgaagagtgactttgaacgaagtgattcgacacagtaaatttgttgttgtccatgaatacttgctctgaacatcgcttgccgatgaaatattgaatgctaaaaaaaaaaaaaaaaaaaaaaaaaaaaaaaaaaaaaaaaaaaaaaaaaaaaaaaaccaaaaaaaaaaaaaaaaaaaaaaaaannggacctcttggttgttcccactgcttt

SEQ ID NO: 124815 - DNA, 887 bp, Zea mays
  unsure (1)..(887): unsure at all n locations
  Clone ID: MRT4577_45307C.1
cctcgaggccggccgggccgggatctccatccgacgaccaacaagctaaggccgggtcgtcatcggccggccggacgtacgtacggcggcgagcttgctacctctgttctattcatacatcgatacattacattacggtgcgagtatactatatataccatggcgtcgagagctccggtgatcgtcgtcgtcgcggccgtgatcatggcggcggcacgcctcgcgagcggcagcggctattacccggtcgccgcgcccttcacgtcgtcgagctggcaagacggcagcgccacgttctacggagacggctccggcctcggcgcagacttcggcggcgcgtgcggctacggcgccaacgacatccagtcgctctactcgacgcgcacggcggcgctgagcacgccgctgttcgcgggcggcgccgggtgcgggcagtgctacgagctgcgctgcgtcaactcccggtggtgcaacccgggctcgccgtccgtcgtggtgacgggcaccaacctctgcccgcccaactggtacctcccgagcgacaacggcgggtggtgcaacccgccgcggcagcacttcgacctggcgccgccctccttcctgctgctcgcggagcgggtggccggcatcgtccccgtgcagttccgccgcgtgccgtgccagcgctcgggaggggtccggttctacgtgcagggcaactactactggctccttctgtacgtgatgaacgtgggccggcagcggcgacgtctccgacctcgccgtgaagagggncggcgagccggactgcagctacgtgcccgcgtcgcacaactggngcatcacgcaacaggtgggtccccgcgctcgggcacgcgcagggccctcgtcgtcaggatgaccagcta

SEQ ID NO: 124816 - DNA, 777 bp, Zea mays
  Clone ID: MRT4577_45308C.1
ttaggtgacactatagaagagctatgacgtcgcatgcacgcgtacgtaagctcggaattcggctcgagcgtccccgcacatcagcagagagacgccactaccaccaccgcaagcgacgacggggagatgtttctgcgacggatcctgaccggcggaggtggcctggcggcgctgagggcggcgcgcgccgtgaaggagacgacggggatcgtcggccttgaggtggcgcccaacgcgcgggaggttctcatcgggctctacacgcgtacgctcaaggagatcgaggccgtccccaaagacgagggctaccgcaaggccgttgagtccttcaccaatcaccgcctccagatctgccaggaggaggacgactggaagcgcatcgaggaccgaatcggatgcgggcaagtcgaggagctcatcgaggaggccgaggacgagctcaagctcatcgccaaaatgattgaatgggatccgtggggtgtccctgatgactacgaatgtgaggagttcttcaagacactagatgccgtcaaatcagatcccgccctccaaggcgatgctcctcctcaagtgaaggcgtaaagatgagtcttcccggttatgtcttatgtcatttcacactttgctgcgctgggtagggactagtttcttgtgccatttgccagcaatgtgcttgttccgagcagaataaatttctggcgagtaccatcgaagagtgactttgaacgaagtgattcgacacagtaaatttgttgttgtccatgaatacttgctccg

SEQ ID NO: 124817 - DNA, 392 bp, Zea mays
  unsure (1)..(392): unsure at all n locations
  Clone ID: MRT4577_45309C.1
ctggaggaaaaatcccgccgctgaaaactggcttcttcccagccgtgcttctctccctccctctatttctccctctgcgcgtcgagcttcttcctgctcgcgtccagttgcccctcctctttctactctctgcgcgcttccctctctctcctccatggccgtcgctgctccctggtccaagttcctgtgcgcgccctggagctcccctgcgcgcgtcccagctcgtcggtgcttcttccctgcgcccagccgctcctccctcctcccctgcgcgtcctcccagctccgctctgctcctggccggcgtcggctcaagctccccccggcactngcttcccatggcggagctttcccatcccaactcgccagtcgcccactggactcgccagcca

SEQ ID NO: 124818 - DNA, 230 bp, Zea mays
  Clone ID: MRT4577_4530C.1
gccggccgggtcggcctaccaacttgactattgtagcatgcaagttgtgtgttaatgatattttgtcaggtatgctaatgctacattcctttttagaggtatttcttttttagaggttctgtcttacggtatatgcagtttcatggtaattggtagaacacacaattgtggtttcaattctcgaagctttgcgtgctaattctgaaaaaaaaaaaaaaaaaaggccccta

SEQ ID NO: 124819 - DNA, 190 bp, Zea mays
  unsure (1)..(190): unsure at all n locations
  Clone ID: MRT4577_45310C.1
cctaatctgactagaaaanacaatcccaaaatcaacctcaatcacccaaacccaactatctaaaatantatccaaccaaaaaggactaatcaaactatatttcctatcatttctcatgcactatttcactaatttttatcttacacacactnaanncncanccgatttcaataataataaaaatccccgc

SEQ ID NO: 124820 - DNA, 215 bp, Zea mays
  Clone ID: MRT4577_45311C.1
cggagggacccgtggacccacgcatacgcggaccccttgggccccaaaaattcctcagccaacccaacacggtcacgggacaggggacgacaggacaggacaagacacgctggctctgccacaccatggttccaatgaacctgtacggggctattatttcgtggaacgtgacgaggtacgcaactgcacttgatgaggctggctccgactaccat

SEQ ID NO: 124821 - DNA, 2427 bp, Zea mays
  Clone ID: MRT4577_45312C.1
atggatcctaaaggcaagaggattgtgatcaacgacaaggagaaggagactctctatgttgatgagccaaaaggtgacaagcctaccaactcaggctcaaacaacaagaagaaagatgggaagaagagacgcatcaagaagatcaactactatgacagcgacacctcctcttcttcaccaagggactacgacgatgactcgtccacgaaaaagaaaacggttaatcaaaattattcatttgattattctcgcatgtcagatgagtacaataaagttagtggcttggacaatgccaagcaaatatgggacaccctcaagatctctcatgagggaaatgacgccaccatgattacaaagatggaactggtggaaggtgagcttgggagattcgccatgaaaaggggagaggagccaaccaaaacatacaagtacaccaatatgaagcccgaggaaattctcgaaaaaatcgtaagcgggcgcatgatagtaaaggaggctaggtacgttgatgacatcgccaacagaccactcccactctacgagccgcagcccattgccctcaaggcaacaagcagcaaggaggcactagctaacaaggtggcacaagtggaggctgcgaggctcaacgaggaggaaatggcacaagaaaagaaagggaagaaggagagaaagaaaaactacaggaaggcgcagggcgaggcgcacattggcaaggaatgggactccgattgttcttcatccgactccgacaatgaaggactggctgcctccaccttcgacaagtcctccctcttccccaacgagcatcacacatgtctcatggctgaggagaagcatgtgtcgatttgtaataggtgtaaagacattgatattgatgcttgcaatactcatgttgccactattcttaagttgaataatgatgttgcaaatcttaatgctcaacttaagacttgcaaaagtgaaaatggtaaaataaaatttgctcgagttgcctataccattggtagacatccctccattaaggatggacttggcttcaaaaagggaaccaagaacttaacaagccaaagggcctccaatctcattgaggagaaaggcaaggctcctatggctattagctctcattcttcacatgacaaaaggaaccatgcctatctttatgctcatgttaagaatgtttctagtgttgctcatcatgatagttgttataatcatgttgttttacctactcgtcatgatgttgtttttgattcacatgccaagtttgcatcctctagctcttcgtatgctcatggtaggaatagacctaagtgccatgctcatcatattgattcctatgtgcctaggaatgcatcaaatggtccaacgatgctttatcatactaataatgcttcatttgtgcttatgtgtaaaaatgataaagtagttgctagaaatttggcgtctaagtgcaagagagataaaacttgcatctgggttccaaagtcttatgtttatacatccgggggcacaagctggattattgacagcggatgcacaaaccacatgacgggggagaagaagatgttcacctcttacgtcaagaacaaggattcccacgacacgatcatatttggagatgtgaatcaaggcaagctccgggaccaccatctagcgcatgttggaatgaagaatcttcataagcttctaaagggagaacatctgttaggactaaccgatgtctattttgagaaatacatacattgtgtagcgtgccaggcagggaagcaggataaatcagaaaaccaaagtactctaaagcacttcctaacgagagctcaaaatgagtttgagctcaaggaagaaggcatcaagcatgagttctccactccctacacaccacggcaaaatggtgttgtagagagaaagaacaggacgctcatcgacaagacgagaacaatgcttggagagtacaagacgcctgagcggttttggtcaaaagctgtaaatacaacttgccatgccataaactggctctatcttcatcgcctcctcaagaagacatcctacaaactcctaaccagtaacaaacccaatgttttgtactttcatgtatttgggagcaaatgctacatcttggttaataaaggtaggcattcgaaatttgctcccaaagttgtagaagggtttttactaagttatgattcaaatacaaaggcatatagggtctctagtgacgttgtatttgatgagactaatggctctccaagagagcaagttgatcttgatgatgtagatgaggatgaagttccaacagccgcaatgagaactatggcaataggtgatgtgcgaccgcaagaacaacaagatcaagataaaccatcttcctcaacactagtgcacccccaactcaagatgaggaacatgtacctcaagatgaaggcatga

SEQ ID NO: 124822 - DNA, 2301 bp, Zea mays
  Clone ID: MRT4577_45313C.1
atggatcctaagggaaaggggaacatgatcaacgacaaggaaaaggagaccctctatgttgatgagccaaaaggtgacaagcccaccaactcaggctcaaacaaaaagaggaaagatggaaagaagaagaggcacatcaagaagatcatctactacgatagcgatgcctcctcttcttcaccaagggatgacgacgacgaagactcatccacgaacaagaaaacgcaaattcataagaatgcccaagctactacaatgttgttagcatctctatgcagggatgagtacaataaagtcagcgacttggacaatgccaagcaaatatgggacacccccaagatctctcatgagggaaatgacaccaccatgattacaaagatggaattggtggaaggtgagcttgggagattcgccatgaaaaggggagaggagccaaccgaaacatacaacatgcacaagaccctggtgaacatgatccgaagctatgggagcacaagatggacggatcatgatgtcattcgactcatgctaaggtcatttactgttattgatcctcatcttgtaaaccttatacgtgagaatcctaggtacatcaagatgacacccgaggaaattctcggaaaatttgtaagagggcgcatgatggtaaaggaagttaggtgcgttgatgacattgccaacagaccactcccactaaacgagccgaagcccactgccctcaaggcaacaagcagcaaggacacgctacctaacaaggtggcacaagtggaggctgcagggctcaacgaggatgaaatgacgcttgtaatcaagcgcttcaagaccgctttgaagggacacaaggaatatcctaacaagaataaatcaagggggaagcgctcctgcttcaaatgtggtaagtctggtcattttatagcacaatgtccctgtcccgataatgacaatgaccagccacaagaaaagaaagagaaggagaggaagaaaaactacaggaaggcgaagggcgaggcgcacattggcaagtgtaaagattttgatattgatgcttacaatactcatccttttaccattcttaagttgaataacgatgttgcaaatcttaatgctcaacttaagacttgcaagagtgaaaatgataaaataaaatttgctagggatgcctacaccattggtagacatccatccattaaggatggacttggtttccaaaagagcatcaagaacttaacaagccaaaggacttccaatctcgtcaaggagaaagggaaggttcctatggctagtatcactcattcttctcatgatagaaagaatcatgcttatttgtgtgctcatgttaagaatgcctctaacattgctcatcatgataattgttataatcatgttgttttacctgaacatcatgatgctatttttgattctcatgccatgtttgcatactctaactctttttatgttcatggtttatgcatccggggcacaagctggattattgatagcagatgcacaaaacacatgacgggggagaagaaaatgttcacctcctacatcaagaacaaggattcccaagacacgatcatctttggagatgggaatcatggcaaggtcaaagttttggggaaaatagccatcactaccgagcattcaatttctaatgtgtttttagtagaatcgcttggttacaatttactttctgataaatcagaaacccaagtggaagagtatcttgaggaggaaggtatcaagcatgagttctctgctccctacacaccacaacaaaatggtgtagtagagaggaagaacatgacgctcatcgacatggcgaggacaatgcttggggaatacaagatgcttgtgcggttttggtcagaagttgtaaacacagtgtgccatgccataaaccggctctatcttcatcgcctcctcaagaaaacgtcttatgagcttctaaccggtaacaaatccaatgtttcgtactttcgtgtatttggaagcaaatgctacatcttggttaagaaaggttataattcaaatacaaaggcatatagggtcttcaacaaatcgtcgggtttagttgaagtctctagtgatgttgtatttgatgagactaatggctctccaagagagcaagttgatcttgatggtgtagatgaggatgaagtttcaacgatcgcaatgaggactatggcaataggtgatgtgcaacctcaggaacaacaagataaggatcaaccatcttcctcaacattggtgcaaccccaactcaagatgaggaacaggtacctcaagacggaggcatga

SEQ ID NO: 124823 - DNA, 491 bp, Zea mays
  Clone ID: MRT4577_45314C.1
tcgagcggccgcccgggcaggtataaaaaaaaaaaaaaaaaaaaaaaaaaaaaaaaaaaaaaataaaacataaaaaaaaaaaaaaagctaaggcctaaattctgaaaaactctataggcaaagtttttcggttttacttccctctagggggccctattccttgtatattgaggcccattttagtcctctggcgggcgtttttaaaaggggctggttgggatttttggcgttaccattgaaaaaaccctggcgggacatccctttttcgcctggtggaaaatccccttttagcccccttcctttctcccttacaggccctcccctatcctccttgccaaatggtccccccctttaatggcgaattaactcccccatgttgtggcgcttttacgcagggggttcggtgcgtttcccacagcgttaccgccccatttttccgctttcttccgtccctttcttaccattttttcctttttttttttgccaccttt

SEQ ID NO: 124824 - DNA, 212 bp, Zea mays
  Clone ID: MRT4577_45315C.1
cactgcacgcttgcaatagctctcgagctggatcgagcgatgctctggcattaagctcagagttaactacgcgcggtttggttttttaaaagagctggaagaatggagacagtcgagcgatgcctaagcagcagaagagattgtcgcagcctccgagcaacatgccttaggcgctggatatggaggacaaggtgaacgaggctgttgttgct

SEQ ID NO: 124825 - DNA, 1065 bp, Zea mays
  Clone ID: MRT4577_45316C.1
cccacgcgtccgcaggtaatcatcatttggactataccggccgagaaggatggcgcgcgtgcgcgagccaccgccgatggcatctaacgacgactccgcgtcgctcttggtcgactacggatggtctccagcagcagccacccctgctaggtcgtctcctttgcggcggctccttcacggcgggaaggcgccggccggcgccgccgccgccgccgccgccaccaccaccaccaccaccaggagccacgacgtcaagaggttcatatgctcgcctttcgcggctgtcttccgggcgatgtcgtgcgcgcgtgattctgcggtcagtacatgcgacggacagcgtagcagcaacgccacggccggggtggccgagcgccttcgggaggcgaggaagaggcgaccaagcctcgagcagctcctcaggatggaagcgccgccaccagcatccgcccgccgcccagatcatcatcgcaagctgggtaaaccacgagaagcggttgctccgtacgaggttataatctcctccggcgccgtgaaggggaaagagcaggagccgctattcccctctcctcaaagtcgtttcgtggctgctgtctccgacgacgccgatgacgccgagcggcggcggcgaaccacgatcgtgcccgtgaagttggagcccggtggccccggccggcggcaaacgaacgcgaaaaggctggtggtcgttttcgcgtctctgcgggcgtgttcttgggctccgaggattaacgacgggaaggtggctgcaggccgtgctcccggcaataaggcggatctgttctattatcgacccattcccatggggcggaggtgccgggttcagcatctggaggagtctccttacgttgcaagtagtgacctgtcgtcgctgctcaaccttgaacagatgtgaggtgcatggtccgggaatagccatgcacaaacttcaattcgtacacatatacttatatgtactctcattattttcctattttccagctgcgtgtatgttatttttttttgtaattgtattatatgatataaaaatctgtaatcacccgcgtg

SEQ ID NO: 124826 - DNA, 275 bp, Zea mays
  unsure (1)..(275): unsure at all n locations
  Clone ID: MRT4577_45317C.1
ggcgacgccacgctgnntcctgttgtttgtcttagacaatataggtacactcttctgcgcatccttcatgttataggatatgtgctttcgggtgggggtttgtttttgcgctgatattccaagtatatatatatatatatatatatatatatatatggggaatcggccatattaaggtatcaatttaattttccacgatcaccattcttgggtcatatacttcaagattcaactatgctgactagaatacatccgagctatatgcgcctagggac

SEQ ID NO: 124827 - DNA, 339 bp, Zea mays
  Clone ID: MRT4577_45318C.1
gctattcctgctagagaatcgacgcggtggaggttgtctggcaggccaccgtcgcgcccgcccttccgtcggagactctgtccgcatccaccgcgtgacgttgggaggacacgcacccgtggccgcttactactctgttttcatagcgctccatttccgttgtctttctaccacctgttgctgctcctacatgggggggctgcctcctcggcgaagggccggtacgcgggacccttgcatccggggcgttgaccttcaccagaatacgattgctgccatttttggaggcgttgtcagcattcgctggggaataggagcacctgtgtttttcgagactca

SEQ ID NO: 124828 - DNA, 300 bp, Zea mays
  Clone ID: MRT4577_45319C.1
ggaagctaaatgaatgtttggacttcatttcttccaaacaactacatcgtggtggaattgattcaccttcaaggcgctctggggctcagtctgatgacattgtaattaaggcaacaggtggtggagcattcaagtatgcagatgtcttcaaggaaagattgggagtcagccttgaaaaggaagatgaaatggactgtcttgtggctggagcaaactttttgcttaaggctatacgtcatgaagcttttacacacatggatggccagaagcaatatgttcagattgatcagaatgacttgt

SEQ ID NO: 124829 - DNA, 475 bp, Zea mays
  Clone ID: MRT4577_4531C.1
ttttttttttttttttgctaaactgataacacatcagcataactcgtattataatttagcgtaagcacaggtaggtacaataagccaaaaagggtccggtgcggtctgcacacctggtcggggcttcctgtagttaaatagagcccagggctctaaatactatatatatatatatatatactatatcatgttctcatttgttgaaattctaatgtctttacctcttacttatcctagcatgccacaatggttaccgcacacgctagaacgtgcctgctgtccttccaaacggctggcctccggcggctaattattgcggtgcatacccaaagttgataataacatatgaaatgaaataataattgcgtagtagtgcagcatcgccgacggcgagacgtcttcatgcatccaaaggatcgcgcgcttgcgattcgttgcagccggcttggttcctaacgctagcgctagggcttcg

SEQ ID NO: 124830 - DNA, 368 bp, Zea mays
  Clone ID: MRT4577_45320C.1
tttgttttttgtgttaacattttttgagagaccagctaacgcgtctgagtttgagtataaacaaccaatcaactatggattaaagacgaaaagctcggttatgactagaggaacggaagaaaagccaaaaggcgatagatcaaggagctctacaggaggctatctggattctattggagctcggcctggccccaccacatgtcaggaccttgaattcaggattaactttattttacccggcctgacaccgaaatgccttgagctgcatgccaacagaacaccatggtgcacttggggaggtgaacgagacccgcaaacatggttggctcttggcccccttgttcttaggacaggccttcaaggtttcc

SEQ ID NO: 124831 - DNA, 108 bp, Zea mays
  Clone ID: MRT4577_45321C.1
aagtgtattgtttatggatttgaactgataacaggaccaatgtcaaatcaaaacgcccaggaaaatttctaaaatacttaggggtgggtggttgaaaccatggcatac

SEQ ID NO: 124832 - DNA, 319 bp, Zea mays
  unsure (1)..(319): unsure at all n locations
  Clone ID: MRT4577_45322C.1
gtttctgttgccattgttgtttgcgtgttgcgctgttgtgcttggggggcgctcttggtgttcttcttgcgcctggtcctcggtgccgttccgttttttcccggccgctccctgctggtgctccagtgggctttgtcccccgtgctgtgcgtgcctgtcggcttcntcgtgctggcgcggtgcggggtgggcggcgtccccttttccagttgcccccgccttgccttgccgcgtctgtcggtccggtcgtctggggcgcgccngcggcggcgctgcctgcctgggctggcggccgcgggcgcgtggccgcgcccggccg

SEQ ID NO: 124833 - DNA, 242 bp, Zea mays
  Clone ID: MRT4577_45323C.1
cttaacgccgccttttttttattttttaccatccacagagccatgacgttgtttaaaaactcccaaaatatgaacatcaaaagtattgtacagctgccatcaagtttctcgacctatcccttccaacttaaaatcaatgtcttctctctaccacatcatagatataccaatatttatactgcaccgctcacgcagcgcacttgctccctctttccttctgcctctacgtctttttccctcac

SEQ ID NO: 124834 - DNA, 677 bp, Zea mays
  Clone ID: MRT4577_45324C.1
cattgggtacctcgaggccggccgggagcaccgtatccccaccccccgagttgagcttagctccgctcctgttccaatcacagacgtgaccacaggcgctatagctagatagagggtcgtgaaaatgccgatcattaggatcgccctgaggagccaccacgaggatgtaccacccgggggacctacaaggtggcgttcgctgagttcatctccaccctcatcttcgtcttcgccgtccagagctccgggatggccttcattcaatgactgaccggcgtgtcggaccgacaaccccggtggtgctgatcgatgtgacgtgggcgctcgcgttcacgctgttcgtgctggtgctgaagtacgcgaacatctcgggcgctacacgtgaacccggtcgagaccttcggtgccttcgagggaggaaacatcaccctgttccgatggctcctgaactgcttggcgcatctgctgagatccaccgtggagagcttcctgctccgcttctcgacgtgcgtataggtcacggacaccttcagtctgactgccgtgactcagagctatgcgctgccgctggagatcgtgatgaccttcggggtgacgtacacggagtacgccacggcggtggacccgaagaagggcagcctgggtaccatcgtccccatcggcatcggcttcatcat

SEQ ID NO: 124835 - DNA, 590 bp, Zea mays
  Clone ID: MRT4577_45325C.1
aaaaaacatttaatcacttatcatatacataacatgtggtcgtcaagaactagtagattacagtaaatggatcaaagaaggactgtccgtttgtcatgaagcggtggttgagctcgccgggcctggccgtcttctgccacatctggtcctgcagcatctcgtcggtgaggccgaacgccctgagctcgtcgggcgtgtggtgcacgaggaggctgtacctgccgccttctccagtctgcatgacgagctcgccgccgttggcgaggttctcgaggccctcgaactggcggacggtccacttgtaccagcgcatgaggaagacgcggagggtgaggccgtgggagacgagcacgatgttcatgtctccgctggtgctgcggtggcccgggggctggaagcggccgaggacgatgtcggagagcagggtctcccggaagccggtgatgcggtcgtacacgtccgccgccgactcgccgttggggaagcggtagaagaagcggccgtagcgttgccggatctccttctccacccgcatctgctcccggtcctggaagttgcctggcccatcccatgcatgcgttgggccggat

SEQ ID NO: 124836 - DNA, 291 bp, Zea mays
  unsure (1)..(291): unsure at all n locations
  Clone ID: MRT4577_45326C.1
cagatttctccctgttccacacaacatatcatcttctaaattcccgntttgtcactttttctgataaaagatggacatattaccacttttcggccccatgtatctcagtaccccatggagctgggctaagtaaataggaattggtttcacgcctgaggcaattagacactttggaagatggcataacctgtctcacctggacttaagcgtctggctctaattcacagtggctcttttctcctcactgtaatcaagttccctcccagaggggccacaagtctcatgggtggc

SEQ ID NO: 124837 - DNA, 131 bp, Zea mays
  unsure (1)..(131): unsure at all n locations
  Clone ID: MRT4577_45327C.1
cggcgaagagacctcgggagtgagntggccgctgggagatgagacaacactgcaacggggtgcgctccctcccgttccggtctccgtcgacaccggtcgcccgctgccgatccatggggttgtcgcgggct

SEQ ID NO: 124838 - DNA, 311 bp, Zea mays
  Clone ID: MRT4577_45328C.1
cgctttcgtggaggaccctgcttttttttactctctttccgttgtcttcaacaggttgagcagtttttttgaggctgccctttttgctttgcgcggtggcaaacaaaaaaattttctcggggtcagaaccaggtttggggactgcttgtttctgaccctggggtggaagggaaaaaataaccccctcccttaaacccccgatgggtagggtgaggtggatttttttttcctatcaggctcccctggctctgtaacaacttttttttttgcgcttaaacgggaagaactttttttttttaaccccccaaggg

SEQ ID NO: 124839 - DNA, 236 bp, Zea mays
  Clone ID: MRT4577_45329C.1
agcgtggtcgcggccgaggtactgccttcgttctcgaatatttgtcgtccactagttcatttttgaactagaccgcgataaataaaaaagaacggagggaatatcttgtaagaacctgaattgaaggcaggcatataattatatacaaaaaaaaaaaaaaaaaaaaaaaaaaaaaaaaaaaaaaaaaaaaaaaaaaaaaagtacctgccccggcggccgctcgcgaaacccgaaat

SEQ ID NO: 124840 - DNA, 1209 bp, Zea mays
  Clone ID: MRT4577_4532C.1
cattgggaccctcgaggccggccggggcaccggtaccgtcccctgtttatgtgcctaatgcccggagcaatggtgcggatcctcatcggaatggacgtcctggctcgcatcaccatggccgaggtggtggctatggtgggggaaacaggaggggtaatggtggaggtggggggcgtcgcgggagtgagcaccacggtggttttgatgggcaacggcgcggaggtggccgcagagatggccatggaccggttcatcagctgcgtggccatcagccaacatacattaaggctcctgttgtagcaggagcacctccaccgcctccaccatttgttagccccgctactcctcagacaccaccttatggaccacctatgggcttccatgacatgtcagcgcatgtttactatttcccggcacccacctcggaaggcattcaaggcctgccttttgtgcctcttccagcaagcccccaagctgttctaattgacccttctcgaaagaaccttctggagcagatagaatactatttcaggcgatgacaatttgtgcaaggacctttacttgcggcaacacatggatgggcaaggttgggtgccattatccctgatcgctggctttcgccaagtccagaaaattactaataatattcagtttatcttggaaacagtcatgctatctaacattgtggaagtgcagggagacaagctacggaggcgtggagcatgggagaattggttgcttccaaaactgaactattctgctgggagttcttctggttcgatgacccctgtgacatctaacattgatgctcttgcatctcagtttcgttctgttggacttgagggggcaacgtaccatccaagcatgcctgggatgtctggtgaagctctcctgacaagatcagcaacttcagttagtctaggttaccatgcatcaaccttcggtgggatacagagcaatgggagtgaacctctctttgggccgaagtctgcaagaaatctactcaggagcgataccttttgaggctatatattcaagagaagttaagtacaatggcaggccgagttttcacagtaacggcatgcacaccttatctcaggtgagatgtaaaaatagctgttaaaataaaacaaaaaaaggcaaaagcataatacaaaaaaaataggcatacacagaccaaaaaaactacaaaatgcaaaaacaaaaata

SEQ ID NO: 124841 - DNA, 268 bp, Zea mays
  Clone ID: MRT4577_45330C.1
acaggatgtttctcacttatggactctcaacacatacctagtgggtgcgatccctgaagcatgcactactgttggtgcacctaaatattgcacgccacattggattagatgagagccttaaggtgcatttagattgtgattgggtcattggacagttgatccaagttcatgatcacggttagggaatgctgaggtatttgcacatcttgaatatagaatgcttaactatattgtagctatacatgattcagccattgtagtcactact

SEQ ID NO: 124842 - DNA, 761 bp, Zea mays
  unsure (1)..(761): unsure at all n locations
  Clone ID: MRT4577_45331C.1
ttttttttttttttgggnngaanggggggtttttggggggggtnaacccgannnngntttttaggggannannaataacagggngctgntnngncaagaaagccaganncggcatctcggatttcggatctttttctngggctcgtcgncgtccccttacgattcccggaccccagctaaaacattttatcccgagcgtctttttctctgtcggcatccctttcagcccttgacctctcgacccganngctcctccctccnagcaagcttgcgacggcgtggcccattgcgttctcaacctggngaagcgccagggggggcctttanccgaggggnngcagctgggggggggggcggggttcctctttccagctttgggctttcagaagaacctccgaccgnnggggtttgggggccttcgttgctgcctgcttgcctttgttcgcggtcttgctttgccccaggcaccccccagtccggcaaaatacgannnagtaggcgcgccttcgcggtccctttggattattaaaagggcttttctttgggggccgatccccttccgtactttttttctctcgcgcatgcccttcttcctcccatggaccgccgacgacttggctccatcacagcccgccatttctttttcctttngncctcctcccggtactggctcgctcctttgcagctagcttgcggcgctctccgcaggtgcgggtgcagggaggggaggaaaggccggaggggcaagaggatcaagcgcg

SEQ ID NO: 124843 - DNA, 294 bp, Zea mays
  Clone ID: MRT4577_45332C.1
aaaaaaaaagacttgatttaaaaaaaaaaaaaaaaaaaaaaaaggaaagttataaatagaaaggcagacaagatacaacaccatcaaaacatcccccctttcattcacccccatttcctctcataactttccaattcattcccctaaatacatttcacttaccctcaattaacatcaccctaaatttacaaaacccttacttaacaaaccttaatctactctaactaaatcccctttcctccaatccccatattacccattatctccttacctatcacccttacaaccattttc

SEQ ID NO: 124844 - DNA, 172 bp, Zea mays
  Clone ID: MRT4577_45333C.1
gccgaaacatatataaatgtggggagtgaggaacaaacaaaaaggatcacacgctgataacttgttccacggaggaaccctacactggctcactagtaactacaactatctactggcacatgacagaccatagtaaggaatcacagctgctatcattccggacgcgtgggtt

SEQ ID NO: 124845 - DNA, 624 bp, Zea mays
  unsure (1)..(624): unsure at all n locations
  Clone ID: MRT4577_45334C.1
cgtaatacgaactccactttatagggncgannnattgggtaccccttcnaggggccggccgggnacactcccgcacgacagagaacatcagacaaaatggaccccgctcgcaaaggaagcagaggaagaagtgttccagaggtcaaggtcaaggacagggcctagcacgccgccgtcctgcgtacatgaccacctctagaaagctctacaaggatgttcaatcttaccgtttggtgcaccatagtcaccctcgtcagacgcgaatgaagatcaacggatgtttggtcccgacagtgccttgtcgacctcgaggagaagcggcatcagtcaagcctggggttacacacaggacgatgagagatctacacctgtgccgatagatggtaccggactcaaatgcatattacacactgaaaaatttgagtgtaacgattgcgtcgactgggtggctctggactagtagacaggccacaaggacggagggtgctggaaggcgaaaaataagcctggcttaggacgctattcatgctcggactagcattgggacggaatcgttctagcagtgggaccggaacgaaaaatgttggatgcgacgatattaccaatcaatactccggggtcctg

SEQ ID NO: 124846 - DNA, 806 bp, Zea mays
  unsure (1)..(806): unsure at all n locations
  Clone ID: MRT4577_45335C.1
gggaccctcgaggccggccaggccgggcgtccgcgacaccaaccagaccaccatgcgccatacccaacggaaactaggccactgcggctacctctcgagctcgctatcgccagcgttcatggaagggctgggaaggacccccatgccatgtggatcgtgcgcgggcagctaatcaggctcggggagtcggaggtcggcgacaattcctcaccaagaaatcagcgccgccgtagatccgccgagagctgaggccagcaacctctgtgtgcaagattctcggtaatcttcccctccgtatggtcgcagatgtctcctcttcgcgtagctgcggtccaatttatgtgggcgtgcgtgtgtgcccaacgtgcatcgctccggcgaggccccgtctctacgacctctgcaccgccgtcataggtgtcggggttggggaagagtggggcgaccgtggatcttcggttgtgcgattcagattagatgtgggcagatccgttaaacgatggggtggagtagatcaggccagcactaaatcccgggcatagatcttgaatcctacagtggctgtcttatatcgagttgagcttagatctggactgcggatgtccgatcgaacaacactgatcagacgaagtctaccggttcgcctagatctaatcagtgccctaaattctagatcgggcggncgagataaacagtacccctttagctcggccagtttgctaaagagccctgtggaaattgtgaattaacccgcagtccatccctatattaagatcgcgaaaaaaaaaaaaaaaaaaaggccccta

SEQ ID NO: 124847 - DNA, 167 bp, Zea mays
  Clone ID: MRT4577_45336C.1
caaactcctgcgggaaacaaccacactgaccatagatacacggctatgcataagggatcgggtactatcttaggttctcggaatagtcactgacagcacaatgcctattatactagccagtttcaatcattccagactccacatactagcctactcagcagataacg

SEQ ID NO: 124848 - DNA, 1494 bp, Zea mays
  Clone ID: MRT4577_45337C.1
gtgtattctactctcagcattggtgacggtgctaatgatgtgagtatgattcaagctgctcatgttgggattggcatcagtggccaagaaggaatgcaagctgttatggctagtgactttgccattgcacagtttcgttttcttactgatttgcttcttgtacatggacgatggtcttacttgagactgtgcaaggttatcacatacttcttctacaagaatctgacatttacactaactcagttctggttcacttttcaaactggtttttctggccagcggttttatgatgactggtttcagtctctatataacgttatttttactgcgctacctgtaattatagttggattgtttgataaggatgttagcgcgtcactgtcaaaaaaatacccacagctttacaaggaaggcatcaggaattcattcttcaagtggagagtgattgcagtgtggggtttctttgccttctatcagtcaatagtgttcttctacttcactgcagctgcaagtcggcatggtcagggttcatctggcaagattcttggcctatgggatgttagcaccatggcatttacttgtgtcgtggtgactgtgaatctccgccttctcatggcatgcaactctataacgaggtggcattacataagtgtggcgggcagtatagtggcctggtttatgtttattttcatatactctgcaataatgacgtcatttgacagacaggaaaatgtgtattttgtgatttatgttctgatgagcacctttttcttctatctgacaatcgtacttgttccgatcatcgccctgtttggggatttcctatatctatcgattcaaaggtggctcttcccctacgactaccaaataattcaggagcagcacaaggacgagccccacgagtacagcagggtgcagctacccgagaccagccacctaagcccacaggaagcgagaagctacatgatgtcgatgctccctcgggagtcatcaaagcacactggctttgccttcgactccccaggatacgagtcgttcttcgcctcgcagcaaggcatcggcgtgccacacaagccgtgggatgtagcccggagagcaagcatgaagcagcaacgagcaggaaaatcctaatctccgccgtgtaaagttttgtatatctggtttcttgattgcaatcgcagaccacaggaattagtataggcagccctttttcgtgtttgccagtggtccacccatatgtggttttgggatgaggcatctgcccatttagctgttaaagcatcatgtagggatacttggtagataaaccaaggtggtattgaaaatgcagttaggaaagttttttcaggcgttcaaaaaaaaaaaaaaaaaaaaaaaaaagagagttgattcctcggcccgccacccaacttaaatcatgttactattattggaggcctgtgcattgatcataaaaaaaaaaaaagaagaggagtggtatgaggagttgttgtg

SEQ ID NO: 124849 - DNA, 494 bp, Zea mays
  unsure (1)..(494): unsure at all n locations
  Clone ID: MRT4577_45338C.1
ccggcggcgaggncacgaaacagcggagggacccaatccaggcacaccaaanacanagggaaggcannnngaccagagagagagngccggggaaaagagacagancncagacaccanacacagggacaagccnngnngngagncagnangcgaacacngggcnanagnnccgggngaacccngagagaagagnanngnccnncgcccncgggagccagcaccaaagcagcaccnngcccgngagnncaaggnaaagaccaggcgaaggaagggcangagngaagaagngagcagcaanaaanncnncgacgaggccangangaaagagcnggcccaacaggcngcngananccacncgcaaangangnagncaaaaagcgagangaagngcacacgnggaagaagcaaaggcccncagcnncnncaaaccaaacangcngcagaagggacngccggagnnccagncgcaccnnaaagcnggcannggccccgac

SEQ ID NO: 124850 - DNA, 1375 bp, Zea mays
  Clone ID: MRT4577_45339C.1
ataacgttatttttactgcgctacctgtaattatagttggattgtttgataaggtaggattattcttacttgtttatggagttgtctcctgcaattgcactaagctctgagtcgtttcaggatgttagcgcgtcactgtcaaaaaaatacccacagctttacaaggaaggcatcaggaattcattcttcaagtggagagtgattgcagtgtggggtttctttgccttctatcagtcaatagtgttcttctacttcactgcagctgcaagtcggcatggtcagggttcatctcgcaagattcttggcctatgggatgttagcaccatggcatttacttgtgtcgtggtgactgtgaatctccgccttctcatggcatgcaactctataacgaggtggcattacataagtgtggcgggcagtatagtggcctggtttatgtttattttcatatactctgcaataatgacgtcatttgacagacaggaaaatgtgtattttgtgatttatgttctgatgagcacctttttcttctatctgacaatcgtacttgttccgatcatcgccctgtttggggatttcctatatctatcgtaagatacctgatttctgtggaattattacgacaagttcagcttttttgcctgaccatgtcaaccatctctgaccctgtgttctcaggatccaaaggtggctcttcccctacgactaccaaataatacaggagcaacacaaggatgagccacacgagtacagcagggtgccactaccagagaccagccacctaagcccagaggaagcgagaagctacatgatctcgatgctcccacgggagtcatcaaagcacactggctttgccttcgactccccaggatacgagtcgttcttcgcctcgcagcaaggcatcggcgtgccacacaagccgtgggatgtagcccggagagcgagcatgaaaccgcaacgagcaggaaaatcctagtcgggcgaacacctctccgctgtgtaaagtcttgtatatctggtttcttgaccacaggagtttttgtataggtagcagtactgtagcccttttttcgtgtttgtcacccatatgttgttttgggatgaaaagtaggcaacggtccgtttggctgttaaacaatcatgtagggatacttggtagataaaaccaaaggggtattggacatgcagttaggaattttagtttctggcgttcattgcgtgatgtagtcgagttgattggtcggcccgccatgcaacttaaatcatgttactattattggaggcctgtgcattgatcatatcccattttatttcaatataagaacacatcctactcctgttccttgtcaaaaaaaaaaaaaacacacccccccac

SEQ ID NO: 124851 - DNA, 830 bp, Zea mays
  unsure (1)..(830): unsure at all n locations
  Clone ID: MRT4577_4533C.1
gttatgtgaaaaaatctgttcgtcggcgtcccttcaaggcttcagcaacccttcggtagggttccggcgactccgcatggccggtcgccaccgtaacccgctgccttcttccttctcccgcggcgccggtgccggaaaccacccgcaccctcctccgccccatcaccctcatctcccgccttaccacctcgacgaattccgcgagccgccgcgcctccccccgcaccacctcgatgacttccgagacccggctcgcctgccacctggccaccccgacagcctccgcgagcatcctcctccgccgcgccaccacttcgcaggccacggcggaggggccctgccccccgcatcgcacatggccgcggcgctggaggaacgtatcggcgcggagatcgaggaggcgcacgcgctgctcggacagaaccagcgactctctgcgacgcacgtggcgctcgtgcaggaggtctccgccgtgcggcacgagcttggccacaccgctcgagccatcggcgctgcccagcaagagggagatctccgtattcgtgaggtctatgagaggttaatgaaaatggaagcagagctccgagcagtagaggagatgagagcggaacttgcacatgttcgtatggacattcaacagctgggtgcagcaagacaggaactcatgggtcagattcagggatatacacaggatttggctcgatcagcagtagagttgcagcaggtggctgcagtganaagcgagacccaagaactcaggcatggaacacagcatttaagatccagtattgagcttgagaaagaaggatatgcagagagttatgagcagg

SEQ ID NO: 124852 - DNA, 549 bp, Zea mays
  Clone ID: MRT4577_45340C.1
cctgggctttgcttcggctccccagatacgagtcgttcttcgcctcccagcaaggcgtgggcgtgccacccaagccgtggaatgtagcccgaagagcaaagcatgaagcagcaacgagcaggaaatccctaatctccgccgtgtaaagttttgtatatctggtttcttgatggcaatcgcagaccgcaggaattagtataggcagccctttttcggtgtttgccagtggttcacccatatgtggttttggcatgaggcatctgcccatttagctgttaaagcatcatgtagggatacttggtagataaaccaaggtggtattgaaaatgcagttaggaaagttttttcaggcgttcacgcttgcgtgatgcatgcttttacactgttcaagttgactgggcacatgcgatcgtgaacatatcggaggcctgtgcattgatcgtagtcgtagcctatttttttaatataagaaccttacaacatactccaacaacttttggacaatactttagagacgaggttatcgtcttatagaatgtttattagttt

SEQ ID NO: 124853 - DNA, 206 bp, Zea mays
  unsure (1)..(206): unsure at all n locations
  Clone ID: MRT4577_45341C.1
tttaataaaaaaacggtcccnctccctgtataagaacgagaggtaccccctgttctataaggggggggggggggccaggatgagcacagctactagctcatcacatcgccaacgtagtcagagatcagtggaagcagagcactccatccactagactagaccagctcatgagcgaagagtccactctctacagtcgccgcaggcct

SEQ ID NO: 124854 - DNA, 543 bp, Zea mays
  unsure (1)..(543): unsure at all n locations
  Clone ID: MRT4577_45342C.1
ggntgttagcgcgtcactgtcaaaaaatacccacagtctttacaagggaaggaatcaggaattcattcttcaagtggagagtgattgcagtgtggggtttctttgctttctatcagtcaatagtgttcttctacttcactgcagctgcaagtcagcatggtcacggttcatctggcaagattcttggcctatgggatgttagcactatggcctttacttgtgtcgtggtaactgtgaatctccgccttctcatggcatgcaactctataacgaggtggcattacatcagtgtggctggcagtatagtggcctggtttatgtttattttcatatactctgcaataatgacgtcgtttgacagacaggtgaacttgtttactgatctgattcgaataatctactattcctgtggtggcttccttccttcctcatgatttattgcttttgcaggaaaatgagtattttgtgatttatgttctgatgagcacctttttcttctatatgacaatcttgcttgttccgatcattgccctgtatggtgat

SEQ ID NO: 124855 - DNA, 946 bp, Zea mays
  unsure (1)..(946): unsure at all n locations
  Clone ID: MRT4577_45343C.1
cattgggtacctcgaggccggccggggactctcggcaacggatatctcggctctcgcatcgatgaagaacgtagcaaaatgcgatacctggtgtgaattgcagaatcccgcgaaccatcgagtttttgaacgcaagttgcgcccgaagccttctggcggagggcacgtctgcctgggcgtcacgcaagggttcagaattcagatcagccgtgacccgctatttcgaattcgaaaaggccaccaggtgtttccttttaactccgccgccgtcgccgccgctgccgcatcttcgccagttttccccaagccacgaccatgccctccccctcccgctcgccaacgacgcctccggtcgcctcggagtggagctgcgtgcggtgcacgttgctcaaccctgaccactccgattcctgcgtggcgtgcgaggcctcgcgcccagtggaggttgacatcgacagccccgtcgtcgtgggcgccgccctcgcgttagcctcgcccaagcggagccggaggaagaatgaacgcagtgcctctcctccaccccagcggtttgggaggaagagggagcacgatgcatcgccggaggtggtcgaactctgcgatattgcgggaaaggggcccgccaccaagaaaggaaatcttgagatttgtttggataagaagaccttcaaaatcatgacatacaatgtctggttccgggaggatttggaattgagaagtaggatggatgctctcggggatcttataaagcagcactgcccagacttcatatgcttccaggaggttacaccatacatatatatgcttatgcaaaaatctnactggtggcaacaatacancatgcttgttgtcacatgagaatgctattcagatgccgtattactgcatgcagttgagcaaatgccgacgaaccatctgactgcatccattttcgattcacatggga

SEQ ID NO: 124856 - DNA, 320 bp, Zea mays
  Clone ID: MRT4577_45344C.1
aacaagagtactcacactagttggatgtatatggccccaaaggacgatcatgatggggatcttcacaaggaggaggaggtggtccaaggagatgtgcgagtcgtcgtccatcaggagacgtctgccgactaggaggccgagtcggcactggtgcgcaagatctccggcctggccgcctacatcgacatgctaccgtcattgagcccgtctacggaggttaactcgctcttcacctacctcttcacgggctgcataccgtgcagtaccgtggacgtatagcgtctgggcccggagctgcagcacatgcgcgcgggcctcat

SEQ ID NO: 124857 - DNA, 445 bp, Zea mays
  Clone ID: MRT4577_45345C.1
cgaggtacagggagaacgggtgaatgtctgacgttacgtattataaagtgatgtgcaatgatgactacaaactaaaaatatcagtggatgaccatagcaggaagcatcaaaggtgtgacagattgctacccatttgttcccttggttcgtggcacaatgcaaatgcggcatcagtacaacagcgtacgcaatccttcgcacgcgcgcggtgcagcatggttttacgttttacacgctgcctttagtgaaaactgtatggagctgtcagtacttgtacaggtagtgaagaaccaaggcatgaagtcaaaacctgcatgcacagctaccagaaacagaagcttttcggcactttgagcaaccaaggtatctgtgcccaggtgaaactgtgaggagaccttggatcaaggacggtttgtctgtttagcaattacacatattatggatg

SEQ ID NO: 124858 - DNA, 358 bp, Zea mays
  unsure (1)..(358): unsure at all n locations
  Clone ID: MRT4577_45346C.1
gcggtcttgttcctgatctccccggggaggggggcgtgggctgctcctcttgctcctacactgttggtgtgtcctccccgggagggctgcttgaggctcacacacggctgggtccggcggtggcggcgtgtctgcgccggtgagggcgggtgtgtcgccttgggctgtgccgacgtgggggggggggggncttttgcactggcgcgggcggtggttggtggggcggttccggtgtgcgccgggtgcgccttctgggggggcccttacggggtgggcgtgtggggggccgggctggtgtggcggtgggtgggggcctggcgggtcgggggtgggggtggggggtgtttggcggtgcgcg

SEQ ID NO: 124859 - DNA, 644 bp, Zea mays
  unsure (1)..(644): unsure at all n locations
  Clone ID: MRT4577_45347C.1
cactgctcatacgaagtttcttctcgtgcttcactaagtgatgcggcaagcagattctttttgttgtactcatcagagattcttggtttcatggtggccataatgttttttggaattatgcgacagacttcagcatgggaatgtgattcttctatgccatccattttgtcagccatagagtctaatcttggactcccaaaggcattcatgtttctttgcttcatgccaatacttgtattttgtgcctttttcattttcacggcggagcaaaaaccaccatttgggaccttcttattggttactctgatctgctacatagttgctaatggtttcacaattttgttgatactaagttcgaaattgcttctgtatgtggttgccattctacatgtctttactaaaagacgatggcaatcatgggggaatggtgttcaatcagcatttcttggtcaattcctcagtttctcctcgtttcagtcagtgaagattgtgcagatgcttaggaacaatccaaatataattgtagcagttgctacattaccactcgtctgtttggttcatccagccattggccttgntttttagcagcttcttttcgtagcatcactcagaaaaaggacctgtacaagtccaagatgggcgat

SEQ ID NO: 124860 - DNA, 3891 bp, Zea mays
  Clone ID: MRT4577_45348C.1
aattcggcacgaggtcgcaactcccctccaaagccagcacgagagcaaggtcccctgatcgccgccgcttccctcgccccaccgccccagcaccacctgctgacctgcacatctccaccacccgtcctcctctgcgggttctccgcaggacgcgacccttggccgcggcattcgcccgaggaatcgccgctcccgcgaggcctccgtctctcgccgtgcccggatcccccgagctgccttcagggtgcaagatctcttccgtgatccggagccttcaccgtttcctcctctctgatcttagctcgatatcggagcgactggcccgagcttctcttaccccatgggcggcggcggcgggttccggggcagctgcagggttggtgccgtgctgcttttctccgcctgggtcgctcttgcagctctcagccgcttgctgcgtccggtgcccaatggctgcgtcatgacctacatgtacccgacctacattcccatcgccgccacgccccggaacatctcctcagatagatatggcttgttcctgtaccatgagggctggaagcagatcgacttcgccaagcacattaggggactcaggggcgtgcccgtgctctttattcccggcaacggaggaagttacaagcaggttcggtcattggctgcagaatcttttcgagcttatcagaatggtccacttgagcccaccttttatcaggaagcatctagtagtttaccaggagatggactcaacaatttttctattccttcacggtatggccgcatgttggactggtttgctgttgaccttgaaggagagcactctgctatggatggtcagatacttgaggagcatactgaatatgttgtctacgcgattcataggatccttgaccaatacaaagaatcacatttggagagatcaaagggtggtgctcaatcctctcctgacctgccatccagtgttatacttgttggccattcgatgggtggttttgtggctcgagcagctgtagtccacccaaacctgaggaaatcagcggtggaaactatactgacactttccagcccacaccagtaccctcccatcgcacttcagccatccttgggtcattttttctcccatgtcaatgaagaatggagaaagggatacaagactggtgtatcacatgcaatcagttcaaaattatctaatgtagttgttgtctctgtatcaggtggcattcatgattatcagattaggtcaaggttggcatcattggatggaattgtgccttctactcacggctttatggtaggaagctccagtatgaagaatgtttggttatccatggaacatcaatctatcctatggtgtaatcaattagctgtacaggttgcacacactcttcttagcataatagatcctgttgacaggcagccattttcaagcacacaaaaaagagtttttgtgttcacaaaaatgctccaaagtgcagttcctcagtctctgagttcaatgactcatgttcctgcttctctgtcacgaaatttacctgccaatgagaatcaggatgctggcgaactacacaaaaaagattcactttcttgcccatcatccactgaatggactagtgatggccttgaaaaggacctgtatattcaatcaaattctgttactgttttagccatggatggcaggagaagatggttagatattaaaaagctgggatcaaatggcagaggacactttgtttttgtaacaaatcttgccccttgttctggagtaaggattcacttgtggccagaaaaacatcattcgcctgtgcaaaatgaattacctgccagtaaaaagatagtggaagttacatcaaagatggtccaaattcctgcaggacctgctccaaaacaggttgagcctggcagtcaaactgagcaaccacctccttctgcatttcttctactgagtccaggagaaatgagtggtttcagattcatgactatatcagtagcacctcgaccgacaatttcaggtaggcctcccccagcagcctctatggcagtggggcagttcttcagtcctgaggaaggggcaagttcattttctattggtacaataatccgctccagctttgctcccaaagaaatatttctgttggaggatcacccattggctctaaacttgtcattttctgcaagccttggccttctaccagtaactttatcactgaaaactgccggatgtggaataaaaaatcctggtgatcaaatggaagctgagagaaataacctttgtaaattgcggtgctttccgcctgttgccttggcatgggattctgtatctggcctgcacatcattccaaatatatactcagagactgtagtggttgattcatcacctgccttttgggattcacctgaggggactgacaaaactacagtactgattctggctgatccacactgctcatacgaagtcacttctcgtgcttcactaagtgatgcggcaagcagattctttttgttgtactcatcagagattcttggtttcatggtggccataatgttttttggaattatgcgacagacttcagcatgggaatgtgattcttctatgccatccattttgtcagccatagagtctaatcttggactcccaaaggcattcatgtttctttgcttcatgccaatacttgtattttgtgcctttttcattttcacggcggagcaaaaaccaccatttgggaccttcttattggttactctgatctgctacatagttgctaatggtttcacaattttgttgatactaagttcgaaattgcttctgtatgtggttgccattctacatgtctttactaaaagacgatggcaatcatgggggaatggtgttcaatcagcatttcttggtcaattcctcagtttctcctcgtttcagtcagtgaagattgtgcagatgcttaggaacaatccaaatataattgtagcagttgctacattaccactcgtctgtttggttcatccagccattggccttggtctgctacttctctctcatgctttccatgctcattcaaatctatgcagttttttagcagcttcttttcgtagcatcactcagaaaaaggacctgtacaagtccaagatgggcgatggttcagttctgctatccaaaagtaaatccgatgggctgcagcaacttctgccaatggatgatagcccaacagcttcaaaaagttttaccgacagccaactagaactgtttgattatcggcatggcgtcatgatcttgcatcttctaagcacactcatgtttgtgccttcacttgttgcctggctacagagaattggtatgggacaaaattttccctggttcattgattctgctatttgcgttggtgttatactgcatggactttttggatcccaaccaaatgtcagctgctgcatatttttcaagttacctggcaggagaggccgtgaaattggtctgagtttcctctacctcgtgggtggctattattcctttgtcagctccatggcgttggcaccttatagggccttgtatgccatggcgaccattggttatatatgtttcatttccagaattctcgagagaagaaatatggtaaggggtgacattaactctaggaggactcggaagcactcacacagacactgacacaccacagaaagtgtgatttctttaaaattatttgtaagagatagagaatagggttgaggaacctttcctccaacctaagttatctccttttttgtttttttccaaatcttgcttatgtgcatgtgattgtgtacggccatggttttgaaagttgttatcggatatggttatcctcggtgtgtggggtcttcataaattgcatcaagaatagcaaatttctaggtgttgagagt

SEQ ID NO: 124861 - DNA, 170 bp, Zea mays
  Clone ID: MRT4577_45349C.1
gttagttctatctccagtaggcctaatgcttgaataagcaagatgtctaatcaatgaattattttcatgctcagaatttcaggtttttgtactccagcataacttggtcttatttcttactgtgatgaacgcttaacagcaatgtggtttaaggttttgttttaaatggg

SEQ ID NO: 124862 - DNA, 498 bp, Zea mays
  Clone ID: MRT4577_4534C.1
gccttaggaacgaggatcaagtccaagctacaaagccaaagaacaaagggggggccgggaaagggagatgggccgagccgagagggctacgggaacaagcccccgggggaggaaggggggacaggaacgccttgggagaagggcgtgggagacttacctgggagacagagaggggggacagagcgcaggggagaagcaacggggaggagccggggggaaaacaaaagggtagtacaggggggtaataggacaggggtgcagggcatgggactgagaccttggttcgaggcaaaatcacgaccccaaagtacgctgaaaaagaggggcaaacttgggttcaaaaagccagaaaaattattcggctaaaccaaggcgttccagacgtgggtagaaacgaggggtagaacaggaatattgccgcgtggtccaaggaccagacctaacggccggggtcgaggcccggggaggaaccctggggaggaaacgggggggggaaac

SEQ ID NO: 124863 - DNA, 405 bp, Zea mays
  Clone ID: MRT4577_45350C.1
aacacgccctatacaagctcccgaacgcaccacaagctacgtcctccctttcaggtacaagctttttttttataatctgtaaatgtaagttcaaaattctggttggccacaaacaacatccaaaaaaccttattattgaattacaactaaaaatcaacctaaaaaaaggcaccaccaaagaagggttgttggaaaaaagccgctgggtttgtcaaagcaagttggacaaagggcaacaataggtgtaattgaaaaaaggttgcggggttaaccccaaaccgcttgtaaaaaggcaacaactgttgctgtgtcaaaaaagaaacacgacttgctgcaactagctccctaaatggcaataaaaattgctgctgcaaaaaaacagcggggttcaatgcggccaaatgg

SEQ ID NO: 124864 - DNA, 958 bp, Zea mays
  Clone ID: MRT4577_45351C.1
tttccgttttccagtgcaaccttgtggctcggttctcccgggggccggacagaaacaagcttcttctccaagacatcctctctcaagtttctgatcgagcagcaccagcattgacgtcgtccagccagtcacaacgcaagacaataaagctgcttattcacctcgtctcaaaacacctgcgagataagaggtacttcatcattattgacgatatatgggacacatcagattgggagaagatcaaggatgcatttcctaacaataatcttgatagcagaatattgatcacaacacgcgttataagtttgtcatgggtatgctgctttgattctgatgatgggcttgtgcatcagatgaagcctttgaatcggacagactcggaaaggctgcttctggcaagcgcctttggtccttcgtctgtggatgattatgattgccagcagccattgtgtgatgaaatactgatcagatgtgaaggtgtaccattgttcgtaatcggtatggcggacttgtttaaagaacaattattgcagcagaaggacgccgaggatcagaggacccttgcagtttacagcagcgagctggagcaaggcccccaacgactaccgaaatgtatcgaacgagcattgtcccttgcttatgatgaccttccttatgagtccaagctacaatctttatgcatgaccatgtttccttctggttacaagttcgacaatgaccgtttcttcttcttcagatggaacgaagacaatgaagtggcgatgcgctttactattccgcatctggcggacaggaatgtcatcacgcgtgttgctggtgctgactgtaggcactgtccggatgaagaagagggctgccactgtcagtggcacgtcaatcattttatgcagcagttccttgcctccaaatctgcagagatgggtttctatttcaccgccagtagcctcaagaagtactt

SEQ ID NO: 124865 - DNA, 272 bp, Zea mays
  unsure (1)..(272): unsure at all n locations
  Clone ID: MRT4577_45352C.1
tagaggagattgtggagaancggcttgagcggcgtcgcgttgtcaaagcgacggggggggggggngatgcaaatctttgtgaagacggtgacggtgaagaccatcactttggaggtggagtcctcggacaccattcacaatgtgaaggccaagatccaggacaaggagggcatgcccccggaccagcaacggctaatgttccccggctggggggggggggacgatctcaaagtacccgaatacaacagtnataaagaggccaaagtttacct

SEQ ID NO: 124866 - DNA, 280 bp, Zea mays
  Clone ID: MRT4577_45353C.1
acacaaaagctgggttttttccaattctaactgtattaaacaccattttcaggccatgcttgtgatggccatgtgctgggacgtggaatttaggtttgaagaccacatcaaatcactccaatccggacaaaactggggccactacttatgcttgcaaacaatttatcctttccatcaaaaggtactcccatatccccattgatttatcagccatccttaacatggggcgcttacttattctcgagcaatagatagtgccgccttattcttacagcaattc

SEQ ID NO: 124867 - DNA, 640 bp, Zea mays
  Clone ID: MRT4577_45354C.1
gctggtacgcctgcaggtaccggtccggaattcccgggtcgacccacgcgtccgtatggactaccgctatcgctgcagagtcaccctcgtgcgcgtagccactgcccgccttgaacaccacctgcaatgcttgccagaggtgccgctcatggctgacacactcctttgtcggtaaagagcctgttttacacctgacctcatgggtgcgggttccctgctgttcctgattatctattatctcaatccatctgtgcatgatagagtttcctgctttgatatgttattgggcctgtgtgactaccttgttcccatatctaacaccaagaattcttgcctctaatatgacgtaccactgcgcaacaacgatgattgcatgaaatctgcagtactctctgttaaactcgacgcagagctgagggctggaggaaacgcctatcttacctagaggaagaaaagcgctcaaaagtactgcatgaccacgagcatttctcttgctagaggctgattgggtgctacaacacgttcacaaactgcttttcacctacctgactgagacatctgcgctgctgcttcctggactaaaccaacatactatcattgtgaagtacattggaatgggcaaacgggatatacacatact

SEQ ID NO: 124868 - DNA, 221 bp, Zea mays
  Clone ID: MRT4577_45355C.1
cgacccacccgtgcgcccacgcatacgcgtacgcctgcactcataacttacacctttatttatctaactatcagcaactcactggggaggggatgcaagcaccaccacaaaattctaacgcctctatcaatataaataactcaccatgacatattgatctcgtataaaaatgaccatttcgtatattaccaaaagacttcccagaaaattcataagagaag

SEQ ID NO: 124869 - DNA, 502 bp, Zea mays
  Clone ID: MRT4577_45356C.1
tattttgtgactattgagttctatatctacaagtatttctgatctcaattgtgatcccttttaaaatgttgattaattcaattcttttggtttaaatatctcgtcaaaatattttacttgctgagatgtttcatctcactcttgcattactcaatgcaggtacttaattcatgttgggaatgagggaagtagcagcacgtccaccttcactctcataataacgctgcccaggcacaaccatgatttaattagaaacttcttgtcaaggatgttcgtttttaactagtcgtgcacactagttaattcagtttatgtcgttatggttatcttcccattgctagcagattattaatgtctagtatgttttcttatcatgatatctgtttatactttaataattcttagtttgttttttgtcatgatacatgtttatacactgttgccccctcctttatgctattttgcaaagaagatgttgtcgaaattttatatatggatgtct

SEQ ID NO: 124870 - DNA, 334 bp, Zea mays
  Clone ID: MRT4577_45357C.1
gcggccgcgtcgaccatactagtcacccgtggccatgaatccatgatgctacagcctactacacagtaccagtacaagatatttctgattacagcatccagccccaacgcttcttcacacacacacacccaccccgtcatctgtctttcgtaccggccaccagagccctctgcgcgcgcacggctacccggacggcggcgcgtctgcgggtgccggagccacggcagctccggcacgccgcgcgaccggatccagcgcacgtcctgcacccgacgtcgccgtccgaccaccgggcgcaggggcacgcgaccttccctgtgccgtcgacgcggcc

SEQ ID NO: 124871 - DNA, 437 bp, Zea mays
  Clone ID: MRT4577_45358C.1
tggctttggacctttgggctgatttatgtgcttgtctttttagttttgagactcgtctaataacggtgatgtggtgttatacttcgtcttgtgttgtcgttcctgcgctttcctctgtgtctgaggtcgcggagggttctgaagaggggttttgtgggtgttggtcgtcggcttcgtcggatgattcggttgcgtggctgctgtatctggttcctcctggtctgtcttaggtgtgtgggcctgactctgaaccttgttctgttgatgattttaagtctctgtcgtattgtcatggttagcattctcatgacggttctgcgtcgcctgtttgtcttattttatgccccggcggactagcggattagaatgtagcttccgaacccaccgacgtcgggtccgacacgacttcggtggtagaacttctcgttctcgactcc

SEQ ID NO: 124872 - DNA, 282 bp, Zea mays
  Clone ID: MRT4577_45359C.1
cgcctgccagccctcaacccggagccacaggttccttcgccatgccgctgccttgccgaatgggagacgactgtagatgctcctgcccgccggtggctgtcccctccaccgtgatagtagtatgcgtgtggcgagccgccaggagccgtaggagtttggccgcctcgccaacctgtgcttcaaattgtgcaccaagtgaaggaagaaggcactctggtgtttgatctcgatcggactctgtacgtcgcgacgttcgctgccaggatcgggtggattccactg

SEQ ID NO: 124873 - DNA, 319 bp, Zea mays
  Clone ID: MRT4577_4535C.1
tttcctctgacgcttgggcagacgcgtggggcggggtaaaagtgtgtttcccactggtaccaactagggatggctatttcatgaggctcttcaagaggaactcggatggaacatgggtcgttcgggtcgcttctgtggacaccagacacgtcctacagggccggcaacagacgtcggaatacgggatccaagaaatgccacatggctacttacaggagacctgccgggaacacgactggggggatgacaggggggcaaacgaaatatacaaactgctggtggactcagggctagccttgcttgcacgaccacgggcagg

SEQ ID NO: 124874 - DNA, 359 bp, Zea mays
  Clone ID: MRT4577_45360C.1
cggccgcgtgggcgcacaactaggcctaacttgaggctgaacctggtgggtaccatgaggggctgccttactacagtgttttcttcgccaagctgaacagacttacattatttgcaaccatttgatgaccacgatggatgtgctctttacatttaaggcgcttgacttgagggtgcctttgctggtcatgagtcaggtcagctgctcgtggatacatcatgagaggaatagatctactatgacatacccttgctatcataaaagtgttacatagccaaactgataaaaactacacctctgaatattgactaagatgtggaaaactaccaaaatgactatgcttaagactgatggtgggc

SEQ ID NO: 124875 - DNA, 460 bp, Zea mays
  unsure (1)..(460): unsure at all n locations
  Clone ID: MRT4577_45361C.1
aaggaaaaccagnncaaacaaaaagcaaaggcaaccccagaagcaggagcggagaaacaaagcgggcggggcgggccngcagccggcagcaccgggacgacagcggaggaaaccgagaaagaggggggcacgagaaangacaccaaaaaggggggagaaaacncggccggaggagaggcaccccgncccacgacaacgaagagaacacggcaaggaccaacccagcagcaagacaagcacacgggannaaggcancccgcaagggggggggccnagggaaagagaggagaggaacaaannggacgacgggagaagggccaggcagcagcaaggccgggccacaganggggccgccgccgacnaggcaccacngggcgggccaggcagagaagcccgacaggaaggccncaggcaaccacgggcancgggaacaggaggcagcngcagggaccgggagcca

SEQ ID NO: 124876 - DNA, 378 bp, Zea mays
  unsure (1)..(378): unsure at all n locations
  Clone ID: MRT4577_45362C.1
gaatgaatgaatgaatgaaatgtgccgtattgttgtttgtttgtttgtttgtttgtttgcagttccctctggtgtcccggtgcgggcggatacgcaagatgttggcggactccaactccagctccaacagcaaggacgcagacggccaccagaagctggagctggcgaacgtgccggggggagcctacgcgttcgagctggccgccaagttctgctacggcacaaacttcgagataaccgcggcgaacgtggcgcanctgcggtgcgtggcggagtacctggagatgacggaggaccagcacgcggacaacctcgtgtcccgggcggaggcgtacctggccgaggtggcgctgcggagcctggacggtgcgctggagg

SEQ ID NO: 124877 - DNA, 390 bp, Zea mays
  Clone ID: MRT4577_45363C.1
gactacaaagtgtgctactttattcacatttactaataattacggagacacagctgaatacaccatgcatgacgaataaacctgacttaaagactgggcacttaggaaaaccgatcacccggcaagaatcccccatgataacgaagatctaactatccccggtggcgtaattaaggataacctcttccgcctctatgcaatggaacgcttatacgacctcctccaccttgctctcaacgaggacgacatcgatcctgaggacctcggacatccttctgaccggcccagaccgcatcaacgttcacacctaggtggacgatgcggccaatccctctgcctccccggcgggggggaacctctccggaatcaacactgatgagaggaccctcg

SEQ ID NO: 124878 - DNA, 352 bp, Zea mays
  Clone ID: MRT4577_45364C.1
tgaaatttgatcgctgatgatttgatctaactaactgggaaatgacaaaaacatattgggactaaggaaggtgtgtgtaatagggagatgaatgcattatgtaccaatgacaacactgcataggattaataaattgtataaattagactatttatataggaggattacgtgatgaagaaagggggagagaggacatcttcagatgaagcagctctaccgcttctggaggtgggggtgttgatacagacaattgtgcatccttgatgccagctccatttagatggataatttctttcttcacggcgctcgcatcaatgaagctctctcgccaggaaatagatccccagctaca

SEQ ID NO: 124879 - DNA, 359 bp, Zea mays
  Clone ID: MRT4577_45365C.1
ggtacatattattgtacaatccagggcgcgagggaatgaaatgaaggggtgggcaactcttggttgaaagacaaatcacagaaccaatccaagcgctgtcaaggacagatgaaaagctagtgagagaaggggtatgccatcaaggcttgcccctggccctgttcgacgcctataaaaaggtatctgacgtgcttcccagtcccccgcgccgcgcggctctggactccaccaaccaagcaagcataccaacttacaaaggggagacaacccgcgaagcgcttacccatctaccacaacagaaactgtgtacgatcttgtaaattgcctgagagttaccaacggcgcaaaggtttttactc

SEQ ID NO: 124880 - DNA, 294 bp, Zea mays
  Clone ID: MRT4577_45366C.1
accgtagccatcatgaatgacacggtaaccatccggaccaggaagttcatgaccaaccgtctgcttcagaggaaacagatggtcattgatgtccttcatcctgggaaggccacagtaccaaagacagacattcgggaaaagctggccaagatgtacaaaaccacaccagatgtcatctttgtatttggattcagaacccactttggtggaggcaagacaactggctttggcatgatctatgattctttcgattatgacaagaagaatgagcctaaacacagacttgcgagacat

SEQ ID NO: 124881 - DNA, 627 bp, Zea mays
  Clone ID: MRT4577_45367C.1
catatgaacattgattttatagccttagatcagaattcatattatgtttgtttgatactccgtctatggagccagacttattgcattcaagaacctatatgaatgttacaaacttgcacgatgaaacataacaaaaaacaaactccaaaattaccattctgtttcatttcgagattttcgcagctaattctctaacaagcttagctgcaaccattgctgtcatgccgtcaacagtatcacgctgcgggttgaactcgacaacgtcagccccgacaacatctgcctgaaggttgtgtaagatgttaaggacgtcacggaaagagagacctcctggttcgatatgcgacactccaggtgcaaatgccggatcgagacagtcaacgtctatcgagatgtatacccccttcactccttcccctaatttcagattttccaacattgggcgatctttcgagaaggttcgcatctcatactgttctactccaaacctcttgccttgttcccgtccttcctggtttatcgatctgatcccaacctgtaaaagcctacgcgcatagccaccttccatgatacgagcaaaagaagatgcatgagagtacttatttccttcaaaacagtcatatatat

SEQ ID NO: 124882 - DNA, 262 bp, Zea mays
  Clone ID: MRT4577_45368C.1
aaatccaaacttctttaattgggggtaaatatacaggcgggcgtgggattagtccggggacccaggacacccctgtgacacgtaaccagattattctccactctttaggtctcctttacaagtctttttgaagccacttccttacttacgcaaaggctggtaccctttatctcttacagagcacactgtttagaacccttgatggggtcttaaccactgggagcccaggacggcccctgctggttacttttcaccttaagat

SEQ ID NO: 124883 - DNA, 266 bp, Zea mays
  Clone ID: MRT4577_45369C.1
cccgatccgggtaccacgccacctcgcctcgccccatttcccgcaccccgcgcgccttcaccaccctcgcgtgtgccaccgtcgacaccgctcgtgccgcacgcggctccgtcgcctacacctcgcgcggctccgtcgaccccgcctacacctcacgtggccctgtcgaccccacctgtgcctcgcgtggccccgtcgaccccgcctacgccacgcgcggccccggcgactccggccccgtccacgagcggggctcgcttcgttga

SEQ ID NO: 124884 - DNA, 255 bp, Zea mays
  Clone ID: MRT4577_4536C.1
ggccgggagactaccgttgacatctatcgaccagagcagagatagagttgctcgtatcagtcgcatcccgagggcgtcgagtgcacgtagggtataagacggctgttacggggatggagatgaataagagctcaggcggggacctggtcagctgctctgacacctaggagctggtcgctcatgagtctgctatgtcgcgcagcataagctcgtccgaactaggactgactcttaatctctgcacgctgtgcttcc

SEQ ID NO: 124885 - DNA, 186 bp, Zea mays
  Clone ID: MRT4577_45370C.1
ggaatactagcgtttgggtgcttgctacgtgattttattttggtttttttattcaaacttgggaaatatccggggtaaaatttgccttctgggcctgggacttacatagaagtctttttctgggtggtcaggctaaaggaaccatatggataatcccttcccggaccagggggtcaggccgggaat

SEQ ID NO: 124886 - DNA, 223 bp, Zea mays
  Clone ID: MRT4577_45371C.1
tatacttccttgccaactcgtacaactgggaaggatccttttatacgggcgggaataagaacacccgaaaggaaagatctctggttgcttattcatgtatccttcttcgacattaacgatttagtacactagcttatgatctgttacgaggaacaatagcatacaactgttttctggttacttgcttagatattaaaccttgaaacagaatcattgtgcatta

SEQ ID NO: 124887 - DNA, 1762 bp, Zea mays
  unsure (1)..(1762): unsure at all n locations
  Clone ID: MRT4577_45372C.1
ccacgcnnnnnnnnnnnnnnnnnnnnnnnnnnnngtactgccgtcnnnnnnnnnnnnnnnnnnnnnnnnnnnnnnnnnntgatcagcccatcgaggcccgcgctgccgctcctctcatccgcctccgcaggcggcttccctcacgcctctcgcgctccctgcagnnnnnnnnnnnnnnnnnnnnnnnnnnccgtgcgggaatgctctcgagctgatgctgctggagcagctccattatcaaagacactgttagacctcaaggattcctgctggagannnnnaaggccacatacaatccgaggaactgctttaggatccatagcattggttgcgagagccttgatagagaattcccatctgataaactggtggttgatattcaaagcattctatggacttggggcattgatatttggcaatggttacatagttgggattaatcagatctatgatgtnnnnnnnnnnnnnnnnnnnnnnnnnnnnnnnnnnnnnnnnnnnnnnnnnnnnnnnnnnnnnnnnnnnnnnnnnnnnnnnnnnnnnnnnnnnnnnnnnnnnnnnnnnnnnnnnnnnnnnnnnnnnnnnnnnnnnnnnnnnnnnnnnnnnnnnnnnnnnnnnnnnnnnngcactatatattctgttcctccatttagactgaagagatatccggttgctgcttttcttatcattgcaacggttcgtggtttccttctcaactttggcgtgtactatgctactagggctgcactaggtcttacattccaatggagctcccctgttgctttcattacatgcttcgtgacactatttgctttggtcattgctataaccaaagatctccctgatgttgaaggagatcgcaagtatcaaatatcaactttggcaacaaagcttggtgtcagaaatattgcattccttggatctggtttattattagcaaactatattgctgctattgctgtagcttttaccatgcctcaggctttcaggtgcactgtaatggttcctgtgcatgctgtccttgctggtggtttaattttccagacatgggttctggagcaagcgaagtacagaaaggatgctatttcgcagtactatcggttcatctggaatctcttctatgctgaatatatcttcttcccgttaatatagagagatcttgtagttcatcttgatcttgggctacagcctaattcatggtgaaaagagggagaagttggcaaagtgaggtctgtcgtgcatattttcaacggaaacaatggagtagcaatattgctatgctagggttctgaagttgtaggagcttttctaagcttttacgatgttgaaggcgttgttggagctgtggaagctgttttccttttttttccttttgtatcaacagtgtcgcgttctgtacggtcttacttggaagtgctttgacctttgagcacatgggttgaagcttgagatctggtcccgaacaggtggcggtggaacggccaagacaagcttgtttcatgccactcgaggtcgaggctaaaccactacggcgtgctcttccatgaaacgcagaaaactagggaaatgactatatatatggtgcaatacgttgtatattttctgagtttcagctcgtatatatagtaggaacctcaacttttaccccatcgattggaagactgaaacttcttgcatgcgtatgtatgcctgtgggtatgtnnnnnccttggcccgcacaaagctacatgttacagaactttcagctnnnnnnnnnnnnnnnnng

SEQ ID NO: 124888 - DNA, 2230 bp, Zea mays
  Clone ID: MRT4577_45373C.1
tacaagactctacagtgactcgtattagtttcgctgtcttcattggcgccctcgaggccccccgcggaccgcaaccccgtcccaacccccactacggccttccccccatggctcccctggcctcccttcctctcccgcccagtactgccgtcaccgctcgcttcctcgccgcccccgccatccgcgtgatcagcccatcgcggcccgcgctgccgctcctctcatccgcctccgcaggcggcttccctcacgcctctcgcgctccctgcagtgccgcccgcgagcaccgccgcggcaccgtgcgggaatgctctcgagctgatgctgctggagcagctccattatcaaagacactgttagacctcaaggattcctgctggagatttttaaggccacatacaatccgaggaactgctttaggatccatagcattggttgcgagagccttgatagagaattcccatctgataaactggtggttgatattcaaagcattctatggacttggggcattgatatttggcaatggttacatagttgggattaatcagatctatgatgttgctattgacaaggtaaacaagccatatttacccattgctgctggtgatctctcaattcagtcagcatggttgttggtgatattatttgcagctgcaggtttttcaattgttatatcaaactttggacctttcattacctctctatactgccttggcctatttcttggcactatatattctgttcctccattcagactgaagagatatccggttgctgcttttcttatcattgcaacggttcgtggtttccttctcaactttggcgtgtactatgctactagggctgcactaggtcttacattccaatggagctcccctgttgctttcattacatgcttcgtgacactatttgctttggtcattgctataaccaaagatctccctgatgttgaaggagatcgcaagtatcaaatatcaactttggcaacaaagcttggtgtcagaaatattgcattccttggatctggtttattattagcaaactatattgctgctattgctgtagcttttaccatgcctcaggctttcaggtgcactgtaatggttcctgtgcatgctgtccttgctggtggtttaattttccagacatgggttctggagcaagcgaagaacagaaaggatgctatttcgcagtactatcggttcatctggaatctcttctatgctgaatatatcttcttcccgttaatatagagaggtgagtttcctgattagcattcagcatccatgaccctttgcttctgacatttgtctgcacaaaaaaatgtcagatcttgtagttcatcttgatcttgggctacagcctaattcatggtgaaaagagggagaagttggcaaagtgaggtctgtcgtgcatattttcaacggaaacaatggagtagcaatattgctatgctagggttctgaagttgtaggagcttttctaagcttttacgatgttgaaggcgttgttggagctgtggaagctgttttccttttttttccttttgtatcaacagtgtcgcgttctgtacggtcttacttggaagtgctttgacctttgagcacatgggttgaagcttgagatctggtcccgaacaggtggcggtggaacggccaagacaagcttgtttcatgccactcgaggtcgaggctaaaccactacggcgtgctcttccatgaaacgcagaaaactagggaaatgactatatatatggtgcaatacgttgtatattttctgagtttcagctcgtatatatagtaggaacctcaacttttaccccatcgattggaagactgaaacttcttgcatgcgtatgtatgcctgtgggtatgtaaaaaccttggcccgcacaaagctacatgttacagaactttcagctcgaaaaaaaaaaaaaaaaactgtcctattttgcgacctggttttcctgcagcttcgtccctcgtagcatatgacagcaacgcggcaaaggatgaaccgcgtgccggcgaagaaggccaaggtaggattgtcgatggacctgctgggttggtcccggctggcgtgataacgcaccgtcgcgtgcggcctggcgacagggacagcggagacgagctgttctgttcccagcgcgggaggtaggctcccggcttcgctgccgtttttcacggagccatcctcagttcctcacccggcataaaccaaacac

SEQ ID NO: 124889 - DNA, 306 bp, Zea mays
  Clone ID: MRT4577_45374C.1
atgagaatcaccaactgccgcccgtgcaaaaacaccctccctcggaccaggaactgggccaccggcggcaagccgccgtcaagcttccccggcggccggtttttccccgcgctcgaccggttcgcccgccgtctggccgcaacgccgtctctttccccctctcccgctagcaagtgggccctcaagcgacgccgtcaccctcgcggccgcgccgtttccccctcgctcgtgggccgccgctgggccaaaagcgcctcagcgcgcgctcgcgcccggggtgggccaaaaatcgtgcccccggcctag

SEQ ID NO: 124890 - DNA, 387 bp, Zea mays
  Clone ID: MRT4577_45375C.1
ctcactccacccctgcggccattggtgcctttggttcatgcatagtgtgcacaagaaataaggcggcgtctctcgagtctaggaaagcccatgacagccactggacttctgtcactgactacagtatgtcacggtctaacaccttaccaaaaacagcgaccacaggtagccgctcattaacgttgccatgcaatctgtgccgtcatttatcgttaggcgagatccatgctggctccaataacttagaccaagcctctctactcggaaaaggctgcattgtaaacatgtgccttgtaaagatatacagtggcacgatggtggcgatcaatcgcgggaacccgacgtcttaacaaggcgttcactagtttcagactgagatcgatatgc

SEQ ID NO: 124891 - DNA, 308 bp, Zea mays
  Clone ID: MRT4577_45376C.1
gtaacgtgaatcacataaacaaaccgcagagactgttaaattcaacatgacatcttacgtatctcatttgtgtacagaatgcgctcaggagggcttaaaatgtaagaaccacatgtagttggagcaaataattgtacagagcgttaaaaccaagacctgtctttggggcacatcagtttacagagtggtaaaacccagacaagctttatgcttgctgttcataagcgatgctgctattgttcgctgaaacaagaaataactcacgggcaacttactacacctgttgcaagaaatatctgatctctgat

SEQ ID NO: 124892 - DNA, 429 bp, Zea mays
  Clone ID: MRT4577_45377C.1
ttcttcaaaatctcctcacatttaataccacaatgccagtctaaaacattaaagtgtgctaaaaaaaaaaaaaaaaaaaaaaaaaaaaaaaaaaaaaaaaaaaaaaaaaaaaaaaaaaaaaaaaaaaaaaaaaaaaaaaaaaaaaaaaaaaaaaaaaaaaaaaaaaaaaagaaaaaaaaaaaaaaaaagagaggtgccaaaaaaaaaaaacaaaaaaggggggcgcctctttaaatctaacaagggtaaagtctgtggagacagcaaaattttgcaaacctttgaaactggtgaaaaactcgaagatcacgcatgttaataccaaaacccaccatttgcatgatgctgaaaatgggaaaaaagatataggtcttgaacaaactaccttttgtacaactggttatgtcactagatgtagcgctctacact

SEQ ID NO: 124893 - DNA, 382 bp, Zea mays
  Clone ID: MRT4577_45378C.1
cttcggctcgagaccaggaaagatttgggttatttgcttcaggggcaaaaaaaaaaaaaaaaaaaaaaaaaataaaaatactaatagggcctataccgactaccagagcatatgttacccggaaataaatgcagaaccggaactctgccagtttaccagaaatacagagggggggcccctcttatatggggcggtatccccggggatattttttggccgcgtctcctggctatccccttattttctcatacagggggctttttggaggcttccagtacaaagcctaggggggccttttgggggaagatatttacttctaaaatatttgcccacatattccgcctttcttttagaaaatcgacctgccgggggtcattgtggg

SEQ ID NO: 124894 - DNA, 293 bp, Zea mays
  Clone ID: MRT4577_45379C.1
cggcagacctggttcggcttactctctcctatttcctgtctatcagcagtcagattctctcgtctgtgctgatggcgtccaactacgtcgacaccggtgcggaggaaggcaggttccacggtcactgccacggccacggtcaccactaccaccacagcacgacgccgaccagcgcggcggcgtaccccaagacgcttcggaggagcttgtcgttcgcccacagacacggcgccgcgcccaagtgcgtgtgcgcgccgggcactcacgcaggctacgtcaagagccgtctccac

SEQ ID NO: 124895 - DNA, 267 bp, Zea mays
  unsure (1)..(267): unsure at all n locations
  Clone ID: MRT4577_4537C.1
ggagaatgggctcatgtgcagctgccctgccggcttctatggccgacgctgtgaggtgcggacatccatcgatgcctgtgcctcgagtccctgcttcaacagggccacctgctacaccgtcctctccacagacgcctctgtgtgcaactggccttatggctttgttggcagacgctgaacgntcctcgtgggcttgncgcccagcttcccctgggtggccgtctcgctgggtgtggggctggcagtgctgctggtactgctgggcat

SEQ ID NO: 124896 - DNA, 616 bp, Zea mays
  unsure (1)..(616): unsure at all n locations
  Clone ID: MRT4577_45380C.1
gtatagggctaacaattcacaatgctttaatcacacaagttttggtaggtcactgaaaatgtaccaaggtgctcctgaagatcatgttaaacaatcaaccaatggatagggtgtccataattctaaatgttacctatattgccttggtcttctccagggctggcttaacttcaatctgctccacccatttacatagtatggtatttacttcatctggaacttcatcatgtggagcatgacctgcatttaactctctgatttgaaccttgctgcaatgttctcggagcatggtgacaaatgcctcagattttgtaagggggtctttcataccctggataactaatataatctggtccagaagtggcttgtccacccgttcagttcttgtaggataatattctttaagaatgccttctgcccttgacctcaagaagagcaaaaggagctgtgcctgcaacctggaaatccatgatgttcgtctttcttcactcagtgggatgaaggagtaatttggaacaactgaaccagctgagtttaaaagaaccagagactntgcaagagaaggccataaaccagcagcaatagcacaagagataacctcaatagagttgccaaa

SEQ ID NO: 124897 - DNA, 2508 bp, Zea mays
  Clone ID: MRT4577_45381C.1
gccggccgggccgcggaacagaaaattcacgcacgattccgagcagccgccctccgccacaatttcgccatgggcgcgccctagcctcgcccttcttatccccgctcttccccgcctatggctgccgctgctacagctgacgcctccgcgcagcccctcccatggctctgcttgcgctacggttcgggccgcttctccctgccccgccccaccaccgtcgggtcctgcggaaccgatgccgagtccggatcgtcgcctccaatgcccccacccccgtgagggacgggggcgctgccgcggtggtgtggtttaagcatgatctccgcatcgacgaccacccgggcctcgccgccgccgtctcggagccgcggcgccccgtcgtgccgctttacgtcttcgaccgacgcatcctcgccggctattcagataaaatgctggaactgctgctatttgctctgaaagatcttaagatgacgttgaaatctcaagattctgatttgctcataggcctgggaaacgctgaagatgttgtgctgaagcttgtgaatgaggtacaagcaggtctcgtttttacagaagaagaagttgaatatagagtgcgtgatgttcttgccaatgttgaatcatctttatctaatgggtcattctcatggggaagccctcccaagatagtggcttggagtgccccattgtatgactataagaatctgggagcagtaccgacatcacatgacgattttttaaagaaaaaattaccattggccacacctcttgctgcggcgaccttgcctgctctaaatttggagttagacacaggttctctacccactctggaagaattaaaatgtttcctgaaagaaataacaccagaggacaattgggctcctctcaagagaatgcccgcaagatctatccttaaaaggacaatcagtcaaaggaagatcaaaagtaatgctacattaagcaccatcaatgaagaaaacatagatgatgctgccaccatggattctgttgcatcaggaaagaggattataaactcgaagtttgcatcagagaactcactggaagttagtggtggaacagaaattactttggatgctttggctgcttacctaaaatatcttgaaggcacaggaaatgctagttggcaagagttgcatgataaagtgcgtttagctgaaaccagatatggtgcttcattctacatcttgtttggtcctgcaattcacgcgggagtccacgcgagggggaaagcttacactgagactatccaatatgaaaaagatcgcaatgcaggttttctatcaccatttgggtactcaacacctacagtaacatcagcagtagatgctatatgttcaatggagtggtattggctcttggcatcaaaatcccaagtatgcatcgaggggaaatattctataagaatttggagatggaagggttatcttgtacagtacacctttcttggcaacgaaggtccacctgttcttcttgtgcatggttttggagctttcctggagcattttcgtgacaatatagacaagattgctgctacgggccaccgagtttgggcaattactcttgttggctttgggaaatcagagaaaccaaatgtcaactattcagaacttttctggtctgaactactgagggattttattgttgaaattgtgagggagcctgttcatcttcttggcaactctattggaggttatctctgtgctattgctgctggtttatggccttctcttgcaaagtctctggttcttttaaactcagctggttcagttgttccaaattactccttcatcccactgagtgaagaaagacgaacatcatggatttccaggttgcaggcacagctccttttgctcttcttgaggtcaagggcagaaggcattcttaaagaatattatcctacaagaactgaacgggtggacaagccacttctggaccagattgtaagagcttcatatgatcctggtgctgcaaaagtccttgagagtgtattcaacttcaatctttcaattcctcttaacttcttatttgattcttttggagggaagatattagttatccagggtatgaaagacccccttacaaaatctgaggcatttgtcaccatgctccgagaacattgcagcaaggttcaaatcagagagttaaatgcaggtcatgctccacatgatgaagttccagatgaagtaaataccatactatgtaaatgggtggagcagattgaagttaagccagccctggagaagaccaaggcaatataggtaacatttagaattatggacaccctatccattggttgattgtttaacatgatcttcaggagcaccttggtacattttcagtgacctaccaaaacttgtgtgattaaagcattgtgaattgttagccctatacaaattgtgattaaagtattgtgaattgttagctatatacaaaacttggtacattttctttcagctgatgttgagatgaacatacatgtacccc

SEQ ID NO: 124898 - DNA, 291 bp, Zea mays
  Clone ID: MRT4577_45382C.1
aaagaagcagaagcaagtttcgaagtcatagtcaaggatatcagtacctaccaattgaacctaaacgctatgtatatataacagctctagctagtggtatagtgcacagtcccagcttaattcagggcagggacatatccattagaatggtgctcttaaaaatagaaactgaaccggggcggtggtctggctaaggccaagtgtataagaagtagagtgtagctgccagcgtagaaacccatgacaaggaggccacaggagattcctgggagcactgggtgtagcaaaaca

SEQ ID NO: 124899 - DNA, 346 bp, Zea mays
  Clone ID: MRT4577_45383C.1
ccacaaaaaaaaaaaaaggggccggttaaaatcacataaccaaaataatcacttgcctcacaaaaaaccaattcaacatcttatttccattccaccaaacaacatgacaacctaaaccccaaaaaaaaaatcaacccattttgcatggaaaggaaaaacaatggccttcatttaattcccaacacgatcttctgtgtccttccccctccttatcttggcccgcgtcacacttatcgtctcctccatcggcgtctccttttcaaacccagggtcaacctctttttcaccctctagggcctcaccactggcctcttcaatggccattttatcccccccttcggttcca

SEQ ID NO: 124900 - DNA, 330 bp, Zea mays
  Clone ID: MRT4577_45384C.1
gggacataaaatttcgttcaaaaatgaataaatccccctgtttcgtgcttgccaaatttttatttccaacttttttttgtcacgcgacagactttgaaactttgacaaacaacagcaaattgcaagttgtgcagggctttccggtttctccttattttttctttaccccaattggtttgaactgggttgggcataaaccttttcatttttcctttttaaacaggggtttttttagcctgccaaatgttataatgggttttttttagggggggctctccttttttggagggatggcaaccttaatggttgggggattgggtgttttttttt

SEQ ID NO: 124901 - DNA, 216 bp, Zea mays
  Clone ID: MRT4577_45385C.1
gaattgccgggacgacaccacgcgcgtgaagacgcgtgggccgacgcgtgggaggaagggagtgaggaatgtgtccacagagccacggaccagctgtgtggagccgtgatggttagagtgtgttcgttggaggcagagagatgctttataaacttaattatggttggcccacagctttgcaagagatcattttgggctgatcaaagaaatttatgg

SEQ ID NO: 124902 - DNA, 341 bp, Zea mays
  Clone ID: MRT4577_45386C.1
tctttattccttccccgtcactgcacatcgcgtgcgcggaaacagccagagacacactccaactcacttgaccaatcttggccctgggccccggccgcgtcttcggaaaacctgaacaccatggcagggctcaaaaagctcgccgagtacctcaccactgggagctacatgactatctaccaagctctcaaggatgacttggttagctacacttcctttatagtctgcttccttgtacaagtatattaacgtatcataggtggattaatcacattgatgcgcttgtgaggcttgatcgagattactgtatagggtcaatagagtgaaggttgaatccttaa

SEQ ID NO: 124903 - DNA, 285 bp, Zea mays
  Clone ID: MRT4577_45387C.1
gcatcacttccctctggctcctctcctgcttctcccttagtggggcatcgcctttggctgcggggtcaccgcgatccaccctgtgctcaacggcctctccaggatcgtgcatggggaggacgctgtcaccggctcctggacctcgcaggtgtccctgcaggacaataccggcttccacttctgcggcggctccctcatcagcgacgactcggtggtcaccgctgcccactgcgcggtcatgacctccgacgtggtcgtggctcaggagtttcaccagggctctga

SEQ ID NO: 124904 - DNA, 1653 bp, Zea mays
  Clone ID: MRT4577_45388C.1
accttctccgggaagctggagcgccagctcacccacctggccggcgccccggaggtccaagaggtgcgaggagatgacgccgtcgaagacgccacctcccgcaccacgtccatgcccaaagtcgatcgcttcttcgccgcactggaaggccacgcgctctccatgctcaagacgtctgcggaactggtgctgccgtcggacaagacgtggccgttcctgctccggttccccgtgtcggcgttcggtatctgcctgggcgtgagcagccaggcgatcctgtggaagactgatcgcgtcgtcgtcgccgaccacgttcctgcacgtatcccacaaggtgaacctggtgctctggtgcatctccgtgctgctcatgtgcgccatcacggccgtctacgcgctcaagctcgccttcttcttcgaggccgtgcggcgcgagtactaccaccccatccgggtcaacttcttcttcgcgccgtggatcgcctgcctcttcctcgccatcggcgtgccgccgtccgtggccactgagcccctgccgaggtggctctggtacgcgctcatggcgcccgtgctcttcatggagctcaagatctacggccagtggatgtccggcggccagaggcgcctgtccaaggtggccaacccgtccaaccacctgtccgtggtgggcaacttcgtgggcgcgctgctgggcgccaacatggggctcagggagggccccgtcttcttcttctccgtggggctggcgcactacagcgtgctgttcgtcacgttgtaccagcggctccccaccaacgagacgctgcctaaggagctccacccggtgttcttcctcttcgtggcggcgcccagcgttgcgagcatggcgtgggccaagatcacgggcgagttcggctacgggcccagggtggcctacttcatcgccatgttcctgtacgcgtcgctggcggtgcggatcaacttcttccgggggttccgcttctcgctggcgtggtgggcgtacacgttcccgatgaccggcgccgccatcgcctccatccgctactccaccgaggtggacaacaccttcaccaaggcgctctgcgtggcgctgtccgtgatcgccgtgctcacggtgacggcgctgttcgtcaccacgctggtgcacgcgttcgtgctccggaagctcttccccaacgacatctgcatcgccatcacggaccacaagatgaagcccatcatggagctgcacgagagccatggcgaggacagcagcaccaacagcaacgacatcgaggccggcgccggtggcaaacagtgagggacgcgacgcctagctaggaagcatgcataagcaatgcacgcgcgcgcacacacccaagtcgccgagcttcacgcacgccaagcgtggggggatgacgcgaccgagttcttgcttggattggattggatctttctataggattgcctacttggttcgatggcgcacgctgaggacctttgatggattgcatctattagttactctatctactactagtcagtagagaactacttgaatgtacagagtgggctacgttgtatgaaacgcggctgcttatttatcgtggaaaacattatgcatgcagagtggctttaaaacttaagaatctcatcagttcctccagacccccc

SEQ ID NO: 124905 - DNA, 200 bp, Zea mays
  Clone ID: MRT4577_45389C.1
gtgttaggctggatcaatattatatgcattatatagtctgattaatggatggtatgtatgtatagtatgatgccaatccagagaatattggcctaagtggaatatctctggtgagcagcatggagacattgaaatggaaggtgatgaaggaaaaaagagtaagccttgtgttaacagctctgcagcatgtgcagtattgc

SEQ ID NO: 124906 - DNA, 279 bp, Zea mays
  Clone ID: MRT4577_4538C.1
tcgcgatctagatcaagatcctgccatgtacgcctacgcagcatatccagggtatggaaattaccagcaacagccaacacaagcaaccgccgcaaaatttctcatgccaacgcaccaaagttgctgcgccccaaccccccagctactttgcgaccagcttgcaaatgatcactctcgggacatcattactgttgtggcgggggctgctgtggtggctgttgctggtaattcccataccctggatatgctgcgtaggcgtacatggcaggatctttgatc

SEQ ID NO: 124907 - DNA, 174 bp, Zea mays
  Clone ID: MRT4577_45390C.1
ccttccgaaggccgtaagcccacggttgcttaaggcttctttcatcgggctgggcccatacccccgcggggccccacaggtggtcaaggcagtttttgtaaagagcaccttgcgtcccgttgcctgcccttggaacggccttccggagttttgaactctttggccgttccaact

SEQ ID NO: 124908 - DNA, 962 bp, Zea mays
  Clone ID: MRT4577_45391C.1
gcaaccatactccttggtgctggtgcaactgtttgtcttcaggttgttgcagaacggagacgaggtactttggaagagttcctagagcagccttctatagatgctactactttactcctgagcatatttattccaaattggatttcagaattccgggcattgggaccctcgaggccggccgggttacagagcagcgcctcgtcctcttggcaatgctgtttcatatgtaaattgtgctttcctgggacatgcttctttggatgagcaatcagatactcttgtattgagtaatctgcggttggcttttggtgcatatggaacagaacatgctattagagcaacgagggtggaggaattccttactggtaaatcactcactgcatcagttgtacttggtgcaattcaattacttagagaaacggttgtaccaatggagggaacatcacatcctgaaaatagagtcagtgcagctgttggatttctctttagtttcctatctccattttctaaatgcatcccagagcctggaaagtctctggccagcagttctactgattcagcagatacagatgatgttcgtaatctgccattatcaacacgtcgagaaacattttctagtgacgaatataaaccagttggtgaaccaattaagaagtatggtgttgaacttcaagcatctggggaggcagtatatgtggatgatattcctgctccaaagaattgcctctatggagaatttatttacagcacacaaccccttgcttatgtcaaaagtataaaattcaaatcctctttagcatcagagaagatcatctcttttgtttccgcaaaggatattccaagtggaggactaaatattggatcatcctctacgtttggtgacgaaccactatttggtgatcaattgctgagtatgctggtcagctcttggcattgtgattgcagaaaccaaaggtatgctg

SEQ ID NO: 124909 - DNA, 748 bp, Zea mays
  unsure (1)..(748): unsure at all n locations
  Clone ID: MRT4577_45392C.1
cattgggtccctcgaggccggacgggtaaaaaagtacgcaaacctggtgaggaatctaccaattgcttttcgtctcctgtccatcccttgtgcgctaccgctcctctcccttggcaacgacgactggcgccgccgctgccagacttcgctgggcatctcgccggcgacgagctcccaccaggattagagaaggtgatggcgaggagtgacagctgcctggcgcgcgtgggtgccggagttgcgatcggtggcgcggtcggcggagccgtcggtgcttgttatggaacttttgaggcattcagatacaagatccctggattgctaaagatcagacatatcgggcaaactactgttggcagcgctgcaatttttgggcttttcttgggggctgggagcttgattcactgcggaaaatcctactagtttgtttccctcctttttctgaacacgactttgtcgatgtgcttcagaggaggattctagattttgagcgctaccctgagtggcttcagtgaaaactattcaacgcctgtacaatttaacagctaatacctcagggttggaaagagcaatcaagttatgtcctggttttggtgtggatggaaatactccctccatttcaaattaaaataaaattcgttttaaatacttaacatgtcgccnnnnnnnnnnnnnnnnaaaacgcagctgcgcggtgcacacagagcgaactataaaacaaacgaaaaaaaaaaaaaaaaaagcggcc

SEQ ID NO: 124910 - DNA, 362 bp, Zea mays
  unsure (1)..(362): unsure at all n locations
  Clone ID: MRT4577_45393C.1
gccgccgccgccgcgcgccncccggagaggcgccgggaccgaggaacgggccgagcgcnaggcagagaanncggggggcncggcncagcacggggcccgccgcgncgggcggcggcgaaggggagaaagncgcgagaacgggcccggaccaggcgcgcgagcccgggagggggggggggcacacacagcnncgncgaggggaangggagggacgaacggaggcnaaggggggcgaacaggcnagcagcagccgcgccaggagggaggaagcgcccccgggcgacagccnggaggacgnncgacccgccggaggcgngaagaagnngcaggccgcggcgnacaccaaccgcgcgaagaagcca

SEQ ID NO: 124911 - DNA, 404 bp, Zea mays
  Clone ID: MRT4577_45394C.1
tcgtaggtcgatacaagactctaaattgagtcgtacgacaaagattatatactaggattgctttggggaaggtatttttatatagagtctaataatcttgctttagcaatctttatataatggattttgatggtcaaagttggagaagtttgacttaggagttaggaggacaaacctaaatggacttaatactcgtgaaaggaggaaacacacaattggcatggtctaccgacatcgctattagttgcatggcatttagccgtgcagtaaacctaagtaaaagcaatattttgtaactggaattttgctttgccaccaggctaaaagaatggatgttgtatggggagagactgctggtgttgaaggtcaattgttgctgttgtgccctctccttttccccctgc

SEQ ID NO: 124912 - DNA, 276 bp, Zea mays
  Clone ID: MRT4577_45395C.1
aacgttgtcccaatgctggatctccactggcatgttctacaagcacactactgaccaacagtgccctgccggacactactgacgtttggctcattcgatatactcacagatccacacctgactctgatgtgtcgatgcaggctgtgccttggtctgcactgtagcacctgtgtactttgagtgcatctcatgaatgtggtgacttcccagataccatctcatgcttaacctagcacatcctacttctttgcctctatgatatccaaattggactga

SEQ ID NO: 124913 - DNA, 527 bp, Zea mays
  Clone ID: MRT4577_45396C.1
gggggaaacacgatttgaatttttgaatcgggatgaaagaccaaagcacatgtttagctaagggagggggttccgcccccctacatccgggtggggctacccactgtgtaactataaccgacctactgacgatttgttttggttcaactaaaaactagtcgcaatttcaattgaggaaacataatgggtgaggaaaacaacagtttggaactaaaaccaaaacattagttgagaactaccatacttggggaaaaagaataagaacgatttttttgtttttcccccttcccttttcaaatggggctgctccttatgtattggcaaataactgtgccggaaaataccatatgggctgggaacccgacatttccctctccttgaaaagaagttgcccccaagctggtgtttgaacaccaccgggatcccaaacaaaaactgagcatatttgttggtcactgcctgtaggtcactggtagcaaggaacacagagaccaccatgatgtttaaacccaagcacgccaactcct

SEQ ID NO: 124914 - DNA, 241 bp, Zea mays
  Clone ID: MRT4577_45397C.1
ccagcgtcggacctgcccgctcgtaccgcttatttgagccggcggcccacaggggatctacgacccagtagacctaacgcgcgcggcccaggccgcgcggccgggacgcgacgccggcactcacggctcgtccccgccttctaccacccgacgatcgcgcggcggggagagtccgcccaccacgacacagcgggcgtctagagaccaagctacgaccggcagcagcatacctcttaggcac

SEQ ID NO: 124915 - DNA, 286 bp, Zea mays
  Clone ID: MRT4577_45398C.1
gaaagcacattagtgtaccaacaatggcagccaaaatattttgcctccttatgctccttggtctttctgcaagtgctgctacggcgaccattttcccgaaatgctcgcaagctcctatagcttcccttttcccccgacctctaccagcgggtttcgttgtgaacccattttacctacagccacagcatcagtgcattacttatacctgtctcacatatagctatcatagtccttgggcttatgccaaacatagccacactcacacttggcacaaacctgtgctact

SEQ ID NO: 124916 - DNA, 538 bp, Zea mays
  Clone ID: MRT4577_45399C.1
attcggctcgagcatcaagttgatgaatcgataagtggctagagacaaccaaagataggacagtctgcacagtagtaggcttcacgatggggctaaaagtcccatcaaaatcaatgccagggcgttgcgtaaatctacagtgaacctagcgagccttgtacctttcaagggagccatcaacattaaatttgtgcttgaaaatccacttgtcggccacaatgtttgcaccaggggggcgaggcaccaaatcctaggtgtgattctgcaacagtgctgcatactcatcttccatggcagctcgccaattaggatcagcgagagcaccgcgaaaagtcttcgaaatgggagacagaggggaggcgtggaacaagactggcaaccggaagccaaccttgcaagcgtgaccatacgatggtggttgatcacttgggaaacaaccactgcgctgggtgggagagggtgatccaatgcgcccgcgagagatgagcgggagatgagggtggagcgacggcactgccacgcgtggtggcagagccgt

SEQ ID NO: 124917 - DNA, 409 bp, Zea mays
  unsure (1)..(409): unsure at all n locations
  Clone ID: MRT4577_4539C.1
tcatactcccactcttccgctctattacactcctctcttctgctgaacttccctaatttaacctgcagacttttctaagagggaggaggattacnaaccacatcaacaanttcttctagcaattgaactctactaatctaaccttcaaaatgaactcttatagatcaccattactatccacaacaacaacattacaatattcatcgggagatcaattcattaccgctcaacaattatcatcactatcacgcatcaaactccattaccattgttagaccgtcttctattcaaattgactttttcaacactattaacccaaaattcacaccacacctaaattaatcatcggttttctacattaattctacatatcataatgatatttgttatcttgcatctatattttata

SEQ ID NO: 124918 - DNA, 381 bp, Zea mays
  Clone ID: MRT4577_453C.1
ggaatctaccaacaaccatggagaaagagaactcccactaacattgtgggtattggaccatatactctgacaagtcaaccaccacaggacacactgatctacaatgcttcataggcatctaacaatgcgtctacatcaaaaggtttgagagggggggggctaaaattattttttgggccttcaagaacgcatgggagctcaacaaactcatgggtaatacgaaaaagaggcatcaccattaataatcctctgcggaagtttaaaaccaccaagttctactgctcgggcattaatgccactggacaccgtaacttcatcaagaacatgaacactgggacctacaagactaactgtgctgacattatcaataactccaccact

SEQ ID NO: 124919 - DNA, 2375 bp, Zea mays
  Clone ID: MRT4577_45400C.1
tttgtttcaacagcatcaggcttttttgcaacattattcgcggacggcagagaggacgcgtcgggtgatacagctcctcctcaggccgaagtgaagtaccttacctggcatagatcaatgtcttcactttcttcatcatctagaattcctcttgggacaacatcgaaggaagacactgacggtctcaatggaaatatctttggtggtgtatacatgaattcaggcagtcatgcctccacactggacaggttgtatgcatgggagagaaagctttatgatgaagtcaaggtaaatttctttctcccttttctgtgttacctggctgctttatgacttctattatgtgtgacacagtgacagtgtgacgatatataccaagaaagatttgcttcttttatgcagttattcaactctgaagaatattagcttacttgtaatgggattatttttttctgctctgatctcaattatttccccttttggtgtcatcttgttgggtttcaactctagcctaccccaacttgcttgggactaaaagactatgttgatgttgatgtctgatctcaattcttgtaaaaattccactttgaagatgactagaagatggaataaatagatcatactaatacccaaaatgtatgtactgaggttctgcctcactgatatggttgcagcagcaaaatggcctctagcgtaatggttaaggcttccaagtaagatcccgggttcgatctccctcggggtgaatttctggcttggttaaaaaatcccatcgctgtgccccgcccgctcccgacttacgttttacgcgccaccctctggctgggccgttgtagagtgggcggtgacgacccgctattgatggggggctagggttcgggaattttcttggccagaaccatgtttcggtcactttttaatataataccggaagggcggtctttccttccccggtcgaggtttttttatatggttgcaggttgcagcacagcgcttcagttgtgctgtaacctcacatggcaatgtagcgggtattacccatttatcctaaagtaaaatgcttaaacaaatgtttaacttaaatgtttctagttacaataatataattgatgtatattgtggaaccatataccttttgttgtacgttggcaaaagatgttgatttcacagttttcctcccttcctattccttcaggcaagcagtgtagtttgcaggcaatatgatgagaaatgtaggcagctaagacaccaggaatccagaggagaaagccaaatgagtattgacaaaacccgtgctgttgtgaaggatttgcactccagaattttagtggccattcagagaatcgacatgatttcgaagaacatagaggatcttagagacaaagagcttcaaccacaactagaggaattaattggaagtttgactcgcatgtgggcaacaatgcttgagtgtcaccggcatcaacacgatatcattaaactagtatccagcactcgcaacatgaagacctcaattcggtcagaatcacagttccaagcaactctactccttcaggttgagctgaacacattatgttcaaactttcagaaatggatagcatcccacaaagcatatttgcagagcctaaattcatggctactcaagtgtgtgaaggcactacaaaggaagaggaagagttccaggaaaaagaacatcaaagctgatccaataacaaagtatgctgttgcgcccatatttaaaacctgtgagagctggataaatttgttggatgatttaccaacggatttggaggatgctattaaggaccttgctgctgatataaaccgttacgtgccacatcaagagaagcaacgaggcggttcaaagctaactctctcgttgtcccgtagtggaaggtcaaacggcgagatgggtgaagtccacaggagttatacccctatggatttacaatcaagtttggagacatttctagggaagcttgaaatgttctctgatgtttcattgcagaagtacatgaagctcaaagaggatattgatgaggcgaaggagaggtatgcggaggcgcaggcagcccagcggatttaatttctggcacagaacataactagtcatgtagagatgtcatctagtgtcggtgtatgcttgttgaaataataggcataaattacttttgccattttgtaagttgcaagataagcctaggaacaaaattgtagagtacatgctaaaatatgccgctgaactgcggttgtaaatgtgaggtggtgataattgaagtcgaagttgcgggggatataaggtgtacattcatcttggggctatatcaatacatgaggtttcattttcttcaaaaaaaaaaaaaaaaacaccaaaa

SEQ ID NO: 124920 - DNA, 2016 bp, Zea mays
  Clone ID: MRT4577_45401C.1
attggccctgcttcaaccctccacccaaagcaactcccccacgtacagtcgtcctcgctactgcagcccggttgccggttaagcatgccgcccagcccgtctacccctacgccgctgcccagccccgcacggagtcgccccgtagccgttcgccggtcaccgtgccagcacggctgcttcgtcgacgcgtccccgcacaccccgttgttgtgtggaggagccctacagcctcgccgctcatcgtgcccgtgcctcgccatcgtcaagctcgctgatgccttcgccctcttgccgccgagcaggtaacaaccaccctcccttccctggctccagtccctacgcgcggccagcccctgcgcgtagccagtcccggcggtctggcgcggcgcgcgcttagccccgccccattgtgccgccggcgagcccgcccaggctggagcggtcagcgcccttccctctccgacagtaactttcccattccccatttgttcctataatcgtgaggttgaagatgggtgtggccacacgggatccgatctgtgtgacccatgtggccctttgcgcggctccgttcctagatttgcggggtacgacaacgatgattaccttttgcggggcgcgtacgcttacagcgccggcggtggctcggagccgtacggggcgcgcggcacgacccctgcgcggtcgggatccgcgctgtttgatgactatgggcggtcgatcagtgccccatctgatgactatgggcggtcgatcagtgccccatctggatgggaggagcagcagccgtggggcagtggcggcggtggcggagggagtgggagctatggggtgatcgcaaaggcccttccaaaggcggaaacgcgtgaggatgagagtggtggtgcacagaagtttcgggttaagctgctgccagagggtgccgggaactctactgacgtgctttgccagattggtctagatggaattcgcatgcttgatccgagtacaagcaggaccctgaggatttatccactcgattcactgacaagatgggaggttttggatgcaactatatttgcattctgggcgaagacatcagtggatattgaaccaaagagaattaggctgaagtcaagcagttatacttcaaatactatgcttgacactgtaacagcagcaacagtgcagtttaaggagataggtgcagatgcaagaagcagaggagcaatagaaactggcaaacccttggtacaatcaaatgagaaaaagaaaggttttgattggatgtttacaaaacctgttgatgaagtgaaagaccattgggtcccagatgaggttgccaagaaatgccactcgtgcgctgttgattttagccctttcaatcgcaggcatcattgtcggaactgtggtgaaatcttttgtgacaaatgcagccagggaaggattgctctgacggctgaggataatgctccacttgtccgagtttgtgatagatgcatggctgaggtcactcaaaggcttagcattgctaaggatgttgccaacagatctgcaactgttcaaagtcatgaagatcttgcaagaaaactgaaggaggaaatggagaaaaaccgcaagtcatcagcatctggtggtggtgcgcctggtaccagaatgagggaagtcgcgtgccctacctgcacagtccatcttcaggttcaggttcccacatctggctcagagacagtggagtgtggagtgtgccagcatgccttccttgtcagcgccaattgatacaccggggagaagatgcatatgctaaagaaattattctgttgacgattattcctttttttattatgctgtatacataataggtgtgtgttctgtcaggccgtacatgtttccttgattgtgttggtgatcacggttaggatatgttacttttttccctgtacatgggtggattccaattcgggagtattgcggtgctgggtgtatgcacagaatattataccattagattatacttggtagagattgaagactatgctc

SEQ ID NO: 124921 - DNA, 515 bp, Zea mays
  Clone ID: MRT4577_45402C.1
cctcgaggcggccccgaatattttccccacgcggtaggctgctgcacgtgttcgccacgaccgccgcccacaacatgtatgtcgcaggtcgacaagacgcttgagcttatccttgccgcacaatcccagaggcggcctcgtcctcacttctggggatgctgtaggcaatgcaaacagacgcggtctgaataccggggaccaggttctgcacacacctccttcttccgacaccagctgcggcctgcgtatatacttgtgctcaccaataccgtcatccaggcgaaatcagactccacctacttccccctgagcaggcctgccgaaggtcacctgaagcgcctacctagaatgtcgtatccaccccgggtcggatccaagatgactgattcacgacaggacagatgaacgcacgtctgtcttgattgcgcgtacatatactctcctacccactgctgtatgacgaacggtcctacgactactgatgcccacactgcatcgcatctaacaaacggatt

SEQ ID NO: 124922 - DNA, 422 bp, Zea mays
  Clone ID: MRT4577_45403C.1
gcagaactacgatggtggtgacctccacggagaccctaccagcggccttcccatcaccaacctcaccctcaagaacatcaagggcaagaacgccgttgacgccaagggaaagaatgctgctatcgtctgtggcaagggagcttgcactaactggacttggtccaacgttcaagtttctggtggaaagaagtacgacagctgccagaacgttcccagcgttgcttcttgctaagggatatccatttattaattttccaactccacttggaggatctacaacgtgtaatatggaaagatagacttcattcttgtatataacataaccattggggccagctcgacaagttcttgctgtggctcctaacaatataactctaaaagcctttgaacaatataaaaaactatttttttattacaaacaa

SEQ ID NO: 124923 - DNA, 354 bp, Zea mays
  Clone ID: MRT4577_45404C.1
cgggttcgttccccgcctgctgctctcccaggcagcgtgagccgccgccgcacggctggggcggcgagtgcgtcgctaacgacacggacattcacctccagttgctgccggggctgtaaccgtaccgctctgcggagcggcggagcccgtgggtcggagaccagcagctccctgaccaagagcgtgacggggactacggctacgacctgtaccgcgggggcgtcctgcctgagaggagacgcgcgcgccgcatcctggacggcaccaaggagctcctctacgcgcgcctctgccgtagcgcgcggaggcccaccaagagcgaccccaacgcgcgagaggaggctcacggctggg

SEQ ID NO: 124924 - DNA, 115 bp, Zea mays
  Clone ID: MRT4577_45405C.1
atggagcatttgttccgccgcgtagtcgagtgctagcagcggtattcctcttttggaaacccataccgatgcacggttccgttccagtctcgcccttccaattgaccaacacaag

SEQ ID NO: 124925 - DNA, 1163 bp, Zea mays
  Clone ID: MRT4577_45406C.1
gccggccgggttggggcgctccgcttctattcttacgctcgaacagcaggcccgtgatcccgctcgtccattggccggcagcagctagcgagcaggctaccacgaatccaccacgaccctagcagtagtagcagcaggagaagaagaagaagaaaagggaacacacgccagcagccagagaagccgtagccagcgagttcttggatcgggcgacgccgacaacgccgttggctggctggctggctgcacatctcccgtcttttgcatcctcacgctagctattactacagtactagcacttcagcaggcggcagagaagaagcataagcccccgggcctgggcatcctgcgtgcgacacttgcgagcagaacaggccaacacagctagctagcaggccgtccggccggcaagtaggcatgaagggcgacaaggcgggcgggagggacaggggcggcgccagcaggccgctgcgcctcgagtcgcagcggttcaggctgctgtccatcgtcgtcggctgcttcgtcatctgcctcgtcttcctcctctcctcccgccccgacgccgccgccgccttcggcaccgtgagtgtgagccccaaggcgtcgctggtggccgcgcgccgtccggtggcggtcaagaccgtgcgggcttcctcctccgccgacggagccttaggtggagatttccacgtggacatcctgccgcagcatcgtcaggagcagagcctcgagcggaccggcgacaagacggccacagaatgggtcagagacacggtgatcgtggaggagaggagcggcgccgagaccagcgaggcggagacggaggagaccgagcccgaccgtcacgacagtgccactgccactgccgcggcgtccaacaccgacgaccagcctgcagtaccaggtgcggagaaggcagtccaagacaccgccgcgatcaccgggcagccggctgccgaaacaacgtcggcgactgcgccggacgggacagaaaagacgggagctgctactggtgggtggtagtggtcagagcaaggtccaggagcagccagctcggcaacggccacaagaggagcggcacgacgagccagcacaacctggccgtggaccagcagcagcagcagccgcgggccgccgctgagcgacttctccgactttcgcag

SEQ ID NO: 124926 - DNA, 244 bp, Zea mays
  unsure (1)..(244): unsure at all n locations
  Clone ID: MRT4577_45407C.1
ggattcagcacgccgtccgttgggaagggagcttagaggatgatattatatttttcgttgttctgnctggctgagcccatggcccgggccctttgggcgcgtactccctaacgtgggtttgggcgggcggagagcatatgcgccggtttctatcttggattctgacttagaagcgttcagtcataattcggcacacggtaacttttggccactggctttttaaacaagcgcggtgaccaattgt

SEQ ID NO: 124927 - DNA, 318 bp, Zea mays
  Clone ID: MRT4577_45408C.1
tcttctttttagagtggctaatcataaagaagagcttcttacttgagttaagagaagtcctggtcatcttgttaactacttcctctttattagccgaagaggatcgagctgcatcaacccagctgggttatgagaaatttaatcacatcattggacgaacagatttgcttaaaccaaaacacatctcatcagtgaaaacgcatcacattcatcttatatacctactatcaaatgctatatttcctgaatggatcagatcccaaattaggagccaggaccgtcacactaattaccctcttctttatatagacaatactt

SEQ ID NO: 124928 - DNA, 297 bp, Zea mays
  Clone ID: MRT4577_45409C.1
tgttaagggaagttgggaagctggtgttgtgcgttggaagtgtattacgtgagatatatatgttacatacaatatgtatgcatatggtattgcggagctttggcatgactatgttataaataaatgaagagggggggtgggctttacagtattcatgggtggacatgaatctgagggcatgcataatgtaattgaatggtttttttatattatggttgggatgtatgtactttgtacctgatatgtggtttaaagtgagatatagagatttgaaatatttattgttgagtactaagg

SEQ ID NO: 124929 - DNA, 377 bp, Zea mays
  Clone ID: MRT4577_4540C.1
aaactaaggaaccgatcagagagagagagagagcgcatagtcgatcatgaagggtggcaagaaggaagtggccggtgcggtggcggccatactgctggttctgcaactcatggcagctccaccgacggacatgcacgaccgctcgacgcactgagacgagccctatgagtacctcgacaccgcccccaaggcgaagatgctgcacgtccccctcaagaaccccccccagtcatacaaaaacattggcgggctccctcacgcatcggcccccgcacctactcgctttttgcgggcctcccactaataacccccacctgaccccccacacccaccttttttttttttcccccccccccccccccgagccctcaaccccc

SEQ ID NO: 124930 - DNA, 495 bp, Zea mays
  Clone ID: MRT4577_45410C.1
ctctgagcatctgattaatctgaaaaacgctttggtcgatccatgtttatatcggtatcaatgacattacaacagaagactcagggaaaaagctgttcttttatttgtttttgaaaaaaatctgatacttttcaaagacagctacaacggagctgatactaggaggacctcatttggtttcacctaattctgtaagcaaaagccgccaatgagggcctttctcgaatttctcatggggatcggaaagcttcaccggcgtagcgcacattgccgagttcctcttcgatacggaaaagctggttgtattttgacaatcgttcacttcggcatggagcaccagttttgatctgtccgcttgctaaaccaacagagagatctgcgatgaagttatcctctgtctcgccactcctgtgactaaccatcacaccccagcctgcagcttttgagtcaagtgctgcttgaattgactcagggactgtcccaatctggttaacc

SEQ ID NO: 124931 - DNA, 241 bp, Zea mays
  Clone ID: MRT4577_45411C.1
gttcgctccatcacttttccactaattcttttttatttcgctcccataccagcccacggagggtgtcagtttccggcggtcgtacaaataacccccaatcctccacgatgacagcagcacctattgcagtacgtaccgacctacatccagcagccatcgacacgagtcatgcaatgaacaacgcctcctacaggcagacggtactgccttgtgatctaaaccctgaccaggagcggacacc

SEQ ID NO: 124932 - DNA, 282 bp, Zea mays
  Clone ID: MRT4577_45412C.1
agatatcaaactattcttatcttgcgtgggtggggcttgttttttttttttccattcatctagtgcaggaagtgaagccaccctcactgaacccctaaaaagatattcccaggggtttggtggcctgcacccccttctcttttacctcccaccagccccagggtttattttttactaaaaaaaaggatcgccctttgagataactggaaatacatgggacttaacccacgctggaagacggtgaaaagtacaaagaccatttttgtggccagcaattggggc

SEQ ID NO: 124933 - DNA, 274 bp, Zea mays
  Clone ID: MRT4577_45413C.1
attcccggagttctagatcagctatgtcccgccctttttcttttcattcatttatatttatctttttaataattcacttacttttctgatttttgtttttactctaatttttttattttattacttttttcctacaccttatatatcatttcataacatcttttttacatcaactaacaatagatattcttttacactctcaccatatacatattatcccccacacttatgagtatatcaaaaagaacgctgcataaacatttatccaaaattt

SEQ ID NO: 124934 - DNA, 174 bp, Zea mays
  unsure (1)..(174): unsure at all n locations
  Clone ID: MRT4577_45414C.1
ccgcactccccccctncgctgttntggaggggagatcgtgcccaacctgtccgttccgcgccgtcgtcgtgcgctagtgtgctggcgatctcgccgtaggcccaagaatacttggcgcgtgctcggccatggcatctccaccgccgcccgtcgtgatgctagctcgtgagcgcg

SEQ ID NO: 124935 - DNA, 170 bp, Zea mays
  unsure (1)..(170): unsure at all n locations
  Clone ID: MRT4577_45415C.1
ccgncgacctcgagaacaaaaagtgccgtggcgaaatatactatttatgaaatttattgccgatcaaccgagcgttttcgggctggagtccatttttgcactaagcggtgtcttatgcggaaaagacgggggagcacattcttttcattcacaacctgaaagagatgctt

SEQ ID NO: 124936 - DNA, 471 bp, Zea mays
  unsure (1)..(471): unsure at all n locations
  Clone ID: MRT4577_45416C.1
ctttcttccccgaaaaggctggacggcggctccgagctcactcgtcgccggcggctgttgcaggagattaacaccattttttgacaaagaaaaaaaaagctaatggcgagaaacataaattcagattatatagacttttcacatttgggtggattcgacatgggcatcaattttgacgaatttgaagaaaatgtgaaaaagctcatggagtatcttgattcagctcatgataaagctgtcgaattcattgaagatgtccatgcaaaattttatggtccctttactgatgatgaggtgccaaataacgatcaatctagtcgctatgttatcaccgagtctttaccaacatctattgagaaggagctagttggaccaaacactgaactttcaactcctnctgcatgcttcattaccattgagaaacaggtctactggctgtgatactgatgctcataaacncaatcagaatca

SEQ ID NO: 124937 - DNA, 610 bp, Zea mays
  Clone ID: MRT4577_45417C.1
catgcacgcccccaactgatgcagcacctcaagtccgcagcgcccggcagcccaagcggatttcggggagctcagacccggaggaacccttgcggagagacagcccccctcccgggagccccttgcaggacagtcctcaccccgacgttccgctactgcagacgggagtgcacagtggccccggctcgccgcgccatggagcggatccccagcgcgcaaccgccccccgcctgcctgcccaaagctccgggactggagcccggagacctacctgggatggattttgcccacatgtaccaagtgtacaagtcgaggcggggaataaagcggagcgaggatagcaaggagacctacaaactgccgcaccggctcatcgagaaaaagagacgtgaccggattaacgagtgcatcgcccagctgaaggatctcctacccgaacatctcaaacttacaactttgggtcacttggaaaaagcagtcgttctggaacttaccttgaagcatgtgaaagcactaacaaacctaattgaccagcagcagcagaaaatccttgccctgcagagcggtttacaagctggtgagctgtcggggagaaatgttgaagcaggtc

SEQ ID NO: 124938 - DNA, 617 bp, Zea mays
  Clone ID: MRT4577_45418C.1
cagaggcaaacctcctgatggttattattagtactgctgaatcgtgtcagttgattcagtttggcacaaccactctaacgacagtcgacagagagttaccaaagctcagtgatgggatccgtatatcggctctcagcagagcggccggaacgatgccccatacataggcatagctactgtaatttacaggtcgtccgtgcgtggcggcttgtgcgctcttttaaaaaaatcgccagtccacacgcgctcggcacaagggaagcacggcactgatcagctagcggccacggcgtcagccgccactgccgctgccgcctcttgacgcgccttcgccatccatcatccagaggaagttcttgacgacgcgagccgacgatggcgccgttggtgtcgtctggtggccggcggaagcttcttgtgcttggtctgatgtaccgtccgctagtttctcctgtgaggtgatgcgatgtggcgtgaggggttgggcatgttcgttgttcgaaggaaacagaacgtcgacaagagtttatgcatggccgccgttcaaggatgtaagtaccatcagagccgagttctccatccttagcttctgggagctttccgttagcctgctgatc

SEQ ID NO: 124939 - DNA, 630 bp, Zea mays
  Clone ID: MRT4577_45419C.1
ttgggaccctcgggccgccggaggcctgctaaactcttgtcgacgttctgtttccttcgaacacgaacatgcccaacccctcacgccacatcgcatcacctcacaggagaaactagcggacggtacatcagaccaagcacaagaagcttccgccggccaccagacgacaccaacggcgccatcgtcggctcgcgtcgtcaagaacttcctctggatgatggatggcgaaggcgcgtcaagaggcggcagcggcagcagcagccggcgcagggatcacggtgcgcccatgctccgccagctcctgagctcgggtcctctggcggctgacgccgtggccgctagctgatcagtgccgtgcttcccttgtgccgagcgcgtgtggactggcgatttttttaaaagagcgcacaagccgccacgcacggacgacctgtaaattacagtagctatgcctatgtatggggcatcgttccggccgctctgctgagagccgatatacggatcccatcactgagctttggtaactctctgtcgactgtcgttagagttgggttgtgccaaactgaatcaactgacacgattcagcagtactaataataaccatcaaggaggggtttgcctctgaactcc

SEQ ID NO: 124940 - DNA, 1733 bp, Zea mays
  Clone ID: MRT4577_4541C.1
ctggatcagaaggcaacctcagcggccgcaagcccgcaactttatccatccgtttggcctaggcgctcggcagtctcctctctcctcgggtggctagggttttgactcctagtcctaaaccagctcccacgccgccatgatgcagccgccgccgccacatcagcagcagcaatgggcaatggcgcccccgcccccgccgcagtactaccaggcggggcaccctccgccgccgcccccgcagttctaccaggcgggccctccgcctcccgctatgtggggccaaccgccaccgcaggcggcggcggcgccggcgccggccggcggcggggcgggggacgaggcgaggaccctctggatcggggacctgcagtactggatggatgagaactacctctatagctgcttctcccaggctggcgaggttatttccgtgaagataattcggaacaagcagactgggcaacctgagggttatggttttattgaattcagcaaccatgctgtagccgaacaagttctgcagaactataatggtcaaatgatgcccaatgttaatcaacctttcaaattgaattgggctaccagtggggctggtgagaaacgtggagacgatggttcagattatactatatttgttggggacttggcctcggatgttacagatttcattctacaagatacgttcaagagtcgttatccatcagttaagggtgcaaaagttgtctttgacagaactactggccgttcgaaaggctatggttttgtaaagtttgcagattcggatgaacagacacgggcaatgactgaaatgaatggacaatactgttctagcagggccatgcgccttggaccagcatccaacaagaagaatactggtggaccacaaccatcgagtgctatttaccagaacacccaaggaactgattctgatagcgatccgaacaatactactgtatttgttggcggccttgacccgagtgtgactgacgagcttctgaagcaaactttcagtccatatggagagcttctctatgtcaaaatacctgtaggaaagcgctgcggatttgtccaatattctaacagggcatcagctgaggaggccataagggtgctaaatggaagccagttgggaggtcagagcataaggctctcatggggccgtagccctgcaaacaagcagcctcagcaagagcagagccaatggagcggtggtggctattatgggtatccccaaggatacgatccatatggctatgctcggccccctcaagatcctgccatgtacgcctacgcagcatatccagggtatggaaattaccagcaacagccaccacagcagcccccgccacaacagtaatgatgtcccgagagtgatcatttgcaagctggtcgcaaagtagctggggggttggggcgcagcaactttggtgcgttggcatgagaaattttgcggcggttgcttgtgttgtgttgtattgttccgacgcccttgtacacgtagcctgtgttgtaactgaatttttgccgaggccttatgagtgactagtgtttcaactgtaactggattgcacatttttgtcgcaaggaatgtactattattgtgtggctcgtgccgctttgaacgctgagtcccggtattaatttttcttcaaaaaaaaaaaaaaaaacttactcataaaagaaagttcaacaaatcaaaaacagggggagaaaataaaaaaaaaaaagggggg

SEQ ID NO: 124941 - DNA, 1636 bp, Zea mays
  Clone ID: MRT4577_45420C.1
ggttcgaactccaaaccaaacgccccagccccgccgcacgcatacggcatacgcatccctcatctccctctcctcgccttcccgccgcggcgccgcctctcctttccgaattccgactcccacctccccggagtgcgtgtttccgcatccggctcgtccgccgatcctcgcgaggcttcctcgaccccgacccggaccggcgcggccacaccggttcaagacattcacaaaaaaaacatgggtcatgatgaagctgtagttactcagaattcagtaaaagcaccatcaccacccaaggatcagccagctatttatccatgctttgattggtcgactatgcagactatgccaccggctgcctttggaaaatcatatgctgcaatatacccgcatgctggtggtttcctgcatcaactcatgcccctagtggtaaacccattgagtgcagagccagctaagtctgggaacagcaagcatgctagtttaaacatgaacctaaaggaaattcatggatctgctgtgtcaagttgcatcagtcagaaaacacctggtgatcctcgccttgcaggctccggagatggtgaatctttcgcgaagggcgtcaattccgtcggcgtcgaggcgactgcctccgcgcctgtctcccactgaaatcgccttgccaacatcactgctcccccagatctaggcctccctgcctcagccacgtgaacgtcgagtcgcttctgccacgcaaaaccatgtgtgagcaccggtagtgacttcaaagttagtggtccaacatcaaccgaatggccagctaaggccgacaaggaatcgaagcgtgaaaggaggaagcagtcaaacagggagtctgcccggcgctcaaggctgaggaagcaggctgagactgaagaactggctcgaagtgtatagctcctgtctgaggagaacacgtcccgcagaagctagataagcaggctaacggaaagcgcccagaaactaaggatggagaactcggctctgatggagaaactagcggacggtacatcagatcaagcacaagaagcttccgccggccaccagacgacaccaacggcgccatcgtcggcttgcgtcgtcaaaaacttactctggatgatggacggcgaagctgcgtcaagaggcggaggcgtcagcggcttcctaagccggcgcagggatcacggtgcgcccatgctccgccagctcctgagctcgggtcctctggcggctgacgccgtggccgcgagctgatcagtgccgtgcttcccttgtgccgagcgcgtgtggactggcgatttttgttaaaagagcgcacaagccgccccgcgagactaacgcacggacgacctgtaaattacagtagctatgcctatgtatgaggcatcgttccggccactctgctgagagccgatatacggatcccgtcactgagcttggtagctctctgtcgttagagtggctgtgccaaactgaatcaactgacacgattcagcagtactaataataaccatcaggatgtttgcctctgtatccgtcgtcgctcgtttcgtctcacctcccacttcgcctttgccggtgctgatcagcctagaagggaccagcgatggaaaaacccaaaggtgagcggaactcc

SEQ ID NO: 124942 - DNA, 121 bp, Zea mays
  Clone ID: MRT4577_45421C.1
ggtcgacgacgtgcgcggcggagggcggttcgcgcacgcggtcgagcctgcgccacgcgcgcgctgtcgggtcgaatcactaggggtggggcttgaacccaccctggttcgccttgcggta

SEQ ID NO: 124943 - DNA, 496 bp, Zea mays
  Clone ID: MRT4577_45422C.1
acaagctttctttttctttgtttttttttttcttttatttccgttttttttttctggtttctgttctgtgtgaggctgacgaaggcccggttagtacgccgtggggttgccgatgatgttgcctggctgtcggagccccttgagtggggggggttctccggcggtgaccagtcctagctaccatgtttaaagcgagtcgccccgaggtgcatgagcagcccgtgtactgtgcgcgtgcaaatgcagaatgacgcacctctgacgagggctcgcaatattgccgcgggcccgttacattaatgataataactatgaggaataaatctgggaatgttgcctgttcaccccggggggtcccaaggccgggcaatttttgggaaccccgggggggaccccggggccctttgaacccccccgggggggattttttgcccccccccgggggggggggaaaaaaaaaaaactagggggccccccccctgggggggtttttggg

SEQ ID NO: 124944 - DNA, 202 bp, Zea mays
  Clone ID: MRT4577_45423C.1
attcggctcgagctcacaaccacaggttatgatgagcacaaagagcgacactcaatggatgtgctttgtggcgactaactacgaccttaggttgggtacccaatccccaacggcagtaccaccgaaggttcttgacctgagccaaatgactcctaagcctatgacatcccggcagcgccaggaggacatactacgtacgaag

SEQ ID NO: 124945 - DNA, 486 bp, Zea mays
  Clone ID: MRT4577_45424C.1
ttgggtgggggggttttttttattttttttttttttttttttttttttttttttcatttcacaccaagatgatgggcttaattagaatcacccattaagcacatccccatacccagtttacagataaacaaacgggacacaccttttttggggggggggggcaagccaaggcccccttttacaatatatatgggttcccttctccccgcttaaaaaagggggggggcaccaaacagacagacagaccagagcgggagacgtaaaactccagttcaggccgtcctttaacaaaatatcaatcctagagaaaactggggggtggccatcataggccggggaaaacaaactcctcgatcgccggaagggccccgatcttccccagcgggtccttggcgggctcctcgtcaaccccaatggccataatcggctgcttgcccctgaacgtccgcccgacgctcatgaaggtgatgttcacgtgtgtggccc

SEQ ID NO: 124946 - DNA, 308 bp, Zea mays
  Clone ID: MRT4577_45425C.1
gccgagcgacgcgcccaagctggttttgttgttttttgcatgtatttcaaagctcatcgggttgaagggggtgggggggtttaattggaacacaaagtggcgcactaatggaccccgttgcgtcaaacaattgttgcttattcaaagacagacagtccagttggttcgaaaagaaagacatcatttattgttgaaaaaggaatacctgcatgtaccactgctcagaaattggacaaacttgggatgcttggaagtgatacatctgagcttgtttctttcaattgctttattccacaaaaaaatatttt

SEQ ID NO: 124947 - DNA, 586 bp, Zea mays
  Clone ID: MRT4577_45426C.1
cggggctggcccctccgctgcgccgacgtaccatacattcgtcgtccctctccctcagctgacccctctgttgttcccgcggactgctcgctcgatctgagcttcgcatctgaggtccccggcgaccgcctagcactttcaataggccgcatgtcgctcgcattgtgtatgggcgctggaaacagaatgccgttgcagcactgattgctgaagaggagcgcgggatcaacgttgacgcgaccaaggatcttgtgatgggcgactacaacaagacccctgaccttcttaacatgaacccccttgggaaggttcctgttctggacactcctgatggccctggttttgagaagaatgctatcgcacgctatgttgctcgctagaaggattacaaccctctttttgagtcttgccgtattgaacaagcccacgtcgcgcactgggtcgatttcgccgcaaccaaagttgatccctgcgttgtgtggcacttgtatccaacgcttgaggacctcccttatgcgatctcacctgaggaaacaggtatgtttctattgaagaggtggctcggcgctctgaacacacaccttgt

SEQ ID NO: 124948 - DNA, 1999 bp, Zea mays
  Clone ID: MRT4577_45427C.1
ccggccgggaatcttccgcactctgtaaccccgcccgcgatggaggccgcaaccgccgccacggcggcgatgatgtggttccggaagggcctgcgcgtgcacgacaacccggcgctggacgcggcccgccgacacggggccggcgctgcatccgcgcggctgtacccggtgttcgtgctcgatccgcgctaccttcgcccggatcccgtcgcggcgtccccaggttccgcgcgcgccggggtcgcccgcatccgcttcctcctggagagcctcagcgacctcgacgctcgtctccgccgcctagggtcccgcctcctcctcctgcgcgcccgcgacgacgtcgccgacgctgtctgcgcggccctaaaggactggaacattggcaagctgtgcttcgagtccgataccgagccgtacgcgctggcccgcgataagaaggtcacggattttgcattggcgtccggcatcgaggtgctcacgcccgtcagccacaccctcttcgacccagaagaaattataaagaagaacggtggtcggccgcctttgacatatcaatcctttgtctccattgctggggagccgccagctcccgccatggaggaatactccgagctcccaccgctaggagacacaggggaatacgagctgttgccggtgcctacggtggaggagcttgggtacggcgatatcagccaggaggagattccaccattccatggcggagagacagaagctctgaggagaatgaaagaatcgcttcaaaataaggaatgggttgccaaatttgagaaaccaaagggtgacccctctgcctttgtgaaaccttcaacaactgttttgtcaccatatctaaagtttgggtgcctgtcttccagatatttttaccactgcattcaggatgtgcacaggagcgtcagaaaccatacaaaaccacctgtttcattgacaggacagttgctgtggcgagacttcttttacacagtgtcttatggaacacctaattttgatcgaatgaaagggaacaaaatatgcaagcagattccatggagcgagaacgaagatctatttgttgcatggagagatggccagacaggatatccgtggatcgatgctatcatgattcagctgaggaagtggggttggatgcatcacctcgcacgccattctgttgcttgtttcttgactcgcggtgatatgtttatccactgggaaaaaggacgtgatgtatttgaaaggctactgatagattctgactgggccattaacaacggcaactggctgtggctctcttgctcatccttcttctaccagtaccacagaatttactcccctattacattcgggaagaagtatgatcctaacgggaactacattaggcatttcatcccagtgctgaaagacatgccaagggagtacatttacgagccttggactgctcccactagcatccagaagaaagccaattgtataattggcaaagactacccaaaaccagtggttgatcatgagactgcaagcaaagagtgtagaaagaggatgggagaagcttatgcgtcgagtcgcgttgatgccaaacctagcaaagggaagacgttgaactcacgccgaaaaatgctacatggtgaccgagacacgtctaactcaaccattgctaagcgactgaagaggaatagccgagttgagtgatgcgcagctcctcccgtgacaactttacactacttgttccatcttcagcattttttttattttcagttgtgttacctgcatctgtcatatgtagctcgtctgacattttaccaaagtagtctgaccgtaaggaaatgacttgagcccgtagctagtgtgatatcctacactgaaggatatatctgtaatatatgctcatgtaataacaggtgtaataataataactgctgcccatgtactctaggtcttatttggaaggtgtgtgcagcaaatgagcagttcaagtcaatccattaaagcaggtggtttggat

SEQ ID NO: 124949 - DNA, 427 bp, Zea mays
  unsure (1)..(427): unsure at all n locations
  Clone ID: MRT4577_45428C.1
gggccgaccgacgcgtccgcggacgcgtgggttgtgattgtgatggtggtgactgataacttgacgacctgaattgaaaacagaatggcataatatcgagcctctacccccacaggccatgtgcatcagagacggagaaagcgagcagattcccagacggaacggaaacggagcgcgttggcaaaagcagagctgagcctgaaagggccatgggtcagtcattgcttgcttgggtcatcttcatctagctgcggcgctacctgcctgcctacctgctgctgtatacgtaactattagaattactcatttcggttagtaataatatcttgtctggtatgttaaaagacctgaacagcaggccagtaaccaaaatgacagacatccgatggttgtntaaaaaaaaaaaatataataaaaaaaagggcgg

SEQ ID NO: 124950 - DNA, 226 bp, Zea mays
  Clone ID: MRT4577_45429C.1
ttcactcaagcattcatccaaaccgacgcattgtttgtcccagacgtggtgaattagcacccggggggtccagttgacctttgggcgattcactgcaaggacgaatgcatgctgaaacttctgctagcccgggccaatatccttatgttcgactcccaacacgggcggacccgtctgtaccaagccgtctacattggccacgttagctgccttcaagccatcctta

SEQ ID NO: 124951 - DNA, 429 bp, Zea mays
  Clone ID: MRT4577_4542C.1
tttttttttttgtttaggaaaaggtggggtaggggttaagcacgcatttttgcatccattccaagaaaagcacaagggacgtggcttgttacaccaggggagaaaccgacaaactgagatggccaccgaaaggggggggttttttacccaacttcccctaacagaggccccttttttttcaaaggggggggggggggcacccttaatgaacccaatacctcgtgcccgccttgctggatcacgaggccgatgagaacctaagcggcccggcaagccctttctttgtggcacaaaccacccacgccgggggggggaacttccccttcaacaaggatggcggcatggcctcccccctgagaggcgacaacacgggcgtatggagattaaactaacctgcgggaaaacaacattgggggacctattgggcag

SEQ ID NO: 124952 - DNA, 437 bp, Zea mays
  Clone ID: MRT4577_45430C.1
cccacgtttccggcatgaacgactctacaccgcgacaggctgctgtggggacagtcggtctcacttgccgcaacgagggctggaagtaccgatgtgagctggcatgcgtgtgagatgatcgggtgatcacttgactagagtgcttgcagacctgatgtggaggttatcgtgtgcatgtgtgatagatttatatagggtcctaacgtgtgtcacttattggcagtgaaacgaatccttagctatttggttgatcgggcttgcttgggactatggtatcaaacggggtctacctttgacttgattggatattcagacttcgattatgctagatgtaagatcgatgggaagagttcatcgtggacgagccgatacttatgaaggtacctgatgttatggaactctaagaaacaaaccttcgttgcactatccaccgttga

SEQ ID NO: 124953 - DNA, 494 bp, Zea mays
  Clone ID: MRT4577_45431C.1
gccggccgggccgggcagcaatggcctcactatttcttctaaattaccaagattctcggacatgtacactctcacgatagcaagtgtagacccacagtctatcgcagcaaacaagccaatccatttcactaagagcgtgacaaagtgatgatcggcaatgaacatattgagcgccataatttctcttttgaggaaaccaagccagaattctgatcctccatttatgcataaaagatgatcgacatgaacatactgagcgctataatttctcatctgagaaaaccaagacagaattctgatcctctgtttgttttgctattttgctttattcgttgtgtatcttaatttctgaatttatcttaagcttgtacataaaatttgttgtcattgcttgctctttttaggtgactgtttattccaaacagttattttatgtgactgacatttgagttctgcgttgaaaactgattatcaatggatgaatttatatggcc

SEQ ID NO: 124954 - DNA, 134 bp, Zea mays
  Clone ID: MRT4577_45432C.1
gtcgtggaatgcggactgtccggtagctgagtagtcgcctacgagcttcggcgttgcgtgatacatagtgtccgaaagctgtctcaggcgcttcgttaaatggcaccgctacatcaggttgttctggtgcagaa

SEQ ID NO: 124955 - DNA, 488 bp, Zea mays
  unsure (1)..(488): unsure at all n locations
  Clone ID: MRT4577_45433C.1
ggttgctcttgttatccgttcancnnctggtggttttgtcgagggtcgaaagcnnggcgagcgaattagnaagnatgctgggacaaggcgtgtgggnnacgaccgtgnngtggccgnnggcctcgcccggngnaccgggcctcgngnnaagctccgcaagggccaccaccgcccnngcccgctcgtcatctaacaaanacgcggnacgnngcggcagctacagagcgggcggcgagtcgatnngccgtcgnnaccccgacgacccgccggtgacccgccgtcgtcgtgcgtgcggtcgtcgtacgacgcgcgcgcggcgcctggcaacgtggtgggcgcagctgttcttccacctcgggggagcaaccgtggcgcaccaagggggcatggggcgccaactctnttgcgacctggccgcaggcccaacttcccccaccgtgttacgacttggctcttacagtgtcgaggaccaggagcaaccnctcgtt

SEQ ID NO: 124956 - DNA, 1124 bp, Zea mays
  unsure (1)..(1124): unsure at all n locations
  Clone ID: MRT4577_45434C.1
ggaaaatatgtctgaattccatgtggtgtttttttgttgcctctttttgtgcctttttctgttctcgtaactgtgttgcacacttatgaggatatgatgaccctttccccagatgatcgacagtgaacatattgagcgccatattttctcttttgagaaaaccaagccagaattctgatcctccatttatgcataaaaagtatttctgaattttatgtagtacttattttgtattcctccttttgtgttttttgttcttgtaactatgttgcacactttggaggatatgatgaccctttccccagatgatcaacaatgaacatactgagcgctataatttctcatctgagaaaaccaagccagaattctgatcctctgtttgttttgctgttttgtttattcgttgtgtatcttaatttctgaatttatctcaagcctgtacataaagtttgttgtcattgcttgctctttttatgtgactatttatttcaaacagttattttatgtgactgacatttgagttctgcgttgaaaactgattaccaatggatgaatttatatggccattgtgtatgagtcaacgccataataatcctctccctgttttgtgcgtatatggtacctgtgcatgatatcactggttgagcatgagtgggggatatcttctttcagatttatattttgtttgctttatagtgttttttgtggattatgttatgtacaattgttttgagtatgtcccatctagtatagtattttaaacgtgtaactttatttgtttgttgtgttctgggaacgcgggtacaatctcaccccctcagtgtcaaaatcctttttaagtatcgtaccacgttcccgtttcttgagcccatctatctcgtaacttggttactatggtctgactccttttctttgcctaactgttcattcgacatgataataacttctttnaaattagatgtgagtgcacaaaactataatttctgccttagactccacacaatatcatttgttatatagcatgcctgtaatatgcctanatcaatgtattgattttcagcaaagttagtgatcattgctaacactgtcttccgctttcggagtctgaaattgagtactatgct

SEQ ID NO: 124957 - DNA, 308 bp, Zea mays
  Clone ID: MRT4577_45435C.1
tctcaaatgaccggttgaggtaaaatataggctccaatctccaaactagccgttggaagcaaagcagataatctctaaattgtaggtttcatgaagtttgcgaggtaccatacgagatatgattattcagttatgccagtgccattcaagtttaatgtgatagatgttgggttgcttactgacctatattaatatcactgtttatagcataaagggcgtggctgtaccttactgcctttacctttgttcctgcttgctattgaacagactatattaaagtcttatttttcaggtgcactacactcact

SEQ ID NO: 124958 - DNA, 389 bp, Zea mays
  unsure (1)..(389): unsure at all n locations
  Clone ID: MRT4577_45436C.1
ccgaaacaaaaataatgcacagtttcatatctaagcttttgagggagaagtgtangagattaatgcattctgaatttaaaaagattacacaaagaaatagacgtatttctagaagtaaggttgaagtacatacctatcttacagtgaggttcttttttctttcagagtgaatatgatggtcattggagtaatggaatagttattgacagagaggaaagagaaacagtagttgtgtaattcctcgcagtgaagaaaaacaataatgtaagtgtatgctctaaaaatgaagagaaaactgcacaacctaacccagtttatatgaaactataactctgcaatgtgtcacttcgatccttagatatcctttaagttgggaacaaatagttttg

SEQ ID NO: 124959 - DNA, 631 bp, Zea mays
  Clone ID: MRT4577_45437C.1
tgcagccccagtctagtgctgttctgtggctttctgaaagaggtgatgattaatgggcacatctgcacgccttttcagaccccctttatatttttttctgtccttgttgtggcacctgcatgcttgtgttttgcaatctggactttgcaatatggctacctctttttcccaaacaaacattagtcaccttgagtcctagtagcctccttaggtctaactaaaattgaagtaatctaaacaacaaagcccattctaaattgtaaagtagagggttcgtgatatcgtttgactgaataaagaaataaaatggatgttgtactattttactcaaactcaacagatccatgatatgactacttacattatgtgttgtatacagtaatttctacaattctattgtattgcaaaggtgaagtcagttttgaaatcagagtggaacatatgtagtaggtaacttttgttctatctgttgtgcaaaactgcatctgtctggagtcctatcctcattgggtctaggtaaaattgaatcaatcttcatggaaatgcaatgttcattctgatttgggaagaagagtggtatcccattttctagtaacgcatcatgattatagctttgcttctatcaaaactg

SEQ ID NO: 124960 - DNA, 686 bp, Zea mays
  unsure (1)..(686): unsure at all n locations
  Clone ID: MRT4577_45438C.1
taccctcgnaggggccggccgggcccggaaatacnnaaaaaaaaaaaaaaaaaaaaaaaaaaaaaaaaaaaaaggggggaccgggggagcacgaggaaaccgaggagactgacccaacccgtgcttgcggcggcgctgcgctggtgccggccacggccatgatcggcggcgggcgggcagcggatagccacccggcgtcctgctcgtcctcgtcctcgtcttcctcctcgccgtcaggcccgtcgacggggggctcccgccttcaccgcagcaagaggcgtcccgacatcctcaacatgctcatgagtgcagcatgtctcagttcatcatcttctgatactggaaaaggacaaagcaagttttcaagcaacaaagtaacacacggatttcacttagtggaaggaagatctggccatgatatggaagactaccatgtagcagagtatagatatgaaaatgatcgcgaacttggtctttttgctatttatgatggacatctgggagatagtgtggccagttatttgaaagctaatctttttgacaacatactgaaagagcctctcttttggtcagaccctncagaagcaattaaaaacgcatacagctctacaaacaaatatattctggaaaacactangcaactaggacccagggggtcaacagcagtcactgctatttgtagtgat

SEQ ID NO: 124961 - DNA, 551 bp, Zea mays
  Clone ID: MRT4577_45439C.1
agctcgtaattcggctcgatgggacaagcaacgccactccactccccccggctcgaaacgcacaccgcgcgcgcaagcccacacaccacacacagagccctcgcgcctcgtcgcgcgcgcgatcagggccggccgaggaacggagcagcgcgccgctgcaccgcaccgcactgcagcagcaggtgagcacggcacggtgcacgacgccactggcgcggcgcgtacgcacgggcacgtggtggtacttggtacctgctccgcgacaacttggagctcgatagagcgggctggcgcatcgtaggatggggagcgcgggggaggaggagagggaggcccggagcgaggcggcgttcacggactccgcctccatcgacgggagcagctccagctccgacgcagcgtccaccgacgagtggctgcccgcggcgccggtgccggtgccggagccaggaagccgggcggctgcgcctccgacaccgacgtggccaggcagcagcacaagcacaagcgcagagcaccatcagagatggagatgatgaaggagcggttcg

SEQ ID NO: 124962 - DNA, 333 bp, Zea mays
  Clone ID: MRT4577_4543C.1
aatctaaatcgatacgatctccggttgcgctgaagcctgatctacaccggggtcgaagaaagggcccaggacctccatcacagaggaggcaggggagcatcatacacaaccacaagccatggcggggaggggcaagatccccactaacaggggggtcctcatagcaatcataggccacgaggacaccgtcactggcttcttgatatgcggcggtgacaacgatgatctgcgcaagaaaccaactacctactctttgacaacaagacaaaagtgtaacaaaacgaggatgccgccaaaaaataaactacaacggaggatatttgctatttgtgc

SEQ ID NO: 124963 - DNA, 275 bp, Zea mays
  Clone ID: MRT4577_45440C.1
agcgactggagactcatcaccggagaccggagagcatccggagccagtgctcgcaccaccgctcccgattcccaatcgccctcccgccgccgaagtagcgccgcactgtcccccggcctcgatctctctcgggcccgccgtccgccgtagccctgcgcctcctgcgttatcaggctggagatccggccggagtcccattcctactctcggtcaataagtattccggaatgcttttccgagctgaaatacctagctctctggagctggatctcagt

SEQ ID NO: 124964 - DNA, 411 bp, Zea mays
  Clone ID: MRT4577_45441C.1
gccgcccttttttttttttttttttttttttttttttttttttttttttttttggtttttgttttttacctaaaaacaaaagcaaaatttcctcggttgttctgtcaaaaaaagtttaaatgaacaactacccatttttctaccctctgcttcggaagttaaactaaaaaatgagccggcccggcccccccccctgctccattttcccttcccaaaacaaaacacaacccatttcttcggcctttcaacccccgtttcttcaaccaccccctttatttcccaccccgccccttcttaaaaagcaaaaaaaccccccaatttaggtccccccaacatcggcagcgggctacggattcaaggcccacaaccacctttacagccttatggccactgatctcatgctttgccttc

SEQ ID NO: 124965 - DNA, 609 bp, Zea mays
  unsure (1)..(609): unsure at all n locations
  Clone ID: MRT4577_45442C.1
taaacattaccttgtcaagagatcactcgttgcacatatgtgttcattttggtgcacacatagggcatttttttaacctcattcccctatatgacaggttatagggaagggcggggcatttgttcaatctgacgtagatgctctaatacaacttttgtgtgtgtgtgtgtgggggggatcatgctggtgaaggatgctgacttttaatttttgaaatgcagaacgtttgtttcgttctaatatgttcatgttatgcaaaacaggtattcatctgagataccagtagtattaattcaggctgtactgtacattggagtcatagcagtgacccgactggcgaggcctaccttgaacaagatgtgctacaacagaagaatggagaaaaacactatgttcttgctctctgttctcagagtcgnggctgcttggtccatacttgctgcctacaccatacccttctttattatnccaaggaccgtgcatccactgcttggctggcctctctacttgctcgggtcttttgctctttctttcattgntatcaacatttttcctcttccacccgatcaccgtcctcacaacatggtttggattcataggcgccctcct

SEQ ID NO: 124966 - DNA, 275 bp, Zea mays
  Clone ID: MRT4577_45443C.1
tcgggccacttcacgaggcactaccactttatgctgttcaagtcctgcgactcttcctccgaggacagggacacgcacttaacaaagacttcactctactactgatatactccatcgtacaaaactatccactaaccaataacatgcatctaaaccgttatcatccactccacgaactgactcatatgcacgatcacaaactgtcgtaaacacagcactattagccctagaacccgttacggtactaccttcaacagcaggtcctcaaaggtgac

SEQ ID NO: 124967 - DNA, 505 bp, Zea mays
  Clone ID: MRT4577_45444C.1
atacagagtagcataggtatatatcataaagtgaattcactgttatcatttcttttttagcatcaagtaggaaaatcggataatcctgtcaagtatgcaaacatgattaattctgaggcctgtcatcaagagcactatttacttgcaaggtgtcacttaagtgctcaagtgaagtactttcaccttatacaatttcgtaattttttaattaatgctccctccatactcattcacatttttggccattattttttcaattattcgttggaaaaaaatcagcaaatgtttatcgatatcaaagtacttttcatgaaaaacctgctagtagttttctttcctataaatctaaatacttgtgtgtatagtaggggttagtttttttaatcttgactgcacacatttgagaaccatgagtaaagaataatggaaataggtggcattcacaaatttttgaacgcccatacaacccaaaggtatctaatggatatgaagttgaatacgtttt

SEQ ID NO: 124968 - DNA, 935 bp, Zea mays
  Clone ID: MRT4577_45445C.1
tccgtccgcaggagggctcggccaaggcggaaggcgcacacagcgaggcgacgccggtatcggacaccggcgttgaggagtggaaaggcgccccggctgccacggacgcggccaacggcgcgtcggggccggcgggctatactcacaaggtcaagtccgcggctgcgggcaccacggagtacggcaagcagctggcgagcacagtgtacgagaaggtcgccggcgtcggcaccgccgtggcgggcaaggtgcagcaggccacacagtcgcccagcacggcgacgccgggagccgacgcgcagcaggacacggacgccgccgcgacggccacccccggcgccggcgggcagtccaaaggaacgaccgtcacggggtacatcgccgagaagctccgtccgggcgacgaggaccgcgcgctcagcgaggcgatctccggcgccgtgcagcgccgcaaggaggacgtcgggggcacggtagcgcagcgcgtgccggcgccaggccaggtggtgaccaaagcgcgcgaggccgtcgcgtcgctcaccggcgggaagcgggtctcggagaccgtgcaacccaccacagcaacagggaaagatgtgaaggaagtctatgcggcggaggcgcctgtgatccatggggaggagatcggcggcccgaagctgaacaccaataccatgtgagctgctcatggagagcgcgggtgatctctgagtattgtgtcaggtttgtgtacacagtacacgtgaatggtgtggtttgcgctgtggagtagagtaggagctggaataataagcgtgctggttgcgttcgccgtggtgcgctttggttttacgtgtgcgtgtgattgtggatctacgagtagttgtacgtatacatatatgtatatgtgtatctaactatgtatacgtcaacgttgaaggaaaattgttctgttt

SEQ ID NO: 124969 - DNA, 564 bp, Zea mays
  unsure (1)..(564): unsure at all n locations
  Clone ID: MRT4577_45446C.1
ccggngcttctcttcgaaaaaagaaccattttagcgagcaanntccatatccccgctcatgtccgcnngtcgccggatgttctacatagccatgcggccgccgtgtcgttctctgtccgccgacgccctcctcctgcatcggggcatggggctggatcgatcatgcgccgccntngccgcgacccatgnntggcatggaggggatcatggatctactctgcttgtccggacgcgcgacggggcggtngcgatgggccatggtgatagcccgttctggtgtatctgtgctccgccgnngcgccggcggatagccccgcgggccgccccgtctggcgtggccccggaaggcgcnnctgttcgatggtncgatatgtgcttcaatgcctgcgnnngctggatggatgcnttggagccagctnnncttcttggcgcccccgcgccccccgcgccctcncnngccgccgtccccgcccgcccaagatagaagaaaggnnngccggaggggtgggcccctgccaccgggggccccaaacaaggaagaggcattctagaattagctaaggg

SEQ ID NO: 124970 - DNA, 1150 bp, Zea mays
  Clone ID: MRT4577_45447C.1
gggcaccactgggtacggcaggcagctggcgtccaccgtctacgagaaggtcgccggtgtcggcactgccgtcgcgcccaacctccgtccgcaggagggctcggccaaggcggaaggcgcacacagcgaggcgacgccggtatcggacaccggcgttgaggagtggaaaggcgccccggctgccacggacacggccaacggcgcgtcggggccggcgggctatactcacaaggtcaagtccgcggctgctggcaccacggagtacggtaagcagctggcgagcaccgtgtacgagaaggttgccggcgtcggcactgccgtggcgggcaaggtgcagcaggtcacacagtcgcccagcacggcgacgccgggaggcggcgcgcagcaggacaccgacgccgccgcgacggccacccccggcgccggcgggcagtccaagggaacgactgtcacggggtacatcgccgagaagctccgtccgggcgacgaggaccgcgcgctcagcgaggcgatctccggcgccgtgcagcgccgcaaggaggacgtcgggggcacggtagcgcagcgcgtgccggcgcccggccaggtggtgaccaaagcgcgcgaggctgtcgcgtcgctcaccggcgggaagcgggtctcggagaccgtgcagcccaccacagcaacaggtacattggaacaatacaactttttgttttttgcagaacgaactcgccgttagcggagctgacgagagacgaactctggattgcagggaaagatgtgaaggaagtctatgcggcggaggcgcctgtgatccatggggaggagatcggcggcccgaagctgaacaccaataccatgtgagctgctcatggagagcgcgggtgatctctgagtattgtgtcaggtttgtgtacacagtacacgtgaatggtgtggtttgcgctgtggagtagagtaggagctggaataataagcgtgctggttgcgttcaaaaaggtgcgctttggtttgaagagtgcgtgtgattgtggatctacgagtagttgtacgtatacatatatgtatatgtgtatttaactatgtatacgttgacgtgtgaggaaaattgttctgtttttttttcagaggcgcatgccaagctgacatacgcgtcagtcgccaa

SEQ ID NO: 124971 - DNA, 423 bp, Zea mays
  Clone ID: MRT4577_45448C.1
ccaacgcgtccggggaaatggacgaggggccctccaccaaactcgaaggccttccaggggttcttttggggcttccgggctttaacgttgatcctgaaaccagggtttttggggctgggtatttggtgaccggggaaatggtccagggacctccaaaagggcagagaagggtggggccggtgcctaagagggctaaggttcgaccacggtccagtgcccggccccgttttgtgaagcggagggggacccattcttcccagagatgttgttcccgcttctgaagatgtaaaaggtaacggttcccacaggggtccaataccgtgcctgaagatgcagaatcacctccccattacttatttgataatggcatccgttttgtttgcctgccattttaagcgtgttttgctaatattgcatttgggc

SEQ ID NO: 124972 - DNA, 427 bp, Zea mays
  Clone ID: MRT4577_45449C.1
ccaaaaaaaagagaacccgcaaactttcactacccctcttcaacacaggaggaaatcataaacaagatcctaaactacaaagccctacaccgacacctgcacaaattaccacttctcaacttaaactgaataaactaggaaccccccttgcgaaactttcaaaaccacccacccgtccctgttacccatcatatgaaagagcccctacacacttgcgcccagatccataaaactaaagcagctcccccaaaacagaaagaggcctgtgttcggccaagggacacctacaaagcggcgtcaaacccttaccaacccccccccgcagagagcctacctgatctaactgggccccacggactcctacacacctcactgggggcccgccccgcggcggaacccgccaagtggccaaaaccgcccttattcc

SEQ ID NO: 124973 - DNA, 392 bp, Zea mays
  unsure (1)..(392): unsure at all n locations
  Clone ID: MRT4577_4544C.1
gggtggggcagaaataaataccctgagtccgtttcagggccgacggggggcaggcagagatcaccggtgttttttttggaatccccccccgccggttgggggggggggggggtttttttttttgggccncnnnntnncnnggaaatccaaaaattgaatcgccctctgctttttcgcgttttgcgcttcctgggtgttttcctggagccttttcctagctggggctagcttctcagaatccaaaagagggttcttttgctcccgggttggtctagctggggctggccttgaaatcctggaattgttgtggctgttgttctgtttggtttttttgggtgcgggagcctggctttttctacgcttccccggggggggttccaccaaattggggg

SEQ ID NO: 124974 - DNA, 381 bp, Zea mays
  Clone ID: MRT4577_45450C.1
actccgactccgctccccgctcgcagccgcgattgctggattggctgccggcagcgccccagcgctagctcccggactttgtgctgtcctctggactattctggacctcgcggcccgccgcctgctcgaatagatggactcggttatggctcgccctcgactcgccatcgcaaactgtcgtgcttcgagtatgtcggtggcagccactccaacacgctcctcacggacgattgtcctgtgctagcggggcaggcgcgaggactgtcacatcggccacggcgacacgaaggacacgctttgggcccacggtgcttagctgcgtacgacgcgcccgcaatcacggtccgtcatctgctagcgcctgccacaccacctgcctac

SEQ ID NO: 124975 - DNA, 596 bp, Zea mays
  Clone ID: MRT4577_45451C.1
gaattataaaggtaaataaaattataattcacttaacaagtctgcattttttataataaaaacagacaagtatgtacaattacatatatcatcagtaatctaaacatcaaatttagatactaaatactgattaatatagtaattatgtataaatatgaatatgaagacatatgtctgaaattatagaaaattgaaagagcaaatttagcccagccagcccaggtggccaggcgcggcccagggggccacacgcggcccagccggccgacccagggggccagacgcggcctacgcagtgagacgcgaggacggttagggtttgcaagtccattttccaccttgcagccgccgccatggggactcagtcggtcttggcggttccgatccgggctcctctggcatgggcgggtgcgggtgcgttggaacagcccctccccggggcacaacacgggcgcggcccgacccccggggtgggcgagcaggggcgcgggggccttggccccggcgacgaatgggcgggggggtgtccctcgaccctggggggccccagcccccgaggggttgggggcgtggatcccgtgggttggggggggggg

SEQ ID NO: 124976 - DNA, 434 bp, Zea mays
  Clone ID: MRT4577_45452C.1
ccttttaataataattctttttttattttttttttttgggggattttttaataattttgccgttttttaaccctcatataattaggggaagcccgggcatcccttggcttgataaaaccagaaaacggaaacaccaacaaccggatcaagagaataaactgagggtagggtttataccaaagggtgagggaccaaacaagaatctcaagggcctttaaaaaaaaaaaaaagagctaaacattttggggccaaaaaaaaaacttacacctggaaaacttttacaaatttaggcacccaaagaaaaaaattttgaaaaaccgaaggaggaggagttggacaaagaaaaaactatttttttacggggaaaaggaaaaaaatgttacccgggttctcctttttggaaaaagaacaaaaagggccccaaaacgggggcc

SEQ ID NO: 124977 - DNA, 354 bp, Zea mays
  Clone ID: MRT4577_45453C.1
cggacgcgtggggaaacatccacgactctcctcccaactgttttcctaaagcgaaatgataacacttcttaataattgtctatacgattgaagctgatttgattggtaattgtaaacaacttgtctttggatctttgaagtcaaacaaagtcagttggttgaaaaaaaaaaaaaaaaaaaaaaaaaaaaaaaaaaaaaaaaaaaaaaaaaaaaaaaaaaaaaaaaaataaaaaaaaataaaaaaaaaaaaaaaaaataaaaaaaaaaaaaaaaatgtaatcacttttaaaggttctaaattttataaagcttgcttgcctgataataaatttttttttccgtcccttaaattaa

SEQ ID NO: 124978 - DNA, 139 bp, Zea mays
  Clone ID: MRT4577_45454C.1
tttgtgagtactggggttcggttatagggagtatattgtagaagggtccacacagaagagacggaaaacataactgtggcctgtgccacgacacgagtcccggcacattgacgcagcaccacgtgacaggacgtcccca

SEQ ID NO: 124979 - DNA, 136 bp, Zea mays
  Clone ID: MRT4577_45455C.1
gtcaatactattaatactcatttgggttattatatatcgataccgaggctcgaaacccggtatctctacaaatgacaagtacgtaattggcaactgcataaactacacgctcagtacacacacgcgaaataaagag

SEQ ID NO: 124980 - DNA, 293 bp, Zea mays
  Clone ID: MRT4577_45456C.1
cgtttgcttctgtaagatttgtgcatttgcctgtgtaaaaaaaaaaaaaaaaataacaaaaaaaggcactaaaaaaaggagagaagaacccaaggaaacaaagaagacgacgctgcggaatatattggcataaaggcatagagactcggtaagcagcatggagaggattgcactatgggggtgcgctggtatggagcgtgccagacttttgggccgcgacagccgtgcgtgccgctcttttgttttgcaccaccaagctacacatgcgtcgccttgaatgtggcggggagttc

SEQ ID NO: 124981 - DNA, 114 bp, Zea mays
  Clone ID: MRT4577_45457C.1
gatccatcccaatactgctctaccctacacgctattttttgcgcggcccaccagagacggcgtctagaagcgctcacaattgcttatgagaaaataagccccaagctgagagaa

SEQ ID NO: 124982 - DNA, 368 bp, Zea mays
  Clone ID: MRT4577_45458C.1
gttttcatttttattattgttggggatacaacagttgccttatataatcttcctaacagattgcagctttctatactgttagctcacaatccgaagactgtattaatttttgcatataaataacactgttgtcttatacatcgactgaatagttacctactgcaaatgatattcatctctaaagctgtcaacccctcttctgaataaatgcacaatctacaattaacgcttctggcccactctacatgcatggtcgaaaggctccatgatcttctgtagcatctccggtcaccggaaatcttgtttaccggggcttgacctgtatgcaaatgcatccttatgccaacgaaaatttcccatatggtccc

SEQ ID NO: 124983 - DNA, 463 bp, Zea mays
  Clone ID: MRT4577_45459C.1
ctaggggattacttgggttgctatgtggtatacttggacccatcaaggcttatgcttcagaggtctgcaggaaagagcaccaagctttgggaatctctcttgttacatcttcacgagccatagctcttgttattgggcctgctattggaggcttccttgcacaggattccggctctcatcaagtgactccttcccctcacgttgactttgcgaacagatgtctcaattctagtggtggagctacgaacaacaatccgatgtcctgatcgagagcgatggagctaatgtttgaacttgtgtgtttgaacttgtgaactaaaaatgtgaactatggatgtgaacttgtgtgaatttgtgaacttatgtatttagacttatgtgaatttgtgaacttatgtatttggacttgtgtgaatttgtgatatgaacatatatcaatgtgtttaaaatttgtaggtatgtg

SEQ ID NO: 124984 - DNA, 472 bp, Zea mays
  Clone ID: MRT4577_4545C.1
aacgcccccaacagggttaaccaccccaacgacgaagtcgttttatttaagtttttgttcgccacacgaggggaagccttggcccaacctttaagcacaaaatgattggagaagggacaatttttttttcgaagtttgcccaaaacgcgcgggggaacaacacggggtgtggccggcgcgtaggggaacaaaacggagggggagcccggggtttcggccagggggggggggagcaaaacgggacgggggcccggccaaccaaaggaaaaattggccggcgcgcgaagggccccggggggaaccgccccaacgcgggggaacgggccttggcgggcgcccccggaaaaccccggggggggacggggttttcccaagggggcccctggaaaggcccgcaggggaggaacccgtgggggtggccccaggcgaaacaacccccaaaaaagccggcgggggtgggggtcttcggggc

SEQ ID NO: 124985 - DNA, 245 bp, Zea mays
  unsure (1)..(245): unsure at all n locations
  Clone ID: MRT4577_45460C.1
gcgnaaacacctcaatgtctagcagtaccatagccctctcctccacaaccttcgggggcggggcactgaacatgccgtggtctctattccactaaacccgcctgacgatgcacatgaccgcggctaaggcaaacccagccgcgagcttcggcagaccgtgatacaggcctgaccgcgttctctacctgggccctctgtgcggcgcacccacaagctaactgactggcgagtctcccggtcgacta

SEQ ID NO: 124986 - DNA, 888 bp, Zea mays
  Clone ID: MRT4577_45461C.1
cttctgtatcatctgcctcactgctactctaccaatccaatcgttgttcccgtatctatacttcatgatcagggacttgaaagttgcaaaagaagagcaagacattggattttatgctggttttgtcggggcaacctatttcctcggaagaaccataagtgctgtgccatggggcatatttgctgacaagtatggaaggaagccatgcattgtgattagcatcctctcagtgattgttttcaacacactctttggacttagcacaacttactggatggcaattgtaactaggggattgcttggattgctttgtggtatattgggacccatcaaggcctatgcttcagaagtcagtaggaaagagcaccaagctctagggatcttttttgttacatcatcacgagccatagctcttgttattgggcctgctattggaggcttccttgcacagggatagtggtcgacaaaaatatttctagcatcaggaaggtttccataattccttccttgctttgtaatatcgttgctagcagcaggatcatgtattgcatgcatttggcttccgatagaattggcaatatacctattttcctacacatccaatggggccttggggacgccctccatggcaaacacagccacttccatcaccagcggattccggctctcatcaagtgactcctttccctcacattgactttgcggacagatgtctcaattctagtggtggagctacgaacaacaatccgatgtcctgatcgagagcgatggagctaatgtttgaacttgtgtgtttgaacttgtgaactaaaaatgtgaactatggatgtgaacttgtgtgaatatgtgaacttatttatttagacatatgtgaatttgtgaacttat

SEQ ID NO: 124987 - DNA, 273 bp, Zea mays
  Clone ID: MRT4577_45462C.1
ggctggtatattttacagtaaccgtggaatggactcctggggcgcgcgagataaaacttatgatggacattcatgggccccatcatttgatcatggcactgacaatgactcactatggaactttggtcataaggatggtgagaatggtgattcagatctcatctttgggccacaaggtcttccaccgataaggactggaggttcctcatctaatagtttgtttgtcaaggaacagaaaccatcttttgattctgttcctggtactccaatgga

SEQ ID NO: 124988 - DNA, 533 bp, Zea mays
  Clone ID: MRT4577_45463C.1
aacccaaatgggaccccagttcacccgtccgtcacaactgggacaaacaccaaaccccaatgaaacacagggttctgagactggacaaggaaacccacagatggacatacattggtcgatgccccctagaggacaaattcttcctcctccacaaccaggcatgggatattggccgccaccaccatggggatatcctacacatccaatggggccttggggacgccccccatggccaacacagccactttcgtcaccagcggattccacaactcatcaagtgactcctccccctcacgataactttgtggacagatgtctcaattctagtggtggagctacgaacaacaatccgatgtcctgatcgagagcgatggagctaatgtttgaacttgtgtatttgaacttgtgaactacaaatgtgaactatggatgtgaacttatgtatttggacttaattatgtgaatttgtgaacttatgtatttggacttgtgtgaatttgtgatatgaacatatatccatgcgtttccaatcc

SEQ ID NO: 124989 - DNA, 414 bp, Zea mays
  Clone ID: MRT4577_45464C.1
cggacgcgtgggtgtgtatctgcccgatactgatatgcatatctatacctgtgctgcatagtgttcgagtacatgtttctgtgggtttgtggctagcactcattgatgttctattgttctatggcttaatgtttacacgatggtagtagaataatgaatatgatcatagcgttgtcagttttcttttaactaacaataccatgcatttttcattctctgcagtcatctgttcttcattcccagccgaagtccactgttggaacacctgcttatattgcacctgaagttttgttgaaaaaagaatatgatggcaaggtacttgtgctatcactttttttatcttgagaaatgtgtcttgagagttgtgcatacctctgcatcagtgcacttgtgttccatatacatgtgccacat

SEQ ID NO: 124990 - DNA, 2876 bp, Zea mays
  Clone ID: MRT4577_45465C.1
tgcgagatgtgaggaattccatatttgtgtggcgaggcaagccgtgcgacaagtgccagatgtacgatgaaatgattgaatcggagagcgtcaccgtttgtgtggattatcaagtcaggcaaataacggtcacttggtcgtggaagggcttcttattgcagtcatagtgttccagctctccaggaagagttacaaaccaccaaagaagccactcactgaaaagtgccgctggaccacatacgattgttgatggtaaagaagttgtgaactttgcatcagcaaactacctcagtttaattggcaacgaaaagattattgattcttgcatcagttcattggagaaatatggtgttggttcttgtggtccatgtggcttttatggaacaactgatgtccatcttgactgtgagtcaaagatagctaaatttttggggactccagactccattctttattcatatgggatttctacaatattcaatgtgatacctgccttctgtaagaaaggagatatcatagtcgctgatgagggtgttcactgggcagtgaaaatggtctccatctatcaagaagcactgtggtgtacttcaagcacaatgatatggcttcacttgcaagcactttggaaaaacttactcgtggaaataaacgtgctgaaaagattagacgctacattgttgtagaatccatttaccaggcccatttgactctagtctccggtctctctctccactctaactacagccggcccgcgtctcctcgaccatcaccaccttgacggtctccgtgaagatgatgagggtcatggacaagctcaaagggaagaagcgcggagattgtggtgactcctcgaggtcacggtcgactaggggttcaggtggtggggatacctcctctatgttgttccagggctctacagcgtcaaggcagcggctagagcagctccttggttgcatggaggagcaggggcgcgaagtggcaagccatagtgcacctgggcaagagcgcgaggtggcaggccatagtgcacctgggcaagagcgcgaggtggcatgccacaatgcacttgagccggagcgtgaggcgataggctcaagtggacctatgctagagcaggaccacaatgcatttgagcaagcgagcgaggcggcagaccacaatgcacctagtcaggaggacgagctggcacgccaaggttcaccaatgcgtgatgatgatgactatggggaggactacgatggagaggccgatggagaggccgatgacgaggttgttacaacgacacaggcaacaaacttcaggtttcggcggtcccttagagttccaccgacacaacccttggaccaacgtagggtcataaaccctgcaggagagaggagctgggtggaggtggcatggagtggcaaaggtcaccggacacccgttaacacagtgctgggatctatagctcgttttcactatccaggggtggtacaattcaacggggcagagacaggggcgtatcactgggctcactggggcctcaaaccatatggacccgaccgtactcaccaagacgcagtgtggtcatcattttgggaacaatttagattggacgaaactgcaaacgaagaacatgcaaaacgtgtattccacaatgctgctagaaaagttataaatggttcaatgtcagatgcacgggtcaaagctgttaccgtgtacttcaagaaagtgaagggtcaaagaatgaccaacaagcaggcatgtgaaatccacttgacagctgaggagtacaaacaaagtgaagtggactggctcactgctcatcctgaagcttgggtcaagctctgcgagtactgggcctcagatgagtacaaagtaatttcagatagaaatcgtttgaaccggaagagcaaaccgggcctccatcgatttggagcagatggatttattgggaaatcacaacgaatggaggctcgtgatggtgttgaaccccgattcattgacgtttacatggagggacaccgaggtccagatccagatcatcctgaagttttatgtgatgacagcgcgacagaaaagctgactcgttatgccgaggaggttaggaggaaagcaggagacgatgatctagattggagggaggcacctttcgatccggatgcagcatatgttgctggtggtgggctaccacatgggaggttggggatcggtgatggggttgtgagtcacgatagctttggtcgtcggtctgtttcctcggtggggagtagatctcgaacttcaacttcgagggaatcagagcttgatgagcaactaagacaacaacaacaacaagttcaacaactatctcaacaagttcagatgatgcagggaatgctgatgcagatgtatagtgctcagatgggatctccaatgggaccccagttcacccgtccgtcacaatctggacaaaccccaaacaccaacgaaacacagggttctgaaaccggacaaggaaacccacagatggacattcagtggtcgatgcctcctagaggacagattcttcctcctccacaaccaggtatgggatattggccgccaccaccatggggatatcctacacatccaatggggccttggggacgccccccatggccaacacagccacttccatcaccagcggattctggctctcatcaagtgactcctccccctcacgttgactttgcagacagatgtctcaattccagtggtgaagctacgaacaacaatccgatgtcctgatcgagagcgatggagctaatgtttgaacttgtgaactatggatgtgaacctgtgtgaatttgtgaacttatgtatttggacttatgtgaatttgcgaatttatatttggacttatgtgaatttgtgat

SEQ ID NO: 124991 - DNA, 603 bp, Zea mays
  Clone ID: MRT4577_45466C.1
atcttccttccctcccctgaccaaggttgcagagataaattggagcccatggaccgtcctgttagcccacgcatgaaagccccgagcagtcgtcgccgctcggaagtctccagttgcgcaaacccctcacgccctgagacacagaggaccacgtggatcgtgtgccactcctccccgggcgcgatcaacaaccagggagctagtgattgctcaccggagtctagaaactgcgccaagcaatttttccatcgtgaacccgctcggtcgtcgcttaatcctccggtgagacacgtcccaccgaattcacttctcatctgctgcggttaacgcttatcggatcggtgcggataccccggggtagggttttggtttactcggcaatggatcgtcgcaggtgttgcgctgccgccgtccagtcggccagggaagaagaaagctctggtgccgtctgatctcctttagatggctcagattagatatcgaataccctttcgcccactttcgatctaaatcgtagatctacaaatgggcggatctgatcgtgacttgccacgtccttgatttgggctgggggatcacgatccaacggccgaaagcgcatac

SEQ ID NO: 124992 - DNA, 156 bp, Zea mays
  Clone ID: MRT4577_45467C.1
atgaggctgcctgtctgtgaggcgctcgaggagaagggcagggtagtctcgcggagggagcaaggtctgggggacgacggtggagtggcgatgtgcggtcacggtggtggcggccttggcgacgatggcgtgcggtcgagaaggtcgtttttataa

SEQ ID NO: 124993 - DNA, 955 bp, Zea mays
  Clone ID: MRT4577_45468C.1
tgcctaattgtgaggtgtagacaactcccaagttcctgcttgccagggagaacctacttggagtcctacattcaaatgagttctattggcactttctgaggtttaaatgtttgcctatgttatgttcagatcgatcttatctttcactgttatatttggaagcttatgaatcaaatgcgtccattttttaccttcacaataacctatgatgaattgtccaacatgtgaggtgtaggtaactgcagccctatttagtcagtttagggtcttgaacgagtttcttcattctcctaaattatgcgatgatctcaataggaactattattaaaaacaaccattagaagagcgctcacacaaatccagtggctgcaaattggcctttttttgggactacattactgcttgtttcttgtgatgccaacactttaggctacgatagatgtttatcatgctttcctatatcttagtgtacatgtcattttgtgatcttcttgaaagccacattttatgtttatcatgctttcctatatcttcgtgtacatgtgatttaatgccagcattttgtgatcttcttggaagccacattttgtgtttatcatactttcctatatctttgtgtatatgtgatttaatgctagttgtatatttatgagaattttggtttattttgtaggattccggctctcatcaagtgactcctccccctcacgttgactttgcggacagatgtctcaattctagtggtggagctacgaacaacaatccgatgtcctgatcgagagcgatggagctaatgtttgaacttgtgtgtttgaagttgtgaactaaaaatgtgaactatcgatgtgaacttgtgtgaatttgtgaacttttgtatttggaattatgtgaatttgtgaacttatatatttggacttgtgtgaatttgtgatatgaacatatatcaatgtgtttg

SEQ ID NO: 124994 - DNA, 495 bp, Zea mays
  Clone ID: MRT4577_45469C.1
cccagaagcgaccggcctgctaagcttcagccttcaggagagagtcgcaagaaagcgccatggtggtgttgccgcatgttttttaattatgtatagtgctcagatgagatctccaatgggacccaagttcacccgtccgtcacaatctggacagacctcaaacactaacgaaacacatggttctgagaccaccatggggatatcctacacatccaatggggccttggggacgccccccatggccaacacaaccacttccgtcaccagcggatttcggctctcatcaagtgactcctccccctcacgttgactttgcggacagatgtctcaattctagtggtgggctacgaacaaaaatccgtgtttgaacttgtgaactatggatgtgaacctatgtgaatttgtgaacttatgtatttggacttatgtgaatttgcgaacttatatatttggacttatgtgaatttgtgatatgaacatatattaatgtgtttg

SEQ ID NO: 124995 - DNA, 859 bp, Zea mays
  Clone ID: MRT4577_4546C.1
ttcttgggggtacacctcgaggctcggccggggcgggagccctcgcccggctaggagcgagaagccaagcggcttggcacctcagcctgctttgtgcctctgctcgctctcttcgccctctttctgcactaatcctcggctcaggcagccaatattctgtctagcgttgagatggcggacaacgtcctcatcgaccgatcagccagcggctttgagttccggcgctgggcgaccggcgacgagttccagagcctcgccaccatgagcgtgctgcagcctgacgctcgcggtatctacagttccttaccatacgtttcgccgctgcctccgttccagtacgcggcgtacctgcactcttcgctctccctcccgccgctgaatcctcggcgccacccgcctctcctcccgctcccgccggcagctgctgctaaggggatgaagcaggcggcgcagaggaggacggggccgagagagtgcaagaggaagaagccgccgcggacgccgaggctgggggaagagcctccgagcgcgcagcgcaggaagccgctggagcgtgccacgccgctgccgtccgcgcccgcggtgcacgaggcgctggacgaccttgagcgccaggtgaccatggggttcgtcgaggacctcaagcacgcgctcgcgctcgcgccgccgccaagcagcctaccgctgcccaccttctcacttgtcagagctgcggctgccgcagccaaggccgtgccatcctgtactgtgtaaccactgcacagtgcggcgagccaacccccgtaccggcgacggtatccagcaccgccagtcgtcttccttttctccaagacttttttctttgcatggattcggaaaa

SEQ ID NO: 124996 - DNA, 535 bp, Zea mays
  Clone ID: MRT4577_45470C.1
gtaaaaaaaaaaaaaaaaaaaaaaaaaaaaaaaaaaaaaaaaaaaaaaaaaaaaaaaaaaaaaaaaaaaaaaaaaaaaaaaaaaaaaaaaaaaattaaaaaaaaaaaaaaaaaaaaaaaaaaaaaagttttttccttgccccgggcgggccgcggggggggggaaaaaaaaattttttttttttaaaaggcaccccaaaaaaagggttttttaaaaaaattgggggaaatcttatgggcctttgggttaaaaataaagggaaattgttttggcaaaaaattttgaaaaacgggttccaaggaaatttggggtttttttttttgaaaaatttttttgggaaaaacctttgggaaaatttttttgggatttttagaggggaaattttttttgggggtttttttttggggatttttcattggatttttttaaaggggaagggcaaaaattttttgcggttttggggacggaaaccccttaaattttttttcccctttttgatttatgcaaacctttggcgcggaacacccttaagggc

SEQ ID NO: 124997 - DNA, 1319 bp, Zea mays
  Clone ID: MRT4577_45471C.1
ctttcaaatctactggctagggggtcctgtggggaatgctgttgcagccttggggagcatctgtagccggcaggggaggagggagctggctggcggacgcgactgcggacagccttacactccagcccagcccctgcagcaatataccagcactgcacaatgcaggcctcctcctagtcccagctttgacgcactgtatttaaggcctcccacgttagacgttattctttatatatatacttagggccgggggttttgcatctctctattcattcatccggccaccaccggctctaactactcttcaagagacgacgaccaacaggcacgtcgatcgtcttccggcgagggcgacggaaggatgtccggcggcgagagtggtccggcagcggcggcggcggccgttccgttgctgcaggcgccggaggggaggacgacgaagtactacgagggatgccccgggtgccggctggacgaggccaacaagactaggaccggcgtcccctacctcaatttcttctacatctgggtcgtctgcctcgccgccgcactgccggtccagtcactgttcccttatctatacttcatgatcagggacttgaaagtggcgaaagaggagcaagacattgggttttatgctggttttgttggggctacctatttccttggaagggccatcagcgccgtgccatggggcatgttcgctgacaagtatggaaggaagccatgcattgtgatcagcatcctctcagtgattgtgttcaacacactgtttggacttagcacaacttactggatggcaattgtgactaggggattacttgggttgctatgtggcatacttggacccatcaaggcctatgcttcagaagtctgcaggaaagagcaccaagctctgggaatctctcttgttacatcttcacgagccatagctcttgttattgggcctgctattggaggcttccttgcacagcctgcacagaagtacccaaatcttttctctgaagagtccatatttggaaggtttccatacttccttccttgctttgtaatatcgttgctagcagcaggatcatgtattgcatgcatttggcttccggaaacgctacactttcatggtgatgacaaagtagaagctattgaagaactggaggcacaagttcgtggctccgaatctacaaaagatctgcataagaattggcaattgatgtcagcaataatcctctactgtgtcttttctatgcatgacacagcttatcttgaggtattttcactgtgggctgtgagcagtagaaaatttcgggggcttagtttgacat

SEQ ID NO: 124998 - DNA, 225 bp, Zea mays
  Clone ID: MRT4577_45472C.1
gggacctcgagccggcgggccaagttcagctcaggtcctggccaaagtacccctaccagggcgcgagggcagcaaatccgccatggggcgagggggataggccagcagcgcagagcggctggacgcggcgaagacgcagtggaccacgggacggcgatcaacgtggccgggatgggctacttcacggacgacaacgacctgaacggcatcaacaccgaaaccaag

SEQ ID NO: 124999 - DNA, 644 bp, Zea mays
  Clone ID: MRT4577_45473C.1
accacacttgcaccgagctagcagtcaagatggcgaccaaacacttggctctttgcctccttgttctccttagcataggcatgggcatggccaccgctgctgcaaaccgcaaactgggttatggccccggaggaggaggtggcggtggtggtagcggtggaggcggtggttacggaggaccaggctatgggtccggatcagggtatggtgagggcggtggcagcggaggtgctgctggagggtatggacatggtggcggcggcggtggcggtggtggtgagggcgcgggagctggtggctctgggtacgggtccgggcaaggatctggctacggagctggcagcggtgctgccggtggatatgggagtggcggaggtggtggaggtggaggtggcggtggccagggtggtggttccggatatggccatggaggtggtgaaggatacggctctggctctggctctggctcgggatatggatcaggtgaaggatacggacaaggtggtgctcatggaggaggctatggaagccgtggtggcggtggaggtggtggtggtcaaggtggtggtggctctggctatgggtctggatccggctccggttatggaggtggcaacgacaacggacattactaaggtcctttt

SEQ ID NO: 125000 - DNA, 103 bp, Zea mays
  Clone ID: MRT4577_45474C.1
tgcgagtgttcgggtgtcaaacccgtccgcgcagtgaaagcgaacggaggtgggagcctttcggggcgcaccatcgaccgatcctgaagtcttcggatggatt

SEQ ID NO: 125001 - DNA, 128 bp, Zea mays
  Clone ID: MRT4577_45475C.1
tgatctctcacggagttcctctccatggcgacgccccgctctccgatcccccgctccgaagcggccctcgattccgcgccgcagctggtcggtgcctcctgcggcgggatagtcgccgaggcggaggc

SEQ ID NO: 125002 - DNA, 385 bp, Zea mays
  Clone ID: MRT4577_45476C.1
ggtcaaaatactaatacaatttgtcggtttacagggaaacatgaacttgacaacccggggaaacatgaaagcggggagggaaggcaggggaagcgcggccctccgaaaggagaatctacaaggatctttcacgaacaaacagcttctgcaaaacaggggggcaggggggggtcaacttgagggacccaacgagcccgcgggaggaaaagaggagcctaacagggcgggattcaagcgccggggttccccatctattggcaccaaaactaatcagggcacgaaccaaaaggggcccaaaggccccaaaacaaacggggcctgcatatttataaaaagccttaaaagcggctcggaaggaaccggattcccttattatgccggggaa

SEQ ID NO: 125003 - DNA, 730 bp, Zea mays
  unsure (1)..(730): unsure at all n locations
  Clone ID: MRT4577_45477C.1
cggaaccctggggccggcccctagctaatagtatcagttccaaaaacgcatgaaggccctctgatgattcgcttcctttcttccgcaaaatggcggacaatgccctagcaaatccaatcccctccgtcgccgccgcccacgacgacgatgaggaccccgatcttatcagcctcctaccggattgcatcctcgccaccatcctctcccttctccccctccctgccgccgggcgaacccaaatcctatcccaccgctggcgccgcctatggccctccgcgccactccacctcctcgactcccacctccccgtccccacctcctccctctgcgctgccatgtcccggatcctcgcctcccactgcgtcagcgctgtgaggttccatatcctcctcgcccgtccctccgcctccgacctcgactcctggttccgctccctcgctgccaaaagcctccaggaactcgtcctccggctgccctccgacgacacccttcgcctccctccatcattcctctccttccggtccctcagcaccgcggagctcaccaactgccgcctccccgaggacggcgaagtctatttcccgcacctcggcgagctgaccctccgccttgccatcgtcccatccgccgccgcgctccatggcctcnctgatcggctgccccaagcttggcagcctatcgctcgaccgcgtcttcggctgccggacccttcgcgtgcggtcctggagcc

SEQ ID NO: 125004 - DNA, 674 bp, Zea mays
  Clone ID: MRT4577_45478C.1
cctgccgggatccacaagtcggcaacagacctcgacgagatggccgacgctccccgagcggctcacctcatctttgacgactcgaacagcagcaggggaggcccggcgtaccaggagatcgagcaagagggagccacggacctgtatcacaacgcgaaacatggcggcgacgcgcagagcaagggtaaagcgcgtcaggacgagcactcgatagagctcgatggctacaccgcggaccggcggctcgacgggcccgacacgaggaggacgagtcggcagctccggaggggaagcgagcctcccgacgcaaaggttctcaagcgtctatggtggagagctgcgttcatcaacgtcttgttcatctgtgcctggtactgtttctcgactctgatgtccgtctacaacaaatggatgttttcagaatccctattcaactttccctacccgctcttcgtcacttcgatccacatgcttgtacaatggctcctcgcagcgctcgtgttgtctttctttcctcgactccggccaaagacgcgacctgccgctaacgactacgcaacgaaagtagcgccttgcgggatggccaccggtctcgacatcggattggcaaacctgagcttgcgaacaatcaccctctctttctacacgatgtgcaagtcttcgggacttgcgtt

SEQ ID NO: 125005 - DNA, 418 bp, Zea mays
  Clone ID: MRT4577_45479C.1
cgaacgacccgccgtgccggccggttcgtcttctctgcctctcttcggttcggcggcggggtcggcggtgagtccagcccggtgatctcaagtccttacccaacatctccttgcggtttctgtgcaattgcttcgccctgctatacaatcgaagacaagggactctgaaatttggctgtcgactgattctgctagtttcgttctcatgaaataaaatatatataaaaatactgctgctgccgccgcggtctttgtggtttggagtgtgctttaagtttaaggtgcctgccatcatacacgccttcatgattcaccagttcatcatacctaatctgatcctcttttgactgtgcaatggcagcaagcgtcctaggatgacgcgcccggcatatatgtgtagacagaggtgctccatgga

SEQ ID NO: 125006 - DNA, 1532 bp, Zea mays
  Clone ID: MRT4577_4547C.1
tgggaccctcgaggccggccgggaaagctacgatcccaatgagacgactatgtgagatcgtcgcgttgatgtgctcacatgtcgtctttttatttgggtgaaggatggatgcatgtatcagatcacttgttgtttaattaatgccatttcagtctttgtccaataaaaaaaaaaaaaaaaaaaaaaaaaaaaaaaaaaaaaaaaaaaaaaaaaaaaaaaaagccctcgcccggataggagcgactagcgagaagccaagcggcttggcacctcagcctgctgcctctgctcgctctcttcgccctctttctgcactaatcctcggctcaggcagccaatattctgtctagcgttgagatggcggacaacgtcctcatcgaccgatcagccagcggctttgagttccggcgctgggcggccggcgacgagttccagagcctcgccaccatgagcgtgctgcagcctgacgctcgcggtatctacagttccttaccatacgtttcgccgctgcctccgttccagtacgcggcgtacctgcactcttcgctctccctcccaccgctgaatcctcgccgccacccgcctctcctcccgctcccgccggcagctgctgctaaagggatgaagcaggcggcgcagaggaggacggggccgagagagtgcaagaggaagaagccgccgcggacgccgaggctgggggaagagcctccgagcgcgcagcgcaggaagccgctggagcgtgccacgccgctgccgcccgcgcccgcggtgcacgaggcgctggacgaccttgagcgccaggtgaccatggggttcgtcgaggacctcaagcacgcgctcgcgctcgctccgccgccaagcagcctaccgctgcccaccttctcacttgtcagagctgcggctgccgcagccaaggccgtgccatcctgtactgtgtaaccactgcacagtgcggcgagccaacccccgtaccggcgacggtatccagcaccgccagtcgtcttcctttctccaagactttttctttggatggatcggaagaaaaatgctacaaggcattattctttttctttcataaaagaagggcggctatttaattactcccttattttctttacagtcccttttttatttcgtcttatatatggctgtgatgtgaaagtgaacctaatttatatggtcgtttgcatcacatatccaaagttaacttcttgatgggaagtctgtttttattggcttgtatcaagaattcaagattaagataagttgtacgcttcaaaaaaaaaaaaaaaaaagcggccgcatgatcaagatgggcgatatcaccccgctgaccggctccaccaacggacagataaggaagacctgcagaagagtcaattagcagatagctagctagggtccctaattaagacccatgcatggctgttgaactgcaagctaagtaaacccttgttgtgttgatgtgctcacatgtcgtcttttttttgggtgaaggatggatgcatgtatcagatcccttgttgtttacc

SEQ ID NO: 125007 - DNA, 557 bp, Zea mays
  Clone ID: MRT4577_45480C.1
aattcggcacgaggacggcgggctgcagttgtcccagcgattcggaatagaagcgtgcgcggtcggtgcgcccacccacctacacacacctcgaggaccgccccttctcccccagtcccactccaaccgcaccactgtggcctgtgggctgtcgctcctcgttgccggccgccatcgatcttagcggcggtgtcgacgcttccatggacgatgccctcgatgtgttcggtgaaatgggcacacgtgcaagtgttgggatggtgactatcatccacggggctggacatcgaggttatatcgaggctgatacacagaccgtctcttcacgcatcgcttctcatagcgtctcagttcctcgatccagaaatggtgtgctcatcatgttgtccgtggcctctattttctcaggcgcaaatgcacctctcctcagctatgttccaactttgttttatgctgctcataaatttccattcaggcaaggaaaaactaatatgtatccttacaagctggattcattttttaagttatttatattttagaattttggttggtctgag

SEQ ID NO: 125008 - DNA, 809 bp, Zea mays
  Clone ID: MRT4577_45481C.1
aagaaagcggtctccctcttcctcccctgtcccgcgccgtgggtcccgccacgcagccatatcgtcggcgctggagtggcgccggcgggacgagccctccgaggcaactcgtaaactactccatggtcttttactaaccagcaaccaccacgatctagggttaatctggagcctaatcacccggccaccaacccccactcccaccccagcgtcctctcgcctcgcccgccgtctccgacccccacccagccgtcctagccacccactgcaactccgcaagccatggagaagccgtcgcacgtagccgccgccgccgggaagcaggcatcgcacaggcttgcagtggtcactggcggaaacaagggagtcggcctggaggtgtgccggcagcttgccgccgtaggggtaatggtcattctcacggcaaggaacgagaagagagggaaggacgccgccgagtcgattcgccgtgaatccaacctctccaacgttgtcttccaccaacttgatgtccgggatgacagcagcgtcgccgctctagcgcgacacatcgagagcagatacggaaagcttgacatcttggtcaacaatgcagcggctgtaggagttgcagcagacgaggaaggcctcaaagctctgaaccttgatgcagagacatggacatctggcagagcagccactctgctcaaagacgtgttccagaatacctatgaggtgccacgtgactgtctcgacaccaattacctatggatccaaacgggtaaaagaagacctccttcctctactgaaactattcccgcccgggagct

SEQ ID NO: 125009 - DNA, 324 bp, Zea mays
  unsure (1)..(324): unsure at all n locations
  Clone ID: MRT4577_45482C.1
aagcagacncgctgccgcgtcgtagctcggaatcgctcgggacggcatcgaagagcagaggacggggagaggcgcgcgcggaagaaaagccgcggcggccctccgacccggaagcgtggccagaaatgctgatcctgtgagccgacttcgtcgtcagtacatgctgtgctgntgcgtgtacccgctcgactctgtttcggacaccagctgcggaagctcacttctgctgtctgaagtgaatgtagctgtttgaaacttatcagagcggtttgggagcatgattgatgggacccccttatttcttcatccaagggattttagtca

SEQ ID NO: 125010 - DNA, 282 bp, Zea mays
  Clone ID: MRT4577_45483C.1
aaaatggcttctcaggtccctcacgttccgcctcgtgctgctactgtcctctcggcgacagagctcatcggaaatactcctctcgttagacttaacaagatcccccagtcgctgggcatcgagtgcgatgtctacgtcaagccagagctgttcagcgctggaggcagtgttaaggacagaattgctctgcgcatgattgaagaggcagagaagagcggaagaatcaagcctggcgacactcttatcgagcctaccagtggaaacactggtatcggtcttgct

SEQ ID NO: 125011 - DNA, 398 bp, Zea mays
  Clone ID: MRT4577_45484C.1
agaccgaaaaaaaactttgttttttttatgcggaaaccaaccagtgccataacttggatgcattatttcgtgaaaaaaaataagtcacaatagttttgaaggaaacctttccatttggtgaaacgccagccggggttgtaacccccgtttgccgcttaacccaataaaacctttccttttaagacaaaaagggttatgaaacccgggggctttttgggtggcccagaaacattatccttccaagattctttgacgtccttttcattgagggggcctacccgaaaaaggaccaagggctgggcacggtggatcttgttggaaagaaacccaaaaggtttccccgatcctttaatttgaggccttgttgggggcccctttaaaatggtggaaaaatttgg

SEQ ID NO: 125012 - DNA, 392 bp, Zea mays
  Clone ID: MRT4577_45485C.1
aactcctgggcgagctcacttttcggcggccgcccttcttttttttggggggggtttttaaaaaaaattgtggttaaaaaccccgaacgcaaagggttcacccctatccactccataaaatccactagcctggcgctctaaaacccaccgacttttactactcatccagcggctcagtctctaaggactaccacaaatagctggattcaatccaaagcgaacaacctctaagtctgccctatctttaaccaaactccctctggaggaaacgtggctgagcccagtagaatattatttgacccttaactacttgaatagcgttggccagtcctcgataatcacttgaccactggcccaatttctcccccaggacctatctcatcggacagaag

SEQ ID NO: 125013 - DNA, 761 bp, Zea mays
  Clone ID: MRT4577_45486C.1
tccacgcgtccgcccacgcgtccgcccacgcgtccggctgcagatccgcctgagcaagattggctcgtcggactccggcgctgccgccaccggctcggcagccgccgccggtgccgccgccgctgtggggtcggctgcggcgctgggcggcggcatcccggaatcggacaccgtggcatgccccgaccacctggtgatcgcggacctacccgacgcgaagagcctcggtgccgtcacgacctccgctgccgccgccacgcgcgccatcggccgtctctcccgtcgcccggtcggggagcgcgtccacatctgctcccgctgcgagttccccatcgccatgtacggccgcctcgtacgaacttgctaagcccttttctttatgcggctatcaaaccacgaacttgttccgcttgtgttgctgctaaggaaactaggggtttaattaaccgcgtgtgttgtggagccacttaccgccacaaactctattattcctctgttgatatcgtaagtgaaaatggagcagcggatgtgcatcatctttgttttatgcttctgtttagagtgttaggcttatgagagttggagaaaatacgaatagatataatttgtagtagatctgtggtaatggctattgcctcagtgttctagcgattccattgtaaggagagccaatgttatctcgttttgttcatcacaggcagtcaagggaagctaagaccgacttgttagcgattgaatgaaggcagtattgatgttctctt

SEQ ID NO: 125014 - DNA, 334 bp, Zea mays
  Clone ID: MRT4577_45487C.1
agcctgggaaacacaaacgactgttagttcgggtgtaatgtataatgtatacaggacttcacacttgctcatataactcactatataaaccaaaccgtatgtcataagactgggaacacacataacatgataaaacactctaactgttgaatgccttggaccctctcagggctcactgaatccgtgccttaatctctgaatcgcgtgagggcacaagcacacccaacttgggttgagacagcacatgagccaccctaaccagtgtgtacaggagggctcagtacgatgtgctgcagctgacagctcggactagattgctcataccgcatgacct

SEQ ID NO: 125015 - DNA, 260 bp, Zea mays
  Clone ID: MRT4577_45488C.1
gcgcccacgcgtccgaactttcccaactatatttaatgcctataaaacgttgatgatgcttacggagatcagaatatatgggcatgtatgtcgatcctccacacggatgtcttatccaagttcaacaccgatatgtctaatcactattacaccactgatatctggtatatcatcccttccatccatccctataccagtttgatatcaggttctatcacctatatttctgagaactatcatgatcaaggatcaattggtta

SEQ ID NO: 125016 - DNA, 557 bp, Zea mays
  Clone ID: MRT4577_45489C.1
gccccgcggggccctacggcggcggcccgggctccatgtcgcagccaatcaacggtagcccggtgcccgcggggctctggagggtgccgccgccccccgcggctactgccatggagaatttcggcgtgtccgcccggcacggcgctagtggtggcacggccttcccggtcgggccgcctggtggggaggcagcagcgtgcaaggacgataaggcggcggtgatgatgagcttgctgtccccctccccctcgctctcgtcgtgctcgtccacgtcgccggagacgaagctagcaggtaggtatgaactggcccgccagaaggagactgttgttagcttggacctccatttgtaatcctttcttgtttatttatttacatagtaggtctccgatctctcccgtcgttgtggattagcagtcgcaagcgcgtgtcaattctcatagttttctaaataatcgtttctacgtaccccctttttttatgccgtacgtctgaaattcaagttcttcatatttctcgaaaaaaaatcttgtggcccagtttctactaaagtttac

SEQ ID NO: 125017 - DNA, 481 bp, Zea mays
  Clone ID: MRT4577_4548C.1
ccggccgggggtccaccgccatgctggtccccgcccagtcggcaccggcgccgccgttgtgctctctccgctccctatcgtcacactacctcctccttccgtcccacttcctcccccctggcggcgtccttcccccgctccgccgcggcgacctcgccatccgcatgggcggtgggccgcgcaccttccccggcggcgtgtccaagtggcagtggaagcgtatgcaggccaagaaggcgcggcagctcctcaaggcgcgcctggcccgcgagcgccagctctacgagatgcgcaagcgcgtcgagctccgcgacgccgtggcgcacctcgagcggccctgggacgcgggctcctccgccggcgcgtccgccgtggctcccactctgctctccgtcgcggccgaggaccaactcaaggcgctcgcggaccgcttccaccgccccggcggcgtggacctgtggaacgaccgcgacgggccccg

SEQ ID NO: 125018 - DNA, 380 bp, Zea mays
  Clone ID: MRT4577_45490C.1
actaaagctacatataggtgcatccccgcatattcattgaacacacattacattaagtacaaagaccaatgcatgatatgccaacacacatgacatgacagaatgcacacacagtttatattcgatgagccttgatattgtttatgatggatgtaacaggctccaccgtctgtctaggggctgccagccgtcggttattgaaacagagtggtatccactcttttcatcaggttggtactagttgaaaccactccttcctgcttgtgcacaggcggcgtacatgacacagaccatagcacgtacaacgagggccatccggcacaaggagagcacaggagagcattgattgattatgatctgccctttgctcaaagggcaac

SEQ ID NO: 125019 - DNA, 839 bp, Zea mays
  Clone ID: MRT4577_45491C.1
aagtcgtcttcctccctctcccgtgcagaggcggcggcggcgcacgaggtgggaaagatgtcgagggccgtcagggtccgcggcgacgagctggagacggagcggggagcaagggcgaagaagcgaagcctggcagtggatcgctcgacgagccctagatctcccggcgacctagctgttgggagttcccattcccacccagagatactgttcgcgatcttcgagccggacgaagcccaatccggagcaaaacaaggtcgtgtgtgcgatgtggtggagtccgcgacggaggaatcctccgatccacccagctcaccgatctacgaaccctacattccggacgaactagccgcagatccagtcgtacgctccgccttcaagcatgccatggctaaatacgaggcagaagaagatcgtctagctgacctgttcactatggatcactactggtaccaaccatcttcctgcctgcgcaaggaccgtcgtctcctttccatccgtgaactcgcaagagatgcaatactttctgctgcaaaatccgtcatcttgctctcgtcctttctcgacaaccaaccgctgaataaatgctgtggcttgtggtttcaaagggacggccagagaaaaaccgcccttgttttgacgtctgcccatctaattcgtaaagatgatatccacaagtggaagcagcagtggacaggcgagtatcatcagaatgcgaaggtcattgttcatttgctggataacaaaactacactaggccagctcatctatcttcaagagcactatgaatttgctatttatgaagttcaagtggacaaaccagttcatctacccacttt

SEQ ID NO: 125020 - DNA, 829 bp, Zea mays
  Clone ID: MRT4577_45492C.1
cggccgctcgagccggcaggccgggaccccaaaccctagcccccaagcccggccgcccgcccgcccccgccatgaactaccgctttcagaacctgctgggcgcgccgtaccgcggcggcgacgccgtcttcgcgggggactcctcggtgctcctctccgcggtggggaaccgcgtggcgaccaccgacctcgccgcctccacctccctcaccctccccttcgagtcctccgccaacatcgcccgcctcgccacctccccctcgggcgacttcctcctcgcctgcgacgacaagggccgcgcgctctacgccaacctccgccgccgcgccgtcctccaccgcgtctccttcaaggccgccccctccgccgtccgcttcagccccgacggcgagctcatcgccgtcgccgtcgggaagctcgtccagatctggcgctccccctccttccgcaaggagttcttccccttccacctcctccgcaccttccccggcttcgccgccggggtcacctccttcgactggtcccctgactccgcctccctcctcgtcgcctgcaaggacctcaccgcccgcctcttgcccgtcaagcggggcaccgggaacaagccctttctcttcctcggccatcgcgcggctgtcgtcgtcgccttcttcgccaccgataagaagactggcaaagtccacggggtctacacggtttcaaaggacggagctatctttacatggaaatttggtggagggcaatgatgctgcatctccaccttcacccgggacaccggagcaggaatcagaacagaatggtgagccggaattggatgctgggagcagga

SEQ ID NO: 125021 - DNA, 347 bp, Zea mays
  Clone ID: MRT4577_45493C.1
tgactgccatatcacatcccgctagtccatctcccttgagacaggagtggaatcgcatcgcttccatgggcagctcctcgaatacctactcaagcatgctggccacgtacacggcggtgacgagggaggacatggtcataggcagggactcgtcaccaccatccttcaaggagaacgaatggatgctcggctaccacgaggcgatcctctacgatgtcaaggtgctaaggatcgaataccatgaagacgtacggcgcttcttcgtccataatctcggttgagaataacaactgcgatgaatagcttgctaatgaccgcttgttggaattgactgaggaaaacgtgcg

SEQ ID NO: 125022 - DNA, 228 bp, Zea mays
  Clone ID: MRT4577_45494C.1
attaatcagtacccacctggggggggcattaattagacgctgcagggggacaatttacattttataccgacacgcttagagcggggacaaccaggatacattactccgtgccagtgtcaaacctattcacaagccaagagaacggaacggctatacaaaacattgggctgtcggtaaatttccatgctactaccaagaggaaaacacagtcaagtcctcttattaagc

SEQ ID NO: 125023 - DNA, 446 bp, Zea mays
  Clone ID: MRT4577_45495C.1
ggttatcatcacacaatggagtgttcaccttcatcttggatggaataaaaacatgattcgagcatcgaataaatttcatcactctggtgatgcctacagtctccattgaagaagacatggaccttctcctggacctcaatccaactgcagccggtgatcctcttcagtcccttctccttaatctccctcctgaccatagacacactctgccaacttcctgacgcagagtatacatttgacagaagaatgtaggaagatgtgtcctttggatccaatgcacgaatgcgctttgcaacgctctcagccagcttgctgttccagtgaatctgacagccccctaacaaagcctttcagaacccaatgcctggttcaaaggggagctcctcagaaaccttctggcctcgtcgaccgcttggcacggatagtagatcaccaccaagcgtatg

SEQ ID NO: 125024 - DNA, 399 bp, Zea mays
  Clone ID: MRT4577_45496C.1
tgggaccctcgagccggccgggaacacaaactcctgaagaagccaaaagactaggacctcatccatctccacctgatctgtccctcgaagctgcgccacttgcagctgccgcactcatagctcgcggagatgatggttgctgctgccacattgtcatccagcatcacaatccacacgacaaaggagcaaatagatgtacagcgtaaagtctgaggtgactaaggagagagccaattcacattaagtgcgctgtgctcactggacgcgttccagcgcgagatacctgacgtgacagctccatcactgaatcgagcaaagcaacctgacaggccgtttgcttattggacgctccaacactcgctcattaccggactcgcggcgctcggtcgctcagctgtt

SEQ ID NO: 125025 - DNA, 697 bp, Zea mays
  Clone ID: MRT4577_45497C.1
atttcacctcagcctcccctcctctccggtgtacgtctccgccgagatggtcggcactatccggctaagactcccctcccttggtcgcgagcttctcaccacgatgccggaggagatgctctcccacttcttctctcgatgccctcaatggagatctagcaccgccgcagatcgaggatcggctacctccatcacctgaggagcatctccgcacgcaaggatctagtttattcgacatataagactgaatcccaggaaggctcacgcaaacacgaccagctgcgaagacaattttttgtccacccaaaagtgcgagaaccaggtgatgggatggacatctactgagcatccatatgctaatgtgcacgaagcacgacttacgtctgacactgcagagtcagcaaaggcctttgcctaaaaacatgaatggaattatgtggatcggaaacgccatgcgcctcttctgaggcctaaggcctacactgacaacttcacgtgtataggctcctccgaaagcggagcaagcatgagactcgagatatctgtgatggtgacattggcaccacgccggtttcctcctggatcgattgtatgttgatttcgatcgtgcccattgttgaagcactaactagagcatgcatctatgctacttgtaataggcatgaagtgcaatcctacagatgatggacttgtactt

SEQ ID NO: 125026 - DNA, 743 bp, Zea mays
  unsure (1)..(743): unsure at all n locations
  Clone ID: MRT4577_45498C.1
cattgggaccctcgaggccggccgggaatttggtattcatcttcctttaatctgggtttcgcttacttttatatgctgttgtgttctcctgatggtttgttccgatattaaatggtctggttcgagtttccattttagtatcaataagtctggttttgagagctggcatggagattggagaagctgatgaccgaagtgcagacacgacacgaactggattcggcgacgcatcttacaaaacagaagagaaatgggaacaggccggcacggcatctggcccatttcgagctaaaagctgtggtcttgatctgcgtcacgacgggtcagcctcaatgtatgcttatgctttcaggctgattcgttccgatcttgcatttgtttttttggggaggaattctttgctatttggtggtttggaaggaagaagggggccaggcgtagatgttagtagaggatcccaacaacactggtgtggttcgctgaagatgttgatggtgggaaaagcacatctggaataatggccaatattccagttacgttccaatccatgaaacaaaaaggtggtagatatatcactgctacaaatgtcaagcaatatggctatctcaggtataaggagagagacacgtcaatcaatgttgaagaagaccccagtatttcatgggcagagcgagtatatcgaggtgaagcatcactttgntcatgaatctgtagccaatatagcctaatcagcgtggattttg

SEQ ID NO: 125027 - DNA, 595 bp, Zea mays
  Clone ID: MRT4577_45499C.1
cgctgctcgaggattggatatcccaaatgtagatctggtgatacattttgaattgccaaactcgtcagagttgtttgttcacagatctggccgaactggccgtgctgggaagaagggcactgcaattgtgatgtacaactatgaccaaagtagagctgtacgggtcattgaacgtgacgttggatgcaagtttacagagctgccaaaaattactgttgatggatctgacttgctgagtggtggatttgactcctttggtggcgggtatagcggttcaaactatgggcgctcaggtggattcggtggacgtggtggttttggccgatcaggcggtggcggcggatatggcaattctggatttggtcgctcaagcggtggatatggacgttctggtggtggaggattcggtgactcaagattttgtggtcggtcaggcggcggtggaggattcagtggtggccaatcaggcggcggtggaggattcggcgactcatggtttggccgatcaagtggtggtgggtcaggatttggtcgttctggtgggttatgagattcttgttaccggccggttcggttggcggtttcggcgggttct

SEQ ID NO: 125028 - DNA, 977 bp, Zea mays
  Clone ID: MRT4577_4549C.1
acgtagattcctgtagcgtagcaactccttgacactctgtctactcggttcgtccatgtcccgaggctgcgattgcaaagagagcggttcgtccatgtaggggcgctgcgattacaaagagagttgttcgttcatgtaccggggctgtgattacaaagagagaggctcgagtggcgcaattcttctgggacgacggatctcgccgttcgtgcgtggcgcccctcgtcgcagcggacgggtctggatcgttggcatgggaggctgatctatgagctgagccgaacagtgactgatcgtgtcgtgtgagcttggtatctcttgtcccgtggcctggctccgcatggtcatgccgctgcggtcggtggaggtgtcgcgcttgtggcgccgccgcctgctagcaggttcttccccggccacggtggagtggaagaagaagcgcatgaggaggctgaagaggaagcgccgaaagatgaggcagagatccaagtaggctgatggggattgtggatggtggtgacgacatggttgtgttacgattcttcgatgcgtgtgagttcatggagagatgtcacatcctagttcgtcgtcaccgtttgccatgtgtccaatagctcgtcttggaaacctgcacttcagtaggccatctatcgtggtttctagctatatccagagttttgtgctaagacaaatcagtcagtcgttttgtgaacctactatgatggagctttatttgctgctaatatcgacctaaaaaaaaaaaaaaaaaaaaaaaaaaaaaaaaaaaaaaaaaaaaaaaaaaaaaaaaaaaaaaaaaataaaagaacaaaataatataatgtctccaaatcaaaataaaaatacaaaattaaaagggggggggccctttaaggggacccaattttggccccggggggggggggggaaattttcttttatgtgggcaaaaaaaatctaattaaccggcccgggggtttaaa

SEQ ID NO: 125029 - DNA, 454 bp, Zea mays
  Clone ID: MRT4577_454C.1
cttaaccctttgaatgtcttaacgtccattattttataacatttctattgaccaatcgcttattgtttataggtattttttaaatttagaatctgcgcatatcaatacataaaaccctattcgatctctttcttctccaatctaagttgcagaaccatggccaaaactctctactgcaattttttttgatcttttcttttactttttctcttcgtaatcgctggttcgagaaatggagaatcccgtgggtttaagattcccgccgaccgacaaggacatcgtcttctattacctccgaccaaaaaactccgatagggacacgagtcatgttgatcgagtcattagcacagtcactatccgtagcttcgatccttgggagttaccttgtaagtgtttttacgagttttcctcttcaaccatcggctactttttaagtttagggtttttctctttg

SEQ ID NO: 125030 - DNA, 307 bp, Zea mays
  Clone ID: MRT4577_45500C.1
tgatgatgatagcggtagtagagtgctcatgaagctggggaaggccaatttgaattacaaaaacttgttgatacctatcgctcaaatatcatttacactatcacaaccccatcagagtctcttctcaaggagctacagactgtagaggaaatgaagcagcaatgcgacatgaaaagagagacatatgaagctatgagggcatcctacacacaaaaaggaaggtcaaggcattccaaaactgaaacatactctgcagaacaactgcaaagcgctctcgctgagtaccaagaagacgcagcgctgttca

SEQ ID NO: 125031 - DNA, 591 bp, Zea mays
  Clone ID: MRT4577_45501C.1
gtaacacagggttaggtggtcggtcaggtgccggtgcaggattcggtaactctggattcggggaccaatcagacgacggtggaggattcgacgactcagggtttgagcagtcgtgcgatggtagaataggtgggggtcgttctggtggtttcggcgattctggttccggccggttcggtggcggtttcggcggttctggctcgggtggtttcggtggctttggcgacaagaactcacggtagactcttgcaagtaatagcagaaagtgcagaaatctgtgttttgcggtagcaagaacatctggagagacgatccgccggatctcagaaggcagaaggaaataatcacgtgcctttgcttattagtgttcttctctgtttgcattttgatcgttcaagctctagctctagaccatacctgtaaaatattccgtggctcctctatctactgtatgattattgtggcgctgtcttttcttgtaggctgttttaacctgaatgacggcctctatataagcatgtcataaatcgactttattcgcaaaaaaaaaaaaaaaaaaaaaaaaaagtactctgcgttgttaccactgct

SEQ ID NO: 125032 - DNA, 341 bp, Zea mays
  Clone ID: MRT4577_45502C.1
gccctcaaataaatatattaaacaggcgttgcatcagttcaaaagctagtctgggggggcatctttcaccaaaaaattggtcatgaatgggggcaaattggttacaatgaattccagtcccggggtttgaagggattttcttctatggatcacttccccccgggggtattcatcatcctttctgggggaggcagcccaattagttgcaaagttactgaaacccagcttaaacatgtcaagggtcaccccgttctttactaaaacactcggcactcccatttttgataccgcttcaaaattcccggtctcggcatcaaaaaacaacatgggatttgtaggga

SEQ ID NO: 125033 - DNA, 1051 bp, Zea mays
  Clone ID: MRT4577_45503C.1
ccaaagtagatctggtgatacattttgaattgccaaactcgtcagagttgtttgttcacagatctggccgaactggccgtgctgggaagaagggcactgcaattgtgatgtacaactatgaccaaagtagagctgtacgggtcattgaacgtgacgttggatgcaagtttacagagctgccaaaaattactgttgatgatctgacttgctgagtggtggatttgactccttcggtggcgggtatagcggttcaaactatgggcgctcaggtggattcggtggacgtggtggttttggccgatcaggcggtggcggcggatatggcaattctggatttggtcactcaagcggtggatatggacgttctggtggtggaggattcggtgactcagggtttggtggtcggtcaggtggcggtggaggattcggtgactctggattcggtggccaatcaggcggcggtggaggattcggcgactcagggtttggccgcacaagcggtggtgggtcaggttttggtcgttctggtggtttcggcgattctggttccggccggttcggtggcggtttcggcggttctggctcgggtggtttcggtggctttggcgacaagaactcacggtagactcttgcaagtaatagcaggtataaaattatggacgtcctgagccaggttcagcattggtaatgcacatcactctctgaccccctatccatgaccccctcagaaagtgcagaaatctgtgttttgcggtagcaagaacatctggagagacgatccgccggatctcagaaggcagaaggaaataatcacgtgcctttgcttattagtgttcttctctgtttgcattttgatcgttcaagctctagctctagaccatacctgtaaaatattccgtggctcctctatctactgtatgattattgtggcgctgtcttttcttgtaggctgttttaacctgaatgacggcctctatataagcatgtcataaatcgactttattcgtcaaaaaaaaaccacgcgtccgcccacgcgtccgcggacgcgtgg

SEQ ID NO: 125034 - DNA, 641 bp, Zea mays
  Clone ID: MRT4577_45504C.1
ccggccgggccgggaatgcctctcatctgaagggcgcgagacagacaccatcataccaacgcgcggaatgtggacgcaaagaataacaagaacaagatgacttcctccgaaacgcctcatggtccaagcccagatatccgctcccgagggaacccgactgtgcgagacaatggccctgtccctgaaaaactgctaccaccatgtagagcgtaacatcaccctatagccacaggcgcgctggacaaatgaaagcaattggatcgctgtcctgtacaaccacgattagggcgaaaggtaccccattgaagcaggctcgtcagagagaatgcacccgcacgaatacagaccccagatcttgaccttacactgcaactcacttcttcctagaacctcctaaagacaataaatgtagattcccgcatggatgtacgaccatggtataactatcattaactgaacaaggcgcgccttgaatctgagacagtcctgggtactttgtgttattgctgactaaacatctatatcccccatataaagggaacatcatgcacttggcgcgggcgccacgctggcatgcgaaccaaatcacatagtgcctcgtgattgttcttccatatttgattaataactggtgcctaaga

SEQ ID NO: 125035 - DNA, 1040 bp, Zea mays
  Clone ID: MRT4577_45505C.1
cttctttatagaatcctatcgatggtcttgcccacagccgagccagagggaagaatttttctttttaattcatgtctcattagactgctatatttctctccttacatagagaggcttacttgacctctagagatgcatattttctcttatatagaattgtatcgatggtcttgcccacagtcgagccagagggaagaatttttcttttttaattcatgtctcattagactgctatatttctctccttacatagagaggcttacttgacatctagagaagtatctcataaaatcaatttaatgtatctcttttcttaccctaactaaccaaatcaatctaacttatatgtttccttatccaaaccaaaatcaatctaacttattttttttactaaaccaatctaatatgtcatgaccaatttagttttaatgtactgttattttttagtggttgttttatgtccatcatttgtactggactttgtttttcttgagatatatcagctgaggcactttttaagtgtattaataaaaaatcacaaaaaaatcatatttctgtgtcatgtgtttctgtgacctactacctcaccatattcagaggatcattttatgaaatgcactatttcataaattcatcatccttgtggagtcactgcaaaagcatggttgcagcttcctattattctaaggcctgtttgtttctgtgactggccaacatgcgactgcgattaagcgaacgagactctgaggatgtgttttggaaatcacccagtcatgttcattttctgatgtagacacgttcgtaaccgaccgtttggaaggaataatttgcattttccactgaaatgtgccactgtcatggaaccaaagaagccctaagatgtgggatgacccactttatcaatagagaagtcatttgtaatataccaccataaccattttgcacataggaggtcctcagccttctgatccaatttgcacacaattttcagggatcatgatggcaaagtgacccctgaagaggtggcggcggctttagtc

SEQ ID NO: 125036 - DNA, 283 bp, Zea mays
  unsure (1)..(283): unsure at all n locations
  Clone ID: MRT4577_45506C.1
gaattccggacttgtagtttggataggatgggttataatttggatctggtattttggtgtgaatttgttaggaataggtttacatagttacggttcatttacattaccgtgtaaataattacatattataaaaccttgggtttttttgggggggggttgatttgngatcccttttgttagaagttgaggggggtctgggggtttggggatagatgtagttagactgtggtactgtgttgtgggtttgttatttttggggtgtggggtgtgggggggactgggt

SEQ ID NO: 125037 - DNA, 141 bp, Zea mays
  Clone ID: MRT4577_45507C.1
cttctcgtcaagcgccggactgggacagatccacctctgctgatttggggtgaatgtacgcgcagggaggagggaaaaaaaaactagtccagtctgctgctgaatgccgatgggcgatggctaacaatgcagctatgttgc

SEQ ID NO: 125038 - DNA, 627 bp, Zea mays
  unsure (1)..(627): unsure at all n locations
  Clone ID: MRT4577_45508C.1
cggggtgaggcgttggctcccttccccctgcttcctccccccactgccggtcgctgtgcaagagctgccacgagacagcagattccccatcatccaaagcgaggctgagggggaggagaggaagcaggaatagcctaacaggggtatagatctcaggaagctccatgcgggtgagcttgtgcccaagcctgtgtcccggtgcgcgaggctgagcttcttgcccgttgcccgtggcgcccccgagctcaccaatgccgatgcgccgccgccgccacgcctcgagctccatggctgtccagcgctctggtgccgattgacaggcaggttgtcctgcccgttcctttttctgcgaggtagctgcttgggcagacaagtaggagcagcggctcagacttcggatctcggcatgggctcctttgggatggactggaaccagaaggcctccgtgttgtgggactgggagaacttgccgcccgtagccatatgcgcgagcgggagcgagaaccccangatggctgctgcgcctcatgctttgcattctgcctgtggcaccatctcttccagctcananatggggtatggctcatccaagagctccgtatccgcgtcggctgatgattcttcacc

SEQ ID NO: 125039 - DNA, 1130 bp, Zea mays
  Clone ID: MRT4577_45509C.1
acaggcgggagcgcggacggtggcggaccgtggtgggtttgtgaggcgttggctcccttccccactgcttcctccccccactgccggtcgctgtgcaagagctgccacgagacagcagattccccatcatccaaagcgaggtgagattcttgctgaaagatcggacggagggagtagaatcgcggggggcgtggctgtggttgccagtcgccatgccatgatgtgtgtagggtccagccaccggagaccggagttgctgatgacgacttggcgatgctgtggtttccaggctgagggggaggagaggaagcaggaatagcctaacaggggtatagatctcaggaagctccatgcgggtgagcttgtgcccaagcctgtgtcccggtgcgcgaggctgagcttcttgcccgttgcccgtggcgcccccgagctcaccgatgccgatgcgccgccgccgccacgcctcgagctccatggctgtccagcgctctggtgccgattgacaggcaggttgtcctgcccgttcctttttctgcgaggtagctgcttgggcagacaagtaggagcagcggctcagacttcggatctcggcatgggctcctttgggatggactggaaccagaaggcctccgtgttgtgggactgggagaacttgccgcccgtagccataggcgcgagcgggagcgagaaccccaggatggctgctgcgcctcaggctttgcattctgcctgtggcaccatctcttccagctcagagatggggtgtggctgatccaagagctccgtgtccgcgtcggctgatgattcttcacccaaggccaaggggaaaagcatggagctcaacttcgcacctgacaaagtgcctgacaagaacactgattcagggaaggttgacgacgccaggacctctccgtcgtcgccggtgattgccatcagcagtgcagagcccgtgcttagcctgaagcttggcaagagaacgtatctcgaagatgtctgtggagggcagagcgtcaagagtttgccgtcggatacgagtgcagagactcctcctcctgcttctccgaagaagacgaaggtgactccaaacaagaaatcttactgtcaggttgaaggctgcaaggttgatctct

SEQ ID NO: 125040 - DNA, 304 bp, Zea mays
  Clone ID: MRT4577_4550C.1
aaaacgctgataaggacgtgcttatgctttcggcctaaggatacgagaacatgtgtacagttgctaaggctataacaggctgttcaggaaatctggcaaacctatgtaggtatctaatatatggaaatatgtacacagggttttttttactattgtaacactggcatcagaacatttactaacgtagcacgaggcaaaaggcctcaggttgagctggcaggaatcagggactagcaccgaagcttgtgaagcgacccaggagaggtgaccgggagtatgcacttgtagtcctggaacacatgcg

SEQ ID NO: 125041 - DNA, 427 bp, Zea mays
  Clone ID: MRT4577_45510C.1
cggacgcgtgggcggacgcgtgggtcagaatatcacaaattgagataactgtggacgatactctcagtgcatctgtccatccaggacacaaaggccaatacatcagtgagatagtttataacttctcaacctgattaggataaaatggtctgaactacatagctagctgacgcagttggtcaacttatctgtggtgaagatgaaggacattagggctttcaatagtcctgcacaatacacttgcactttcatgtgcaagacatggatttttatcatgatatgaagggcttgtaacataatggctcagccttgaccatttgtagaagcagcacaaagtcattttgaagtacatggatttctgtgaggattaatttttttaatatttacttgtgttgagaaatagaagggagtggtgagagctatctcg

SEQ ID NO: 125042 - DNA, 1421 bp, Zea mays
  Clone ID: MRT4577_45511C.1
caccaccgcgcttggccattggccttatcttcagccacgcgatatttcttttgctcagtgttgtctctgttcttcccccacatcggcatcctacccaggccgagcttggcccctgcgccctcccatctccctcagctcatccatctccatgctcagtctgtgctcttgtgtcgtcgtggtcgcctgggtcgtctcatcgccctgcgtcgtcgacctcgctctagcagtcaggctcctgtgttgttccttggctgtcgtcgcctacctccctgtgccctgctcctacttcgtggtcgtgtcgtgtgccagggctatccgcagcttgcctgcaccaagtccgggcatgtccatcgccgttcctcgtgcagctcgctgccggctactgtcaacctcgcccatggtcgtcaatccgcccatgtccggtgcctgccctccacgccggtcatccttaccatgaacccctccatgctcggcctcggcatcagtcgcaccatcatctgcaatagagcagctgagcccctccaccaatgccctcgcttacaactccatggcctcgcctgatacaaagtcgtcgctttccctggacagcggcgttgccgggcaccatgttgctcatttcggccatgttcctcttcgtgctcagcagctaagcgtcctgtctgaccctagcaccttgcaccgtcctcgctgtcaattcctcagtagtcgccttggctcctgcagccgcgtccgtgacgtgctcgtcatccccagcgactcgtttcctgctgcacgctacctacactgagcccggtagccgtattccatcgacggaggagagaaatcaccggaatgtgtggagaagaagcgtagtctaatacgacacctgcgcaagtgctcgacaaaatgtctaaacttggaatcgtcgctgtcgctgtttctgtagatttcgggtcgaatttaattatggtacgttaattgatcacgtgatgcaaaggacaaaatttaagttgaccccaagatgttgtaaagcgtgagctactccacaaggtgatgctaatggacggacctaaagatggacagacgaagcaagtactggaacaaaggctgagcgtcaagtgatcgccgtctaacaaacactaacctagtgtttcttccaggttatagttttgtgctgctgttgatggtgttaagtgccggtgggctcgaccttcttataagtctaagtaattcttctatacttcttattgaggatggtcacatgagctagcatatatttcaaacttacaaataatttataacatctcaaagttattcctttgaaccacttttgtaatcactccgataaatacaatgtaaacttgttgtaacttgtaaatttggtaataagatttttccgctgcaaaaaaaaaaaaaaagcggcctcgagctccgcttttgtc

SEQ ID NO: 125043 - DNA, 721 bp, Zea mays
  Clone ID: MRT4577_45512C.1
tttttttttttttttttcgccatgtatgaagttgagtataatatgtagtgaaagcctctatatctatcgcagcctacacaatctggccatcccactgttatccctggtatcatacctcaagccaaagcaccattccgttcctcacgttgatgaataccccccatcaacaaagatagtctgccccgtaacagcagcactagcttcactcgccagccaaacagcaacacccgcaaagtccttcggcagcccattcctcccgatcatcgtcctcgcagcatgagcgtcagcctttcccggatcaagaaacgtagctctggccaaaggcgtatcaactagacccggcgcaatagcattacataaaacgccgtgctttgaccatgcctcagcttgcgaacgtgtcagacccagaagacctgccttcgatgcgccatatgcaccactgtttccaaaggctcgaaaagactgttggcttatgatgttgatgattcttccccagcctttctcagccatcttgggtccgaatgcttgaccgagggtgaaaggtgccgtgagattcacagcgatagtctcatcccacgctccctgagatagatcattcatatgaggcctataattaaccccggccgcattcacaagaatatccggcggtccagcattcgttttaatcgcatgaatcgcatcgcgcacagaagcttggtctgaaaggtcagccacgatcgct

SEQ ID NO: 125044 - DNA, 863 bp, Zea mays
  unsure (1)..(863): unsure at all n locations
  Clone ID: MRT4577_45513C.1
actccatagggcgattggttcccacaaggccggncgggaaattcctatcacccggcgcctctccgtcttcctcctccctcgccgtcgccgcgcccccaaccgtcactaccgacagcagcacggttcaccccgggcgcgagggcgacgctgccgagggcgaggggtgcgtcccgccggatcggcgcaggagcgacacacgcgacgccatggacgagaagaagggctccgaggaggcgccgttcttcacggactacggcgaggcgagccggtacgaggttaccgaggtggtgggcaagggcagctacggcgtggtcgccgcggccctcgacaccctcaccggcgagcacgtcgccatcaagaagatcaacgacgtcttcgagcacgtctccgacgccacccgcatcctgcgcgagatcaagctgctgcgcctgctgcgccacccggacatcgtccagatcaagcatatcatgctcccgccatcgcgccgcgagttccgcgacatttacgtcgtcttcgagctcatggagtccgacctccaccaggtcatcaaggccaacgacgacctcacgcccgagcaccaccagttcttcctgtaccagctgctccgcggcatgaagtacatccacgccgccaatgtcttccaccgggacctcaagcccaagaacattctcgccaacggcgactgcaagctcaagatttgtgacttcggccttgctcgggtgtctttcaacgatacaccttcagccatattctggacggattatgtggcaacaagatggtatcgtgctccagaattatgcggctccttcttttcaagtatactccctgcgatgatatctggagcctaggttgtatatttgctg

SEQ ID NO: 125045 - DNA, 526 bp, Zea mays
  Clone ID: MRT4577_45514C.1
acatttctaaaaaaaaaaaaaaaaaaaaaaaaaaaaaaaaaaaaaaaaaaaaaaaaaaaaaaaaaaaaaaaaaaaatttaaaaaaaaaaaaaaaaaaaaaaaaagggttggtccttgggcgggaccccccttaggggggattttgggaattttccttaacctgggggggggttgggccttttttttagggggccaatttccccttttggggggggttttaaaatttaatgggcggggttttaaaaagttggggatgggaaaacccttgggtttcccaattttattcccttgggagaaattccctttttcccaggggggggtattacaaaaagggccccccccattgccttttccaaaaatttccccaccttaatggggaaagggcccccccttttagggggcattaaggcgggggggggggggggttacccccaaggggacccttttattttgcgggggctttaggccccgtttttttggttttttccctttctttttcggcaggtttggggggtttcccccttaa

SEQ ID NO: 125046 - DNA, 271 bp, Zea mays
  Clone ID: MRT4577_45515C.1
tgaagcgctccactccagttatgttggcatacgatgccgagaatgcgccgaaggatgctactcctttcatgttggcatatgacaacgcggcgaagaagcgctccactccagttatgttggcatacgatgccgagaatgcgccgaaggatgctactcctgtcatgttggcatatgacgcttaacggactgataccgcatctggaaaatctgaaaagacggacaagcaaaacacaacacagatttttcaggctcgtgtacttcttttatctgt

SEQ ID NO: 125047 - DNA, 664 bp, Zea mays
  Clone ID: MRT4577_45516C.1
gaactagtacgaatctgagctgtatgcactaggactcccagcatgactgccgcaagatcctaagacgtgcgcagacgcgcgccgagccagaatgtatgccgaagagatccgaccccgcgctgcagccgcacgccccgaccttctcccaactagatctctacccggacaacgggtacgccccgctagggacgcctcgtaccccaagctgcgaacaaagtacgcgccggtgggcggattcgacggcgcccccccacctcacgaggccgcgctggcgacacggcttaagcactcggagccgcccggcggacgcgtggccccgaacccaggcccaggcttttactagtttccccgcacacccggggggcggagctcggcgcgggagaggaggcggccacactagagaaaaataaataacggtctcgtcgacgagccccagagaaagataatgatgccggaccctgaggaaggcacgcactcggtgcaacagcagcccactcgagtgaggcggctactacgtcgcgtgggccaaccacgacctcggccacgacggacacgacatcacgatgggcgtcaggacgaggtgcgagcagacgcggaccgtgatgagaatcgacaccgagggtagcgagacagagaaccacgaccgctcgatgttccgccagcg

SEQ ID NO: 125048 - DNA, 477 bp, Zea mays
  Clone ID: MRT4577_45517C.1
aaagcataaaaccatacatgtcacaatgttaaattattacatcaccatcatcatcatgaggagtctttgcaaaagtaaccatcattgttcgaaatgcagcggaataaaactaacgatacttaaacagagagatggggaagcctgtcccatcactcctcatgctcctcctcagccgaggcagggtcccactcaacagtccaacccggtggcaaggtggacgaccaagttatcccggcaaccatctcctccagagaaccttcaccaaacagatgctcaggttcttcagcctcatggaactcgaagagctagatcacttgatcgccgaagcttgatcatcgattcctcgaagcgcaggaacaaatcgcgatctagacacggagacacagaggctcgccgttgaagatggaacgtggacagcgacagagaactccgcgccatggacgtcggcgactcggcaaggcgacctcgtggagtctg

SEQ ID NO: 125049 - DNA, 176 bp, Zea mays
  Clone ID: MRT4577_45518C.1
aaatagctacatggcgaatctctcctaacaggcacagatgtactaggaaaatgatgacttcatggagaaggtaaccaaaactgttcactctgatgagctcactgtataagaacccaaccttctgtcttttgcatacaaaaacctcattggaaccctccgttcctcatgtcacatca

SEQ ID NO: 125050 - DNA, 205 bp, Zea mays
  Clone ID: MRT4577_45519C.1
tacgtcgattcccggtcgaccacgcgcgactagttctagacgcgagcggcgcctttttttttttttatggatgtgatcacaacttacgtaaagattgtacggctaagcaagggtatgactttgttttgttaaattgtagaggttagtgggcagataactccctgcatgacagtcaaaaaggggaagtttagctgtacaaattggg

SEQ ID NO: 125051 - DNA, 111 bp, Zea mays
  Clone ID: MRT4577_4551C.1
ttatttgagtccctgagtccgtcatcgtacactcgaaggatagagactataccatctcaagggtgtctatgcatacacgattgatcgatcgtctataacattctataaaaa

SEQ ID NO: 125052 - DNA, 232 bp, Zea mays
  Clone ID: MRT4577_45520C.1
ccatccaatacaaacacctttccgtcaacataaacgagctttcgatacccgacagacaacgcccaggaccgacgaattgtcaagaaaagaagaaatattaacagtatacaactcacgaaactaggatcgggattaaaggtattcacaatgtctgccgaagacgagcgtcaggctgcccttaactcctatcgcacgaaactcatggagtcgcgagaatgggaggcaaagctca

SEQ ID NO: 125053 - DNA, 381 bp, Zea mays
  Clone ID: MRT4577_45521C.1
aaaaaaaataaaaaatcacataaaaaacaatctatacgcaaacgcttggagaaattcatactgagacacgtgtgcatgccttgtagccactatgatatactgtcacctaatttcaattcactgaataagttttatcaccttaaaaactgtgaaaacccatttgttccccaacgttatagtcttcctaacatcctaatttattcaacaaacgtaatatagaataaatctcaacagattgttctttccaacattattccatcatgaatggtcaattggatgcgctttgtatcgatacattacacgcacagtgtgaatttattacatccattcatactcgtaaattattaaatgacctagcatctggttatcttaatagattca

SEQ ID NO: 125054 - DNA, 259 bp, Zea mays
  unsure (1)..(259): unsure at all n locations
  Clone ID: MRT4577_45522C.1
ttcttcaaacacacaccatcccagctccgagatgtcatcctgcggccggcgggagtagccgcgtcacgttctctttttatgaccgttacatcaccattttctcttctgagggactcctgtaccaagacgatgtcttctttcatggctttttaattcatgcatttattttattttattctttttttttcttcttttattttattttttttttattctttcttattttattaatnntttttttatttttattctttttttt

SEQ ID NO: 125055 - DNA, 369 bp, Zea mays
  Clone ID: MRT4577_45523C.1
gacatgaacaggtttctaacttttgttatatttcatttggtttaaggttgttcaatgtgaagttatcgccgttttttcagcacattattattgtttttttttgctctggagcgacgatacaaacgcacagacttttgactctaaggggtgggataccaacccgcccgaattactgacggaatggacatggatacttccatgcggactaggacacaccgggctaaaggtgcgatacatagcacatggaagggcagagactatgggacgcacactacatatgtccaggccagacgatgcttataagtgttgggaccaccgctggaccaaatttggggcgctgcgacacaagataatactgcttgcaatcca

SEQ ID NO: 125056 - DNA, 4337 bp, Zea mays
  Clone ID: MRT4577_45524C.1
aattcggcacgaggagaacatagacttggatgatgagttcttagaggggcaggatacacccgtagaactggaaccagttatacttgggtttgatgagggcgtgcaggttgaaattccaccgaatagtcaacttgaattagcttctgtgaggagcacggaaaggacagttggagtacatctaaactcaggagttgcagagcaagagaatgtcagtggttcagttgtccattctgatcctgttactgaagcagagaaagcactgcaggcattgactcttgatggtgtaaatggcctgacagaagacagtaatggggagccatccaatagctcaaggacacctgcttcaagttcccagttacctcaggcaattcggctcgagcctattttttcgtcagcttcaacagtagttgggcagaatgaagtacctgtcagcctccagtttggtttgtttacaggtcctcctctaataccaactccggttccagccattcaaattggttccatacagatgccaatccatctccacaatcagtttaacccatccctgcctcatatgcacccttcaacaacccctttgtatcaatttggccagttgaggtatgtacgtcctatcgctccgagtgttcgatcgctgccttctcaggccacccgccctgcacattcttccatatcagctcaacatacattgaatcagaatgtgtccagtgttctacctgagctaatggatggaggtacaaaccagaacatcccagctcaggcaagctcatccacctttatcaacaaatcagcagcacctacaaccaaggttccccttggcatggacaattcaaattcccagtatctcaatgctcctgcaaacaatcagatggctggtgtggacggatttagtagtcaagtggacagagagtttgctgagggtacaactccaagtgggaggaatcaaggtctctctttgaagaggaattacagacctacgtccaacaatgtagaatcttctcaatatggtttggaggggagagccatgggtgatccaaaggctcttggtgttgtctctgatagaagggggaggagatatggatatgctgttaaagacattaacatgagatctactggctcaattgttgagccttctcataaggattccaaaggaggattccagagaagggctcgtaggaatgtaagacgaactgagtttagagttcgggaaaacatcgagaagaatcaaaatgaaacttctgaatcattttgccatggtgaacaagatgagataacaagctccaatggaacaagagatattccagcgagaaatactaatagaagggaacttgatatgagcaaggcatctaggataaatggagcaagtgatcagagtctctcgtttagaagtacacacaatgtcccttatgagagatctcatggtgggaacaagaagtctagaacgggtgctgttcctgatggagatactacctcattgcaagctggagctgtccgtgttgtgaagcagcaaggcattgaggtccctgttgatgcagatggcttcattgaagtaagatccaaaaggcagatcatgagtgtcaggagagagcagagggagaaagaaaacagatccaaaataaggatggcaaaggctccccgcaaacagcatagtatttccctacaaagctcagttggtcctagtgtgaataagcgagcagctccttctagtggagaagttacaaagaaagtttcttctggttccgccatcacagtagaaggaagaattgttgactatgctgaatcttcaattccattgatgggtgatacagcctccatgaacctcatagggccaccctcaaccaatgcagaaactcatacaaactgctttgccaatcagcctatccagatccaggcatcctctgacttggtcacctcgagtcctgcaaagcttgtgagtggcttatctgatggcgacaataaagggccatctattagtactccatttaacatggtttcctgggataattcacaaataaaccaacaggtcatgccattaactcaaactcaacttgaagaagctatgggaccagctaaatttgaacagcaggctgggcctggcttttcgttggagtccaacaatgctttgtctcccacagtaatcacagaaaaggtgttgccttcatctgctagtcctattaactcccttctggctggagagaagattcaatttggggcagtaacgtcaccaaccatgctacccccagtcagccgaactgtttcaagtggtcttggagctccaggttcatctaggcctgatatgaagatcgatcgaggcttgcctagcgataacagtggtcctgataaggcaaattccaaggaattatgtccgagtaccgaggatgcggaagcagaggctgaagcagctgcttctgctgtggctgtggcagctattagcactgatgagggatctccagctgatgcaactactgcatcggctccagacaagagctttacaagcaaggatctcagtgggttaacatcaggaggggcaagaacaggtcaagctggtcaatcatccacagaagagccactcgcagttgctcttcctgcagacttatcggttgatactccatccatgtccttgtggcctcctatagccagtccacaagcatcagggccaatgctttctcagtttcatggtgcacagccatcccacttttcctgctttgatatgaactcgatgttaggagggcacatttttgcatttggcccaagtgacgaatctgctggttctcaaggtcagcaccctcaaagaagcaatgcattgccttcagcaccattgggagcttggccacagtgtcattctggggtagactctttctaccgccctccaactgggtacgctggtcctttcatcactccgggaggaatcccaggcgtgcaagcccccccacatatggtggtctataaccacttcgccccagtaggtcaatttggtcagatgggacttggttttatgggagccacttatatccctggtgacaagcagcctgactggaagcaaagtcaagggccacctattgttggtgtaagccagagtgatccaaacagccaaaatatggtgtctggtcaagtaaacgctcctagtgttcctgctccagttccacatctacgcccaacttctatcatgccaatcccgtctccattgaccatgttcgacattgctcctttccagacatctacagacatacagatgcaaacgtgctggccacatatgcctgtacctcctctacactcagttccattatcagttgcacttaagcagcatccagtagagggtacagccacacaacagtttgttcataacgtgccaatagacaagtctggtacaaataaccgatttcaggagtcctctgcttctgctgggccatcagacggcaacaaaaccttcccaaatgcagccgtctctcagtacagggatgagttaggtcttgtcgaacagccagcctcaaccagctcaagctcccaaactgttcagccttcgtttggccaggcgggcttgatcagcaatgaagtcccaaccagtgccaaagccatggttagggtgaccccatccaaagtcaaccctggaattgcagcaggggcggctggcagcacgaacgccccccaggtcaccagcataccttccaagacccatcagtcctcgtcatcatcatcagacccgcaataccagcatctggttaacaatcaggatcgccgtgcccgtgcgactcagaaggctggtactggtaacgagtggcagcgacgatcagggtaccagggtaggaatcaaggttctggttccgacaggagttcaggcactggtaggatgaagcagatctacgttgcgaagccctctgcaacaagtggccatgcctcgtcaggctagagagtggtggtgctgacttcactgagcctgctccacgctggtacacagctcagagcatccttggcatcagacacatgtgaaacatattttcgctccatgtctgtctattctggtttgttttggtgattgtggcatggtgctggttgtgtatgtttttggttcattttgttgcatagaagaaaatagagtgtgctgttgcactgcaaaaagacattcgaagcgataccatatcatgcatgataaattttgcagccgatggaatcggctgcccgtgtaagtcactggtgtgatgtaaggattactattgtttattgttactatttgttggctggctcaacgtctggacaggcgaggaaatgtaacgtgggggggtatgttaataaatgcctcatatgctactttgtcggaacaaaaaaaaaaaaagggcgccccc

SEQ ID NO: 125057 - DNA, 659 bp, Zea mays
  Clone ID: MRT4577_45525C.1
cattgggtacctcgaggccggccgggcgcccgtttcccttctgcgcgctgcagtcagtcagccctcatggccgccgcacaatgccagtgccacaccttcaccacgggccgggcgtgcatggccgccgaccccagtgagagagccctatctggcatttaggtagagtagtggacaaccaagcccaaggccaaagccattgcttgctcagcctctctgcactgcactgcagggcgagggtcacacacacacagggtgtggtggatgatgaggcaacggcaaactggcagcagcaagtactactagcgcttgctaaaggccaggagcccaggacccggaggtgctcgctgtcgctgatcaaccgcgcgccgtcgcaggcagcacagcaaccagcaacagctaggcaggtagtagtagtatacatgagcaggttcgcggggcagacgtccaccaggccgtgggtggggatggcgggctctggcgccaccgcgtccgagcctgccgccgccgacgtcgcgagggacgacgccgcggcggccatgaggggcgccggcggcagcgccggcaccaacgccagcgccagcgccatcggcttcgcggccacggcggtcctcgtctgcatgttcctcctcatgggcatcttagagcacctcatcaagccc

SEQ ID NO: 125058 - DNA, 561 bp, Zea mays
  Clone ID: MRT4577_45526C.1
cattgggtacctcgaggccggccgggatcttgacttgagcctctggtgcgtggacatggagtctgcatgctctccgcttgactgtgtcactgcaacaggggcgcatgactgatctaagttcgcgggaggtctcgcactccacgtgtgctgtctcatgcgccggaatggcacctccaacgacttcatgtccgaggtatcgttgaggacccactcagacacaactatgggagggacgcgattatggccgacgaagacaaagctgaacgtgcgcataaaggggatggaccgtatctggtgccacttcttgaggagctggaacggtagttgtgacacctcgcccctctaagagatcgtcatctacgagaccgtgaggggttacgacaggtgacccacctgataaagaacaactccacgctcgatatctgcgatgactactgcatgacggtcggcaaccaggttatctcagtctactgcaaggtgatctaaggtcgtgaccgaccgcaaacgcaataaactgacgaggccccagatcgtgatccatcgcgtcatcgaggccatcgg

SEQ ID NO: 125059 - DNA, 221 bp, Zea mays
  Clone ID: MRT4577_45527C.1
aaggggaagagttctcgacttctcacaagtcacgacagagagaggcggagttgcggagagtgtgcagaacaggagcatgaaagtggagatcagcgaagcccacgacaccattcgcttcagcatcgacaccggcgtcaaagccgagctcgacccgccgcacccgcgtacatctaccatccaatacggagaccaagttctgagcggacaagaagaagttcggg

SEQ ID NO: 125060 - DNA, 247 bp, Zea mays
  unsure (1)..(247): unsure at all n locations
  Clone ID: MRT4577_45528C.1
ccggccggggtggggaagtttcgctctcgccgtcgtctatatcctatggatcgcgcaaaacaacccagggggcaccatgagggagtttttattcctcttcgttctcctgggtctggtcgagggggcagcttctagctattttattggctggtcgtgcctgatacagattgtctcttccctnactaaacatccggggggggggtgtttttcctngnnttatcagcctccctctgcccagtccctacct

SEQ ID NO: 125061 - DNA, 384 bp, Zea mays
  Clone ID: MRT4577_45529C.1
ccgcctatggacaagcatcggctcctagttcacattcttagacatcaagaaaggggctgagaaatcatcatatcttgctcaactaataaaatgtgccaccagcttgctcgtggcattgatcgcaaccttaatgctttaagcatacatggtcgtaaatcacaggccgaaagagataatcttcttaatcagtttttaacaggcagggctccaacattagtagccacacatgttgctgctcgtggacttgatatcaaagatatcagactggcactcaattatgactttccaactggtatagaggactatttgcatcgcatacggcgtacaggaagagctcgcgctactagagtctcgtacacgtttttctcttaacaatattggaaa

SEQ ID NO: 125062 - DNA, 383 bp, Zea mays
  Clone ID: MRT4577_4552C.1
ggtaaactaaaaacgaagattgcccaaaaattttaaaaccgaaaaaaaagtaaaaggaaattcagaaaaattgggattctcccaaaaaaatcaataaaagggaaaaatagacaattacaataaaaaaaaaattaatccctcccgttcgccggttataaaccaaatgattcccaaaaaattagtgaatattaaaaaactgcagagggaaaaaatagaacaagtccaaaaaagggacaaaacttggggcaaaaagtgaaaactgggccaaccaaaatgcaaatctccgctcctggaaaaggagggagggaaatgtacttcgccaaaaagtaaaaagtggaagtttaaaatcgtaaaaattgaacaggataaaaataaacttttct

SEQ ID NO: 125063 - DNA, 587 bp, Zea mays
  Clone ID: MRT4577_45530C.1
acttaattattatgcattgcaatagtacagaaaatacagattgcgtggtgcaaagttgcatgcgcacatatccacacccatccgtcacactagctagtagtattacttccccaaaaagaagccaccccgtactagcaagaaatttagcagctaactaatacgatcgagcattcgcgcatcttattggcagtagatagctagctaccttgatggatcgagcaaggaacatgcactaattccttgctttagtgagctgtgtacgtagatcgatgcatgcttgaccttgaccaccacatagcttaagcttaatatactagtaataagctaccgctcagagaaggcggagcacggcgtccctgaccttggtcagctcccgccccttgctcctccccgcctgatccggcgcgacgacgccgccacgccgcccatccgctccatcttcctcgccagccactcatgcggaggcagcatctcccccgcatcgtcctcctcgtcacctctgctgccgcctcgcctcgccgagctcgagctgccagccggaatggccaccggcgccgacgaccttcctcctccgcccttgttgttgc

SEQ ID NO: 125064 - DNA, 1257 bp, Zea mays
  unsure (1)..(1257): unsure at all n locations
  Clone ID: MRT4577_45531C.1
tggaccctcgggccggcacggcacaagatctctaatgccataagagatctgaaacaagcacacattcagcaaaaaagactgtaaacttagtctctgcgtcgattaatttgaaacactctggtgctaagtctattctaagggaaaggaacttgtttattccaactactaattcatcaaaggaagataataaaacttttgtgacaactgcggtaaggaaacatgagagcgatatgcaggagaatcacaatggcacaaaaaatattgtagtatcatctgaaatgcatgtagtaccttgcagcatgaaagagatagtatcaagtgacatgaaagaagaggatcattcctctccaggttttcttgcagagaacttatttgctgacttgggctttacatgttcatctaatgcagctgataaaacaactgaggaaaatccagccatcgttctccaatcttctccgaagataagcgaccaattgagaaagatatcaaattcactgaagcttcttaattctatggcacctagtatagtaaaacagaaaacagatatagttcgtccacaatcctttgacttagttgaagcagaaccaaaaactcctgaggtcaacttaaaactttggcatgctcaagatgcacaagaatcacttaaggctcgtagcacagggattaagaaatctctagctaaggagtgtttgttgtttctaaacagcgctaataaggagcagttaaaaagtttaaagggtattggagagaaaagggcaaactatatacttgagcttcgagaggagtcaccattgaaagagattgatgatcttaaaagcataattgggatgagcaaaagagagatcgacaagatgatgtcaaagttgatttcggactcgccgatgaacgagtaagggttgtattgatctcttcccacttaggaaaggaggagaaggtcatagttctaaatttaaatatcgatgcttgttgttatcagatcgctgtggaatccagatgattttgggtgttgcttgtgagaatattctgatgttttgtttttttaaaaaaaatacaggaatgtcttctctaaaaaaaaaaaaaaaaaaaaaaaaaaaaaaaaaaaaaaaaaaaaaaaggaaaaaaaaaaaaaaaaaaaaaaaaaattaaaaaatgaatgaataaggaataaataaattaattaaatattagataaataaatttaaatgagtggnattttaattaattatttaattgaatggaaaatattttgaaatttaa

SEQ ID NO: 125065 - DNA, 513 bp, Zea mays
  Clone ID: MRT4577_45532C.1
tttgggtattacatgttcatataatgcagctgataaatcaactgaggaaaatccagatggagttctatcatcctctccgaagataagcgaccaattgagaaagatatcaaattcactgaagacactgcttgacatggcacctaatatagtaaaacaaaaaacagatatagttcgtccacaatcctttgacttagttgaagcagaaccaaaaactcaggtcaacttaaaactttggcatgctcaagatgcacaagaatcactaaagaaatctctagctaaagattgtttgtttttttctaaacaacgctaataaggagcagttaaaaagtttaaaggtgctcaaaaaccttaaaatattattacttaaccaaacacaaatgattgcttatgtcttgctaacatgttggttatgtgtagggtattggagagaaaagggcaaactttatacttgagcttcgagaggagtcaccattgaaagagattgatgatcttaaaagcatgattgggatgaac

SEQ ID NO: 125066 - DNA, 529 bp, Zea mays
  Clone ID: MRT4577_45533C.1
gctttctctccctaccttaggtcaagataaccatgtcgaccaagtcccggcaaatcgtggcacttcacagttccaaacagtaccagggtgcgtgggcgctccactgctgccggacgcccggcgacgagcacacgaagcactaccccatgaaccgacagcatcggccaccaacgcctcgccaatatcacggtctggtactcgcctgagaggccagaacaacgttaataatagaaacggtcaagtcctggccatcaacggtatcttaggacccacctgacgaccatcaacaactacaggattgggctgatcatccagatcacaaccgcctaccacagcatgtacaagggaccaccagcgacacaaccctgaacggcactggataacagagggacaatgagatggcttgctcatcaaccgcgagaggtctcacctggatccactcatcaagaccggcacagagcacttcaagctgtgcaacgaggacaacacaaagctagttacataacagtgagattaaggacccactacc

SEQ ID NO: 125067 - DNA, 792 bp, Zea mays
  Clone ID: MRT4577_45534C.1
atggctggccattctagcctgtaccgcctcccccaccgcgaggagagcctggcgagcccaggcagtctcagcagcagcaatggggagggagcggagcttttccacgcgttgatagggaggtcaacgtcatcttcagagggcacagagcacaagaaaaccggagacaacaaaagctcaacgaccgtgatccaaaagagccgagtgaagaaagtattagtggacgggggaagcagcatcaacatctccttcccccagacgctccaggccctagggatcaaactcaaagacctcaccgagtcggatactcccttcttcggcatcgtgccggctgaaggggaatacccgcttgggcacatctacatgtccatcaccttcgggaccatagagaactacaaaaccgagttcctgaggttcgaagtggcacgcttcgactacgggtacaacgccatcattggaaggccaggactagcgaagttcatggctattccgcattacccatacatgatattaaagatgccaggacctcaaggaatcatcactgtgcatgctgatttccaaggcgctgcagagtgctttcggggagccattcaaacaactctcactggtgggccctcgacagctcttcccgcgcaggcaaacaccaggatggaggaggagggtctcacgatacccaccaatgaagctcaagttgtgacctctatacggttggctgaagagactaagaggattaatctgggattctctgatgagcgcaagactgccatcatcagtttcagccttgatgacaaatag

SEQ ID NO: 125068 - DNA, 394 bp, Zea mays
  Clone ID: MRT4577_45535C.1
gggggcgccaactggagcaaccaccaactaaaactgtttttcattcctccctcccaaaaaggattaacgatgttgggggaaacttttattcaagtttttttttttttaactttgaaatttaactttttttttacaagctttattttaactgtggttggattttttttttccatttcggctccctgagttggtttcactttgccctcaaatttccttattttaattgtccaggcccttccttacttcccttaaacaacctaattttgtgcttgagccaaatttctttaaacttatgcttttttgttgttaaaaaaatctttttgtttgtcgtggttaccaaaagcttcaaaacattttttttgtccaccactgttaatccatccattttttttaa

SEQ ID NO: 125069 - DNA, 594 bp, Zea mays
  unsure (1)..(594): unsure at all n locations
  Clone ID: MRT4577_45536C.1
cctccatgcgccgccaacacctttcggcgagcaagatctcggcggcgtcgngacagcagcaggtggtcttctccaanaggcaggaggtgaagcacctgaagcagacgtccctctggggctccaccttcgacgctgtcgtcgcgtcgctggcacgggcggcgttcaccaccctcgcgcgcatcaaggccgtcttcggcgccggccgggagcagcgccacccgccgctgtaccgcagcctgacactctcctcggcggtgcacccgtcaggcgacgcgcggtccccgccgtcgcgcaagtccatgtcaatggaggaggtgctgctgttcgacgtggacaaccagccgtcgttcgctccgaaacggcaggtgcggggcggcgggttcctggaggacagctcggcggcactgacgcccccggcggggacgctgggcgcggcggcgctgtcgccgcgctacgccgggctggtgatctcgatcgagcggatggcgcggtcgccgctgctggtgggccccgaggagcgggacgagctgtacgggatgctgacggcgagcgtgcgcgcgcagctccgggcgcggctgcgcggcgcggtgcccg

SEQ ID NO: 125070 - DNA, 550 bp, Zea mays
  unsure (1)..(550): unsure at all n locations
  Clone ID: MRT4577_45537C.1
ataaaaaaaaaaaaaaaaaaagaacaaaaataaaaaaaaaaaataaaaaaaaaaaaaaaaaaattaaaaatatttaatatttttttttaaaaatttttttttttcttgtttcttttcttcccttaaggctatatttttggtcatttctttcgctgtgggggccggtcgacctttcttttttggggcccttttggccctttttggggtttttttcatggccttgccttccctttcccccttcttttctcgatttccctgggggtttcccccctttctccccttggagaacccttccgctttccccccttttttccttttggccaatgcccccccttcccccctttcctttcatttccccatgctgcgtggcttttggtttccccttgttgcgcccttttaggcgcggtgggtgggcccttttcncgcgcctttccccccccccttgccttttctttcccgccctttttttccctttctttccttttctttttcgcccttttgtttgggttttcccgtttttctttaagtcggggttttcctttggcgcccc

SEQ ID NO: 125071 - DNA, 825 bp, Zea mays
  Clone ID: MRT4577_45538C.1
tcgggcttcgaggcagtctgcagacagcaccagcagtctgcgcgcactccgcagtcggtcgtggagctctcgagcaaaagcgcgcgacatcgtcggagctagctacgcgtgcgcgctccggccggcggatcggatcgggtcggatggcgtcgtcgaaggcgctcctcctgttggctgccgccgccgtcgctgcggcgtgcctggtcggcgccgcggacgccaagttcggccggctgggccggctcgtcatcaccggcgtcgtgccctgcaacaccggcagcctcatcgacatcgccagctcccccgccttcccgaacgcggacgtggagctgcggtgcgcgggcagggtggtggcgggcgcgacgaccaacaccaacggcaccttctccatggagctggacatgaccaacgcgctggccgcgttcatcggcggctgcacgctggtggtggacacgccgctcgtcaagtgcaacgccgacctcaccgacgtcggcagcctcgtctcctacctgcagggcccgctcacgcgcctgctcggcggcatcttccacctcttccccgccggcttctccttccacgcccgacgagcctgacgtcgtatctagctagagctttgtacgtacgtactactggacaacacaatcaaactttaaacatgctgctgagagctatatatatatatatagctacaactacaaatgtaaaatgtttctagacatgtgtaatgctacgtacaaactgaaacgaagttgaaccaaaataaacagttgggaggcacagtcgatggatgggtgcttgctgtcagctaataagacatctttttcc

SEQ ID NO: 125072 - DNA, 279 bp, Zea mays
  unsure (1)..(279): unsure at all n locations
  Clone ID: MRT4577_45539C.1
cattctcttcatatactaaccacaataccacctccacactcattacactcgccgtcaggttttttactaagacggccactccacttcttcacataaatgtanatcactactncttctcactcactaaattcttatacattcatccttttcaacgtaccaattacattttttttccttttacaaacttcattatcaacaatacgctatactttcctaactttatcatcactttcttcattccctcgaacaccttcatccatttcaaaaattactatttcc

SEQ ID NO: 125073 - DNA, 1231 bp, Zea mays
  Clone ID: MRT4577_4553C.1
gcaatgatgaatgagttgaaagaagtaaaaaagcagtgaatcctacagaagttcttcttgtcgttgatgccatgactggccaagaagctgcagggttgccacgcgtctgcaatgatgagattggtataactggtgctatactgacaaaactggatggtgactcaagaggtggagcagcactgagtgttaaagaggtgtctggaaagccaattaaatttgtaggacaaggagagcgtattgaagatcttgagcctttctacccagatcgtatggcacaacgtatcctgggaatgggagatgtactttcatttgttgaaaaagcacaagaagtgatgcgccaagaagatgctgatgaattacagaagaagatcttgagtgcaaaattcaactttaatgacttcctgaagcaaacacaaatgattgcaaaaatgggttcattcagtcgtttgattggcatgattccgggcatgaacaaggttactcctgcacaaatccgtgaagctgagaagaatctcaagtttatggaatcaatgatcaatgtgatgactcttgaggaaagggaacgaccagagcttcttgctgaatcacgcgagagaaggaaacgagtggccaaggactctggaaagactgaacagcaggtgagccaattggtcgcgcaactcttccaaatgcgtgcaaaaatgcagaaaatgatgggcgctatgcaaggaaaagagtcaccagacatggacgagctcatggaatcgatgaaagctgaggagcaggctgctgccggtactggacggcgtagaaggaagtatggcaacctgaggcagcggcaactggatgccatgcgtggtttccgcagacggtgagatgctcattgccgactagcactggcggtgcctgcacgaacgatggcatttagggacttgggctcggatatagaagtggaagaagatgaagtgcttttgggtgcaatggcaatcatctgggtacattgagttgagtttgcatattcatgtgcagtgtcctattttgacatattagctgtattattatctttcttcggagcaagaactcgcaaaattgcgtcatctgaacctgtccaccgtcgtggaaacgagtgcacttcggccatgctagcaaatacaaatacggatctggatcatacgtgtggcacataactctggaagaattttgcgagaaaaaaaatccccaataagcatagctagcaatgcttttagtttct

SEQ ID NO: 125074 - DNA, 916 bp, Zea mays
  Clone ID: MRT4577_45540C.1
ggcacgccttacaaagttgttgaaacacttagggggtttgttacttgcgatggacattcatgcacacatgttgttcacgcgaaaagctcgcaggactatgaatttctgtattgctttgtgctctggtgcttggataatttccccaaactggttaaaagaaagcttcagagaagggcagtttgtaggagaagcacaatatgttctggaagatgaagaatataggatgcaatataagtctcaacttagagatgcagttatgagagctaaagaaaggcctaactctttatttgctggttatactttctgtctgtcaaagtacatccagccctcttttgatgttctctcagccattattaaatctaccggaggcaagatcataaaaaaactgagtgagttagatgagctgtcccggacaatctttttggtgtgtgaagaggaggcagaacttgcattggttgcagcaaaaagtggcatcaaaacattcagcagtgactggttcatgagctgtgtcatgaaacaggaacttgaccttgaggcccctcagtttattgtatctctatgatgtgcctacagttcaagtcctcctaactcctaatatatctctttctttggttgggatataaattgtttctcctggttcttcgtggatatacaaattttctcatttccttagttacaaaagctgaagtagtgtcaaactagttatcatcctgtgacgatgatgacctgtttaaatggaaaaggttgcggtggagctattccaatttctgtataggcccatttgattcccttcattttgagttactgtaatttcacttgtcgagattggatgtcaaaaggatgacacttccctgagtgaactccaaaatgaaatactagttgcattgttcgcaaaaaaaaaaaaaaaagggcggcc

SEQ ID NO: 125075 - DNA, 121 bp, Zea mays
  unsure (1)..(121): unsure at all n locations
  Clone ID: MRT4577_45541C.1
gacgtcatanctcttctatattgtcacctaaattcaggggactggcggtcttttttcaacgtcatgactgagaaacaactctcttttcccaactttatctccttgcaacacaacccccttt

SEQ ID NO: 125076 - DNA, 268 bp, Zea mays
  unsure (1)..(268): unsure at all n locations
  Clone ID: MRT4577_45542C.1
cgccacgcgtactccacgcgtgcggtnctttcttgatactccattattgacagctatgctattacacttcagggacaatattctggaagctggtatgcaaaggctgacaagttcgtgttcagttataaatcacatggaacctattggtgaccttaatcatgtatctgttctacgcgaggacatgacatacatgcatcatagaaaatttcacgccatgatttcaaagttagcttaaaacacacaactgtattcagcgcacatcaatcat

SEQ ID NO: 125077 - DNA, 272 bp, Zea mays
  unsure (1)..(272): unsure at all n locations
  Clone ID: MRT4577_45543C.1
ccgggttgacccagcgtccttttcctgctgcttgttgccgcttccctctgggctcgggcgtctggccctgcgtcatcctgcgtgccttttgtccctnggtccgcccgccttntgccttcttttctctctttgggcgntttgttcggcccctttctccctcttttctttttctcttccctttnccccttttctcttggggggggggggttcttctctccnttctttgtctcctcccttctgccttttctcgtttgcttccccccccttttccc

SEQ ID NO: 125078 - DNA, 586 bp, Zea mays
  Clone ID: MRT4577_45544C.1
cccggcctacgcgcggcatcaggccagcagccggcggaggcagcagcggagcaggggcggctctgtgtccgccaacgaggcggacgtgtacgtggccagctagagtaagagcaagcgcaagtgcaagcgcggcgaggccgaggatggtgaaggccgtgcgctgcctggttcaagcaagagaatcccgtcggtggaggtggaggcgcaggcgctggcgctcccggttggctgcccgccccggggccgcacgagctttgtgagcggggggtggatctgaaagagtcgacagtcgaaagctgaagaaggcgagtaggagacagatccagacaacccgcgggttgaaaacttggatatcgacgccatacgtgctctgcgcctctgctcctcttgtttctgttttcccttccctgatgggatcttttgggctgtgagtgggttagaggttgatgaggcctgaggtgtaaatgtacacggcgtttcaggacgtcgttatgatcgatagtcgcgaaattttgatgtccaacgtatctcgaaacagaggttgaggccagccaaaagcaaaaaaaaaaaaaaaaaacccgcggcc

SEQ ID NO: 125079 - DNA, 489 bp, Zea mays
  Clone ID: MRT4577_45545C.1
cgtctgggtcatctcacgtgccacgagcatacatctggtcgatcacctatcaatactatggctgatatcacgaagctcctatgcaccaaaggactccaactatgccatgctcacctctcctctgagaactatgtgtctggagactgcattactatagacgacatcaaggttgtcaacgacacgccggctaagaatgacaatgccctgatgatgcgacccataggagatatccctcccggctgaaaatcgagaacctgctgacgttcggtgtcaccgcctgggtattaatccagcgctaccatgctcttgtattatgactgtgacgataatcatcacctggtatctcctggcgatgaaactgatgaggagatcaggcagctgatgagcgcgccgccgctgacgatgactcttataaagataaaaagagaggcttatacgccgagcttaagaaagtcaatgcttgtgacaataacactatatatcgaggag

SEQ ID NO: 125080 - DNA, 900 bp, Zea mays
  Clone ID: MRT4577_45546C.1
cattgggtacctcgaggccggccgggcctcaccctcgcgcgtaccctccaaaggcaactcagccaagctcgtgagagcagaggaactctctttcctcacacaccaaagcagcagtggcaaagctgcgctagaggccatcaggccataatagcccagagagcagacgaggcatggcggcgacgtccgtggcctgcgccttcttcttcttcgacgcggcggagccgctgggcgagaccgggcggcggcagcggcaagcgctggacgcctgcacgctctgctccaagccgctggcccgcaacagcgacatcttcatgtacaggggcgacaccccgttctgcagcgaggactgccgctacgagcagatgcaccacgacgcggcggccacggcctacgcgcggcatcaggccagcagccggcggaggcagcagcggagcaggggcggctctgtgtccgccaacgaggcggacgtgtacgtggccagctagtttaagagcaagcgcaagcgcaagcgcggcgaggccgaggccgaggatggtgaaggccgtgcgctgcctggttcaagctagagaatcccgtctgtggaggcgcaggcgcaggcgctcccggttggctgcccgccactgcgccgcacgagctttgtgagcgggggaatgggatctgaaagagtcgaagattgaagaaggctatcaggagacagatccagacaaccagcgggttgaaaacttgtatcgacgcgacgacgccatacgtaaagttctgtttctgttttcccttccctgatgggatattttgggctgtgtgggttagagatttgaggcatgaggtgctgcgagagctagcagcatcgatctgtaaatgtacacggcgtttgagcacggtgtttagtcacgaaattttgat

SEQ ID NO: 125081 - DNA, 1046 bp, Zea mays
  Clone ID: MRT4577_45547C.1
gggaaaaaaaaaaaaaaaaaatagtcctatttgtggcatagtggtagctatgttgtttaatgaccaacaggtctttggttcgaatcttcacttctttatatagttttaaaaaaaaaaaaaaaaaaaaaatcgaatatgccataaaaataggataagctcaccagagcagagaaactcgcacgcacgcactctcttccccccctcctgcccactctccaacgcagcacaagcatctagcaaagctgcgcagcgcagccagcaagcaagcttggtccggagagacaacagatataagccagccagagagcagcagacggaggcatggcgacgtccgtggcctgcgccttcttcttcgacgcggagccgctgggcgagcccgggcggcggcacgcgctggacgcctgcgcgctctgctccaagccgctcacccgcaacagcgacatcttcatgtacaggggcgacaccccgttctgcagcgaggactgccgctacgagcagatgcaccacgacgcggcggccacggcctacgcgcggcagcaggccagcagccggcggaggcagcagcggagcaggggcggctccgtgtccgccaacgaggcggacgtgtacgtggccagctagtttaagagcaggcgcaagcgcggcgaggccgaggatggtgaaggccgtgcgctgcctggttcaagctagagaatcccgtcggtggaggcgcaggcgctccctgttggctgtccgccaccgcgccgcacgagctttgtgagcgggggatggaagagtgaagaaggcgatcaggagacagatccagacaacccgcgggttgaaaaattgaagaagacgtgctctcctctgctccccttgtttctgttttcccttccccgatgggatcttttgggctgtgtgtggattagaggttgttgaggcctgaggtgtctgcgactgcgagagctagcagcatcgatctgtaaatgtacacggcgtttgagcacgtcgttatgatcgatagtcgcgaaattttgatgtccaaaaaaaaaaaaaaaaaagcggcc

SEQ ID NO: 125082 - DNA, 1009 bp, Zea mays
  Clone ID: MRT4577_45548C.1
cattgggtacctcgaggtgacttttattatagtaaagaatgcgcgtgatctcaaaaaaaaaaaaaaaaaaaaaaaggctccctccggccgggccgggaggcaactcagccaagctcgtgagagcagaggaactctctttcctcacacaccaaagcagcagtggcaaagctgcgctagaggccatcaggccataatagcccagagagcagacgaggcatggcgacgtccgtggcctgcgccttcttcttcttcgacgcggcggagccgctgggcgagaccgggcggcggcaaagcgctggacgcctgcgcgctctgctccaagccgctggcccgcaacagcgacatcttcatgtacaggggcgacaccccgttctgcagcgaggactgccgctacgagcagatgcaccacgacgcggcggccacggcctacgcgcggcagcaggccagcagccggcggaggcagcagcggagcaggggcggctctgtgtccgccaacgaggcggacgtgtacgtggccagctagtttaagagcaggcgcaagcgcggcgaggccgaggatggtgaaggccgtgcgctgcctggttcaagctagagaatcccgtcggtggaggcgcaggcgctcccggttggctgcccgccactgcgccgcacgagctttgtgagcgggggatggatctgaaagagtcgaaggctgaagaaggcgatcaggagacagatccagacaacccgcgggttgaaaacttggatatcgacgccatacgtgctctgcgcctctgctcctcttgtttctgttttcccttccctgatgggatcttttgggctgtgagtgggttagaggttgatgaggcctgaggtgtctgcgactgcgagagctagcagcatcgatctgtaaatgtacacggcgtttgagcacgtcgttatgatcgatagtcgcgaaattttgatgtccacgtatctcgagcagaggttgagggcagacgaagcttggcagacgatgccaggtttcctt

SEQ ID NO: 125083 - DNA, 441 bp, Zea mays
  unsure (1)..(441): unsure at all n locations
  Clone ID: MRT4577_45549C.1
cgcgtccgatttgaggccggtgcggtctccttgcttcgtgttggtgcggaaaaataatccgcggcgtgcacggctattggcttcgtgttctgctcgattgcgccccccacccctcctcggtagcgcgcaagatgaatgaagattggtcctggtctggttggcgtatcagtagatttcattttcattgcgagtgtgccgttttctttgaattcttgggcgggttcgagtgaggttttggggtttcgccttgctttcangggcggtgttgttccgatgacgtctgccaagtagtaattaattttacaggattanttttggtgctgtttctttgaatgataaaccgaaatccttgtttttttttgaaaggattaacatcatattgctttttaagtgctgtttggttcatcaacggtaacatatatagcaacagtaatgattcat

SEQ ID NO: 125084 - DNA, 507 bp, Zea mays
  Clone ID: MRT4577_4554C.1
aaccccgcccgcccccataaaaggcgaacgggagttttaatcacaaccggcaaataaaccagaccaaaaccaacggaaacggttagctacccagttttttggcggaaaaaaaccaacaaggcccctgggcccccccgggaaaggaaaaaataaaaaccaaaggaccggccacctagctagaacccccccccccggggcataaaaaacaacgaacccgtttggtaaccaacccggccaaaaccaacccgaaacaacaacaacaacgaagggggaaaaaccagcaaaaacctcccctcccactgggttaattttaaggggggggggggccggggccttccccgagaggaaagaagaattttaccaggggccccggaccgtttaacttggccagggcccaaggggagggcgttctccaggccccgggaaaacccccccacccccctaaggcctgggtgggaaaaacccctttcccccaggggcccacccagggggggggggaggaccccc

SEQ ID NO: 125085 - DNA, 782 bp, Zea mays
  Clone ID: MRT4577_45550C.1
cctagtcccccccacccaaccacccttctcccgccgccgccccgcgaagcaaagcaggaggagcaggatgccggcgggccacggtctgcggtcgcggacgcgcgacctgttcgcgcgcccgttccggaagaagggttacatcccgctcaccacctacctgcgcacctacaaggtcggcgagtacgtcgacgtcaaggtgaacggcgccgtgcacaagggtatgccgcacaagttctaccacggccgcaccggacgcgtgtggaacgtcaccaagcgcgccatcggcgtcgagatcaacaagcaggttggaaaccgcattatcaggaaaaggatccatgtccgtgttgagcatgtgcagccatccaggtgtgctgaggagttccgcctgaggaaagtgaagaacgaccagctcaaggcggaagccaaggcgcgcggtgaggtcatcagcaccaagaggcagccgctcggccctaaacctgggttcatggtcgagggtaccacaattgagaccgtcactcccattccctacgatgtggtcaatgatctcaagggtggttactagggtgtttgggttatctgcctgcacaaccagttcaaatctatggtgctcttatgggttggatttgctctctgagcagtagtctgggttgggtctttattcatgtcaagaagatattcggtgtaggttgctatcatgagttttgcagaaatgctatactgtgctatttcctttagaatgatgatgtgctctgttgaactatatagttacattgcttgcctcc

SEQ ID NO: 125086 - DNA, 165 bp, Zea mays
  Clone ID: MRT4577_45551C.1
gtgatcacccggccctcgaccaccaaagcgggggcattttaaacacttttcgcgttcacaaccggaacaaaggagatgtacaccttatcttttgagatactagggcgctagactctacaaatccaacggcacaatcacactctgtagtgctgggttcgccttcta

SEQ ID NO: 125087 - DNA, 276 bp, Zea mays
  Clone ID: MRT4577_45552C.1
attttctgtgcatgaagctctatgaccttcacgagttctacaacctcattttgttccctgattttatttgtatttattactgtttggtcaccctgtgatatatgttgtacaactgcatgtaaaccacgtcatgtgtacaattgtactgtttagattggttatacttaatgccatgtactggttacatggtttcttctgtcttgatccttgttattaaccaggtacaaacaatctttctgtaggcagcagttgccagagcctccaatggaattacac

SEQ ID NO: 125088 - DNA, 420 bp, Zea mays
  Clone ID: MRT4577_45553C.1
aattcccgggttgacgcacgcgtacggaagaatattctcctccggctccggtgaggataagagcactcatgccggacccagttgccactacacatagattactatggccgccagccaccgattgggacgccggagttgataacgccgacacccccgtccgcttgcactgcatgcaggcttgtcgatggcagcacggtggagtcacaggggaaggaggcctgtatatgcatgccaagaacgcccgactgcgttaactgtgaggttcttggcgtgcgactgtgctcaccgatggcggcagcagaagaacagaaaggctgctgtcgagcccgtgtcttatttagcattcatgctgacaggatatctcaacagatgaaagacgcctgagtgctgctactggtacacactacacagtgcagagca

SEQ ID NO: 125089 - DNA, 287 bp, Zea mays
  Clone ID: MRT4577_45554C.1
tgttactgtcaggaagctctgaagcaaagaccaccatggcctccacctacacagtgggttatgcatattgtgggtgctcaactcaggccaataccctggccatcttatggctctcgttcagttgggcaatgtttatgggggggtccaggttgtgatcaatgtttcttactgaatttcattatattaatggctttggggccttgctaaggcaacaggctaatctgtcttttgtcaagaagaaagggtggttggttttattgcaatttttatccggtggtcagcacaac

SEQ ID NO: 125090 - DNA, 664 bp, Zea mays
  unsure (1)..(664): unsure at all n locations
  Clone ID: MRT4577_45555C.1
ccggtaccggccttcccgggttcgcataccatctacactgtccagtccgacatccattacatggagggcatgccacccgtaccagcagcgcctgatcttcggcggcaagcgtgtgggaggtggacgaaccctggcggactacaacatccataatgagagccatctccacctggtactccgcctcaggggccgtatgcagattcttctcaagacattgactggcaaaaccattaccttggaggtgctcagctctgacaccattgacagtgtaaacgccatgatccactacaaggagggcattcccccagaccaacattgattgatctttgtaggcaagcagctcaaggatggccgcactctttcggtctacaacatgcaaaaagagagcacccttcaccttattctccgcctcataggtggaatgcatatcttagtaaagaccctgactggaaaaaccataaccctggatgttcagagctcggacaccatcgacaatgtaaatgcgaacatccatgacaaggatggcatccccccngaccagcaacgtgtgatcttcatcagcaaacagctggaggatggccgcaccctagcagactacaacatccaataggagagcaccctccatcttgtgctccgtctacgtggtggcaataagtcatgggtc

SEQ ID NO: 125091 - DNA, 1270 bp, Zea mays
  Clone ID: MRT4577_45556C.1
gccggccgggtcgggctcttttccagttccagacctgaagaaactccgaccggccggtgggcggtggcggcaggggcgaggcgacaggatctgtgccgcgatggcgacgtcgaacaccgcgcggatggaggacggcggcggcgacctgagaagcaccatcaagaagtggaacatcatctaccctgtctacctcaactccaagaagacggtcgccgagggccgccgcatcgccgctgccaaggcctgcccggaccccacctgcatcgagatcgctgactgctgttcgcacctcaagatcccccacgccatcgagttggataaggcgtaccctcgggatttcttccaggtggggagggtcagggtgcagcttaagaaagatgacggctcccccgtcaatcctgctattaaaacgaagaagcagctgatgatccaagtagcagagctagttcccaagcatcacggaaggacaaagaagcaggagccagcgcccaatcccggtggcagttcaaagaacacaaaaggcgggaaaaagaaaaagtgatgcagtatcattgtggtggtttttattctgttcgtcatcagtcactacgctcgaggcagaaagggaagggcttggacgttgttgttatgttgccattatgccatttttcatgtataagaacttactaagaatcttccattgactcggtaaaatgcaacataaaaaaatggcttcgctaaaaaaaacaaaaaaaaaaaaaaaaaaaaaaaaaaaaaaaaaaaaaaaaaaaaaaaaaaaaaaaaaaaaaaaaaaaaaaaaaaaaaaaaaaaaaaaaaaaaaaaagaaaaaaaaaaaggaagaaaaaaaaaaagggggaaaaaaaaaaaaaagggggcccggggggggggggcggttataaaaataggggttccccgggggggggggaatgggatttggggtttttggaacggggggacttggggggggggcggggaaccaaattggccttatggggggcggaattaggggggttcagggggggggggttaaaaggggggggggggggaaaaccggggggtaaccaaattagaaggggtgggggggaaatccccttttcgcgaggggggaaaatgggaaaaggggcggaacgaattgcctttccaaaaggtggggctccgggaggggggaggggaattggaaagggaaaatattttgtaaaaatccgggagagtttttgggaaagagggttctttttttaaacaaagaggggaaaatgggaaaatccccttt

SEQ ID NO: 125092 - DNA, 924 bp, Zea mays
  Clone ID: MRT4577_45557C.1
tttccaaaaagcgaaaaaaaaaaaaaaaaaaattacaaaaaaaaaaaactcgaggccggccgggccgggctattgatttgttcccgtcatattaacgccagggagggccttttctctcggctgtgaacggcaaacagtgtctcttttccagttccagacctgaagaaactccgaccggccggtgggcggtggcggcagccggcaggatctgtgccgcgatggcgacgtcgaacacggcgcggatggaggacggcggcggcgacctgcggagcaccatcaagaagtggaatatcatctaccctgtctacctcaactccaagaagacggtcgccgagggccgccgcatcgccgctgccaaggcctgcccggaccccacctgcatcgagatcgctgactgctgttcgcacctcaagatcccccacgccatcgagttggataaggcgtaccctcgggatttcttccaggtggggagggtcagggtgcagcttaagaaagatgacggctcccccgtcaatcctgctattaaaacgaagaagcagctgatgatccaagtagcagagctagttcccaagcatcacggaaggacaaagaagcaggagccagcgcccaatcccggtggcagttcaaagaacacaaaaggcgggaaaaagaaaaagtgatgcagtatcattgtgttgttttttattctgttcgtcatcatacactaagcttctgtgaaaaagaaaaagtcttggacgttgttgttatgttgccattgtgccatttttcatgtataagaacttactaagaatcttccattgactcggtaaaatgcaacataaaaaaatggcttcgctagattaaagggccctttgacaaaaaaaaaaaaaaaaaaaacccctagaaaaaaaaaaaaacggacgcgtggtagggccgcggccgctc

SEQ ID NO: 125093 - DNA, 283 bp, Zea mays
  Clone ID: MRT4577_45558C.1
ggaactcagttacatctcagttcagcataccacccccaaagtgatggtcaaacggagcgtgtgaatcaatgcttggagatgtttttgagatgtgctgttcacaattccccttctcagtgggcaaaatggttagactcagcagagttgtggtacaacacatcctatcatacttctataaagtgttctccatttaaagctttatatggagttgagcctaatttgggatgcattcctgtcactgactctttgaatccttcagaagctcaactcaccttgcagcaaa

SEQ ID NO: 125094 - DNA, 426 bp, Zea mays
  Clone ID: MRT4577_45559C.1
tcttcttcttcttcgtccctttgaagatatggtgaagaatcttaaagtggatcctgttgctaaggtcactgcctccaccacttccatggtttctgcaaaagagaataagaatcagtcagaggcagagccatcatattatgaaactcttgagacatatcaaggcctgccttgtccttatggtggctactatggatactactatccaggtcttgatggttcagttggagaagcaaaggataatggatactatggttatggaacagaagttcagtacccggtaatgcaaggggaaaatgggtctgtgatctacttgatgccagggtttcagtcttatgatgcaagccaaacttatatgcctataaacccgggtggtgtatcgagtcaagcacttcattcgccgatgtatgctgcttcaggttattatca

SEQ ID NO: 125095 - DNA, 764 bp, Zea mays
  Clone ID: MRT4577_4555C.1
ccgtccgggatgctcctccccctcctcaaatcccagccgctcctccaccacgccgcgcgcctgtcctccccacgcacccgcctgctcctccgccgcgacgcaatcccgctcgcacgctccccgcctatccgcatggcggcctcgtccggctccggcgccagctcccctgcctcggcgccgccagctgccgtggtgcacaagtcaaagatcaaattttgccctgcttgtggaagtccaacgaaactggccatacctgatggcgatgagaagatgagggctgtttgttcttcttgtggaagagttcactatgaaaaccccaaaatggtaaatgctgaacaaataaaagaaaaaggaaaggatccatatacatttgtatttgggctttaaattacgacactgaatgcctgttcgcacagtggccgtggattttttagttctacctacagtattttgtaggaggcaaatcacagctgcagctttaatctgcggtgaacaccccttcaattccatgattatagagcccgcattttttcattcatgtatgaagtgcttttgatgaacagatgtgtccccattttcttttttgtttaatctattggtgaaacaagggactatagctggcaatatttttttgttatatatgtgtaacacatgttggcttctattttctgccatttacaatatatatcatctggataggttgttggttgccttgttgagcatgataataaggttctcctttgcagaagaaagattgaaccagc

SEQ ID NO: 125096 - DNA, 1006 bp, Zea mays
  Clone ID: MRT4577_45560C.1
ttgggtaccccctcgagtgtccggcccgggctccccctatacccggcttatctaccgaggcaaaactaatacagttgtttgactagatcggaggtgaagataagccggtgtactaatctggccacggttaacccctctcctcggcttggccgccacatccactatttctttcagaggctctgcttctctctcctcatatgcatccgccgtgagcctcctccagtcctcctcttccttaccccaatctcgcctcaaatccaatcccattcccacctcacagtctagcttgcctcgcatactcctcatctcttctcctagccttaggtcgatgtttgcctaggcttccaccacggatttggcccccaaccgtgttcccttgttcgcttgctattgtctcaatcattgatacttgttcccccaaaaccctgggctccagtcaatcgttgcgtccctcacacggtgatcgaggcatcactgatgatggcaaggatgatgcggtggccacagccaatgacagcgcgcaagtcccccgtgcgactggtggtgcggcatgcgggggtgctcttgctgccttcgccttcacctagcaaccagagatgacttcgaccttccctcgttggcaagtgtctcgaaccgttgccgtgactctccgccaccaagcgcctctgcaactagcggggcaaaggacaaccgagggagaggatggtggagtagccgatggagaggaggaggaggcgcttcggatgaggactttagttttgtattggttctatgactctctgccatgtacctctgcaggtagcggggcaagagcaaccaagagagaggaggcgccgtcgctagcgatgcgtggttaaacagccgaggtagaggaggcactccgaatgccaatttagttttgtattggttgttagcaaataatttgtgaaatattaaagtcgattataatatatgtattgctcgtttttatataatcactgtgagttaatattttatcgaattatgt

SEQ ID NO: 125097 - DNA, 561 bp, Zea mays
  Clone ID: MRT4577_45561C.1
acattgttcttggggggatctcgttttgaaatacaaaacaaacttgtaaaaaaaaaaaaaaaaaaaaaaaaaaaaaagcttgtacctaaggccgaaaccacggctccgggggacgttcaccacgatatcgcggcaaactgtggggacgtccaagcaactgtcgggagggcccacttccccctatagggcccagtttgccactatacgggccgtattacaacaacctggcgcctgggaaacccctgggggacccggaaaaccctggcttgccccacattcaccttttggcagctgatgcaattttgaacaggtggggacctatcgacctggcccacaccggccccccttgcaaggagaagggccgccccctggggcagtggactcaccccggagggggtggtgaatccccgcaggggggccggtacccttcacagggccctatcccctggccattgccctatctccccttcctttctcgtcacgccctccctttttccccgcgaagctctaatttcccggctaagtttaaggtcgcgggttactgttaggcggcccctttac

SEQ ID NO: 125098 - DNA, 368 bp, Zea mays
  Clone ID: MRT4577_45562C.1
gaacccttgtccttctttttccttccctgggagggcttagcatctctggggggacagcatcatcttcctataaccccgcaccaccaacttggatggcaccagccctctcatcatcctgggcaacactggttgagttcccaaaaaggcccaacccacccaatacggcaccaagctctgaaagctccctccaatacaactcctttttaaacaaaagcccccctgtaactaaagggggcacaaaccgggttttaaccgcttttacaaaaagtttggaaggggcattttccactttatgctcgggggcaccaacaagggccctaacataaaagaccccgagggacgttgaacatcctcccaaaggggggcgc

SEQ ID NO: 125099 - DNA, 324 bp, Zea mays
  Clone ID: MRT4577_45563C.1
tcggaaggcaccaccggcttcccgatcttgttgagagggagccccattccgaaaccggcggcggatttcaatgggccccaagggccgaaagaaacccggccgccaaaaaccttgcgaagaagaacccggcggcgaaaaaggccccgggggggagaaggccaagggccgaaaggcggttccttgcggccaggtccgcggccaaggagggtggcaaaaaaaagggaaaaaaaaaggcaaaaaattcgggggaaacgtccaaaatttactttttaaaggtgctgaagcaggggcacccggttttgggcttttggtccaaggccttgt

SEQ ID NO: 125100 - DNA, 983 bp, Zea mays
  Clone ID: MRT4577_45564C.1
cattgcaccgctcgcgcgtggccgggcatcgccttgtcaccaccgctctcgcctcgccgccgccttcctccttcccctgcgattacaaaaccctaggaccattctccaccaattcctctaatccctcgtcgctaggtagttcctgcgtctccatcccgatccccttgtcgattcagtcgtaatcaggatgcagcccggatcggccccggcggccggcggcaccggcatgttcgtgccggcggcgacggctggcacggtgctctgctgcatgtgcggcgtgtccatgcagcccaacccggccaacatgtgcgcgcgatgcctgcgcgcgcgcgtcgacatcaccgagggcgtcccgcgccacgccgccgtggtctactgccccgactgctcctcctacctccagccgccgcggtcctggctccgcgccgcacccgagtcgcccgagctcatgcagatcctgctccgccgaatcaaccgcccgctcgcgcggctccgcgtctccctctccggcgccgagttcgtcttctccgagccccactccaagcgcctccgcctcaagctccgcctccgccgcgaggtgctccacggcatcgtcctcgagcagacgcacccagtggagttcgtcgtccacgaccggttgtgcgactcctgctcccgcgcgcaggccaaccccgaccagtgggttgccgtcgtccagctgcgccagcacgtgccccaccgccgcactttcctctacctcgagcagctcctcctcaagcacggccaggcttccctcgcgatccgagtcgcggcggcccccggcggcctcgacttcttcttcggctcgcgttcccatgccgcccgcctggtcgacttccttgccaccgtcgctcctatccaaactcagacagcgaagcagctcgtctcgcacgacaccaagagcagcgtctacaactacaagtacaccttttcggtcgatatctgccctatctgccgtgaggacc

SEQ ID NO: 125101 - DNA, 388 bp, Zea mays
  Clone ID: MRT4577_45565C.1
ttcttagttgcgctaaaacacacttagctgaagctttatgatatttgcatcaatattttataaaccactgcattgaattttccttcctctggatcctgccaattcacgagtcttggggcaaaccagttctggagaaatgataagaccctaccttcgagttgaatccttgcaaaagtgtttaaattctgcaatattactgctgaagtctttgtagttatcatggtatgaatagttgttttgctttgtatggaccattactaataatttctattagttaaagttaaaaagaaagtaagtcaaatagcgattgcttgttagttgtcgcttaatactgctgttgctgaacatatgtattctggaggacatttgtgcgtcatgccatcttcat

SEQ ID NO: 125102 - DNA, 411 bp, Zea mays
  Clone ID: MRT4577_45566C.1
aattcactaacaagtctgcattttcataaaaaatagagacgtatgtacaactacatatatcatcaaccgtctaaatattcgaatttagacatacgttaaaacagtaattgaacgaacacatagttcttttgattgaaattgcagtaaataaaataataaatgtaaatgcttcggccgaagcgtaggcagcccatgcaggtggaatccggcccaggcggtcctccaggcagcctccccagccggccctccagtcggcccaggctagtggctagcgcagcccggccggcttgcctagcggccaggcgcggcccaagcgccatataggaaggctaggcggttaccctaaccgcccaccacattcaccaggcggcggcggcgccaacacacagggcatgggcgcggtggcgggtg

SEQ ID NO: 125103 - DNA, 650 bp, Zea mays
  unsure (1)..(650): unsure at all n locations
  Clone ID: MRT4577_45567C.1
ccaattcttcgtagagtagtcagtgaagaagtggagcgcgcactgggcaaacttggccctgcaacaatcggtggaaggccttccccaaagcgaattccgaacaaggctgtcacttcccctttttactggaggaaaagttgaaggggagcagggagctgcaattcatgttgttttgtttgatgctggcactggctgtgttgtatcctctggaccagagtcgtctgccaaacttgacatcgttgttctagaaggtgatttcaacaatgaagatgaggagggctggaccggagaagagtttgacagtcacgttgtgaaggagcgtgagggaaagcggcctattttaactggtgatctacaagtcacactaaaagaaggtgtgggaacaattggggagcttacattcacagataactctagctggataaggagtaggaaattcagacttggcttgaagattgcctcaggattttgtgagggtgttcgcattcgtgaggcaaaaacagaagcctttatggttaaggaccatagaggagaattgtacaagaagcactatccacctacactgaaagatgaggtctggnnaggttggaaaaanatagggaaggacccgggtcattccattaagaggctgaacaaatctggaatatcta

SEQ ID NO: 125104 - DNA, 1083 bp, Zea mays
  Clone ID: MRT4577_45568C.1
gggtacctcgaggccggccgggccgggacagtaggttcattcccccctaccacatcgaactgtgcgcgcgctgcgcggtcggtcgctcccctcctctgtccgcgatctcggctggccgcctgggcttggccctcgccaccgctcccgtctccggttccggcggccgagccaggtttgctcgggtcttcgtgccagcgacgatgaaggacaagcgtgggctcgaggacgccggcgacgggcgccctgatgccaagaggccgcggcctccggctctggccagtgttattgttgaagcgctaaaggtggatagtctgcagaggctctgctcatcattggaaccaattcttcgtagagtagtcagtgaagaagtggagcgcgcactgggcaaacttggccctgcaacaatcggtggaaggccttccccaaagcgaattgaaggtccaaatggaagaactctgcaactcgaattccgaacaaggctgtcacttcccctttttactggaggaaaagttgaaggggagcagggagctgcaattcatgttgttttgtttgatgctggcactggctgtgttgtatcctctggaccagagtcgtctgccaaacttgacatcgttgttctagaaggtgatttcaacaatgaagatgaggagggctggaccggagaagagtttgacagtcacgttgtgaaggagcgtgagggaaagcggcctattttaactggtgatctacaagtcacactaaaagaaggtgtggggacaattggggagcttacattcacagataactctagctggataaggagtaggaaattcagacttggcttgaagattgcctcaggattttgtgagggtgttcgcattcgtgaggcaaaaacagaagcctttatggttaaggaccatagaggagaattgtacaagaagcactatccacctacactgaaagatgaggtctggaggttggaaaaaatagggaaggatgggtcattccataagaggctgaacaaatctggaatatctacagttgaggatttccttaggcttgtggttcgggatccacagaaattacgcagtatacttggaagtg

SEQ ID NO: 125105 - DNA, 274 bp, Zea mays
  Clone ID: MRT4577_45569C.1
acgcgttcgccgacacgtacgccatctctctcaatcagttaccgcagatccgtcatccggtgagtgtagtccgcacgaacccatggcctccctcgagcttgcctgctcctacgccgctctcatcctcagcgactatggcatctccatcaccgcacgataagatcgccacgatcgttaatgcggccaacatcaaagtcgagtcctactggcctgccctcttcgccaagctcctggagaagcgcaacgtctaggaccttatcctctccgttggatc

SEQ ID NO: 125106 - DNA, 343 bp, Zea mays
  Clone ID: MRT4577_4556C.1
gaggccccttttattaatttttttaggagccccttttcatttttagaaaaagcccatcaaaaagcttccccgttattaaatttttttaggagctggtggaggcccaccattaagggcctttaatcatggggcaacatgttgggcaacccatggggatagggcataaaaaacacccccctttcacggggggaggaaccccccctggtccttggcggagcccaaaaccctatgggacttggcccttaacttgggccttaacacctttacaaacatagcttggaaattgagttttttgagcccccccccaagggttcccgccttccattttgggaaaattttgggg

SEQ ID NO: 125107 - DNA, 229 bp, Zea mays
  unsure (1)..(229): unsure at all n locations
  Clone ID: MRT4577_45570C.1
cttagnncgtggnntcgcggcccgaggctacccgcgggnnggttcgnnnattccggnagaaggnngagcctgtagnaatacggcttaccgacatccaaggcaagggcagcaggtcgcgccaaattcacccannatcctgacagcggggcaggtcagtggacagatgaaataagcaagtacctgggcgcgcttagtgtgctggtaagttggagatgagtagtctgcggcc

SEQ ID NO: 125108 - DNA, 2444 bp, Zea mays
  unsure (1)..(2444): unsure at all n locations
  Clone ID: MRT4577_45571C.1
gggagtaatgtatactatagtatatagcgacatgtcccctatccaccgggcagggtgtgcgcggtcggtcgcttcccttcccttttgtccgcgatctgggctggccctcgtggcctcgtcccgtctccgattccggcgtccgaaccagattcgcccgggccttcgtgccagcgatgaaggagaagcgtgggctcgaggacgccggcgggggcgccggcgacggacgtcctgatgccaagaggtcgcggcctccggcactggccagtgttattgttgaagctttaaagatggatagtctgcagaggctctgctcatcactggaaccaattcttcgtagagtagtcagtgaagaagtggagcgcgcactgggcagacttggccctgcaacaatcggtggaaggtcttccccaaagcgaattgaaggtccagatggaagagctctgcaactccaattccggacaaggctgtcacttccccttttcaccggaggaaaagttgaaggggagcagggagctgcaattcatgttgttttgcttgatgctggcactggtggtgttgtatcatctggaccagagtcgtctgccaaacttgacattgttgttctcgaaggtgatttcaacaatgaagatgaggagggctggacaggggaagagtttgacagccatgttgtgaaagagcgcgagggaaaacgacctattttaaccggcgatctacaagtcacactaaaagaaggtgtcgggacaattggggagcttacgttcacagataactctagctggataaggagtaggaagttcaggcttggcttgaagcttgcctcaggattttgtgagggtgttcgcattcgtgaagcaaaaacggaagccttcatggttaaggaccatagaggagaattgtacaagaagcactatccacctacactgaaagatgaggtctggaggttggaaaaaataggaaaggatgggtcattccataagaggctgaacaaatctggaatatctacagttgaggatttccttaggctcgtagttcgggacccacagaaattgcgcagtatacttggaagtggtatgtccaacaaaatgtgggatgcccttgtggaacatgcaaagacttgtgtcttaagtgggaaatattacatatactattctgatgagagcagaagtattggtgctattttcaacaacatctatgcattctgtgggttgatttctggcgagcagttttattcatctgagagtcttgatgatagccaaaagctgtttgctgatgcattggtaaagaaagcatatgataactggatgtatgtcattgaatatgatggcaaaggtcttttgaaccctaaaccaaagaaaaagtctgcatccactggtcaagtggagacacatgctctgcgggttggcccgttggactattcaaacaataccatgtcttcgatggcatgccagggccatcaccatcagctggaactgattctgcagggtatggcgtcgaccaaatcgcaacacatccatctcagctgcagagttcatccgccaatgtccaggcaccatatgatgacacattttcgttcttaccacgtaccatgcagacagggtctgcaaatgatgccatgggtctggaactgggcagttgcagcaagtaacttcctcaaggccagacaattcagccagcaaacgtgggatatggtgattggcccaggaaccgtgacagtcagtatcctgatggcttcactgaaggcattcgccttaagagccaccagttgctcgagggcgaggacatgcagcagctgctgagggtcttcagcatgggtggagcttctggcagtttgccagacgacaccttcaacttccagtcctacatgccctctccgatgccgaacctcgggttcgaaactgagcgtagccattcgtctggcaaagctgttgttggctggctcaagatcaaggcagcgatgaggtggggaatcttcgtcaggaagaaagctgccgagagaagggcgcagctagtcgagctggaggattgacaccgtggctttacaatggtcaaggttgccttgtagattactagtagttatctgcccacataccttcctgttaccgttgaaacaagtttctgaaactcttttctgaaatgtacaacgagtagttctactattttcttgtacagaattcaccttgcttngcttgtgttagtggtgtaacattgctctgctaagtttgacacatgactggacccgtatgcttgtgtatctaattttccatccatagctcttcagtgcagaatgtaccgcaacaatgcgaattaatccaaagattatgtgtacatgttgatgccttgcctttaagggaaaaacactcttgctagaaacattcaggtctagtttgggtactctagtaaaaaaaaaaaaaaaaaaaaagaaaaaaaaaaaaaaaaaagcggcc

SEQ ID NO: 125109 - DNA, 320 bp, Zea mays
  Clone ID: MRT4577_45572C.1
cgtaagctcggaattcggctcgagcccaaacgagaagcccactatctggcgcccgcccaactcctcttcaacggggggtctattgaaaaagattggcgggaaaacaacagaccccatcatgggggagaacgccccaaccgcaaccagccaaagaaagcgtaccaatcagaccgaaccaacgggaacgcacctccgggggacgggggcagaaggtacacacgagcgagggcacgcatacaagacagaagtgacctagacgactcaaacgaggcagctgaaaaggagaaccgcctaaagctacaaactggacgggctgtctt

SEQ ID NO: 125110 - DNA, 756 bp, Zea mays
  Clone ID: MRT4577_45573C.1
tttcccctctgtctccttcctcctcccaccccatcccaagtagactaccagatcggtaacctcccaaatcactcgctcactactcgtatcacttacgatcgaggatctaccggcggccatggcggcgtgcagaggaggcgggggcggcaaggacgtggaccggatcaagggcccgtggagccccgaggaggacgacgcgctgcagcggctcgtgggccgccacggcgcgcgcaactggtccctcatcagcaagtccatcccggggcggtccggcaagtcctgccgcctccgctggtgcaaccagctctcgccgcaggtggagcaccgccccttcacccccgacgaggacgacaccatcctccgcgcccacgccaggttcggcaacaagtgggccaccatcgcacgcctcctctccggccgcactgacaacgccatcaagaaccactggaactccacgctcaagcgcaagtactcctcctcttcctctgcatcggcatcgccggctgatgacgccatggcaaacgacgatgaggaccgccggccgctgaagcggaccagcagcgacgggtacccggggctctgcttcagccccgggagcccgtcggggtcggacctcagcgactccagtcaccagagcctccccttcgtcatgccgtccgccgcctcgcagcagccgcacgtgtaccgcccggtcgcgcgggcccggcggggtgtaccggctcccgacggccaaccccgcatccgtcgccttcctgt

SEQ ID NO: 125111 - DNA, 148 bp, Zea mays
  Clone ID: MRT4577_45574C.1
ttgctgttttctataaaagcttgacaaaggactgggaggatcttttgggtgtgaagcactattctgcgcatgattcactggactctaaggctgttctatatgctactaatagggtccccttcatatcttattcacaccttaaagaatc

SEQ ID NO: 125112 - DNA, 356 bp, Zea mays
  Clone ID: MRT4577_45575C.1
tcttcctcagcatcatgagcgacgaaccaaactgtatgaccttcttcacctaaacatacttctaaaaagctggcacatccagcaatatagaacgtcccttaccctacctaaaataaggccctctctatcttaaactttgataagggacccttgaacatatcgctctaggaaaaactaaaggtggcgctaacataccaaagaaccgctgcattctctgcctattgcatttgactgcacccagcctgacgcctataatacgaattttgtgaaaaccgaacccgaggctgcatccggtaattcaggtccgagacctgcttgcggaccagctttacctatagctagacctttaaatcttg

SEQ ID NO: 125113 - DNA, 1544 bp, Zea mays
  Clone ID: MRT4577_45576C.1
gcctgcgcgcccggccgcccctccccttcgggccccccgccgcgcaccctcgcggaactgggaggccggtgcggtcctcccccccttctgcccgttctctccccgtgtgggcctgcccccttccggcgcgacgagacgccttatgcttgttcaagacgtcaggtgttggtatttgggttgcaattgagtgattgggaaacctgactggacagaagcattgttggtcaaccaatgggaagcaatgaccctagcacaccctccaaggcttcaaaggcatcagaacaagtacttgaaacagtggatcaacctccagctaccacatccagtggaacagtttcagtttaccctgaatggcccagctttcaggcataccaagcaattccaccacatgggttcttcccccctaccgttgctgcaaatccacaggcccattcatacatgtggggagctcagcccatggtaccaccttatgggactccaccaccaccttatgtgatgtatccacctggagcagtatatgcccatccctctacacctcctactatgcatccgtttagtcattaccctatgccaacaaatggacatgctgaaactcctggaaccgcgccaagtgctccagaaatgaatgggaaaagtgagcctggcagaacatctgctccatctgccaatgggattacctcgcacagtgagagtggaagtgagagtgagagtgaaggaagtgatgccaattatgaaaatgattcacattcaaaggacaatgatggaaaggaagatggcaattctcagaatagcatatcttattcagcatcacaaggagtgttaaaccaaaccatggcgatgcttccaatacaaccgggcgcaatggttggaggagtttctagctccacagctaacttgaatattggagtgcactactgggaagctccaggttctgcagctgtctctgcaacgcatggcaaagcaccagctggttcagctcggggagaccaatgggatgaaagggaactcaagaagcaaaaacggaagcagtctaatagagaatcggcacgcagatcccggctgcgcaagcaggctgagtgtgaggagcttgggcaacgtgctgaaactctgaggtcggaaaactcgtctctcagggccgagcttgaacggatcagaaaggagtacgaacagctactttcgcagaacgcttcactcaaggaaaagctggggggcagcagtgacccgattcctgatatgaatgaacagaacgacggcaacggcagcgacaagaagcaatctgattccgatgcccagcctgggagcgagtcttgacccgtttagctcaggatccttgggaatgcacattgctatttattttctcgaacatggttgaacagaacataggagaaaaagaattgtttatgtaactcttaccccttgactgcctaatgtctctgacggcatgtatataatgtatgccctcactgctgaactagtactagtaattgaggaattgcagatattgacagctaaaaaaagggcggccgctcgcgatctagaactag

SEQ ID NO: 125114 - DNA, 243 bp, Zea mays
  Clone ID: MRT4577_45577C.1
aacgcacacaagcggatgacaaacaaacagcaagagagcggaactgcgataggcaaatgcaaatgcaacggcaacgcaagccagatgcagagcgcgccccgccacgatgaagaaggaggaggtggcctcgccggcggcggcgacggtggtcctgctgctcctgtcgtcgtcgttggcggccgtctcctgccagccacagccgcagccgcagcccgggggcagcaagcagacggcggctaacaa

SEQ ID NO: 125115 - DNA, 328 bp, Zea mays
  Clone ID: MRT4577_45578C.1
ttttgggtgtttttttatattttttttttgtattataaactttttttttttttatcatttatttcttcaacatcattaaacatatgttatttattatcaaccgcggagcggcacatgtttcttactccagcaaccaaaaatccattttctcgttgtgttagagcacggacccccacaccataaaatatcgctccaaaaaaaaaataaacctcttccgcagaaaaaaaaccccccgccctttcataaaaaaaaaaaacacccccctcaaaaaaaacaaaatcttccgcccgggacaaataattttctaatccctcacccgccgagcaat

SEQ ID NO: 125116 - DNA, 712 bp, Zea mays
  Clone ID: MRT4577_45579C.1
ggggtgcgccaggctcaagcaatagtgcaacactagagcgacacacaagggacctaatggcaagccactgtagtggacccttccccacaaaatattaatttaatatcaaagtggacatatggcccacatatcagatattaaactgataagaacagatactacacttgatcttagccaaaaggccgagaaaggtatgaattgttatattgactgaggtctgcttttataagccttctctgctctctcccgctggaagccaccgaggtgggactaaactgaagcaccacaaagtacaggcattcagacctctgtccggttgcgtgggctttctgggctatcaatacggcaatacgtcgatgctggctcggtccgcagtcgtttccaccgcagctggctggacacaggccacccgccgtccgctttgtttcccagacgtcgaggctgaactccatccatgtttgaaacaaaatcttctttgtttgtatgatgaccgtacgtacatgaatggaaccgttccaggagggaagccacacggaaccgttccaaggattgctcggcgttttctttttacaaatgctgtatttttcttaggtagacgtaataatcacggagtctggatttttctttttcttttcctttttttcaagtattgctcggctttgctaggtagacgtaataatcatttacaaaggccatgcacaaatagcgcacg

SEQ ID NO: 125117 - DNA, 627 bp, Zea mays
  Clone ID: MRT4577_4557C.1
ggtccctctgacgagtgacgacgaaaccctaggccatggcttggcgcggcgccgcctcccgctccattatcgccgccgtccgtgctcgcgcggcatccccgtcttccaccgccgcctcgcgcctccgctcgacagctccacttcccgccccctcgcgcctccgctcgacagctccacttcccgccccctcgcgccggtccgtccccgccttcgctttcgcgaccgcgaggccgttggcggcgatgtcggggtccccggcggcggccgtggtgaagctcaccgggcacgcggcgacgagcgtgcgggcgtgctgtgagctctcccagggcacttaatgcgcacttttgtccttaaatgcaagggttggattctttggaggttgcatcccttgaaactcgtcgggcttgcgtccttttccatgcattttgcagagtacttagcacctcgtgtgtcggcaaacggacagtatatctgctgtaacttacataaataatcatatgttagcctgctgctactcactgccccacatcgattggaactaagttgatgtttggttcacgttatacaattaaatcatatttgtttaagtccaacaaaaaaaagaatccacgctaaaaactgatattg

SEQ ID NO: 125118 - DNA, 477 bp, Zea mays
  unsure (1)..(477): unsure at all n locations
  Clone ID: MRT4577_45580C.1
agaanaagagggaacgaaaaagcgggttggtacccctccgcaattcccgcgataggagtttctttttttcagccttccaaggtgctgggagtgcgggcgtgagccactgggcccaggcatctataatttcctggtagtcacactggcaacaaaacaccttagaaccagatatcaaccccctccaagcaatacgtgaattccctttacatgaaacgtcagggctacctgagtatctgtgttgaatgcagtctgaaatgaccctgtggattttactggctggttgccactactgtacaacattcagtgcccacacccacctgttccattaaggttttttgagacatgagagatgcctattccctgctgtgtgacacggatttgtgtagttggaaagaaaagacaacattagggagtaaacattcaagctttttacctgtaggttgaatctgccgccacttggtgtttattaccagctat

SEQ ID NO: 125119 - DNA, 534 bp, Zea mays
  Clone ID: MRT4577_45581C.1
atctcgaaatggtgccctcataccggcatgtgtttcctagaaataatcaatatattggttgagatttatctcgataaaaaaaaaaaaaaaaaaaaaaaaaaaaaaaaaaaaaaaaaaaaaaaaaaaaaaaaaaaaaaaaaaaaaaaaaaaaaaaaaaaaaaaaaactagacctagaaccaaaaaaaaactaaaagaaaaattttgcccatttccctaacacccgccgaggggcaaattcttgaaatttccaggccccattgggccctataggggattccttttaaaagggcccagtcccccctttaaaaacgcgttaaaaaaaaaaaccccggcgtttccaaacttaatggcctggaaaacccttccctttccccaatttaatgtattagaaaaaaggccccttttgaccgcctttgtaaaaagtaaaaaagcccgaatggaaaacgttcccacactgttgccccccttaaagcgcaaagggccccccccttacccgcaccttaaacccttacacttgccggggatcccccccc

SEQ ID NO: 125120 - DNA, 201 bp, Zea mays
  unsure (1)..(201): unsure at all n locations
  Clone ID: MRT4577_45582C.1
tccgcccagcgtgcgaccagcccgaggaacacgcngagaaaccggggcgctcattcgtgtgcgacccatcaacggcacagagcagacagatgcaggcgcaaacgtcaccgcggaccggtatagctagcttgggaagctgcaactgaactcactttatctgatccgcatgatagtaatggggggcgaacacatgaggaacat

SEQ ID NO: 125121 - DNA, 2620 bp, Zea mays
  Clone ID: MRT4577_45583C.1
ttggatgctatctgtcaggctagccttgttgctattattggaggctcttcgcctgcttcggttacccgtttgcttggtatcagtttgtggcgctatctggttggttgcacttggttgatacatatggttgcatgttctgcaagtgaatcttcagagattacagctatctcattagtggatagtcatgcatttatgtaaaaaaatagcaatgagaaaaaagaacaaagtaaagaaaaagagaaaatatagatagagatgtgggagtatatccaagaggatggaaaaaaaatataatctgttatcatattacaatttttgttcttaatgtttctgcaatagtgtgttgatgtcatcaagatgggacgcaaggttagctgcatgatcacccatggcccatgggtactcattggaattccaaagtttgtggaggcatggaacacaaagacagggatgaaactaagatttcaagggccttctagtctggtttgttccatggctatcacggatgagatgctgtttgctggtactggagatggtcgcgtcatcgcctcgacatcaaaacccatccacctcccttcttcctctccagactccacgaccgcaaccccacccatctcctccttcacgaaccttctagaaccccgtccagaaccctacccaaccatggcggcctccctcctctcccgcgccgccgctgccgccgcggcgctgcgcggcgcggcccggccgaaccacctcctcgctcgggcctccctccccaagggtcgggtcgggtgggcggcgcgcgcggcggagggcgccggtgggccccggtgcggcccgtcgccactgctgggcgcgttcgggatcgcggcgcggtgcaacgccacgtcgtcttcgtccgcggtgtccgaggccaccggcgtccacacagtgcccccgacggagcccgtggtgtcggccgagtggctccacgccaacctcaaggaccccgacgtcaaggtacttgatgcctcttggtatatgcctgcagaacaaaggaatccattacaagagtaccaggtggcccatatccctggtgctttgttctttgatgttgatggaatatccgacagaacatctagtttaccacacatgctgccatctgaaaaggcattttcagctgctgtatctgctcttggcatctacaacaaagacgggatagtagtttatgatggaaaggggctgttcagtgctgctcgtgtttggtggatgttccgtgtatttggacatgataaagtttgggtgttggatggaggtttgccccaatggcgcgcttctgggtatgatgttgaatcaagtgcctctagtgatgccatcctaaaggccagtgcagctggtgaagcaattgagaaagtttaccagggtcaattggttggtccaaccacatttgaagcaaagttgcagcctcatcttctttggagtcttgatcaggtgaaagagaacatcaacacccagacacatcaacttatagatgctcgatcaaaacctagatttgatggtgcagttcccgagccacgaaaggggattagaagtgggcatgtgcctgggagcaaatgtgttccgtttcctcaggttcttgacagctcacaaaagctattgccttcagatgagctccgtaaacggtttgagcaagaaggaatatcacttgatcagcctcttgttacctcttgtggcactggtgtgacagcatgtgtattagccttgggccttcatcgacttggcaaaaccgatgtcgcaatttatgacggatcgtggaccgaatggggcgcccatcctgacactccagttgcaactgctgtttagtctcttcataataggacgcccgtgctcttcatagaggacctcttgattgtatttgccccgtgctgtgattctatggaggttggttggatgcttggatgtaaggctggggaagcgaagccttttggccttcactgtaaaagctgcaacagaaaaactgtcacatgcactgaattataagataactccccttgatctctcgtcttggttgattaataaaactaaagtttgtctgctgtatgtgagctaactatacttatatgcacataaatgtacatatctacagacattcaaaatcctcgggtgcagaagcaccgatctgtggtcggtctggtaatttgctgataaagcaagtgaccactgaaccagtgttgatcctcagtggccatcaacggccagtgatttcactgtctatctcggcaagaagactttactctggctcactggacaagaccatcaaatgcatgggaccttacaactcggcagtgtgtccaaacactctctgagcataaagctgctgtaacatctgtgctttgttgggatgagaagttattatcttgctcccttgacaagactgtaaaactctggactctgtcagagtcaggaaaccttcaagtcaaatatacccatgctgaggagaatgtaagaactgcactcctgccgatcatgcgttatttttgttttgttggatgctgcatactgtctatacctaaatagtttatggcaacaacatttttatcggtgtagtaactaagttttactattaaggttcagagttaagagcaacaattacattttc

SEQ ID NO: 125122 - DNA, 1110 bp, Zea mays
  Clone ID: MRT4577_45584C.1
ccctcgaggcctgccgggagtctcacgacaacaaccccacccatctcctccttacgaaccttctagaaccccgtccagaaccctacccaaccatggcggcctccctcctctcccgcgccgccgctgccgccgcggcgctgcgcggcgcggcccggccgaaccacctcctcgctcgggcctccctccccaaggaaaccctccttcctcccctactactactcgtcatcatcatcaccgccgctacgcccctcgcgggtcgggtcgggtgggcggcgcgcgcggcggagggcgccggtgggccccggtgcggcccgtcgccactgctgggcgcgttcgggatcgcggcgcggtgcaacgccacgtcgtcttcgtccgcggtgtccgaggccaccggcgtccacacagtgcccccgacggagcccgtggtgtcggccgagtggctccacgccaacctcaaggaccccgacgtcaaggtacttgatgcctcttggtatatgcctgcagaacaaaggaatccattacaagagtaccaggtggcccatatccctggtgctttgttctttgatgttgatggaatatccgacagaacatctagtttaccacacatgctgccattttgaaaggcattttcagctgctgtatctgctcttggcatttacaacaaaaatgggatagtagtttatgatggaaaggggatgttccgtgctgcttgtgtttggtggtggggaggactgcccagtttgcatttggagcatcaaaacaggcgagctaatctttgttcggagcaaggcaaacagtcccttcccgacatcttgttggcccaaaaacaaccatggcttgtagtccttggctgtttgatgtaaaccccaactgggaagtcagacatcccctaaagctagggtgtcccttcttgacatgttttttttagtgataggtggatactgtttaggtaggaacaaagtttttagggattgatgggggcaagcattttcaaatcctgtgtgttgtattactactgggacaatctccaaagcttgttaacttatgtgtttggactgtgaatttgttatatgaacatatatcaatatgtttaaaatctgtattgtttgg

SEQ ID NO: 125123 - DNA, 1080 bp, Zea mays
  Clone ID: MRT4577_45585C.1
cctcgaggccggccgggacttgcctttcttcaggttcttgacagctcacaaaagctattgccttcagatgagctccgtaaacggtttgagcaagaaggtaatatcataatatttcatctatattggttacaacttaaaaatatcttattagtgctcgatgatagcatccattagccaggttttatcatgttttgttggatgcttcctcccagttcaggaagtgttttctttacgcactttcagttgtaatattatttttttgacacaacactaatctggtcaccaaaatacctatagatcttctcatacctaggtcaaatttagcattctcatgaaatcgttaatgaggctttagctagtaacatgaagcttcactggatttaataggtttgacatgattaacatggatgatattggtggatttggatttggccgtattttctattgggtttattgagagaataacatcaatgttgtacactggtagttgacgctggtgatcatttttatcgttttatggcacttgataatgtataactgcagccaccaagatttaaaggtagaatcagcactaactgtggcggtatttgattcctttggtgtgcttcattatcaggaatatcacttgatcagcctcttgttacctcttgtggcactggtgtgacagcatgtgtattagccttgggccttcatcgacttggcaaaaccgccggccgggtttatgacggatcgtggaccgaatggggcgcccatcctgacactccaggttgcaactgctgtttagtctcttcataataggacgcccgtgctcttcatagaggacctcttgattgtatttgccccgtgctgtgattctatggaggttggttggatgcttggatgtaaggctggggaagcgaagccttttggccttcactgtaaaagctgcaacagaaaaactgtcacatgcactgaattataagataactccccttgatctctcgtcttggttgattaaaaaaaaaaaaaaaaaaaaaaaaaaaaaaaaaaaaaaaaaaaaaaaaaaaaaaaaaaaagaaaaaaaaaaaaaaaaaagcggcc

SEQ ID NO: 125124 - DNA, 1162 bp, Zea mays
  Clone ID: MRT4577_45586C.1
cgggatttatgtacaaaaatagcaatgagaaaaagaacatagtaaagaaaaagagaaaatatagatagagatatgtgggagtatatccaagaggatggaaaaaaaatataatctgttatcatattacaatttttgttcttaatgtttctgcaatagtgtgttgatgtcatcaagatgggacgcaaggttagctgcatgatcacccatggcccatgggtactcattggaattccaaagtttgtggaggtgacattctgattctagtgagagtacacctttattttgtattatgtatggtgacattgaggggtgactttgcttggtacaaggcatggaacacaaagacagggatgaaactaagatttcaagggccttctagtctggtttgttccatggctatcacggatgagatgctgtttgctggtactggagatggtcgcatcatggcctggagatttcctgctaaggaaagtaacactgaaccagtgttgatcctcagtggccatcaacggccagtgatttcactgtctatctcggcaagaagactttactctggctcactggacaagaccatcaaagcatgggaccttacaactcggcagtgtgtccaaacactctctgagcataaagctgctgtaacatctgtgctttgttgggatgagaagttattatcttgctcccttgacaagactgtaaaactctggactctgtcagagtcaggaaaccttcaagtcaaatatacccatgctgaggagaatggtttgcgcacactcttcggacatgcaccgagttgggaagacgccagttcacttgtgctcctctccacaacagcaatcgccgtccgcttgcgacttgccatcgttcgacgggattggaacactgttgtccacgaaggaagttaggaccatcgagcttgcggctggtgggctgctcttcaccggagactgctccggcgagctgaaagtgtggaggtgggcgcccaaggactaggaggcagtagctgatgtgcatcaaatagtgtagctgtagcctcattgaagaataatagccactgacgtgctccatcattgtattcgtttccatgtaaattatggctgctccccctgatgatgtagcacatacggccaattttgtgaggatgcaaaccctggtatcatgttcc

SEQ ID NO: 125125 - DNA, 861 bp, Zea mays
  Clone ID: MRT4577_45587C.1
cccacgcgtccgcccacgcgtccggtcttgtgtcctgggagctctgagaaaaagtacatggatgaagcacggaacttcggaagagatggctatctgcagaccttgttgcatgcacttatcatttggatatattctgttgcttgattctgccagggcctctgctatgtgcacattttatatgcttaagggccaacataagaaggagagatgcgtatcatttcattgagtaaagaggctacagggaaagaaatccaacatagcccgcccctcctccctctaagcacacaagacctgaaaggttctcagcctgttagcaccatggaatgctcttatttgtgattgcctgcagcaccgccatcataacacttgcaatgatgccattaaaaagacatcatactgatgtttccagatctctcaagccaccaagatagtgagttcaggcctttcttgctatatcatttggcacttgtcagcctagctcaaaccggcttgataacttattgatgataggttgaggcgcaatggaaataatccaagcctgccagattggtaaccattctttagactgccatttagtaagtcaggttgaacctattaccatctataaggacttgttcggttagctctcaatccatgtggattgagtgggattggatgggtttgaatcccaaacaagtcaaacttcttctcaattttttccaatcccatccaatccatatgtattaggaataaccgaacaagccctaagtgggcatgcaaatggcattgtgttggattggaccattgtaaacggtttctcgtgttggatgcaagcattctgtagttgttttgagttgttttttattatctgtagtacttgct

SEQ ID NO: 125126 - DNA, 310 bp, Zea mays
  unsure (1)..(310): unsure at all n locations
  Clone ID: MRT4577_45588C.1
gcgggtgttttttttttgttcttttgggccccttgcgtnggccagctgggaggagcgtggaaccagtcaactgggggacctcgcgcgcccctgggcggggggcgggggtctggccgacgcaaacataccatgggtgggccgcccctgccccgggggggggggggggcgcgcctcgtctggtccgggaccctgggctggggcccgtccccgcactgaacgtgggccgccaggacgggcgtgggcgcgtccggcgtccgggggcgcgccccccccgcgggggggagggggggccgcgccgcgccctggtccc

SEQ ID NO: 125127 - DNA, 496 bp, Zea mays
  Clone ID: MRT4577_45589C.1
gccggccgggctgggagaatcttaggctcctattcatctttctcctctctacgtacagagtgaactagaaaaagcacgcgccatggcagagcagaacacatgccatgtctcctacacagatgtcgtcggccacgtcgcgaacgaggctgcgtgcgccgccttccaccaggaccacgtgaagatgcccaagtacagtgtggaatggcaaccggcggcttggtacgagagttggggttacggccccaaacgagtgctggacctgggcccactgtacggcgagacgccaagctacctgacgcacgagttcccaggccaatacggcgtgcgacaacggcggggcatagtagaggcgacccggagacagatcctcgaggaaccgagtagctgtaggtgatccacttccgctaggccatgctgggcgagctcgattgtaacttcccgtagctggtcgcccggaacgtcaacaaggtcgactacgccgtggggtttaacgacg

SEQ ID NO: 125128 - DNA, 256 bp, Zea mays
  Clone ID: MRT4577_4558C.1
atctcgtctcatctactcagtaccatgcattacttctgctgttcaaagcttatttgcaccgtcggttttgaaccatgctcacctaccaaaaccaaaaaaaaaaaaggtaacaaaaggaaatcatattccggtgagcgttagaggagcgagtacaagcttatatgctctctgagtattgtatccgatgggccatattcagcgcacatcgaacttcactgtgctcgactgaaaattgtgtaatgtgtattagcctatt

SEQ ID NO: 125129 - DNA, 375 bp, Zea mays
  Clone ID: MRT4577_45590C.1
aggcactcggcggtacgtgcggttggaagtcggaggctacttcgccgactgccgagcgctggtggaggaggaccgcccgaggtggcgggggtacagcgccgcgcggggggggcgccacgacggcgcgccggccctcggggaagcccgggcacaccttgccgggcagctgccccgacccgcacggggacgagccatggagcctggggctcgtcgacctgaccggccgggcacacgccgacggaacgcgggcactctgcgtctgctcatggcaccagcagcctgggccggccgactggccgggcgcacggcgcggacggcccacgccggggacaccggggtgagcagcatccacccgacggcggcggcggcgggggc

SEQ ID NO: 125130 - DNA, 443 bp, Zea mays
  Clone ID: MRT4577_45591C.1
gcctggtttggtttttttgaaacgcacacttggatatagagacggaaccctaatgcacctaaataagcctatgatgaaacgggcctacatggggaaacaaccatagtgacaagcggaactatacatcttactacagtatgtaccaccacgaggcgggcacagaagctctggtatgctacgcgacaccaaaacatccagcagagggtagggcagttatagggaggcagctttacagcacaactgaacctctgattgttagggagctcattcatctgtagctggagtagatcctactgtaactagggtagatctgtgtgtagctggggtagcaaatattgctatactggattccttgagaagctcaatatcgttatagaggccgtgcattctggtccacagtgaattgacagaaagcgccactcttaaaactttgatagccattt

SEQ ID NO: 125131 - DNA, 855 bp, Zea mays
  Clone ID: MRT4577_45592C.1
cccctacgccgtgctgtgctcgagtgtcaacgtcatcgcctagcctcccgccgccgtcgccgacgccgccgccgccacaagcgaacaagagagttaagaagatggctgaagttgaaaccttcctcttcacatccgagtctgtcaacgaggggcaccctgacaagctctgcgaccagatatctgatgctgtgctagatgcatgcctggctgaagaccctgacagcaaggttgcttgtgagacatgcaccaagaccaacatggtcatggttttcggtgagatcactaccaaggccaatgttgactatgagaagattgtgagggatacttgccgtggcatcggttttgtgtccaatgatgtagggcttgatgctgaccactgcaaggtacttgtcaacattgagcagcagtcccctgacatcgcgcagggtgtccatggtcactttaccaagcggcctgaggagattggcgctggtgaccagggccatatgtttggatatgcaactgatgagacccctgagttcatgcccctcagccatgttcttgctaccaagcttggtgctcgtctcactgaggttcgcaagaacgcgacctgcccgtggttgaggcctgatggcaagacccaggtgactgtggagtatcacaatgacaatggtgctatggtccctatacgtgtccacactgtgctcatctccacccagcatgatgagacagtgaccaatgatgagattgctgctgatctgaaggagcatgtgattaagcctgtcatcccagagcagtaccttgatgagaatacatcttccatctcaacccatctggccgctttgtcattggtggacctcacggcgatgctggtct

SEQ ID NO: 125132 - DNA, 784 bp, Zea mays
  unsure (1)..(784): unsure at all n locations
  Clone ID: MRT4577_45593C.1
ttgggtacctcgaggccggccgggatatgcatccggtgtctcctcaaannnnnnaaaaaaaaaaaaaaaaaaaaaaaaaaaaaaaaaaaaaaaaaaaaaaaaaaaaaaaaaaaaaaaaaaaaaaaaaaaaaaaaaaaaaaaaagactgcccccccatcccgcagcagccaaaacctacctagccgccgccgcagggggccccccatcgccgccaaaatgcaaatctttgggaaaactctgacggggaaaaccatcactttggagggggagtcctccgaccccattgacaaggggaaggccaaaatccaggacaaggagggcatccccccggaccagaaggggttcattttcgccggaaagaagctcgaggacggtcgcaccctcgccgactacaaaattcaaaaggagcccaccctccacctggggctccgcctccgggggggcgccaaaaagcgtaaaaaaaaaacgtaccccaagcccaagaagatcaagcacaagcacaaaaaggggaagctctccgggctgcagttctataagggggacgaccccactggcaaggggacccgcctccgcaaggagggccccaacacagaggggggggggggggtcttcatggccaaccacttcgaccgccactactggggaaaggggggcctcacctatgtctacaaccaaaaggcgaaattgcttgccccgatttgttttatccgccaacctatcaagcattcagaggtgggttactcaaattgtatctcatttaaatctgcctgaggttgaaacttaa

SEQ ID NO: 125133 - DNA, 900 bp, Zea mays
  Clone ID: MRT4577_45594C.1
gccggccgggttccggctaatcacgcccaggattaaagattcccatcccccctctccgccttggcctcggctcgcgcacctgcctgcctacctacctgcgttgttgtcttcttcgcctccttccctgtggccgcaccgcagctgcggcgccggcggcagaggtgaacagcgaccggcggcgagtgcgcttcccgcggccttgtcttgtccggtctccggggccgggaccgacagcgcagcgcctctcgggatctcccccgagtccccgacccccatgcgtcggcctcggtgacagggtttgctagcggagtccatccaactataatgaattaggcacccagtacgtaatggcaacggaagtcaaacaaacttatttttcatggtcacaaggagagtcaactgaacgggatggtcctcaaagagtatctgtatcccagacacttgatcatggttccatttccttcggaagatttgaattagagtcactatcatgggagaagtggtccgtatttactaatgacaggcgcaatgaagaatttggaaaattcaatggtttagtcgctcagaaaaaggcttattttgaagagtattacaagaagatcagggaactaaaggcttcacagcagcaaaaccagcaaactgaacttattctggaatacagcggtgatggtagtgactccagccaaacagcagaagaggagcagggtgctgatcttgaaacccccactggatctggagcagctgttgatgtttatgtggaagaagttccatgtgaaaccacatcggagcatggactgcagtgctataatgaccaaggaaacgaaaattttgatacagaattttcctcatctaatctttcttcgtcaggtggatttctgcagcaaactgaccatgatgtta

SEQ ID NO: 125134 - DNA, 674 bp, Zea mays
  Clone ID: MRT4577_45595C.1
accctcgaggccggccgggacgggcctggcctgcctacctacctgcgttgttgccttcttcgcctcctccccctgtggccgcaccgcagcagctgcggcggcggcagaggtgaacagcttcccgcggccttgtcctgtccggactccggggccgggaccggcagcgcagcgggctcgcgggatctcccgacccccccatgcgtcggcctcggtgacagcgccgcagcttttcaaaagtgctcctctttgggggccttgggggtctgtaactctaactgctgggtggcctctcttttcttgcctccccgctttcttttccgtgggtttgctagcggagtccatccaactataatgaattaggcacccagtacgtaatggcaacggaagtcaagcaaacttatttttcatggtcacaaggagagtcgactgaacgggatggtcctcaaggagtatctgtatcccagacacttgatcatggttccatttccttcggaagatttgaattagagtcactatcatgggagaagtggtccgtatttactaatgacaggcgcaatgaagaatttggaaaattcaatggtttagtcgctcagaaaaaggcttattttgaagagtattacaagagatcagggacctaaagggctcacagcagcaaaaccagcaaactgaactta

SEQ ID NO: 125135 - DNA, 449 bp, Zea mays
  Clone ID: MRT4577_45596C.1
tgcttaagtcttcactcatggttattaacagccttgatttgcaagtgttaatgttttacccgttatcatttcattgtgtattggtaaagtgtagtgttaggttgtagtccgtaagggtaggtggtggtgggtagggtaattgttatcgtagttgagacttggtggttagtggtaattggtggggggtaggtggctgggattcggcgctggctcatagttagatagtagtagtagtagtgcgatattatcattgcacggcttatcgtcttcccgtcggcgctgcttatcgtcttctcgtaatgctgcccgactcttcgcgtagctcgtatatgtgcgccgaaggagccgaccttcgcatagtatatgacagtataaattctcatcggcctaccttcggcatcattgcggcaactcgattcgtcacactgtcccgtccaccactcacacct

SEQ ID NO: 125136 - DNA, 623 bp, Zea mays
  unsure (1)..(623): unsure at all n locations
  Clone ID: MRT4577_45597C.1
ctgcgttgttgccttcttcgcctcccccctgtggccgcaccgcagctgcggcggcagaggtgaacagcgaccggcggcgagtgcgcttcccgcggccgggaccggcagcgcagcgggctcgcgggatctcccggcccccatgcgtcggcctcggtgacagggtttgctagcggagtccatccaactataatgaattaggcacccagtacgtaatggcaacggaagtcaaacaaacttatttttcatggtcacaaggagagtcaactgaacgggatggtcctcaaggagtatctgtatcccagacacttgatcatggttccatttccttcggaagatttgaattagagtcactatcatgggagaagtggtccgtatttactaatgacaggcgcaatgaagaatttggaaaattcaatggtttagtcgctcagaaaaaggcttattttgaagagtattacaagaagatcagggaactaaaggcttcacagcagcaaaaccagcaaactgaacttattctggaatacagcggtgatgggtagtgactncagccaaacagcagaagaggagcagggtggctgatcttgaaaccccactggatctggagcagctgttgatgtttatgt

SEQ ID NO: 125137 - DNA, 2545 bp, Zea mays
  Clone ID: MRT4577_45598C.1
cccaggagccctcccacgcgtccgctcccgcgagcacgctacgaatcgccgtggtaaatgctcggccgcggcggccattagaaggcgctaatcacggccaggattaaagagcccccctctccgccttggcctcggctcgcgcacctgcctgcctcactgcctgcctacctacctgcgttgttgccttcttcgcctcctccccctgtggccgcaccgcagctgctgcggcggcggcagaggtgaacagcttcccgcggccttgtcctgtccggactccggggccgggaccggcagcgcagcgggctcgcgggatctcccgacccccatgcgtcggcctcggtgacagggtttgctagcggagtccatccaactataatgaattaggcacccagtacgtaatggcaacggaagtcaaacaaacttatttttcatggtcacaaggagagtcaactgaacgggatggtcctcaaggagtatctgtatcccagacacttgatcatggttccatttccttcggaagatttgaattagagtcactatcatgggagaagtggtccgtatttactaatgacaggcgcaatgaagaatttggaaaattcaatggtttagtcgctcagaaaaaggcttattttgaagagtattacaagaagatcagggaactaaaggcttcacagcagcaaaaccagcaaactgaacttattctggaatacagcggtgatggtagtgactccagccaaacagcagaagaggagcagggtgctgatcttgaaacccccactggatctggagcagctgttgatgtttatgtggaagaagttccatgtgaaaccacatcggagcatggactgcagtgctataatgaccaaggaaacgaaaattttgatacagaattttcctcatctaatctttcttcgtcaggtggatttctgcagcaaactgaccatgatgttagagttcctgttcgtggtgacaattctaccagtaaactgtatgcggcgccgcagaatgctagttctgttcacgatggtactagaaaaacatatgaagctgcaaggactcctagaaggattattgagaaagattccaggcttagacacagccccaagataataccaaaatccgtcaaagccctttcacaaagtgctatggattacacatttgctagtgagaggcctggttcagtgaagcccaatacaactacgagccagaaggctaagccagtgcaaagaccaaatgcagcaagccagaagacgtctgcatctacagaaaggagcaagcttacaggtctcagaagaccttcctcagcaggtgcgcaacggccttctactggagagcgacatgctattgccagggagaattcacaattacctgtggtcgtttccaccccacggcgaccttccactgctgagagacgcccagtcacccgagatcgtgcagagaagcaagccaatgtcaccacaccacgccgaccttctacttctgaaagactccccatcaaaagagagactgcagcaaagcataatgatatttccgctgtacgtcgaccctctacaggagagaggcgtgcttttactagagatggtgttctgagaactgatgtgaagacacctagtaaggcaagagcaactgtggctcatccgatgagtgaaatgactacagtgggcaatacgagaaaggctatcactccaaatgcagctagaagtagcaagctggaaacaaaaagcaataactacagactgaagggaccttcagcattggatagccactctactaggtcaaacagaatggacttgcaagtgtctggcaagcagaaatcgagttctgttaaccttcctccaaggaaaattttcagttctactgctggagaaccatcagttggaaccatttctaggtcaaaaaagaaagagggcgttcaggcgacagtgcaatctcgagcatccacttcaaagagaacaactcctttgcagactggaaacttaaaggcgaggggtccaaatccaccagcaccgccacctccaccacgtcggccatcacgaacgactaccaaaccaagtgccggtgcctcatcgattggcggaagaaagccaaaggcttcagcaccacaatggcactgatgcagtggaggagagcggaaagcgcttcagtacagtggcccgcagagcatggtggatctgagggacgtcagtaccggccttcctttgtatggtgtgtactcccgttggcccgtgcagagcagctcccaagtgtagtctcagtacaacccccgttggcccgtcccttcctttgcagagcagcagtctagtgtatgtagtcgcgcgtatcatatcccaccggtgcctagtttcgtcgtccacaaggaacttagaacattgtaaatacctggaaataaatttgcagcttagctctaaagtaaatccagcccaagatttgtgaacatccatgtatgtcattagcaatggaagcccttgtttatcagctaaaaaaaaaaaaaaactttttaagggttattgtcagatttgattcttcggaaaaaaaaaaaaaaaaa

SEQ ID NO: 125138 - DNA, 271 bp, Zea mays
  Clone ID: MRT4577_45599C.1
ctcacctcaactaacgctcgctagctacctagctagcacgtactatagataattgcgacatattttgatttgatgtatatacacacgtggcaggggtccatgagcgcaccattgttcaacacccgttcgttcaagatcgcctacgtgccgaacggcaagggctacgccgagatcgtgtgcccgcaccgccagtcgcagggcggcgagagcgatcgcgactcgacaagggcaggaggatcgaagaagaagaagaagaatcgtctgatgagca

SEQ ID NO: 125139 - DNA, 685 bp, Zea mays
  Clone ID: MRT4577_4559C.1
ccggccgttcccgagcgactccctctgacgagtgacgacgaaaccctaggccatggcttggcgcggcgccgcctcccgctccattatcgccgccgtccgtgctcgcgcggcatccccgtcttccaccgccgcctcgcgcctccgctcgacagctccacttcccgccccctcgcgcctccgctcgacagctccacttcccgccccctcgcgccggtccgtccccgccttcgctttcgcgaccgcgaggccgttggcggcgatgtcggggtccccggcggcggccgtggtgaagctcaccgggcacgcggcgacgagcgtgcgggcgtgctgtgagctctcccagggccaaaatgggaaggatggttgatgaggagatcagacggaatgattcatatcctgatgcacttaatgcgcacttttgtccttaaatgcaagggttggattctttggaggttgcatcccttgaaactcgtcgggcttgcgtccttttccatgcattttgcagagcacttagcacctcgtgtgtcggcaaacggacagtatatctgctgtaacttacataaataatcatatgttagcctgctgctactcactgccccacatcgattggaactaagttgatgtttggttcacgttatacaattaaatcatatttgttcaaaaaaaaaaaaaaaaaaggccccta

SEQ ID NO: 125140 - DNA, 351 bp, Zea mays
  Clone ID: MRT4577_455C.1
ctctctctttttttggaacaagaacatgtattctatcaaaatttaaaggcttgcacataacatatgctggaatgattcgtacagttattacaggccgatagtgctcctgtacacacctgacaccgcaacacctgaaggtctagcacactcactggcctgaagatccttattccactcaggtgcactcataaacccggggcgcaacgcacgtatggcctgcgctttagtttccaacccgctgatcacgttcaatctcatacctttttacgaggtcagatccatccatccgcagttaggtctgttgtttgcaccaaattccctgtgcggggcagtacccatggaggccagcca

SEQ ID NO: 125141 - DNA, 644 bp, Zea mays
  Clone ID: MRT4577_45600C.1
gtttcactaaaagagctgcagttcctgccccaggttgatcagctcccaagaacttgagttcttcaggcctcacattgaaataaagcgcgatcgtcagactggcgaagtttttgaagtacttgatggtttgatgttcaaggatggatttctgtataaaaaggttgcacttagttctttgatttattgggggatacaaccgacagaaacagagcttttgaaattctcttctagtccaagcaatagagcttctgctgatgacctggattggctctccggcatgtatggttctaagaaaaggaaccttccagcagaacgagatatgaagtcatcatcttctaaaataaaatcctccaaagcatcagaccttaaagggtcaacttctactgaaaattatgacgacaatgatgaattcaaccttcatgatcttgtactctatgggcgaaaagattttggtgtgatcattgctgttgagaaagatggttttaggatactaaagggtggtcccgaaggatctgcggtgacagtgaggaagcaggatattaagaaaggctgtgtagacaaaatgtttacagctgttgatcatcataaaaagacgatatccattaatgacactgttaatgtcgtggaagggccatttcagggta

SEQ ID NO: 125142 - DNA, 394 bp, Zea mays
  Clone ID: MRT4577_45601C.1
atttagtcattcggttctaaagaatcttttcttttcccataaactcatatttagctttttgcatgcttccgacaatactttgggcaggcattgttttgtataaaaaaacttgccggggaggaatagaccgtcctcccggtttggctggcactcaaggcgcacacacccccttcacgggctgaagaagagaaagtcccgaacgagaaaatcctgacccccatcactcacgggtctaccggcccaaggcagcaaggacatgcccaaagcaacagcgacatgccaatgtctgctaagtctgaaactagtttttattgtgccagatatcaattgcgagtttagtctatatagatccctaaatgaagtaattacacaagtattaagtcgtggcaaccca

SEQ ID NO: 125143 - DNA, 380 bp, Zea mays
  Clone ID: MRT4577_45602C.1
cttgacctctattttcccttgcttactgcgtctccgtgttattctagcagaaggggggacgaaaaccaaacctggtccagtttaagtccccaggtgttggtgggccccttagaccgcgacaatggtgaccatctatatcatgtcctccatccctataattgcagagtcctgaccgctgttatccccagccgattttcccgtgttttgaaagacaaacgtatacgccgatgtgtggaactgggcattacgtacaatgattcgcgtatactgcaccgctcagcacctgatgacacggccacaacggaggctgaataggctacttttacttacacatggggtgattaggctacaaccattacacgagaagaaactttgtttaa

SEQ ID NO: 125144 - DNA, 363 bp, Zea mays
  Clone ID: MRT4577_45603C.1
tcgcgcttcggcgtcggcccgaaagctttctcccctgcccaggacaccatagtggtgatgccggccgcgccggcctgcaacgtggaggccgccacccccgatggcatccgcgcactcctccgtttgtaggacaaaagggagaaggcccctctcccagtacgtcgagcttggtataccataatatttccccgccaatattattcttttgggtgtgaacattgaacgcgtagaatagtatttcaagacacgatgtgacgcttgaggtctggtcgtgcggttgtcctcatggtgacatgatatgacggcgctgtatgggtgctacctctggcggagcacaagctggagggagacgacgatcttaac

SEQ ID NO: 125145 - DNA, 153 bp, Zea mays
  Clone ID: MRT4577_45604C.1
tctcccttgcgcgcctccatttgcgaagaagggccttgcaaggagaaagtgccctccacccatgaggccagagaaaccccacataaacattggggtcactggccatgtcgactctagctagactagcacgacaatacaccttatgtactaact

SEQ ID NO: 125146 - DNA, 448 bp, Zea mays
  Clone ID: MRT4577_45605C.1
gccggccgggtacggaagctgcccaaaagtcgcctccatctccgtggctgggttttctgctttgctgagtgaaatgaacatcgctacagctctgtggcgcgctgggacttccctgttcggctacggctggagggtgtcccggtgcacgcctggaacaaggacgttgctgcccagatcattggaagccactgtgccatccatgtgttggacgagaagaccatgcctcgcaagcgaactcgcacttttgatctatgggcatggagtgaagatcctagcaaggaaaatgaaaacgacatctgcgggaaagtctgtgcgtcccgtgggtggggggaggcttttttttttttcccccccccccccccccccaacacccccacccacccaaccctacacccccccacacaaaaaacaactcccccccccccccccccccccccctttccccccc

SEQ ID NO: 125147 - DNA, 354 bp, Zea mays
  Clone ID: MRT4577_45606C.1
ccggccgggatccttcctggccggctggctactgttcctcttgttcctgggctcctggcgactcctccctgcgaaaacctccggctgctcctcctcctcaataaccaactctggtggctcctccctgatcaagaaccatcggctcctccagtccttgaccaactccggcgactccctggtcttgtaagtttgattagctaaatacctactgctgtttgagtttgattacctacagctattcagactttagaggtgctacattctaggactgctacactgttgtagtgctgtttgacagtttgagtttgatattcatatttgaaacgcaaaaaaaaaaaaaaaaaaggggcggcc

SEQ ID NO: 125148 - DNA, 283 bp, Zea mays
  Clone ID: MRT4577_45607C.1
gtcctcgaggtgttcgatgaaatttcgaggtgcgacggtggcatgtggtgcccaagcttctgttaccatctggcttcaccaccgacagagaggaaaatgtgttcaaggatgtggatgctatgttcaagggggcaatagtaggtgctaggagattctacaacagactcttatgtgatgttgtccactagaaaagagatgtgggatgtactggaggccaaatatagggtgcctaacatcgatagtgagttgtatatcatggagcattttcataaatatagaatga

SEQ ID NO: 125149 - DNA, 268 bp, Zea mays
  Clone ID: MRT4577_45608C.1
agctgcagcaaacaatttctgcactacaacacactttaattgagaactccgaccgaggctttaaatgatcagttttttgtagcgacggccatcgaacccgcaaggcccaaccaaggttccagagatcactaatccctagagcacccatctcttttggccgggtgacattagaccatgccaagagacaatgaccacccttcccttcttttctaccttgccacaaaaaattccttcgaattctatcaattgctttgatgacccaagccgg

SEQ ID NO: 125150 - DNA, 373 bp, Zea mays
  Clone ID: MRT4577_45609C.1
ggggtaacaaattatttcagttaatctttgtcaagtaaccaattagggttcatggtacaagagaggaagttggtgtcccggaggccgtaacagctccgcagaataaaattcagaaatcctactgccagtacgcactgctgctggcagaggctggccgcgcattcgtcagctccttcacgacggcagtcatggagggcctttggctcacctccctggccgcgcaccggagcgccaccgacaggaccttacgcaccttctccatcttcaccgtgccgaagactttctccatgagggccgggtcacagacggcctcgattttgtcggtgccgttcagcacggacgacacccagccgactatgtccgtgctgtcggg

SEQ ID NO: 125151 - DNA, 461 bp, Zea mays
  Clone ID: MRT4577_4560C.1
aaacctactccccgttgtggaggcacaaaggccggtttttttttaacccttccctctctaaaacgggccctcaaaccgagtgagcttcttttgggaaacaaaagccgggaacaaaacttccccccaagggccaccaaacaattggcgcctcttgccttgtttacaatggagttttgatcacaagaacaagtgacaacgaaaagaagccccccaagcgcaggagctcaaatgaacacgacaaatgactttcactagccactagggctttggggggaaatggagaggatttgacctctttgtatgggaccaaaaaagaatgcctacctcttgaaaggggttgagaagtgggaaaacttggatgcaatgaatggtgggggtggcccaaaagagggggcccccctcttggggggggggggaaaggggaaaaacccggacccaaaaaagggggtgggggccccccc

SEQ ID NO: 125152 - DNA, 681 bp, Zea mays
  Clone ID: MRT4577_45610C.1
actcctatgggcgattgggtccctcgaggccggccgggattcaggcgcatgcgatggcggcagttgcccgagagcacgcgcgacgacggacccctgaccggtggccgtagctcctagacctaaacgtgcggtggcggcggttcctcgatccggagtagcggcggcgattcccagatcggtaacgtggtggtggcggctcctcgattcagagggcaagcgacgacgtggccatgtgcgggcaagctgcggcgtccctggggcccctaggcgggtcagaggtggcggcactcccaaggcgggcgagcaagcggcgccccccaatgtgcgagaagcgacggtgccgcacgaggcgcgaggttcgagcggcgtcatggaaggcgcgaggtgtatgcagcaatggtcacgcgtgacatcgtccgatccgacgcagttcgggcgacccgagtgacgacctccatccattcttgttttgtcgacgacgtcctccggcaattaccttctccgattcgtgttgtctttcgattattgtgttttatgcctaccacatgcactatttacgttaaaattgtatgatttcatgcttaaacatggagttcgtatattagtttactgcatgcatatattgtgcatgcatattgaaaagggaattccttgaaaaaaaaaaaaaaaaaatttgcggcc

SEQ ID NO: 125153 - DNA, 368 bp, Zea mays
  unsure (1)..(368): unsure at all n locations
  Clone ID: MRT4577_45611C.1
gccgttgaacacgcccgcggcgccgtgcgggaagaagccgccggggctgtgggccgggtcggcgggcctgctcaggttgcgcgcgtcgccgtgcgcgaaccccatgacgatgatgaagaggatgaacaccacgtgcacgcccgtcagcaccaggttcaccaccgagctctcctttgtgctgcgtgcgtgcgtgcgcccgcccatggaacggaatccgtatcgtctcgtcagcactcaagcagcaaatctggaaatggcgtctacgacgaaactatttgccgaattttcggttttggaaaaaataataaacttgctctgcattaccagtttnagttaaccacaaaagntncttttttatnttaaaaact

SEQ ID NO: 125154 - DNA, 375 bp, Zea mays
  Clone ID: MRT4577_45612C.1
aaagcccaactaaatttccaggaaggttttcctggctccctgtcccgcagagggcaaagggggggccaaattaaattcaacgggggaaaacccccggaaccccccactaggttaaaaatttcaatcattggggcccggttccgggacactgggggaaggggtccccctccatggcccgggggcattaaaaaaaaaatttccggccccgataaggacccagggtgaaaaaacctcaggggaagggggtctttttccaaaaaagactccaaggggcaaaaaggattttataaccttggggaccaaaccttttggggaaggggaacaggggctaaattagggagcaacaaaaacaggggtttctgccccaactgaaaa

SEQ ID NO: 125155 - DNA, 586 bp, Zea mays
  Clone ID: MRT4577_45613C.1
cattgggtacctcgaggccggccgggtcgcgccttacgagccacgccccgtgcgcacactacccgcagagcgcaccctggcgcctaggtcggtcccgctcccgaccgttgctctccggtcgacgccgccgccttccgcgcagctactgcctacactcccacaccacgatggcggacgactatgcgtttggacacgtgatccgacactgggacctgatcccgctctccgtgcatatgtgcctgcatcggcgtgctccgctactttgtctccaaggtcatgcgctccccgacgactctcttcgtctcccgactgaagtatcgataaggtacgctgacagatcatcaggaagaggaacctgacgaccaaggcacaggacatcccgggctctattttcaagaacgcaaggtttattacgccaccgaagaaaatggataactacatgttccacaggaatacgctgagaaaggtcacgctgacatggtttctgatccacatatggtcatggacatgatgaataataacctatccatgatagctcctcatcacgcttacatatgtatgcgcgaacgttttctgttcaggtttc

SEQ ID NO: 125156 - DNA, 238 bp, Zea mays
  Clone ID: MRT4577_45614C.1
agcccacgcgtccgaaaaaaaaaaaaaagaaaaaaaaaaaaaaaaaaaaaaaaaaaaaaaaaaaaagatcaaaaaggataacaaacttaaatagacataaagtaaatttggagggcttatcaactagtatcgcctctatggagttgaccgaatgtcgctttatcgtggtgcagtctagaaagcactcctctgtgagctaccgtacggtgcctttaaggatgccactgtttttgctaaa

SEQ ID NO: 125157 - DNA, 287 bp, Zea mays
  Clone ID: MRT4577_45615C.1
tcgtggactcgtgggcggacgcgtgggcggactcgtgggcggacgcgtgggctgacgcgtgggctgagacagagtacggtcgcgagagtgaaggcaaggaaaaacacccaaacgggccaaccccaggaagccgcgtgggaccctacagaccctaaccctagcgctggcgacgcgccgaggatcgatggcgatggacgctgagcggcagcaggccgagctgatcgcgcagttctccgctcaggcggcggcgctatggttcgcgccccagctcgccgcgctagtgcttg

SEQ ID NO: 125158 - DNA, 226 bp, Zea mays
  Clone ID: MRT4577_45616C.1
ctcacgcgtccgcccacgcgtccgcccacgcgtccgctgctgctgtcagaacgaataagagaagatggagaccccacgagtggcccacacccgacagagcacacgggtggggcgtggcatggagctgcaccaacacgacgcactaccgagacagattaaagctcaccgatcgaaggggacagtcgtggggtctgctgctgctgtcagaacgaatcatatgatatgg

SEQ ID NO: 125159 - DNA, 423 bp, Zea mays
  Clone ID: MRT4577_45617C.1
ggcacaatggggttttcattttcaaaccaacactttgtccatttaaaggggggcttttttactgttatatcaccaagggggcaacgggaaagttggaattacaaaaacaggagcccccctagttcaaagagctgcccccccaatattttggcctcactttttcctgggaacagcaggtgcaattcccccaaccaaaagtcccaccccagttgtcgcaattccttttccaatcaaaccatttttggcaattttattttttattgcctttttcaacgatttggcccgcccccaatccccttgaatttccaaacaacgatctgcaagttgcctgctttttgagttggccccaatccttgtgaatccaacacccaacaagtacaggtttttccttttctggagaggactggccgaattttccaaaaa

SEQ ID NO: 125160 - DNA, 597 bp, Zea mays
  Clone ID: MRT4577_45618C.1
ctcgaggccggccgggatcgctgttcttccgttgatgtacatctgatgattgtggaagctgggcatatagtccccgattttatcaaggctagcgctggtattgttagtgtgccactgcgacgccacatcgaccatccatttgagccgaatcatccctccgattaccagtctagcaggaaaggcaagagttgttttgaatccagcgactccactcactgacagtgactatgcccatgatgtcgtcgacctgacgttgattatcgtgtgtgaatcctgggatcggcggccacagctttatcgagagccgagtatcagagaattgcagaactgtatacatgttatgcgcaaagaacgtagtgaactcctgcattgaggccgatggcggtgttgcccccatcaatgcctacgaggtcattgaaactgacacagatgccattgacgtcgggtctgcagatattgagaatccagactacgctgaggttatcatacgaataatagaccatccaaagacctctagctgtaggcgcatacggagctggacgtgtactcatttactctgtgcaaggttaccagcgatgcgatctgcatacatgtgtg

SEQ ID NO: 125161 - DNA, 200 bp, Zea mays
  Clone ID: MRT4577_45619C.1
tcgagcggccgcccgggcaggtacaagctttttttttttttttttttttttttttggcagcaacagggcctcgcagtaactgtcattccaagaatttcataacggggaacccaaatctcagcgacgattcccagccagctctacccagctcgggaaatccatcagcatgcgtttaagcaaagcctagtcctggaggttgc

SEQ ID NO: 125162 - DNA, 270 bp, Zea mays
  unsure (1)..(270): unsure at all n locations
  Clone ID: MRT4577_4561C.1
gtggcggcggtacagacagcaagaatatgatgatagtagtttgatgncttgtgccgaggagcaagaagaanagggctccnacaagatgccccctttatcttctccttccatggtcctcntcccgcagcacnanctccaaatcntctcgngcctgcctctgcctctgcctcctgaggtgctgaacgacagcnctgctacttctgatctgcatgatggcngggaaanagcatgccgnagtcatggaacnagctgcgtcttgggggattatcg

SEQ ID NO: 125163 - DNA, 290 bp, Zea mays
  Clone ID: MRT4577_45620C.1
atatttttttttttttgagcaaacaccatgggggtaaataaaatgtggaaaggggtttccgcatcaaaacacggtaataggtcaaaaccccttgccagggccacccattctcgctgccaaaactcccacaaccagggatccagaatccaacctaagacctacgacctccagctaatacattgtctacatttatcatgtatatacatcctctacagtctgctttaaatgaaatatggcctatatagcgactcgctctcaaataagatgcatctatctttaattctttatac

SEQ ID NO: 125164 - DNA, 511 bp, Zea mays
  Clone ID: MRT4577_45621C.1
ccggccggggtatcaagtcctctaccatccctgctagttaccgggatggctcccaagatcctagtcatccttgcgttcctcggcgcggcctcaccggcggttctggccgccttcgatgtgatagagatgctggtcgacaagcccacgtactccacgttcctgaagctcctgcaggacaccagggacgcgtccgaggcgaatcggatccggccggcgactgtactggtcgaccccgacaaacttgccaagcctctggcgtcactgcccggcgataaagtgcagacggaggtggagaaccacgaccttctgcattatacttcgaccccatcaagctggacgagatgaatacacgcaccgacatcctccccacggtgctcgtccggcaacgactagaaactcggagtgctcaactacaccagggacgacgacgggcatatgtacttcggctggtctcacggcgtcccctgtgtgaactggctcgggaaggtccactcagcgcggtcgaactctg

SEQ ID NO: 125165 - DNA, 613 bp, Zea mays
  Clone ID: MRT4577_45622C.1
ggcaccaaggggataacattgaatatgataagagcatcatataatatattcacacgaaaattgtactaaaaacggggtttactttccctctaactaaaaggggaagcttaaatatataaaccaaaagtatacaaacacaaacagacagagggagagagatagacatacatgttaattaactttgctaacacttaaaaggtctctcataattaggaggtaaagaaggacaattctggttcatgtttggatatgggtaaatggggttataaccaggtaactccattctgtattcacctaaaatttgacagaagtcaagcttcccttcctcggggttgcaccaactcggtaaccgagtctggttagactcaaataacttcaaagtgtacgcatctcggatagtgaattcagtgacttgaatgggatcagcgagagggtcgaatataccagcagctttgtacattgcaaggatgaaagcaacacatgttgtcgatttaccgtcgctataaacccactcatcctgttcagggatggtgagtaactcatcaaatgacattccacgcctcgctgtttcttcaagtatcccatacaaatccagatcctgtacaacggaaac

SEQ ID NO: 125166 - DNA, 1878 bp, Zea mays
  Clone ID: MRT4577_45623C.1
attttgtaggatggcacagttccacctcctcgacccgttctacgacgagagccaccgggggcgccttctgtcggaaggccaggacctagcaacgcttcgttctaggacacacaatgggttccaagacatggtgttcgacgacaggtacactaattacctcagacgagcaggtctagatgtaatatcgtaccagttacgacgcgggttgcctactattgattcggcggccattactgcacttgtggacaggtggcggcctgagacacatagttttcatcttccttttggtgagatgacagtcacattagaggatacacagaagatacttggactcgatgttggtggcagagcagtgacaggccaatgtgaccctgacggttggagggctagagttgaggccttccttggtagagagcttcctgctgagggcgttgaaaggactgctggagtaggcatcacatggctccgtcagtcttttggtgtgtgccctgctgatgctgatgaggctacagtccagttctattgtcgagcttggatcctgcacatgtttggttgtgtcctcttcccagacgccacaggagactgtgcgtcctggatgtacatcccgtgtctcaccgactgggatacagctggacactacagttggggctccgctgtgctttcttttttgtaccggcagctttgtgaggcttgccgtcgtacgtcctcctcttcgtctataggcggttgcgtctacctcctgcagatatggatgtggtttcgcataccagttggtcgaccacgtgttttccagcctagaccctggccatggatgatttatggaaatgcacgtcttcgaccgacgtatgcttatatttgggaccaggtggcagctccttttgcgagagctaagagggcatacatggagtatgttaacgagtttgacaccctttcagcctctagcgtcacatggcagccatacaacgcacctgagtatgctgggatgatctttagtgtagtatgcagcagtgaagatgaaatctatatgatgcaatgtcctttggtctgtttctggtgtgttgagtggcacctacctcacagggttcaaagacagtttggtaggaaccagctatggccggttgaagatgttcctacttcaaaggagctacacaaatttgaccggcggaagcaaaagaagataacggactttcgtcaacatcatatgattggtactagggtgcgactcgttgtaagcttcgccagcagtggacagcggaagactacgccgacattgattcttctgaagatgaagaaacggagtatgacctgtccacaagactgggaacccaagtggaggcggcacccatattagatcgagtgggtaacacattgcgacggtcggtagaggacattgatcgccaacttttgactgtgggcgacagcagcatgcgcagcttcttgcaggcgcctacgtggagctgctgctcgctgtggctgcaggactaatgttgcacatgacgtccatgtaccatcgtgtaccgacacaacaacgccctccacaggtcttggtgctggcttcgactacgatcacgacgagataggaccttcacagcttcagggggctccttcgacacagccgacagcaacgcaagatcgtaggcgacaccgctctccacaacgttacactccaggcaccgacgctttaggcaagggtaagactaggagacgttgaattggtttggactctatggacttgttatgtaacatatgaattatatagactcgtaatggactcatttggcctctacgggcttgtatgacattttaatggacttgtatgaattctatggacttgtaatgcacttgtttagacttttatgagcttgcttggaattgttt

SEQ ID NO: 125167 - DNA, 412 bp, Zea mays
  unsure (1)..(412): unsure at all n locations
  Clone ID: MRT4577_45624C.1
tgctgctacgcgtccgcccancgcgtccggtctgttctcttaatcaagccaagtctgtgatgcttcttgggtttggtggcttctgttgcagttcaccacttggttacacatgagaatgattcttgttgtctgctggtcaaacatttacgctgctagtgcacaagcaatggagagcagagacatgagtatatgactaccaatatcttcaataatccaccgtgtggtgacgtgattatgctggaatcaggtgatttgcagctagcctgggaacttggagctggaggcgagaagaggcatctagttgtagcttcctacagtggcaagctgtctgttgatcaatcatctcatcatgatactcatcttactgccctttaaccgtgcaggcgagtttgccgcccatattgcggacatg

SEQ ID NO: 125168 - DNA, 272 bp, Zea mays
  Clone ID: MRT4577_45625C.1
cacaaaaaaaaccatgcatttttattggttcaccacaattccatctttttttattggttctgacagcagggggagaccccccggggggccccccacgggacaaaacccacgggatggggtaactgggggatggggcttcccgaaccccacccttacgggacagattaaagcttaccccccgaagggggggaattttttcggccaacaacaacaaagtcccagattaaaagaaaccccgggttggcgccccggcccaaataaaacactgtttg

SEQ ID NO: 125169 - DNA, 2060 bp, Zea mays
  Clone ID: MRT4577_45626C.1
attgggtacctcgaggccggccgggaattgaatatcttttgtagatttgttgttgtacaaatggtgttgcttatataatatttttccgtgtaggacctagcaacgcttcgttctaggacacacaatgggttcctagacatggtgttcgacgacaggtacactaattacctcagacgagcaggtctagatgtaatatcttaccagttacgacgcgggttgcctactattgattcggcggccattactgcacttgtggacaggtattgttatgattttataaaaatattcttgaatcattgagctcttttacactattttttttaattatgtaggtggcgtcctgagacacatagttttcatcttccttttggtgagatgacagtcacattagaggatgcacagaagatacttggactcaatgttggtggcagagcagtgacaggccaatgtgactctgacggatggagggctagagttgaggcctttcttggtagggagcttcctgctgagggcgttgaacggactgctggagtaggcatcacatggctccgtcagtcttttggtgtgtgccctgctgatgctgatgaggctacagtccagttctattgtcgagcttggatcttgcacatgtttggttgtgtcctcttcccagacgccacaggagactgcgcgtcctggatgtacatcccatgtctaaccgactgggatacagctggacagtacagttggggctccgctgtgctttcttttttgtaccggcagctttgtgaagcttgccgtcgtacgtcctcctcttcgtctataggcggttgcgtctacctcctgcagatatggatgtggtttcgcataccagttggtcgaccacgtgttttccagcctagaccctggccatggatgattcatggaaatgatcgtcttcgaccgacgtatgcttatatttgggaccaagtggcagctccttttgcgagagctaagagggcatacatggagtatgttaacgagtttgacaccctttctgcctctagcgtcacatggcagccatacaacgcacctgagtatgctgggatgatctttagtgtagtatgcagcagtgaagatgaactctatatgatgcaatgtcctttggtctgtttctggtgtgttgagtggcacctacctcacagggttcagagacagtttggtaggaaccagctatggccggttgaagatgttcctacttcaaaggagctacacaaatttgaccggcggaagcaaaagaagataacggactttcgtcaacatcatctgatattagtaaatgattgggaatcgggtgctgagaatgtatattccaacgatgagttgcacaacaatagtgattacaggcggtaccaagcttggtaccagggtgcgactcgttgtaagcttcgccagcagtggacagcggaagactacgccgacattgattcttcagacgatgaagaaacggagtatgacctgaccactagactgggaacccaagtggaggcggcacccatattagatcgagtgggtaacacattgcgacggtcggtagaggacattgatcgccaacttttgactacgggcgacagcagcatgcgcagcttcttgcagcgtttatctaggcgcctacgtggagctgctgctcgctgtggctgcaggactactgttgcacatgacgtccatgtaccatcgtgtaccgacacagcaacgccctccacaggtcttggtgctggcttcgactacgatcacgacgagataggaccttcacagcttgagggggctccttcgacacagccattacaaccacaggatcgtaggcgacaccgctctccacaacgttacactccaggcaccgacgctttaggcaagggtaagactaggagacgttgaattggtttggactctatggacttgttatgtaacgtatgaattatatagacttgtaatggactcatttggcctctacgggcttgtatgacattttaatggacttgtatgaattctatggacttgtaatgaacttgtttagacttttatgagcttgcttggaattgttt

SEQ ID NO: 125170 - DNA, 192 bp, Zea mays
  unsure (1)..(192): unsure at all n locations
  Clone ID: MRT4577_45627C.1
ggccgnccttttttttttttttttaaaggaatggatctagagacttnttctgttacagccctgtacattgataagagggtggatgtttacaagcactactccgtcgattgcaaacgctcagacaagagggacctttctgagtacggctatctggcgncgnctgtcccgttcaacgagttccctccttatgac

SEQ ID NO: 125171 - DNA, 1037 bp, Zea mays
  Clone ID: MRT4577_45628C.1
gcgcctgccgcggcgtcgggcgcggggcgccggccgtatacatacccggcccgtttcaccatctctctagtctctccctggccccaaggcatcgcccgaccgccgtctcgtcccctcctccgacctctcgacccatccccaccctacacccactctgcccctggctgcgcgcgttccagttggtgtgcgtgcgtgcgtgtccatggggaacacgccgtcgtgcataccgcttgcgcccgcggggggcggcgcctcggcggcggcgaccagcgcagccaccgaggtgatccacgcggacggcaccgtcacccggctggcgcgcccggtgcgcgcgtcggagctcatgctccaccacccgggccggttcgtctgcgactccagccgcctcgcggtcggctgccgcgtccccggcgtggccgccgccgagctcctccgcccgcgccacgcctacttcctcctgcccatggacatgctctactccgtgctcaccgacgacgagatggccgcgctctccgagtcccacgccgcctcctcctcctcctcctcctcctggaagaggatcaccacgtccacccgccaaggccgccggagcgcgaccgggggccggggccggggccacgcgaaggacgaggcctgcagcagcgatggcgccagggtgtacccgatgctcgggctgctcgagaccgccggtctgcagggcgcggatagtactaagaaacatgaagtacgcgcaggccccgcaggcaagtcgagcggcggcgggttgaggcgccaccggtcgtactcgtggcaaccggtgctggacaccatcgaggaggttccgttccgtgacgcggcggacggccggttcaccagcggggcgccgcaagagtgagcagctttggttttctctggtgctaggcgagcggcagctagcttgagctggctaccgactacccagtgtacactagctagcactagtataaataagctcaaaacctgcggcacgttcaacttttcactggcggtttccgttatcaaacgtcagtgaaagaaac

SEQ ID NO: 125172 - DNA, 1385 bp, Zea mays
  Clone ID: MRT4577_45629C.1
gcacgaggcgaactataccagggctggagaactgtctaatgctaagacctgcatatgcagttgaatatgattacttacccgcatatcaatgctcaagatcacttatgacaaagaagatgtcgggtttattcttctctggccagataaatggaacaacgggatacgaagaagctgcagctcagggtataatttctggaatcaatgcagctaggcattctgatgggaaatcattaattattcttgagagggaaagcagttatataggaactcttattgatgatcttgttacaaaagatcttagagagccctatcgcatgctaacaagccgttcagaacaccggctattgcttcgatcagataatgctgatagtcgtttgacccctttgggacgagagattggtttaatagatgatagacgttgggagctttatcagtcaaagcaagcccgcattaagcaagagaaagaacggttgagatctacaaaagttccaggaggtgaatttgctgctgaagttactgcagtatccaaccaacctgtaaaggattcatctacacttgaagccatattaaagaagccacacgtacaatataaactccttgacgagcatggatgcggaaatgaaaatttatctcgaattgagaaggaatgtgtagagattgatatcaagtatgaaggtttcatcgcacgacaacaaagtcaattacatcagatcgtaaaccaagaacacaggaaacttcctgaagatttggattaccactcaatgacaaatctatcacttgaagctcgtgagaaactttccaaggtgcgtccacaaacaataggtcaagctagcagaatcggcggtgtgagcccagcagacatgacagttctcctcatttggatggagagcaaccgacgcatggctacccacaggagacagcgagagcagctgggatcagttgcagtcgagtcggatggttcttcagaggaggccgtccaagccagcacggcataaacgtggggagcttctggcagctgaacaaggaacaacaaaattcggtgaggcatccagggagcctgcgcgtctgtggtacaacgatgcagggaggcgccaagtgcatgcatgtcttttcttgacgacatgaggaaatagtcggccccctggttccttcatgttgtgcctcattgtctaccagtatgtgtgcatgttgtttaggaatgctggtggaatacaggttgatatttgcagtagtagaattgagagagcagactgtaaagaacgacaacaaataggggtttaaaacatacattcgcactcacttagctaaaaaaatacactttttgtgtgttttatactttatacttaagcaaaatatagattttttcggaaaaaaaaaaaaaaaaa

SEQ ID NO: 125173 - DNA, 285 bp, Zea mays
  Clone ID: MRT4577_4562C.1
gccccttatctcttatctgagttaataggataacttcgactaatcaaggtcttagccgaaaccagaggaaaacagtatcccgttactttcacacacaacaaacgagccggctgcatacggtggaaagccagcggtgcaaaaggggtgaacaaacaaaaaaaaaaagcgcccccctaaaagcacactacccacacaagaaacctgacgcgccaggggcattaaagaataaaacaacgcgcgaacacgaaaagatagcgggaccgccgcaagagtggcccaccttac

SEQ ID NO: 125174 - DNA, 1534 bp, Zea mays
  Clone ID: MRT4577_45630C.1
cccgcgagcatatatatatatatggtaatccaatggtgtcatctactgcccaccttcggttcttagtagtataacagaagtggagatcggaccaccaaggctgttttgggaggttggtctagcaggccaccaggtcggcccgaggctttgccggcaggaacggacctcttatcataggccgtaacgaagcccacatcctatccgacgggcagaagcagagcaccaccaccatacgccgccaccgcaagcagacgtcccagtcccatggccatggcttccaccgccaccgctgctgcttctctccgcctcgccttccctctcctctcctcgccggcttcctcctcctcgtcctctaatacccttcgcttccctctccgccgccgcagcgccgcccgccccatcgccgtctccgccttcaagaagctctccgaggcgtcccccgtgcccatccctcaggagcccaccgagcccctcctggtcgacgaggacgctctgccccccaaggccggggtctacggcgtctacgaccccgccggcgagctgcagttcgtcgggatttcgcgcaacgtcagggccagcatcgagggccaccgccggaaggtccccgccaacctctgcgcctccgtcaaggtcgcagtatcagatgaggagacaccagatcgatctgcccttaacaacgcctggaaatcatggatgcaagaacacatagcggccaccggcaaggcgccaccagggaacgttgcaggaaaccacacctgggttggtggccccccagcggcccccagacctgcgtctgacgcctggacgccacgtccagctgacggttccgctggagcagctgatagaccggctggtgaaggagaacagggtggtggccttcatcaaaggatcaaggagcgctccccagtgcgggttctcgcagagggtggtgggtatcctggaagcgcacgccgcggatttcgtgaccgtcgatgtgctcgacgaggagcacaaccacgggctgagagaaaccctcaaggcttacagcagctggccgacgttccctcaggtcttcgtcggaggggagctcgtgggaggctgcgatatcgtttcgtccatggctgagagaggggagcttgccgccctattgattcagaaatgaatgctttaccctacagtgacttgaattgcttcgatggttgtctgatccacacgtagtagcacggagatccaagttgttgtacctgctgtgcatgttggatgtggtacgtcccgagtttgaaaagcgtgtgatgtggtatggacgtgtggtttgcctgctgtttataggtagaagttgcctgaggacgacacacatattttttgttttatttatttgtggggatcggagagcgatcgagcctctgtttggttggttggatgtacgtagatggatgaaagagtcggccacagtttatataatgttcggatgaaagttaagtagagacgagttaaacactggagtagttttttgtacgtatgtggccccaaaaaaccgaaggagggtgtcgccccc

SEQ ID NO: 125175 - DNA, 468 bp, Zea mays
  Clone ID: MRT4577_45631C.1
gtcgacgcgcgcgtccggtcattcaccgtgcgcgcctctctccgcaaggccaccggcaccgccgccgtggcaatggctgccagcgccctgcttgccggcggtgccatggcccaggaggtgctgctgggcgcaggcgacggcgggctcgtcttcgagcccagccagttcagcgtcaaggccggcgagaccatcacattcatgaacaacgccggcttcccgcacaacgtcgtcttcgacgaagacgatgtgccgatcggcgtcgacgccaccaagatctcgcaggaagagtacctcaacgcgccaggcgagacctactccgtcaccctcaccgtgccgggaacccacggcttctactgcgagccgcatcaatgagccggaatggtcggcaagatcaccgtcaactaagtaagctagctatcgatcgatatccattcatgtaatagctgttgcctcctgccttgtccttcc

SEQ ID NO: 125176 - DNA, 263 bp, Zea mays
  Clone ID: MRT4577_45632C.1
tcgatgagatctgcaagtacctttttatgaggtcgtgctggatgccaagaatgactgcaaccgagctaatcacccggagggggatgtgcccaaccttcatgtgatcaagctcatgcagagctttaagttcaacgagtatgttacggagaccttatactggcagtactactactggtatctcaccaacgatggcattgatcacctactcaactacctgaaccttccgtctgagatcgtgcctgccacgctcaacaagtctgtca

SEQ ID NO: 125177 - DNA, 507 bp, Zea mays
  unsure (1)..(507): unsure at all n locations
  Clone ID: MRT4577_45633C.1
cttcatcgtgcgcgcctctctccgcaaggccaccggcaccggcgtcgtggcaatggctgccagcgccctgcttgccggcggtgccatggcccatgaggtgctgctgggcgcaagcgacggcgggctcgtcttcgagcccagccagttcaccgtcaaggccggcgacaccatcacattcaagaacaacgcctgctggccgcacaacgtcgtcttctacgaagacgaggtgccgagcggcgtctacgccaccaagatctcgcaggaggagtacctcaacgctccaggcgagacctactccgtcaccctcaccgtgccgggaacctacggctactactgcgagccgcatcaaggagcccgtatggtcggcaagatcaccgtcaactaattatagctgagctcatcgatacgatatttccattccatgtatctaagactgtntgcctatgcgtgactttgtatctcgcgtccgatactgtccatgatctacatagttttacgagttcacac

SEQ ID NO: 125178 - DNA, 522 bp, Zea mays
  Clone ID: MRT4577_45634C.1
ccggccgggctgaaacggtgccgtacatccacctgattcattcgccagttcctcgttcttcatctttttttctctacacaactggaccgttgcccataccgcctttactgagctgcgtactcttgtttcttgaaagcgtcgccgaaacaaagttggagagtgtccaacccctgtgacgatcatgaaaggagcccttctttcgctggtgtggcttgcgggtcttgctgcaggccaaagtagctcatccgtgtcggttatcacactatctggatcccaacgaagtctcacaggtgacgatgctgcccccaacccaactgtgccctccgatttcgagggcagtacttttgcgacaattacgtcacctgcttcctcagcttcatcgggcgccacagtgtcgtccaacggcacgataacctcgggtgaacctgtcaccaacatcggacaaggaaacaggaccatcacgccaacaggtaccggcacgggacccgccttgccgtctaacacacaggcatgcaacaacta

SEQ ID NO: 125179 - DNA, 660 bp, Zea mays
  unsure (1)..(660): unsure at all n locations
  Clone ID: MRT4577_45635C.1
aattcggcacgaggcactgctggcgctgcccgcctcccccctccagtccactctccactcccacactccgttaccaagctgcccgcctcccctcctcctccgccgccgcctcacagccgcagcagctagggttagggttcgttccgccgcggctgccgtcttctccagggcaggctactcccgccgggcccctccctcccattgcattccccagttcccctgcaaccccccattaccctttctcccacccattccttccttccttccgcccctctccagcccgcccggaccggtcgcgttgcaaggtttgtttgaaggaatctgggcgggtttatgtcgatactagctgctgctgctgctgcagagatcaggtgaaagggacaagtgttgtggctgcgcaattagtacccagagtgtgcacagccataccacctcgctgatagctactacccccctgtgcgcacgctgcctccaatctcctccaagaaatgcgtcctcgtccttgaatcctactaaccatcaaactcccagctcccctcccagaccagtccgtggaggaaagtgagcgatggggcttcgcgcgggtttcctccttctgccgccgncgccgntcctcctcctnctcctcctggtgctgctcatttcccctgcgcgtgggca

SEQ ID NO: 125180 - DNA, 349 bp, Zea mays
  Clone ID: MRT4577_45636C.1
tatcacggcacgtttcttactatgttttgcgggctccaacccttaaatttgctggttattcgattccaaactgagattcttttcccattacccagcccaatattgcatcaaaatgccctaaacaaatgctcaacattgcaaaaatgtaaaactggttccgggtaaccaaattacaaaggcaagatatgcccaccctccaaaaatgctaccaaatcctgttgcactcaagagccaccaatgctttaacaagcaacaaacctcatcataaagcttgagagggaccaaacacaaataactccaagaatttgtaggacaggtcattatgcttctaaagagttcatgaaagctc

SEQ ID NO: 125181 - DNA, 383 bp, Zea mays
  Clone ID: MRT4577_45637C.1
ttttatcttagcacattgctatttctacgacaggatagggtgtcgatgatgctattgaactgccccttgatgcacagatccacctttactacgcctccacaataaatgatgctcgtccggcgctgcgtatcctggcgggcagcccattttctgggcggttggtgacgaccaatggggacataaacgcatcaaagtggtgggcaggcatcatgcctagactgctcaacggaatgtgcagacaggacagtccaaaatcattgcaagcgcatcaccagcgtattttccaataacgtttacccccaaattaggcttgaactgttacgcaatataagctacgttgagttactaactcatggtcccatgtccagactatactactaatt

SEQ ID NO: 125182 - DNA, 170 bp, Zea mays
  Clone ID: MRT4577_45638C.1
tctagtccacatagatgcacctggtgtgaagcgagctcaagaatacattcggcgacctgtagcggcagacactttcgggctgtgctgttacggcgaccatgcatacgccatgttcgttggatctgagaccttcggtgcttctaccacaggccataccactggtgtcttcg

SEQ ID NO: 125183 - DNA, 731 bp, Zea mays
  Clone ID: MRT4577_45639C.1
cccacgcgtccgctcgcgtcgcggctccgcttccatgtcatttgacagcgcaacacggcgctgcagggtaaagatctcccccgctcgccggtctctctgcccaggccagcaggacgaagaagaagccggccgggaagacccaggcctgaccgcctgagctaggggagaggaggacgacgatggggctgctgtctcagcgggtggagcggtcggagatggagcccggcgaccacatctacacctggcgcgccggctacacctactcccaccacgggatttacgtcggcggcagcaaggtggtgcacttcacgcggaagagggaggcgggcggcgcgggtctggactcggccatcgccgtgtccagcctcctcctctcgcggggctcggacgagtgccccagcttcccggactgcggcttccagctccccgacagcggcgtggtgctgacctgcgtggactgcttcctcggcggcggcgcgctgcaccgcttcgagtacggcgtgcccgccgcggcgttcctggccaaggtccgcgggggcacgtccaccacggcgcgcgccgacccgggcgacgccgccgtgcgccgcgccatgcacctcctccggcacggcttcggcgactacgacgtgttcgagaacaactgcgaggacttcgcgctctactgcaagacggggctcctgctcctccccgccgccgcggctggcggcggggtcgggaggagcgggcaggcc

SEQ ID NO: 125184 - DNA, 705 bp, Zea mays
  unsure (1)..(705): unsure at all n locations
  Clone ID: MRT4577_4563C.1
gccggccggtcctcgaaaaggggggnnnnnnaaaaaaaaatttccaaaaaaaaaaaaaaaaaaaaaaaaaacaaaaaaataaaaaaaaaaaaaaaaaaaatcccccccttttttggaacccaccaacaacgtaaaaaacaaaatttggcccccaaaagggcccccaaaaaattttgcccccttatgccccttggggtttccgcaaagggtgccaagggcaccattttcccccaatgcccccaaacccctaaagtttccctttttcccccggaccaaccccaagggggggtttcgggaggggaaaacccaatttttcaacccgaagggaaccaaaagggaattggggcggggattttacctttaacccccttggtcccccaaaaatggtgcacccttttacacaaaataccttggggggattttttggcaaaaaaattcgggggacaacaactaccaaaacttggggaaaaaaaccttgttgcttactctcaaaaaaagaatttttttccatttaaccaattaaggggattgaaccctgcttcttttttgcaacaacaaacaccattcaaccagttaggtggtgccaacccccagaaattttttcccttgaaccaatggggaagattcaactcccccggttttttccggtagcaaaaattacccccgtttgcccacttaacaaaggggaaccctggtggctttttg

SEQ ID NO: 125185 - DNA, 364 bp, Zea mays
  Clone ID: MRT4577_45640C.1
cttcttccagctctgagacgcgtgcggagcagcctgagacctacagtagaagttagcctgtcgtcatcagatcagctagccatggacggcggtttcccagcacttcttgaccccaccgcgctctcactggcgctgccggtgacccagggcccgcaagggctcaataagctcagcaaggacgactacctggccatctgcctcgccgcgctcgccggcacgcgaggaagcggcctcgtcgtcaaggctgccgctgggttcgggcggaaagagaccggcggcattaataagcagtcgtggtgcccaccgcagccggcccccgccgcgcacgaggaggcgctccggttccggtgcgcggtgtgcggga

SEQ ID NO: 125186 - DNA, 565 bp, Zea mays
  Clone ID: MRT4577_45641C.1
caggcaggctggtaggaaccttgttactatgtctgtagtgtactattctgtgagatatctcatacgcctttttttttctttttctttggtgcattcctcaatgtgtagatttgctgtctcatcaacaagggtaggtttggcttggctgtgtatggagaaaaaaaaaaaaaaaaaaaaaaaaaaaaaaaaaaaaaaaaaaaaaaaaaaaaaaaaaaaaaaaaaaaaaaaaaaaaaaaaaaaaaaaaaaaaaaaaaaaaaaaaaaaaaaaaaaaaccaaaaaaaaaaaaaaaaaaaaaaaaaaaaaaaaaaaaaaaagggggggccccctttaaaaaaaaaaaaatttaaccccccggggaggaaaaaataattttttttttttgggccccaaaaaaaaaaaaccggggcccctttttaaaaacgggggagggaaaaaaccctggggtacccaaaaaaaaaccctttgaaaaaaaacccctttttccaaggggggaaaaaaagaaaaaggcccccccaaaacccccttcaaaaaaattcccccccctaaatggaaaaaggacccccc

SEQ ID NO: 125187 - DNA, 385 bp, Zea mays
  Clone ID: MRT4577_45642C.1
gcgagtacaagcttttttttttttttttttttttttttttattttttttttttttttttttttttttttttttttttttttttttttttttttttttttttttttttttttcttttttttttttcttttttttttttttttctttcattttccttcccttatttgatttcattatacattcaatacctttatgttttttttcattttcccaaacccgcgggacctgtccttgcggactttctccatgacaaattccacctcactgctagtcgtaactaccgaatccgacctagataccaatctcaccttaattatcgccatagctctttcctgtgacttttaggtttcccctcccattccccacaccttcctatccgtaaccctt

SEQ ID NO: 125188 - DNA, 1726 bp, Zea mays
  Clone ID: MRT4577_45644C.1
cattgggtccctcgaggccggccgggagtctactgcttgggaagggaaaacgggggtgcatttgttgggatttttccaactcaattccatccgatccaagagcaagtttcaccggattgattccccaccgcacccgaccacaaatcccaccaagcaaaccctaatccgtcggccatgtcgtcctcccccgcggcgctgcgcttctactgccaccagtgcgaccgcaccgtctccctcgcccctcccgcatccccggacgccgacgtcttctgcccccgctgcggcggcggattcgtcgaggagcttcctcccaaccctagccccgcgcctccggccgccgccttctttgccccgccctccttcgacatccgccaccccagcgacctctccgctttcttcggccccgcctcccccgagccgctcgccccaggcctcttcgatccctccaacttccttcacgaccacttcggcggcctcctctccggcggcgccaccatccagatcgtcctcgagggtgggcccccgcccccaggcctcaactttgccgactacttcgtcggctcctccggcctcgagcagctcatccagcagctcgccgagaacgaccccaaccgctacggcaccccgcccgccgccaaggccgccgtcgcctcgctccctgacgtcgctgtctcggccgacatgatgcaggccgacggcggcgctcagtgtgccgtctgcatggacgacttccacctcggcgccgccgccaagcagctcccctgcaagcacgtcttccacaaggactgcatcgtcccatggctcgacctccacagctcctgcccggtctgccgcttcgagctgcccaccgacgaccctgactacaatcacacccatcagcagcacggtgattcgtctgcccctgctcccccttcccccgctcccgcggtctcctcccccagggtggccgagaggaggtttaggatttcgctgccctggcctctcagggccgcttttggcgctgctcaggcagagagcagcaatcccaccgatgatgacgtgcctccgtctggcagcgatgcagctggtggccctcagtctcagactggatatgatgatctcgactgaggcctcaatagccgttcttggaaacaaataggtatgaacaacaaattgcagttattactactagggttcatcgcttgctgttatctgtttggcgtcacctacctatagttcaggaatcaggtagcaccatgcatttactatcgcatttgattacggttactgtattgactgccaaagaaaaagaaaaaggctctattgtgccatcattgttctacaaaagcgtattacaagagtgaatgaccatccttgttctatgtttacctgatattaacatggtatgcacttggcgtggatgataaccaagattcatctagggcaatcaatgggatgtaacttgcatgttgtaactgcgactctataccccaaaaatgaaagatgatcccgtcgtggaccaaattaataaatgtgcatcaaaagtatggagtcctttaggaacctctgctgactgttgatggaaaatggttggtttgttgaccctgtcagtgcattgtttttgaagggatatgggcctgttaatttaaaatttgtattccctaatggttgggggaggaacggtggagaaactgagtcatgtaaagttgttccttttgcaattgctgcatggtttttttcctgttcc

SEQ ID NO: 125189 - DNA, 567 bp, Zea mays
  Clone ID: MRT4577_45645C.1
gactctttccccggagaaagaacatcagaacacgatcctattatggcagacacacatcttcgtaattccatttcagcaaacggcctattcagaaagggtgtgagacggagtgcagcaaaacaccccaagccccgccgaacacctaaacccgagctgctcgccccgacgctccccgcctctaacccggaaggccaagtgaataacaaccatgtgggatcctccttaagcgtgcgacgctgcgtgagagtcatcaacgttcaccggcgactcctgctcctcctcttctttgcactctgagatgtagaatgaagtggttcgtgaatccgtgactcattgccaacactaagcattacaagccctgactcctaatcttcgtgctgcatactctccacgcagatagtatgtccatcaaagactagtttttacaccaagtgatcaagagaataacggatgtgttcggaaggggaacaacaatgtgtatggtgagaacgctaggacatagacacgcacccgatgtgctaacggtatcgtgtggcggtggagatggctctaggaactggtgatgct

SEQ ID NO: 125190 - DNA, 406 bp, Zea mays
  Clone ID: MRT4577_45646C.1
ttttgaaagataagtaggtatattatacacaataactttggttaaaaattacagatcgttgagaaaacagccaaaaaactgttatttagtgtacaagaagcctagccgagccaaagaatggggaaaggaaatgtgatggacagattcatgacatcaagccagagcaactcttgtatgaatacatagtgatgaacttctagtacatagtacatggtgataaagaattaaaaaccgtcgttgagtgccgtgtgagctatcaactcacattatataatattataattcaaggtgctggaagtgctcaaaattgatcaaacaccacagtatgtcaacgtacgagtacctgaggattccagcatcaggttcgaattcattgtgctgaaactgctttctgaaagaatggatg

SEQ ID NO: 125191 - DNA, 489 bp, Zea mays
  Clone ID: MRT4577_45647C.1
gtctcctgtcctcccttgtgcgctaccgctcctctcccttggcgacgacgactggcgccgccgctgccagacttcgctgggcatctcgccggcgacgagctcccaccaggattagagaaggtgatggcgaggagtgacagctgcctggcgcgcgtgggtgccggagttgcgatcggtggcgcggtcggcggagccgtcgggatcttctggagctagctactactgatccctggtatgtctggttagctggcggctatagatgtaataaccatatggcctttgttaagagttcgtgcttaggtagcatcttctgccttctggttctggaggtggaacatatcaatgctctagttggagtttattttcccaattgcttgtgctcttagagctgttgccgatttggtgtactgtgatttggttagtttccagctagcggtgaggacttgggatgaaacatgcatgattttctatttgcttttgatttgactg

SEQ ID NO: 125192 - DNA, 925 bp, Zea mays
  unsure (1)..(925): unsure at all n locations
  Clone ID: MRT4577_45648C.1
gcttgcaggnactcatctgcgcgccngaactcacaatctgctggaaggaccgggtgaggatcgctctgggagtagctcagggctggcacaccttcaccatgaccatgctcctcaagtgctgcatagagacctcaagtcgagcaatgtgctgctactcggtgatgaactcgagcccagggggaccgggtttgggattgatcgtgttgtcggggagatggcgtaccagtcttgcatgtcttcggacctgaattacaagtgctatgttgcaccagagcaaagctgcaccaagaaaccaacgcacctcatggacgtctacagcttcggggtcatcctactggaactggtcaccgcagcacagcggccggcgtccgacggcgagtccgtcgacgtcgtcaagtgggtgcggcggcgggccaacgtgaccgacggagtgtcgcagatacttgaccccagcatcgccagcgcggcgacgcagaaggggatgcaggccaccctcgagctcgccctgcgctgcacgtcagtggtgcccgatcggagaccggccatggatgaggttgcccggtcgctgcaggcaatcagtttcgctagtgttcatccgcagacgccgatgctcactaaatcgcccgggactctggaaccatgaatggcactggtgtggtgtggtggcggcgtagcgtaagggttcacagtatccattaccgcgtaggcgcatagcccttccttcttgtagttgtacatacatggtaataataaagagaaataaatggtcagcgtggattagaagcttattctgcaacgaaaggtttagagtgttttcatatttgcagaaatctggttgaggatctgattattttccttccgtagacctttgattgtcttaggaatcctctgggataaaaacttatggagatgctctttgttctat

SEQ ID NO: 125193 - DNA, 496 bp, Zea mays
  Clone ID: MRT4577_45649C.1
ccccacccgggttttcttttcactccaaatttggggtaaaaaaattttccgggcgttgttaaaaaagggagcccgggaaaaaaacgggggggttttaataaagtttaaaaaccgaagtaaggggggggtgttggccccttagggggggagggcactggggaacttttttttaggggatgggtttaaaaaaatttgaaggtttttaaaaattgggccaacgaatgggggtttttgggaataagggaaatacattggggggggcccccaaaccggaaaaatggttccagggacccagggaaatgggggtattttaggccgggccaaaagccctttttttgggtagacgggttgccccgggaattacacgggcctttgcccctgggttggcccggggttggttggttggccatctctttctgggggggggcgccctttcccaggaggcgtgttcccgggggggggggttttggggactctcttcccgcgcccgggggcc

SEQ ID NO: 125194 - DNA, 1033 bp, Zea mays
  Clone ID: MRT4577_4564C.1
atgagatgctacacatatagtgtaatctttattaaaagtctttatgatactcagattctcctcacagccagattttcaccacagctaaattctcagaaaagacctctagatgacttaatctcatttttggaccctttgcttggcgccgaagaccatgacgctgagataatactgctcggcgctgcagatcttggtgccaaggtgcttgctccgctgtcgataataggcaaacgcggtaccgacgtggtcgagctcggcactatgaatcatggtgccgagcatttactccttagtagaaattgccgaccaccgccgcaccttgaagaccgtcgtgctgttcgtcgtggtggcccgtctcaggcaacgacgagtacgccgatcgcggcctcaaagacctcccgccaccgctatgacttgaagccctcctccatgccaatcaaggttttaccacagcgtgcttctctagctagccgttatgtgagtcacccttctacctcgaagggaagagacgactcctccagttcatttagagacgacatgaggacaagggtcatatggtcatcatgctggctgagggtgttgaacaggacctcatcatgaagtcacccttctacctcgaagggaagagacgactcctcgagttcatttagagacgacgtgaggacaagggtcatgtggttcatcgtgctggctgagggtgctgatcaggacctcatcgtgagaagtatgaatttcatggacacctaagatgcttctggagataaactgcttctagatggctgcctttggctattctagaagataaaggctaggcttatggtccaaaccttcgtctccttctcaatgtggtggcagagaacattgttattgccttcatctaccattcagtttgctttattattattattataaaatagatgatccctattgatcaatatgtcttgactactaatatctctatatgtttatatcaacaacctttatagtgttatatataaaaaaaaaaaaaaaaaaaaaagtcgacgcggccgcg

SEQ ID NO: 125195 - DNA, 575 bp, Zea mays
  Clone ID: MRT4577_45650C.1
ggggacggcggacgggtcagttacgcaagccgatcatctgaccatcgtctccttgataagcgcacacgcgttccctaatcagctactgcacgcactctccatggctgtgtggctggctggtgtgtgtcctgtcagagaatccgaggacggacccacatcgacctcgtacctccggttcgtactactgcgacggaagcgagactctgggctctctctcacatgcacgccgcgcacttgacttgttgagagagagagagagagcggtgaaactccaagcgaggtgtggactagggattttgagagaaccgcagggagggacgtgagtagtgtgagtggtatatagagtgcttggcgtcgaatgctttggcgcagtagcgtcaaaacatgctagctagcagtgtcacgcttatcttatctctggttccccaaatcaaacaaggcacatgtacgttctaaaattcgttccaggaatataaaagcattcgcatccacgtgccagactgaccagcccgcacggcagggcgtgggacaagaacatattaaaaaatagttacactgtgtcaaaataataatgc

SEQ ID NO: 125196 - DNA, 657 bp, Zea mays
  Clone ID: MRT4577_45651C.1
gaccgagctggcccgttcccgttcttcttccagtacggatcgagctcacgtgctcctcgacggcaatggatccgccgtcggacccgaagccaatcatccccctcgatgagatcgtcagcgacttcgagggtgtgctcgcggcagactcttgcctcacagccccagcgcaaggtgtgccaactcgaacttctccctcaccattgcagatgtggacaactcctggttggattcaccactaaaggccgaggatcgacacacaggggaagtgattgggactggccgtcaccgtaaatcttcgcctcgcctctacatcttggacacattgcgtcttccttcctaccatgcctctacagctcgtgtgcttgccgcttccggtcccacgctgtcgtttgcccagtggcatcatcgtctttgtcacttatgtgggtcttgtctgtctactctaataaagtcatgatgtttaggtcctacacatgttgagtctagttttcattgtaaaggttgtcatcttggcaaacaagtacaacttccatactttactagtgattcccattctgctaaaccttttgatcttattcactctgatgtttgggtccagctccttttgtttctaaaggtggtcataaatattatgtcatttttattgatgatcatttt

SEQ ID NO: 125197 - DNA, 459 bp, Zea mays
  Clone ID: MRT4577_45652C.1
cccacgcgtccgcccacgcgtacgggcagtggcagtggcagcttcctcgaccctgcgcctgcggtggcggcggtgcccggcattaagaggaggtcatccgcgaccaacactgtgctctccgactccgacgaccagagcagcaactcctacggatccggctcctccgacttggaggggacgcggacgggggacgacgacgactgcgacgacgacgtcatgacctctgactacacctcctacgacttcgttgcggcgggttactgtaacatgcaaggcggatcgccgaagagaatgaggagcagctaccgacagcacgccgcccagtctggcacatgacgcggacatgcctggctctggccttgataaagtgagctaccactaccaggcgtcgcctccttattacttctggagcaacacatgctctgcagacgacgcgtgcgtggccacccttggtcttct

SEQ ID NO: 125198 - DNA, 310 bp, Zea mays
  Clone ID: MRT4577_45653C.1
gctgtggggttggttctcttctccctcccaccgttctcttctcgcccccgctataaatcttccccgacgccgcacgcaaaatccaaaaatccccaaccccaaacctagtacactgcactgtagcagcagcgggaggaggaggatggtggtgaagagcggaggaggaggcggcggcgcggaggagggggccgcgggcgcggcggtgcggcggtgggtggaggccggcggcgggaggctggggctggacggcgggctggccacggagctcttggtcctcttttccgacctcaacgacccgctctggagcgcc

SEQ ID NO: 125199 - DNA, 361 bp, Zea mays
  Clone ID: MRT4577_45654C.1
ccgggtgcactaactcattggcgactcgtgggacttgacttgcatttacagagcggtgacacttcataattcgcaaaaacgcatgtgtgagctatgaatggtagagtgaaatgcaccaccctcactaatgtacagcgcgaggatgcgctacgaacaatacaagattagcgcaacgatggtctgggaggtgttggctatgtgaggtgaaaccttagtaaccctgtgtacaaaatcactggcaattggtctgggccggccatagcgtgtaattctggagaataatctcgcaaaatgtatttcgggtggcaaatatcgatatataataatatgctgggggacgggatacccgtgggattagatg

SEQ ID NO: 125200 - DNA, 368 bp, Zea mays
  Clone ID: MRT4577_45655C.1
cggacgcgtgggctagttcatgcatatggtgctgaatcgacaccggttgttggaacctggatggaggaattgaatttgctggtcaacttaacggatgaagccatgaaatgtgcttcgctccaaagtctgctgccagcttgaccacgtctcctgtctcattgccaattttcggaagtgcaggtaacctatacgccgtacgtggagtccagccagagaatccattgaatacaaaagaaatatctgaatcttgtatggtcatcgtgggcatagcgccaaacttgcgcgtggtgttttcctgtccctgcctaaaaaaagagggcattggcaatttggcattcaaaaggtggaacaggtgggtttgttgtcta

SEQ ID NO: 125201 - DNA, 147 bp, Zea mays
  Clone ID: MRT4577_45656C.1
ttcacgcgtgggcctacgcgtgggcccggccgtctgtgtctgagtctctgtcacagccaacccgcaggcgatagtgtccagcggaagaggacgctcacttgcccctacctcaacctttacctctgcatcagcccgccgtgccacgag

SEQ ID NO: 125202 - DNA, 269 bp, Zea mays
  Clone ID: MRT4577_45657C.1
ctttggtttgcatttccgccaattttgtatgtgacgaaagcttagagcatctacaggaagtttgtgtaattcacatgctatgagcgccgacgtcggcaacttagcggtggaggagaagcagatccagcagaacatccagatgaagcgtgagcttccttgtttcccttctgacagaagaactggcagaatgtgagatgcctctacgtcaagagggcatggggaagccatacagggtgttctaagtatgctcgtttgtgaagtctgctagg

SEQ ID NO: 125203 - DNA, 690 bp, Zea mays
  unsure (1)..(690): unsure at all n locations
  Clone ID: MRT4577_45658C.1
ccggccaggaaacttgtccttcctcccgcaagtgatatagtctattactacttgttcttcatccatcctacagccaagacttgaacaagatgtcttccagtactcctccatcccacggggcaactacccctacacaatataccgacaaggaagacggcggccattatcattgcaaccatcctcaccactactatgaagaacggaacaagaacgttcagaagcctcaccagtccatggtatcgcaagtctacaacccttcgttcttcaaggttgccaaccctggtcctcttggcttgattagtttcgctctgactacatttgttcttggtctctaccagtgcggtgctggacttcccggatccaacccctttggtggcatcggccctgaccaagccatctttgngtctggctgtcttcttcggtggcatcgcccagttctttgcaggtctcatggaatttcgtgtgggcaacactttcggtaccactgtccattgctcctacggtgctttctggctagcctttgccatgttcttcgtccctgatcttgcaatcaaggatgcatacaagggtgacgaccgcgcgtacagctttgccctgggtatcttcttgatcctatggtgcttcctcaccctcatcttcttcatagncgctctcaagacgaacattgccattctggttgtgcttggcttt

SEQ ID NO: 125204 - DNA, 241 bp, Zea mays
  Clone ID: MRT4577_45659C.1
agcatcgcttctcacgtacgtcctccacctctgctcctggacagcagagcaggggacgacacatcgaggaagaacaagtaacgtcatcggatatcagcataatgatcagcagcagtagcacacacggtcaatattccagatagcgtgaattaaagcatggcgtcgtggcagaggaccaatcatgcgggagatgatgcggcggagtactgcgacgtgggcttagtggactacttgacggtga

SEQ ID NO: 125205 - DNA, 276 bp, Zea mays
  Clone ID: MRT4577_4565C.1
ccggccgggaccaccagttcacatcactatgcggtagatgaggacggtatagcggcacatagcgactacgacgatagcagtgtgccacacatggaatcacagctctccgccgccgtgccctggatttacggcttctggggctacgactcgtccaggtacgaggtggctgcgctgccgtccgggaggtggggcaggaagacgttcttagaccaagtgatcatatgatactacatctgttccgccaccgacctgatcatggtgacgacgatgacgctg

SEQ ID NO: 125206 - DNA, 569 bp, Zea mays
  Clone ID: MRT4577_45660C.1
gggggggggggggttttttttttttttttttgttgttttttttttttttttttttttttttttttttttttttttttttttttttttttttgggaaaaaccccaaacaaaaaattggttatttctaggaaacccaaccccgaaggggggggcgggggggggggcccccccaaatggaaaccaaaaaagggcccccccaacgagggggggccgcccccccaagacaggggttatcaaaaaaaaccgggtggatggcaccaattgttgccgctgggggaaggcccccccccaagggttaccccccgctaggggattaaaaaaccgggggccctgttggggggcccccccaaagttccacaaattccgttggttgaaaggaaacccctgttgccaggaggccccagggtttgccccaaccagccgaggcaaagctgggcccatctgttgcaacaattgttgttgccggtttgtaggggccttggccacaacgagcgggctaaaataaaacaattgttccttttttaggtaggcggccgggtccaccatggctagttgaccgaaccccggcaa

SEQ ID NO: 125207 - DNA, 2861 bp, Zea mays
  Clone ID: MRT4577_45661C.1
aattcggcacgagggatgcaaccacctgacaatggcatctctttgcgcgccctcggcgctcctcgaccacccccatcgccgtcggagacgagcccctgtacctagccgtataaaggcggcagggcttagacaagcgccggcaggcttcccgggcccctagattctctctcgcgcttccgctttccttctcctggtcctggccatggcccacgaacgggagccgctcctgcagcaacgacagaccggcgtcggcaatgcctgcggtgccaaggactcgtcctcggcgccggcgccgtcggctgccgcgctgccgtcgctggctaggaccgtgctcaagttcctgatgtgggcggtgttcctcacctgggccgcggggatcttcctctacccgaccaagcccgtgcaggccgtgttcaggaagtgggtcgggctcaccagggactccatgttcggcatcgccgggggtattttcctgaccttcagcgcgccaattctgatcattgcgcttctcgcatatgtgtacatctccttcttcccgagtgagcatgtggtggagaaaaggaagctgcgctcactgagtttcaggctctggactttccctgttcttgtagacggcccctttggagttgtctctgcagttgagttcatcggaattgtcttgtttatagtttttgttgtctactcaatgacctattatgccgtggaagctgtgagccttgtctcgaaatttgatatcccatcaatgactgagagtgaattgatactggatgtcattggcctccgtttaggggcggttgggttgttctgcatgctcttcctcttcctgccagtcgcccgaggctcggttctcttacggcttatcgatattccatttgagcatgctacaagataccacgtctggttggggcatctcacgatggctctctttacattgcatggcttgttctatgtgatctcatggtccatgcaagggcgcctccgtgaagaactgagacagtggaaggaaattggagtagcaaacctgcctggtgtgatcagcttggcagccggcctacttatgtgggtgacatcacttcacccagtgaggaagaggttcttcgagctcttcttctacacccaccagctctacgtcgtcttcgtcgtgttcttggcgtttcatgttggtgacttcatcttcagtatttgtgccggagctgtgttcctcttcatgctcgaccgctttttgaggttctggcaatcaagggccaaagtcgacatcatttcagccgcctgccgcccgtgtgggacggtggagctagtattctcaaaaccagcaagcctccactacaatgctttgagtttcatcttcattcaagtgcgcgagctatcgttcttgcagtggcacccgttcagtgtatcttcaagtcccatggatgggagataccacatgtcggttctcataaaagtactcggcacgtggactgaaaaactgaggagcatcatcaccgatgtacaggagaagaacgggggtgactctgagctgcaatgcgggcgcatgacagcctgcgtggaaggcccatatgggcatgaatcaccctaccacttgatgtacgagaatctcgtcttggtcgcaggaggcattggaatatcgccattcttggcgatcttgagcgacataatccacaggatcgaggagggcaagcaatgcatgcccaagaacgtgctggtcctttggtcagttaagaagtccaaggagctttctctgctgtccgccgttgatgcccagaccatcagctcatctgtctcggacaggttgcaactggatatccaggccttcgtgactcaagaaccccatcctcctttggaggatggcatcgtcggggacgaccagaaagtccctggcatgttcgtcaagaacggtacagccatgtctgggctggtcggcaccggggacaacttctgggcggccatgtacttcctggcgtccacgctcggcttcctcctggcgtacgccctggtgcaggtgtactacgtgaagccgcacaacgtggtggcgtggtggtacctgggcctcctgttcatgctgtgcatggttgccggcgtcgctctacccggcgggctcgtggtcctcctgtggcatctgtcggagaagcagaggttggaggacgacaagtgggacgcctctcagtcaccgcgcgccgagcagacaggccccttggctgcggcgggtggtggtgacgacgacgctgctcccagcgtcagcctcgccgccctgcggacgacccggtacggctgccggccgaacttcgaagcggagttcgcggcgttcgcggagcgcgccggggacgcggcggacgtgggcgtgctggtgtgcggaccgcaggggctgcagacgagcgtagcgagggagtgcagggcgcggaacctccgccgcggcggcttgggggcggccaagagcaggagcggcgcggtcttccatttcaacagccacagcttcgacctgtaaactacgtacgtctcgtttggtcggttcaacgatcatcagtacatgttgcacagcacacacgcacagacgatagttggatgtacatgttgatccgtcataatttgatatcgtgtatatatatgtatagctgatagttaatatagttaagttatataagagatgtataaatctgtatgcgtatactataggtgtagcatatgcatgcatgatagaagacgaaggttaaatgctgacgaatcacgtgaaatcatgtcatgtttcgcgtctaatgcgtgaatttgtatttttcttatgcgtttgtgagtacgtcaaaactacgttgcaacgcaagatttatctttgggcgcgttggtgtgtaaaaaaaaaaaaaaaaaaa

SEQ ID NO: 125208 - DNA, 190 bp, Zea mays
  Clone ID: MRT4577_45662C.1
aaaatagcacaattgctggggccaaatgaggtagaccgtcgcatccatgacctatctacttccctccccttcttatctgctactgcaataatcacccgaggcaattttggcgtgctttacttccacacaacatcgtagcatgcgaaaggtggacgtgctgatcccctcttgcgacttcatatctcttcta

SEQ ID NO: 125209 - DNA, 327 bp, Zea mays
  Clone ID: MRT4577_45663C.1
agcaaaagccggacaatcaggaacactgttcaggatctccaacacttaccacatgtattgacccatctcggccggcctataaccgacaaatgcactcgggaatcactgactggagaccatgactttcgacccacagacttttgttaacccgtgcagtggttacccgcattatctccccatagaccaccacatgtgttcactctttctgagttgcaagtcggatttgtgttgagagacacccccctgaccctgttccggacggtgccctccaaatgccggggcgcaataaaaaacggattcgagctctgggtcagccctgggattctc

SEQ ID NO: 125210 - DNA, 384 bp, Zea mays
  Clone ID: MRT4577_45664C.1
gtcacatggctcgtatgtctttacatacttttagtttacattagaccggttacagtttgctgccatttacattaattgatcatctggggtggggggtgagcatacaccggtttgtgcaactactttcagcgtcttcgtatctgcaacaagttgagttcaggagaaaacctcactttttactcttcggactgacaaaccaatggatggtatcttatggttgtacacatctacggctttgtttattcatttattttccggggaccaattttgtggcgtatgcccaggtgtttttggcgacgtggtgggctacttggtccaaaagttcttgatggggccctttgcggtgacgattgcctgcactaataagcccaacatggaaaacat

SEQ ID NO: 125211 - DNA, 714 bp, Zea mays
  Clone ID: MRT4577_45665C.1
ggatccatcacagatgatgaggcagcagacgacccgattattatttgaaacagagtacaaagagcaaataaaagcgtgcatggatatatcatggaggtgcacgctgcgtaaatgctctccatgacatcgcagagagcccgcatcgcctgcagagagtgacgatcttcagcgggacgatcgtaaactcgctggagtatttgtacagcgacggcgacgggcagcagcacaccgccggtccgtggggcggctgcggaggaactggtcgaaagattcatcttgcccctgaagagttcatagtggaagttactgggacattccatccatgcgcgtgggacagaacaatacccagtgtcgtgtcctctctgacgctcgtgaccagcacgggcaaaacacacgggcctttcggaacgcagctgggagccgcgttccaggttccggtgcagagcgacagcaggatcgttggcttcttcgcccacggagacaattacatcgaagcaattggcgcctacgtgaagaaattgacagaatccagcaaccgttaactcttggaacaacttgcagctgttcacactgtttcttgggccattgctccttaaatttagtccagatggccaaggagcaaccaaacagaaatcgctatggcagggaagatggactaaactggactgtggcacctccagcatagcctgctcttagattagtgaccagacatca

SEQ ID NO: 125212 - DNA, 393 bp, Zea mays
  Clone ID: MRT4577_45666C.1
cagactactcatctacgttcactccgccatccaacaagatgcgacaatctccgtaccacgcccatcatcccctcctacaaccagaacgtcatggcactacagagcgtacttctcgaccgaacgacaaggatcgtatacgtgaaggaattttatatcaactgatgaatcttcagccttccctactagaagtacatcatcaacacacgcctgaaaaaccccttgtcatgccacttaatatcatgcatctggatgatcatctcattttgtgagatgatagaggaagaggtacacttgtaggagacatacctccagcaccatctccgactggtcgtggattgcctctctatgcaaatgatacaagagctggaaatgttcttgtggaagatgctcttg

SEQ ID NO: 125213 - DNA, 2603 bp, Zea mays
  Clone ID: MRT4577_45667C.1
cattgggtacctcgaggccggccgggttttcatttttcgatcactagtggtcagcaccacacaactgggccttggggcggtaaggagggtacgaataagcttgggggactacatccaaatacattccagcatagcatgcacatccaaatacgggtagccagcatgatgattgaactaggccttcacaagcatctgacagccgaaccatgtgggcttccatggcacatttgttaccaaataataaaagggatttgcctgggcttgcactacctacatgacaagaacataattcatctagatctgaaaccggacaatatattgcttgatgatgacatggtgcccaaaatcacggacttcaactcgctggagtatttgtacagcgatggcgacgggcagcagcacaccgccggtccgtggggcggctgcggaggaactggtcgaaagattcatcttgcccctgaagagttcatagtggaagttactgggacattccatccatgcgcgtgggacagaacgatacccagtgtcgtgtcctctctgacgctcgtgaccagcacgggcaaaacacacgggcctttcggaacgcagctgggagccgcgttccaggttccggtgcagagcgacggcaggatcgttggcttcttcgcccacggagacaattacatcgaagcaattggcgcctacgtgaagaaattgacagaatccagcaatcgttaactcttggaacaacttgcagctgttcacactgtttcttgggccattgctccttaaatttagtccagatggccaaggagcaaccaaacagaaatcgctatggcagggaagatggactaaactggactgtggcacctccagcatagcctgctcttagattagtgaccagacatcatcatgatatttcgatattataataaatgaggagcccatctcagatgtttatgttagctcctcagtttttgcttctgaatgattaatttagatcttccttattcttgcaattactgagtatcttattggagtatctggaacaagcggcccattcaaaaatctaacaaatgttgtaacgtcacttacgtttgtcaccaatactcgtagttacggaccctttggaaaagggcgaggaacaccgttccacatccaaacgcagaacaacggcaggatcgttggcttctttggccgttctggccagtatctctatgcgattggggtctacacgaaccaagatgctagggtcgcaaggatcgggcgacctttgggtggagatgaaggggttcttcatggcatcacagacctcagtgggcagcagcgcagcagaggtggaggtccatcgggagaatgtggagacagcgacgacgagcccaacggtgatttcgcctgatgaggccgtcgtcgccaggattgggccttggggcggggttggaaatgctctccatgacatcgcagagaggccgcatcgcctgcacagagtgacgatctccagcgggacgatcgtaaactcgctggagtatctgtacagcgatggcgacgggcagcggcacaccaccggtccgtcgggcggctgcggaggaactggtcgaaagattcatcttgcccctgaagagtgtcaatcggcacattcaacggccatgcaaacgtcataacgtctctgacgttcgtcaccaacgctcgtagctacgggccgtttggaagagggcgaggcacatccttccacatcccagtgcagggcaatggctgcatcgtcggtttctttgggcgctccggacggtacctcaacgcgatcggtgtctacacggcgccgaaacccgaaccaaaagcaggtggtgatgaggccgtcgtcgccaggattgggccttggggcggggttggaaatgctctccatgacatcgcagagaggccgcatcgcctgcacagagtgacgatcttcagcgggacgatcgtaaactcgctggagtatctgtacagcgatggcgacgggcagcagcacaccaccggtccgtggggcggctgcggaggaactggtcgaaagattcatcttgcccctgaagagttcatagtggaagttactgggacattccatccatgcgcgtgggacagaacaatacccagtgtcgtgtcctctctgacgctcgtgaccagcacgggcaaaacacacgggcctttcggaacgcagctgggagccgcgttccaggttccggtgcagagcgacagcaggatcgttggcttcttcgcccacggagacaattacatcgaagcaattggcgcctacgtgaagaaattgacagaatccagcaaccgttaactcttggaacaacttgcagctgttcacactgtttcttgggccattgctccttaaatttagtccagatggccaaggagcaaccaaacagaaatcgctatggcagggaagatggactaaactggactgtggcacctccagcatagcctgctcttagattagtgaccagacatcatcgagatatttcgatattataataaatgaggaacccatctcagatgtttatgttagctcctcagtttttgcttctgaatgattaatttagatcttccttatttttgcaataaatgaggattcttttctgtct

SEQ ID NO: 125214 - DNA, 877 bp, Zea mays
  Clone ID: MRT4577_45668C.1
ggtacgaataagcttgggggactacatccaaatacattccagcatagcatgcacatccaaatacgggtagccagcatgatgattgaactaggcccttcggagtttcttacaggagtatctggaacaagcggcccattcaaaaatctaacaaatgttgtaacgtcacttacgtttgtcaccaatactcgtagttacggaccctttggaaaagggcgaggaacaccgttccacatccaaacgcagaacaacggcaggatcgttggcttctttggccgttctggccagtatctctatgcgattggggtctacacgaaccaagatgctagggtcgcaaggatcgggcgacctttgggtggagatgaaggggttcttcatggcatcacagacctcagtgggcagcagcgcagcagaggtggaggtccatcgggagaatgtggagacagcgacgacgagcccaacggtgatttcgccaaattcggcccgtggggcggcgacggaggacagccgcaggacatcggaacactaccctgccgtctagacaggatcaagatcagcagtgggcttatcatcgactcgatcgagttctcgtacgctggccctgacagccagtaccgcaccgcaggcccttggggtggtcatggaggagacaacagctcttttcagctagctggttcagagttccttacaggtgtgtctgggtcaatcggcacattcaacggccatgcaaacgtcataacgtctctgacgttcgtcaccaacgctcgtagctacgggccgtttgggagagggcgaggcacatccttccacatcccagtgcagggcaatggctgcctcgtcgggttctttgggcgctccggacggtaccccaccgcgtccg

SEQ ID NO: 125215 - DNA, 2601 bp, Zea mays
  unsure (1)..(2601): unsure at all n locations
  Clone ID: MRT4577_45669C.1
gtcttcacaagcatctgacagccgaaccatgtgggcttccatggcacatttgttaccaaataataaaagggatttgcctgggcttgcactacctacatgacaagaacataattcatctagatctgaaaccggacaatatattgcttgatgatgacatggtgcccaaaatcacggacttcggtttgtcaagactcttgggtaatggaaaaagccacaccattacacaaacaagaataggaacatggggttacatggcacccgagtacttggatngatggagtgatcacaatgaagacagacatctatagcttgggtgtgataatcagacacatggtgaagggacgtaactcggcagacaccactgatgaagaagtactggcaaactggttgattaggctggaaaaggatccatcacagatgatgaggcagcagacgacccgattattatttgaaacagagtacaaagagcaattaaagcgtgcatggatatatcatggaggtgcacgctgcgtaaaccaatggacaggccaacgacgcagcacatcctacttacactggaggaaacagaagcaaagatcaaatcggtcgttgggcctactccaccaaatgccgggcagcttcagattgccaaatttgggccgtggggtggagatggagggaagacgcgagacataagaatgacgccttgccatttgcatagcgtaacaattagcagtggaactattatcgattctatcgggttttcattcactgatcactatggtcagcaccacacaacagggccttggggcggtaaggagggtacgaataagcttgggggactacatccaaatacattccagcatagcatgcacatccaaatacgggtagccagcatgatgcaaacatttgcttattagtccggttcacttccaggctagggtcgcaaggatcgggcgacctttgggtggagatgaaggggttcttcatggcatcacagtaaaaccacattgcatgttaagaatggcagtttttaatggaactataaatttcatgagttcactgttgagtcttcatccaggacctcagtgggcagcagcgcagcagaggtggaggtccatcgggagaatgtggagacagcgacgacgagcccaacggtgatttcgccaaattcggcccgtggggcggcgacggaggacagccgcaggacatcggaacactaccctgccgtctagacaggatcaagatcagcagtgggcttatcatcgactcgatcgagttctcgtacgctggccctgacagccagtaccgcaccgcaggcccttggggtggtcatgggaggagacaacagctctgtgagtgtgatgaacatttaaaaaaacaaactatccaccgagaacgtggtattcaaaattgtcccgagggacaatgaagtataacttctctttgatttccttacagtttcagctagctggttcagagttccttacaggtgtgtctgggtcaatcggcacattcaacggccatgcaaacgtcataacgtctctgacgttcgtcaccaacgctcgtagctacgggccgtttggaagagggcgaggcacatccttccacatcccagtgcagggcaatggctgcatcgtcggtttctttgggcgctccggacggtacctcaacgcgatcggtgtctacacggcgccgaaacccgaaccaaaagcagttgggaaacaagatgtgtgctgtgctaatttattttagttataatttgtgtttgtgtttttttttgttggtttgttctgtccttgttttgtttgactcaaactggtttttgttactcgcacagggtggtgatgaggccgtcgtcgccaggattgggccttggggcggggttggaaatgctctccatgacatcgcagagaggccgcatcgcctgcacagagtgacgatcttcagcgggacgatcgtaaactcgctggagtatctgtacagcgatggcgacgggcagcagcacaccaccggtccgtggggcggctgcggaggaactggtcgaaagattcatcttgcccctgaagagttcatagtggaagttactgggacattccatccatgcgcgtgggacagaacaatacccagtgtcgtgtcctctctgacgctcgtgaccagcacgggcaaaacacacgggcctttcggaacgcagctgggagccgcgttccaggttccggtgcagagcgacagcaggatcgttggcttcttcgcccacggagacaattacatcgaagcaattggcgcctacgtgaagaaattgacagaatccagcaaccgttaactcttggaacaacttgcagctgttcacactgtttcttgggccattgctccttaaatttagtccagatggccaaggagcaaccaaacagaaatcgctatggcagggaagatggactaaactggactgtggcacctccagcatagcctgctcttagattagtgaccagacatcatcgagatatttcgatattataataaatgaggaacccatctcagatgtttatgttagctcctcagtttttgcttctgaatgattaatttagatcttccttatttttgcaataaatgaggattcttttc

SEQ ID NO: 125216 - DNA, 580 bp, Zea mays
  unsure (1)..(580): unsure at all n locations
  Clone ID: MRT4577_4566C.1
tgaggatgaaattgagcagcaagtaaaagagagctagctcaagnagtcatacaaaagagtcacagtccttttgcatctccggttctacttgttaagaagaaagaccatacgtggcgattctgtgttgattacagatatttgaatgccatgacggtngaaaagcaaatatccagttcctgtttttgaccagctgatggatgagttggcttcagcccagtggtttagtaaactagatttaaaagcaggctaccaccaaattaggctgtcgccaggggaggaaccaaagactgcgtttcaaacacacttgggacattttgaattcagagttatgtcttttggattgactggagcacctaatacatttcttagtgccatgaatgatactttggcccctgttctgaggcgttgtgcattagtttttttcgatgacatcctagtgtatagccctacccttgaagcccatttgcaacatctatccactgttctacagttactacagcaggaccaatggaaagtgaaattatcaaaatgtgctttcgctcaaacgagtgtatcctatttgggccatattattagtggc

SEQ ID NO: 125217 - DNA, 594 bp, Zea mays
  unsure (1)..(594): unsure at all n locations
  Clone ID: MRT4577_45670C.1
cgggatcctcctncaccgcctccccatctccatcgcctctcgcgaccgcgaacgtgagctcggcctgacactgacgcgagtcatacgcattcgctctggcgtaagactccacggcacgctgagggcgcggcggcgcgcgctttctcgtatctactctgctcggtggccacactcgcgtagtgtcggtctatgtggcgcgtgctgaggaaaaatggcgatgggcgatagattcgtcgcgcgctgtgacggcgcgctgctcccgtgcgcgctcctcctctccgcaccgactgcaacaaaggcttatgattctctgtatccgaactgaaccatcactatatgatggtatatcatgcactgaactcctgatgcatatgttcctgttgtcacaatgtttaattatcaacaatttcaccatatcccagcacctgattgccagattgagggttcatgatcagaaatggaagccatatgtcctctgcgtggggctcagaccactgaacagggagactgctcaaagttcaagagtagacctccccattgctgcaagaatgatccaccattgtcgatttacttccaggaactccaatacacatg

SEQ ID NO: 125218 - DNA, 1020 bp, Zea mays
  Clone ID: MRT4577_45671C.1
gtgaatatgaaatacttcctcgtcatggtgagatatgggcggtttacaaaaactgggaggctgtatggactgcacaggattttgaaaaatgtgagtatgaactggtggagatacttggccatactgattcctccatacaagttcagcttctaaggaaggtcgatggttataagatggtatttatgtcatacagagcagagggttctgtgatgacaataaggaacgatgagtaccccaagttctctcaccagattccttgctttcgtctcacacatgaaaaaggtggcaagcttcgaggctatttggagcttgaccccttatcagtaccagaggaatttctcgactgattccatctgagataaactttatcaaccacaaatctggaaccttcttgtgatgaagtttctgtaactgaggctcagttaatgttaaggtcgacaggtcaacattgttcaaatgacactgacataagatgtctggatttcagcattcatagcactaacgttcttaaggctctgttcgtttagtccggattggaggccagaaccattccaactcatcaagctaatacaaatttgtgaactattctaatccggaaccaatccagtaaagtattccggaagaaccgaacgggcactaaaggtggactaccaatctgcacaatgaaggcattgactgttggactctttgctgggtggctgtcctgcagctgtaattcacaatccgagtaaattgtttgtagttagcttcagctgtatctggggtttatggtgtaaaaactgccacttctcttgtagtgtactctggtagtgctgtatttgagctgtggggtgccatcctgattaattatcagaagagttctattggccacccttacaggaactgaaacatgaaatggagtcagccaggtcaggctcatcgatcaatgtgttatgattgtgttgttttgcaggggacaaggcctctttctattcgcatttctctgtatatacaagttacacttacacgtcatgatttttt

SEQ ID NO: 125219 - DNA, 297 bp, Zea mays
  Clone ID: MRT4577_45672C.1
gttagcacactaaagtaccaacgggggcaggggtaattttttgcctacttatgctcattataatttctgcaagtgctactacagcgaccattttcccgaaatgctcgcacgctgctatagcgtttccttattacaccgaacctctgaccagcgaagtttatgatatttgtaaacccaattctttaatcttccatgatccaataagctatcacatcttccattttacctttatcaccctcgttcttcaacaatattcaatcctattacatttaggacctttgggtcatttattgacac

SEQ ID NO: 125220 - DNA, 422 bp, Zea mays
  Clone ID: MRT4577_45673C.1
ttttatttgatttgggactgaaccgcacatgggggacattacctcatagaggggtggtagaaacttcatccgtatcatatggatggagaggttctttactcgatgggatttagaagacttggaactaatctgtatgcgaggcacgatatgaagaccagtctcctactgatgtataactacatagtaaacatgattgggctacaaatgaatctcatgtggctgatgactgttggaggggtacataagacgagctaataacctatgcattgtcagctgactgtgacacagcaatagtaggctggaaacccttaaacatgtaccacctgtcaggatgacttgagagcagcattgtgcacactctgggagacagataaactagctcctgctaagtatgtccgactgtcttctgaagaacaggactg

SEQ ID NO: 125221 - DNA, 351 bp, Zea mays
  Clone ID: MRT4577_45674C.1
tatatattcaaccacaagactttttttctgaaatcctaccaagagctgtacgaggtcattgtgtacatgcatgcatctttacaggctattgggaggatgctggtactatcaattcattctttgatgcaaacttgggcctgattgtgctgccttccaaggtggatcattatgaacaaaaaactcctttattgactgtaccacgttacctgcctgacacgcagtttgactactgccctacgatagacgcatctatatatgagaggctgccactgactgaatgccacatcgagcttcctgcgattggaggctgctaacatgccaactgtcgatgcgatcccaacgactccgtta

SEQ ID NO: 125222 - DNA, 592 bp, Zea mays
  unsure (1)..(592): unsure at all n locations
  Clone ID: MRT4577_45675C.1
aattcggcacgaggagaaggtcttcccctccctcccaaaacggcactcaaaattctccgctgggaaaaatctgcaaaattctccgcttaggaaaaaaaagattcggagcaatccaccctctgtttactcctcgattaaggtgatagagtcatagcgagggctctgaattgggatcccaacaaaagaatagacttgggttggggcttgcagaagaagggaatgtcgacaaccattgacgggctcgcgacgtcgagtcaggagggtaatgcacacaatgacgaaaagaaagaagtacaattctgatgaagaagaactcagaaggagaaatgaagcccaaaagggtctctttcaagaaaagagccgttactgtggggtataaatttaggcattctttatggagaaagagtaaaatgaagaatgataaccatgtagcctcaatagatgacataagagatggtcaagagctggagattgttgaaaggttccgcngagtgtttaatcgacgaggggcttgttgccagaacatcatgatgattatcacatgatgtttgagggttcctgaaagcaaggaaatttaatanttgacaaagca

SEQ ID NO: 125223 - DNA, 429 bp, Zea mays
  Clone ID: MRT4577_45676C.1
ggacctttggtctgatttatgtgcttgtttatgtgcttggttggtgttccttatgctcttagcttgatatcttgatctatcgtttgcgtgttggtttaatttggtgtaacggttgctgatcttgtagttttgaggtttctgacgttcttttgatctgtttcgtgagtttattctcgacttcttgttctcttgtcattaacgtgtgtgtcttgtccatcttgtagatgtccgtgtcttccgattatagttcatgtcgctaagtaggatatggtttctcggatttgcgtatttgctcttgttactagcgtcggtattgatgatggtcaatgtcgttctactgttgctgattcactcgatgttatggattctggggatctgcatatgaatttgggttgacattcgtcgacttgagcatttggtgaggagtct

SEQ ID NO: 125224 - DNA, 345 bp, Zea mays
  Clone ID: MRT4577_45677C.1
tcgttcacgcgtgcgcgaccacatgggcggacgcgtgggcgagctcgagggctagctcgtcatacgggtactcaggcaacggactggacgccgccggcagcccgtcctacgccttaaacatgtacttacaggtgcagaaccagatggaggggatctggtacttccagggcctcgctgtgcccacggcctaagacccgtgcacgcacgcctgctgctgcaccatacagatcactccgctggcagcgcagagacgactcgccgacgacgggacagctctagtcctcgtgggtctgcttactgacgaggatgtccccccatgactgagtccgtgactcggctcatgtt

SEQ ID NO: 125225 - DNA, 401 bp, Zea mays
  Clone ID: MRT4577_45678C.1
aaacccaaccaaaccccaatctattttaaagcccccccaaaaaaacacttcacaaaaaattaaccaaatccacacccccaaccataaccacccattttataaattcctgaataaaaataaagtcaaacaaaacccactagtttcccttttttatttaaaaaactaaaattcaagcccgccggtgaaaactctttttaagtaccacaaaaaaaaaatatcattgccatttctattaaaaactaaggcccaaacaaaaaaccacccactcagccaaaaccgcctgtcccttaccaccctttccaaaaaaattagcaaatcccacaaatatctaaaaaaataaagtcccccaattctttgcccccaataccaaccccaaaacaaaacttaaccggaggcctttc

SEQ ID NO: 125226 - DNA, 427 bp, Zea mays
  Clone ID: MRT4577_45679C.1
tttacaattcgtagatgtagtcaaaaacgaaattgacaaaggccatgtttatcccacacacgaaccgacccatcactacgagttcagctctgaaaactcggatttacacgcctcattccaattcgacaacaatgaattcaaattattgaatgtaactgttcaaaaattgcatcttaataatggtgtattcattttgaataagttagaatgggttgacagcgtcccgaaacagcatttcgatactccaaaagaatgcgtttatccacaagaatcaaacagttcaatattcagctttttacattaactacctccttttatcgaattgaaaaggcacacagataagaactaattggacataataatactgaatactctaaatgtatggtatttagtgtattaaaacaaataaaacgtgaattcataagcg

SEQ ID NO: 125227 - DNA, 511 bp, Zea mays
  Clone ID: MRT4577_4567C.1
aatattcctgagggggccgactattcatggaacgtgagaagcagatgaataatcatctgcttccgcaagaaatcgaagaatttcttgggaatcctgctttagctactcgttcttttttctctggcggggggggggggcttcatctgagttcgaatcctactgagaggtctactagagatcagaaattgttgaagaaagaacaaaagaaacatcttgttctttccaggcgatcggaaaataaagaaatagtgaatttattcaagataattatgtacttacaaaataccgggtcaattcatcctatttcatcatatccgggatgtgatatggttccaaagggtgaactggacagttccaataagatttcattcttgaacaaaaatccattttggggtttatttaatctattccatgaccggaacagtgggagatacacgttacaccactattttgaatcagaagagatatttgaagaaatggcagatctattcactctatcaataaccgagcc

SEQ ID NO: 125228 - DNA, 435 bp, Zea mays
  unsure (1)..(435): unsure at all n locations
  Clone ID: MRT4577_45680C.1
ttctctcgtccgcncatactgcgtggcacaggacatgcccctggctcgcgcttaacactggctctacagcngaaaactcccaccgngagcctaactgagaagctgaagtntctaacagttctcgngttcagatnntggtgangatggtgcttcttttttgttgtntnaacattttgttgcggcgtgctgttcccaatggaatccattgcttgtctctgcgccttactggtgtatactccttaaatgcccatgattgtgcttangaaaggttgtcactgcttttggttgttcttgttttgcattctttgcgggagctgcctcgggtgctttttccgtggtgcgttccttttgctcttttgttgaaaatggtggttttgtcggcgctctccttcccttgtttggtaattcttggctcgtgtctgtcgtttgcctgct

SEQ ID NO: 125229 - DNA, 382 bp, Zea mays
  Clone ID: MRT4577_45681C.1
aaaatagagagaccaaatattagttactaaaaccaaacaacttgacgccactgggaatcctcccaaaacaatgcatatcaagatgcaaatgtcaacgcgctatggcctaaaaaatgtctacttgggaagtggcggtatgctctgctcgttcctgaagtagtcagtgggatccactgccgccttcactgccgccagccgccggtagttccccatgaagtatctctccgcccacgccctggcgctccagtacgatgacaagccgtcgctgccgatgacgttctggcccatatccaggtcgcggtagttggcgaacgcctccctgggattgctggtgacgaactgcgccatgaagccgtagaggccgttgagccacccaagcgcc

SEQ ID NO: 125230 - DNA, 538 bp, Zea mays
  Clone ID: MRT4577_45682C.1
attcggggggggcaaagtttaaaattacaaagttttttttggggggcccaaagtttaaaaatttgccccacatggcccctacacaatgtttgggttttgcagttgaaaaaacagggattttttgtttcttattgggggggaacggaatatgagggggttttatggggggggctaaaaattgggtttccaaaggggctttggtcgaaacaacccaagttgtccccgtatttgaaaccaaacatgtccaaaaagcgtttgaaaaaacccatccggttggaaacaaaagcggggggcccggggccccacttaaggcccccttttataattttggggaggaccccataccccgggagcctccctggggccactttgtggggggagggcccccactggcccgggaaaacctcggggcaaaacgttttgggcggttggggggttttccattaccaaagcgcccttttaaaggaaacagtggagtcgggggcaaccaaacctgggttgcccaaaaggtcctggccaatggcctccccggggggcc

SEQ ID NO: 125231 - DNA, 305 bp, Zea mays
  Clone ID: MRT4577_45683C.1
acccggattttcgttcttccgcggacgcaccacactctgggggggggtgtgtataaaagggggggtgcattccatgaagcgaggatcaaacatgaccaacgaggggaggccaagggcgaccactgcccatgcggccagctaaggacatggccaggcatacaacagggcgagagaccacaagccagagcgagcggaaagaccagagaaccctcggaaagcaggcggctgagaggaaaggcggcgtggaagagcaaaaagagagaacacaagagcaaccagcacaccagacgacacacaaaacagag

SEQ ID NO: 125232 - DNA, 289 bp, Zea mays
  unsure (1)..(289): unsure at all n locations
  Clone ID: MRT4577_45684C.1
cgtaagctggatccttaagcggcgccttntttatttttttttttttataaatattttttggggggggcagtgttcaaaaggtttattaaagagatgataaaccggtgttttgtttatacagggggttatatggagagagacaaagagcaggtgaatttgtaggaacaacccccacggagaacgaacgcaagcctatttccttataacagggaacgggggcatacataggtttcatgggggagcactgagcaccgttggttccggaacattctcatgcccggacgcgggg

SEQ ID NO: 125233 - DNA, 524 bp, Zea mays
  Clone ID: MRT4577_45685C.1
gtgggtgtttttttttttttttttttttttttttttttttttttttttttttttttttttttttttttttttttttttttttttttttttttttttttttttttttttttttttcccggggacagggggcaaggccaaaccgcaatggggggggggggggggaccaccccggttttaagggtgtcatataaggggacattttaataaaaatttttttaaagcgggatcattttctcatatgaaaaggggcaagcttttaggaaaacacagttaattcacttttggaccaaaaaaaacaggcccgatgatttgggatcccaaacattgcaaataataagccgacagtttgccttgtcttccctataaagcccccgggtattttttgccacccaatttttttcccagggcccttttaagcttgccaaaaaactggtgggggggaaatgccttgcctaactaaaactccggggaaacctgggggtttttattgaaaaattaaacaaactgggcctggggaaactttt

SEQ ID NO: 125234 - DNA, 596 bp, Zea mays
  Clone ID: MRT4577_45686C.1
aaaaaaagcctagctgcccccatgaggttgctttgctttccagttgttgcaaaacatcgggggggatgttcaacttaacccacccaaggcgggcccaaaaaaaaataaaaaaaaaaaacccccaaaaccctgcttttttatttgaccacgggggggggcaggccgttgaaaaatgaccgaaaccacgggcgaatgatttaccattttgggcgggggatcattatcacataaaacaacccggggggaaatggggaccccctcgggaatgggaagctggcaaacctcgaccgggggatcctgaaaaagccggacgttgatttccctgagggggggggaaaacctgcggtcaaggtcctttagcgggccctcgggggaaaaccccccaataccggcccacagggggttggggtacacaaggggccccccgaccccccccagggggaacaattgtttggggtaccggacgtatttaggtttgtcggggtccacaaacccaaaatcaaaggccgccgtggttggccgggtcggaaaggaattcttccaggtgttccagggccgggccctcccggaagtccaccttgcccgcccccccgggg

SEQ ID NO: 125235 - DNA, 139 bp, Zea mays
  Clone ID: MRT4577_45687C.1
cctccactcggaatgactatcctgctgccaagagggtcaagttggacagtgtcagagtcctgagacagatcagcaacaaccgaaaatgcaccagctccaggtcctcggacaccgaggagaatgtcaagaggtgaataca

SEQ ID NO: 125236 - DNA, 333 bp, Zea mays
  unsure (1)..(333): unsure at all n locations
  Clone ID: MRT4577_45688C.1
tttatttctaactctacctcactaaacttcggtccgaacataataaaatttgcttcgttcccattacatcttctgaacncatcaacataattcaaacctccaccaaccttctctattcctaacgctcaaccttcttttattctctttaccaaatcacctactccaaaaaaccttcaaacaatcccctctcattgcccatccaggatttttacatcatttgatgacttggaactcaaccaatttgtccacaatacacttttttcattaaaccttttcttctattcaccttatcttcaacttcactttcttcccttaataaatttttttatttcc

SEQ ID NO: 125237 - DNA, 385 bp, Zea mays
  Clone ID: MRT4577_45689C.1
tgaacactgagccgcgccgaggtcgccgggacggacacacaaaacgacgatggccgcgacgtctgctgaaccggaccaccagcttcctcgagacagggcctggtctcccgcgccgccggagtcaatgccggcggccgcatcaccatgcgccggaccgtcaagaccgttccccggagcatatggatacgggcctgatcgccacaagtatcgtggcccgctccccgagcagacgccgccgtacctgaccggcgagttccccggcgactacgggtgggacaccgcggacctctcggccgacccggagacattcgcgcgcaaccgcgaagtggaggtgatccactcccggtggtcgatgctgggcgcgctgggctgcgtgttcgcagag

SEQ ID NO: 125238 - DNA, 286 bp, Zea mays
  Clone ID: MRT4577_4568C.1
attatgtgcttaattgccaatcactatgcttcgactacggctgcttggaatccctaggctttctccgtccaagcctatgaggtgctccagctggacaaaccctagacgcctacggcgtcatggcgagcagtaacgactcacaacgacacatttcacgtatcgacgacgtcatctacaaagttcgagaggattgaatcacctacggaatctggaacgccaggctaaacgaggtccaagctcattgggagatgaaaaaggctcaatgtggcccaaacattgggaacat

SEQ ID NO: 125239 - DNA, 295 bp, Zea mays
  Clone ID: MRT4577_45690C.1
ggctctcatgggcatgggcaggaaggttcgtgagattcatactccctaaaagctagctagaaaaaagccgtagtggaagcactcttttacgagctgatgccctcaatcgtctgctaaacgtggtcggatgcaccaactgcccgaccagggccggtccctcgccaatgcacttgacgcgcagtcatgggtgacgaggacattgaatcatctcctgtgcagccgatgtgctgaacgaagtcgctgagcaacggttgactcgcgaccaggatttaaatcgtccatatcccgcgcttga

SEQ ID NO: 125240 - DNA, 569 bp, Zea mays
  Clone ID: MRT4577_45691C.1
ggttgagatatagggagagagtctcctagagagagagagagagagagagagagaaagagatagagagaaagcgaaggagagaaagggagagggaaccacccgttacgagagaaggaggggcgcgaacgacgggaaaaggccacgcccccacaccgcccgagagcaccccccccccccaggggggccacgaagcaggccggggagacccgggaaaagaggcgccgggagaaacggggaggcaccgacccgcaggggagggcggggggccggcgggcccccgggagcagcaagaagcgggtggcaaacaagcgcgctagccggacggacaacagggggagggaggcggcggggcgcaaacaggggcagaggggggggcggggggcccccgccgtccgctcgcgggggcgggggggacccggcccccccccccagcggggaagggggggggggaagccccccccccccaacagacagagggggcggggggccccccggccccgaaacagggccgtaacgcgggggtgcgggctgcccccccccacgggcaaaaaaaggggcccacgcggctt

SEQ ID NO: 125241 - DNA, 410 bp, Zea mays
  Clone ID: MRT4577_45692C.1
cagaaacatcatcaacttccttacttctttcagagccacttgacaaatcattactaccaacgagctttttaaatagattcttagcataagagagtgcctgtacataagtttccgttgcatgataagcccgggctatgttgtccatagaggcatcaagaggcaactgttgggagcttagcacaaccttcatctgagtcatacacaattcaagtgcaccttttgcagctactgactcattggtgcacaaggatatcaatgccttgaacagtgtgatatcaggagaggtttcatatttatgggatgaacgagttgcatcatccttgtcaggatctcccgtcagcacccactcatcaggagcagagacgaaaggaagtctttcttgcgcctcagaaggatatacaggtgtccgc

SEQ ID NO: 125242 - DNA, 308 bp, Zea mays
  Clone ID: MRT4577_45693C.1
aaaaaaaaaaaaaaaaaaaaaaaaaaaataataaaaaaaaaaaaaaaaaaaaaaaaaaaaaaaaaaaaaaaaaaaaaagggcggacgaaaaaggggcgcccggtttaacggactccagcttaacaaccccgggggtccgccgttttggggcttcaattctttcccccgggcgcaggttaccggctcgttttttttgaaggcccctaatgttaaacccctggcccgccttttataacctgcctgtttggaaaaccccttttttcccccatttgtttctccttgagagcccttcccctttttgccctttg

SEQ ID NO: 125243 - DNA, 697 bp, Zea mays
  Clone ID: MRT4577_45694C.1
cttccggctaggattccgtggagcaccagcccccgaccgaccaccgccgccgcagccatgctcctcacgaagccccagctctcttcctccctgctcgcatccacgccgctctttaaccccacatccaatcccaaccacgccaggccaatcgccgcctccccctccccccgccgccgcctccgcatctccgccgcatccacggcggtttcgccgggggcgacggcgctcagccgcgtcgacgtgctctcggaggcgctccccttcatccagcgcttcaagggcaagacggtggtggtcaagtacggcggcgccgcgatgaagtcccccgagctccagtcctccgtgatccgcgacctcgtcctcctctcctgcgtcggcctccgccccatcctcgtccacggcggcgggcccgagatcaactcctggctgctccgcgtcggcgtcgagccgcagttccgcaacggcctccgcgtcaccgacgcgctcaccatggaggtcgtcgagatggtgctcgttggcaaggtcaacaagaatctcgtctccctcatcaacctcgccggcggcaccgccgtcggcctctgcggcaaggacgcgcgcctcatcaccgcgcgcccctcccccaacgccgcagcccttggcttcgttggcgaagttcgcgcgggtggacgccacggtcctccaccccatcatcgcctct

SEQ ID NO: 125244 - DNA, 427 bp, Zea mays
  Clone ID: MRT4577_45695C.1
actactactacacacccacgcactagttataaggatcatcaacgaaacaacaaaccccaagatcgatcaagagtgagctagcaacaccatcgaagcaacacagtgagcactgcagtggggtggggatgatgatgatgggcggcgccggcaagatggtccgcgcggcgctgcacgccttcatccggcactaccacccggcggcgtcgctgctggcgctgccattctccgccgtgtcgctgctgtcgcggacgcacccggcggtgctgggcgcgtcgcacctgctttcgcggcgcctgcgccgggcgctcgtggccgcgggcttcccgccggcgtcgcagctgctcttcctgctcagccaccggctgtcgcagcgcgcctgcccgcccctccccggcgctccctttgcgctctcctttctgctcctggc

SEQ ID NO: 125245 - DNA, 290 bp, Zea mays
  unsure (1)..(290): unsure at all n locations
  Clone ID: MRT4577_45696C.1
gnatggggaacnaaatttnntcctcgnaggtcnttcnattttgacccggancttgtnggtcccactnggctcncttacnattgngaaaaattcatntccggtgcnanatncactgaagggaaggttgggccataaatttggagnatttgctttacncgggagacganagccccatcgaacaataaacaggcanaggaaatcncgganaagggcgaaagtnnaantnaaaatgtncatgaanagtgggtttaaggacancttgatgacggcgtactggacgaacaaccctt

SEQ ID NO: 125246 - DNA, 456 bp, Zea mays
  Clone ID: MRT4577_45697C.1
tggcgtcacggtcgggtggttgttcccgtgacagctcataagaggcctcgcttcggcgaaaggtctatctgaatggggaacaagtaattactgatcatatggcatgacatgaacctttaccatgaatttttggaggtggagactccgatgatgaacatgattgctggtggagcagctataaggccttttgtttatgacaagctgttttctttagtttcttacataaaatgtgtaatgtatggtataccctctgttatccgaaatgtaagttctataggacagctcctcgactctcctatgtgacgctttaaatagtgcagactacataaaccattttcatgataaataatctcatccattgccgagttagattttccatacatagatgcgtcaagctttaaaaccttgacaattatacatttacctacttttggattaaggtagaatgattgttct

SEQ ID NO: 125247 - DNA, 304 bp, Zea mays
  Clone ID: MRT4577_45698C.1
aaaaccaaccaaaccccaccatcccaaaacatttttttattgtccaaaatcctacattcccctgaataataaacccatccaggtttaaaaaaccagttacagccaaccaaccctttaaagaaatttttaaaaaaacatttttttctttgtttggaagacaaaaccgtccatcccccaggaataaagccgtccctccaaaccccttaaatttttaccaccttagtaaccccgttttttttttacaaatccttaaaaagcccctcctaccccattttctttccaaacccccttatttttacccccc

SEQ ID NO: 125248 - DNA, 326 bp, Zea mays
  Clone ID: MRT4577_45699C.1
aacagtaccatcaatcatcatcaaacttagtaaaatacgcaccaaaccaaatatgaaccgtggattatataacttcaaaaaccattgagctggtgctggtggttgttgccgcaatagatgcagtaataagtgtacattgctcacttactggcagctgcagatgacgcaaacaacaaaaccatgagctgcaacgtgattcacaaaaccatcatgcacaagaacatcagcttcaaccagcactagaacatagcgtgttacagcaacaccaacaacaactagttcacatgcaaccgccacatcataacctacaacacgatgttcatgtt

SEQ ID NO: 125249 - DNA, 1583 bp, Zea mays
  unsure (1)..(1583): unsure at all n locations
  Clone ID: MRT4577_4569C.1
catatgtaaagcttatactacctccgttcacaaatatatgacaccgtcgactttttnnccaaaatttttcccaccccgccctccttaaatatttcttcaaagtgaaatttaagtcaagcattaactaccttaagtgataaaacaaattcctttttgaatagtttccattctaacgttgttttggtcataaaatggcaaggggcacaaataggatagtttcttctactttgttttactacattttctgtgagtaccagttttataaaaaaaacttgacctgcggggggtaagacagcccccgggtattgtattaagaataagaccttctcacacaggtcaagaaaacccccgaacccctgccccacccatacacagcggcatcgaagcccatgtgagaacgaccacgaccggggctgagccttagacctatgctttggcgtggaacagacgagaggatttttttaacccacgcctgaaaattcgctcccacggggagtcgaactcaggacctgaggagtgctactcagaccacctaaccaactcagctagaggccctttcgcgagtaccagttttatcatatttctctaattctctttatgtttcaggaatggtggcagctttaacaaacgagagtgcaacaagcaaatctgtatattttgctcattgcacgtcagagatgatattcattactcatttgctgacagagcaacctgagaaactcgctggtcctctgctggctgacacgtatgtaactctcttaaaaggtcgcaatgcatggtatgggcaaatgcttgccaagggagagttgagtcctgacatgggtgatagtatcaaggggaagggaatgattcaggcttttttcttttgtttgaagctattatagtactacatccgttctcgaatatttgtcgcccgctagttcatttttgaactaaaccacgacaaataaaaaagagtgataaaccctgacatttgcagccatccaattttgcttttttacacggttaccatgatcattttaccattccattggacagggtatctctgcagttggtgcattttttgagctgcttagtcaacccagcttaagtgtgcagcacccagaagaaaacaagcaggttgctccagctgagctatgcccaatcctgaagaggctttacagaatactgataaaaagggagctcccagcaagggacattcttcaagccctgagggacgaaacgatgaatgatcctcgggaaaggattgagatggcacaaagccatgcattctaccgcccgtctctccttggaaaaccatgatctagttagtcttgtagattagtagaatataaacggacgctgtgctgcaggtttctccactgtgcttgctgtccttgtgtccgagctacatggggatggggctttgtcagttgtcgaattctttgtgcttcctcgttgccatggtgtacaagagattactgaaccaataaatgttctaagtgcatattatatgaacacccaatttgaaagtaaaaaaaaaaaaaatcaaaataaaaaaaaaaaaaataaaaaaaaatactaaagaaaaaaaaaaacaaaaa

SEQ ID NO: 125250 - DNA, 853 bp, Zea mays
  Clone ID: MRT4577_456C.1
cattgggtacctcgaggccggccgggcgggggaaccaactcatgctcgacagaccacctcgtcggggcttcgcatttatcgtgccgtccatgtccatgcaagagccgacgagcgccgccacccagcttcacgccgcgatggaagcgtcattgtcgctctcgtcactgcagctcgccttcacggcggtcgcggcgatcgcggcgctgggcgtcgcggtgaccgtcacgaggtacaaccggagatacatgggcctgaggctgcctccgggcccgcccgggtggcccgtcgtcggcaacctcttccaggtggcgttctccggcaagctcttcatccactacatccgcgagctccgcaaggagtacggccccatcctgacgctgcgcatgggggagcgcacgctcgtgatcatcagcagcgccgagctcgcgcacgaggcgctggtggagaaagggcgggagttcgcgagccggccccgggagaacaccacgcgcaacatcttctcgtccaacaagctcaccgtgaactccgcggtgtacgggcccgagtggcggtcgctgcgccggaacatggtgtccgggatgctgagcacgtcgcggctcagggagttccggcacgcccggaggcgcgccatggaccggttcgtgtcgcggatgcgcgccgaggccgcggcgtcgcccgacggcgcgtccgtctgggtgctccgcaacgcgcgcttcgccgtgttctgcatcctgctggacatgaccttcggcctgctggacctccgcgaggagcacatcgtgcgcatcgacgccgtcatgaagcgcgtgctgctcgccgtcggcgtgcgcatggacgactaccctccgttcct

SEQ ID NO: 125251 - DNA, 1736 bp, Zea mays
  unsure (1)..(1736): unsure at all n locations
  Clone ID: MRT4577_45700C.1
cattgggtacctcgaggccggccgggataaattggttatcggttcggaccgatttttgaagggaaccggtttggtgaaccctgcgttcaatacgcagcagcggcggctaaccctaacttcaaaggcataggagtaacagtcttcgcacaaatattccctcccccaaggcccgaagccccgaaactttccggatctttcttccgccgcttcatcttctttgcgcaaaactagttttgtttctcgttcttctcttcgatttcggccgaataaagatggcgtcggctgcgcgcctcctcgcgccgatctccaggcgcggcgtcgtctctgtggctctggcgggggtggagaggcggcggccggaggcggcgtcgctcctgggggcgcctgtgctggctacggtggaagcctgcgcttcgatcaaggtcattcctttgtcgaatcagctggctcgatactcgacaactgcatttcagaggtttgggttttcaacttcagccccccaacaagatgataaggagacaaacaagcacacagatgatggggttaatagaagtgttggagcaagtactggagcttcaagtgaagccaataatgtgcctggaaccgagaaggcacaggaagcaggttcacttgattctatatccaagtctaacaggaagaggacagctaaacgaactgcattttctgattcagattcagaagacctagacctatcaaaggaggaccttgtgaagctgcttcttgagaaagacgaatcattgaagtctaaagatgaagagtttaaagatatgaaggataaggtcctacgcagctatgctgagatggagaatgtccttgccagaacaaagcgtgagtcagagaacaccaagaagtatgccatacagagcttctccaagagcttgttagatgttgcagacaatttgtctcgggcatcatctgttgtcaaggcaagtttctcaaagtatagattcatctaacgattctgatgaagctgtaacactactgaaaaccctactagagggtgttgagatgactgagaagcaacttggagaggtcttcaagaagtttggagttgaaaagtttgatcctttgaatgagaagtttgatccaaataggcactatgccattttccaaattcctgatccttcaaaaccatcaggaactgttgctgctgttgtgaaggttggctacatgttacatgatcgtgttcttcgccccgctgaagttggtgtcactgaaggtggtccaactgaagaagagccaggggagtaatctagattaaacggaggttgctggctgcacgtatatctatgactactgccctttattggttggataagcatacatatcataagttatgtttttaaatagatctgtgaggcaaatcactatttatgtagcatgttcaaagaggcaatttgttcaagctagtccagaactctcctttttcttgctcggtaataaaaacgagattgtagaacatgtacatcaccgaaattgcttgccaaagacggattattgcagcctgcattaataggaatactgacaatgagcgtgccacaatcaaaggtggtctgttttgaatgataatgtttgaatgaagatgggactgccgagatgtgtgctcggnaaaaaaaaaaaaaaaaaaaaaaaaaaaaaaaaaaaaaaaaaaaaaaaaaaaaaaatttaaaaaaaaaaaaaaaaaaaaaaagggccgccgcccaccaggtaagctt

SEQ ID NO: 125252 - DNA, 512 bp, Zea mays
  Clone ID: MRT4577_45701C.1
ttttgggtatccaacatactggagttgctgttatatgccgaagcagacgtaagatggaaatatagtactgtatacaagatcaaaatatacatacatgagttgaactgaaatgtcgactgcttacagaaaggggctaaaactggtgcttaagaaatacaccagaaattgttctggttacattttacaacagggcaggataatcaacttgcgtccttcaaacaagatatatggtaggtcagtagcaagcagtgtcatacccagtagcatatcacaagggtcgttaacgcagaccgtttaccttcaacgatgggggaggaaggagtcaatagcgttctgtctctcatcttgatcttttcctccatggatagcaacaggctccacttcctttagaggaaggtgctcatggatgtagtcgacatcagccttgttttgacagaaaatgagaacaggaggtggagtcttttggaggcattcaggaggtatataattttagcatcttgctttacatattc

SEQ ID NO: 125253 - DNA, 709 bp, Zea mays
  unsure (1)..(709): unsure at all n locations
  Clone ID: MRT4577_45702C.1
gttatgagttcagaaaaaacaacaaaagcaggtaagtatgacctgtgtcaggatcctaatatcgatgactatgcggcaatagataaccataacattggcttgatgtacttacgtcgcaacctaatggaagaattgattgccgaagttgacacatttgatgagaaagttgttggatcatttgtgaggataaaaatacctggtacagggcaaaggcaagacatttatagacttgtacaaattgttgggactggaagatctgcagaaaaatataaatatgggaaaaggactactgatataactctagagatactaaacttagacaagcgggaggcagtaactattgacataatctcaaaccaagagttcactgaggaggaatgcaaacgcttgcgtcaaagcataaagtatggattcattccaaggctgactgtgggagaggttcaggagaaggcaagggttctccaaactctgaaagtcaatgactggattgaaagcgaaaagatgcgacttgngcatcttcgtgaccgcgcaagtgatatgggctatagaaaagatcttagggaatgtgtagagaagcttagattgctaagcactcctgaggagcgtgctcgtaggctgaatgaagaacttgaaatacatgctgaccctgcgatggatccatattatgaatctccggaggaacaggagcaggaaattgaaaaagtagctt

SEQ ID NO: 125254 - DNA, 322 bp, Zea mays
  Clone ID: MRT4577_45703C.1
gacaggtctgaacctaatctgaagacatgcatggtgagcaacgggagcttctttgctactaatccaagaggctagatcaagtagaatcatgtgatcatctaattggtgcatgcttggtggtgtatttaattcctgtcaaacatttgtttttgttgaactatatgtaattgggtaaattataccggaggatataatattagcagcaatgctgtagctagctaggttagtagtactggctatattaggggagatgataagaattcatgcccccaaatttcttctgtctgttgtttttccttttactgtacttatcgtacccttt

SEQ ID NO: 125255 - DNA, 2403 bp, Zea mays
  Clone ID: MRT4577_45704C.1
accctcgagccggccgggcttgtgatcgatccgaaaccttggtactcgatccgatcttctcggttcctcctccaaatccaccggcatctgcaagccctagccccaaccccgaccgcccatgtccgccatcgcggcctcctcggccgccgccgcgtcgaactccgatgaggaagaaaactatgaggagtacatcccagtcgccaagcgccgggccatggaggccgagcgcctccgccagctccgcctctccaagtcggcgccggcctctgccgtctcatcactcccgatgccacctcccccgcctcttttgccagcgcagacctccgttcccgacgccgccgcgaagcccagccttctcgtcaaggccacgcagcttaagcgcgcggccccggaggtgaccgccacggagcagcgcatccagcaggagaaggaagtgattgaaaatctctcagacaacaaatcgctcaggtcagtccgcgagatcgccaagggcatcatctacacggaaccgatccagaccgggtggaagccgcccctccgcctccgccgcatgccgctcgccaaagccaacgagttccggcgcaagtggcacatcatcgtcgacggtgacgatataccgccgcctgcgcgtgatttccgggatctccgcctcccggagcccatgctccggaagctgcgcgagaggggtatcgtccagcccacgccgattcaggtgcaggggctgcccgttgtgctctctgggcgtgacatgataggcatcgctttcacggggtcggggaagactctggtgttcgtgctgccgcttatcatggtggcgctgcaggaggaatcattgatgccgatcgtgcctggcgagggcccgtttgggatgatcatatgcccgtcgcgggaactggccaagcagacatatgatgtgattgagcagtttctcattccacttaaggaggctggttatccggagataaggcatttgctttgcattgggggtgtggatatgaggacacagctcgatgtgttgaagaagggcgtgcacattgtggtggcaacgcctggtcggctcaaggatttgcttgccaagaagaagatgaaccttgacaactgcaggtacttaaccttagatgaagcggataggctggttgacctaggatttgaagatgacatcaaggaggttttcgaccatttcaaggatcaaaggcaaactcttctcttttctgctactatgcctcagaagattcaaaattttgcgaagaacgcccttgtgaaaccagttactgtcaatgtgggaagagctggagcagcaaatctagacgtcattcaagaagtcgagtatgtaaaggaagatgctagaattatatacctccttgaatgcctccaaaagactccacctcctgttctcattttctgtgaaaacaaggctgatgtcgactacatccatgagtaccttcttctaaagggagtggaggctgttgctatccatggaggaaaagatcaagaggagagacagaacgcaattgactccttcaagactggtaggaaggatgttctagtggctactgatgttgcatcgaagggtcttgattttcctgacattcagcatgtcattaactatgacatgcccgccgaaatagagaactatgtccaccgaatcggtcgaactggtcgatgtgggaagactggcatagcaactaccttcatcaacaagaaccaaactgagaccacgcttctcgatctcaagcatctgctgaaggaggcaaagcagaggattccaccggtgttggcggagctcaacgatccattggatgatgaggaaataattgccaaggagagtggtgtcaaaggttgtgcgtattgtggtgggcttggccatcgtgtcagtgactgtccgaagttggagcaccaaaagtccatggcaattgctggctcgagaaaagactactttggcggcgggggttaccgaggagaaatatgattgctctaggttgatgcttgcgtgtggttatcaggagctaagatgctgcaatttcaggtcatacatgtcacatgtatcagctagccaaggctcctcccccatcgttgaagggagacggtttgcgttaacgaacttgtgatatgctgctgggtatgacactgcttgctactgacctaccatgtatcttgtttgaaggacgcaagttgattatcctgccctgttgtaaaatgtaaccagaacaattgctcccccatttcttaagcaccagttttagcccctttctgtaagcagtcgacatttcagttcaactcatgtatgtatattttgatcttgtatacagtactatatttccatcttacgtctgcttcggcatataagagcaactccagtagttggctaaaaaaaaaaaaaaaaataaaaactcgagctcgtgc

SEQ ID NO: 125256 - DNA, 143 bp, Zea mays
  Clone ID: MRT4577_45705C.1
ctttttcgtgaggtccaaattttattttcacacgtctcaattatacgagtggggggatccattattcatacacattactaccacacacatttctactgcctttagtaacattatattctctccccttaccaaacattctcttc

SEQ ID NO: 125257 - DNA, 644 bp, Zea mays
  Clone ID: MRT4577_45706C.1
cggcacagcgggacagtgagcatggggatgagcaggcgcaagatgactgcaagtggcgccggatcccgacgttcggcgactggaacctgcgggacgacatgcccgtcacccaatacttgcaagcagggacttcttcatcgttgtgccgccggcagagaaggacgacgacgaggatctgttcaaggtgccccagtgttcctgccaagccctacaactacaagaaggctatataaattcaagtaggaatgcaggatggggtgcattcaactcatgcaggtggcaggttaatggaagtggccaattctgtggcgtggctgagatgattggacctgtcgatttcgacagaagtgttgattactggcagcaggataagtggagtggccagttcccttgtgaagtggcacataattaaggatgtaccgaacaatcttctgcggcacatcattcttgagaacaatgacaataaacctgtcacaaatagcagggacacacagggaggttcaattaggttggcatgatgctggtacctatgacaagaacattatcgagtggcccaagtgcagtggcgctaatggtagcttgagattcaaagtcgagttgaagcatggggccaatgctgatcttgtgaatgctatgaaactgat

SEQ ID NO: 125258 - DNA, 322 bp, Zea mays
  Clone ID: MRT4577_45707C.1
cggacgcgtgggggaccttacgcgccgtgggcctattgctcttcgactatccggcccacacccattgccacccaccagcaccttcggcggtccccacccccgcctacttccctcgtgttcgcggtgtggaccccgcgtaccttgcggcgttgacgcgcgaacgtcccgtcatccggtgagtgactgggagaccgagccttaggcgggggggtggaaccggacaccctcgccgggttgcagtatattgggcgtggggcgcatgcgctctctgctgctttcgttcacgccaccacctgacgtctattcgccactgagccaggat

SEQ ID NO: 125259 - DNA, 427 bp, Zea mays
  Clone ID: MRT4577_45708C.1
acttaagaaaccgggcgcttttaccggttataccatgggggctttatgggttgcagcaatccgaacagcgggaaaaatgggtttgggcccccatgcctaaacccaaaacttttaacaggggaatcaggtaattggggggggccaaacaggtggtgacaccttttttgttctcggggcaacgtcttccaaagaaacaccacgggagtctttttgaacaaaaaggggcaaaacccccacaaagctccaaacatgtgctaaaaaattacttggatcccccaaaaccactgaaaacactggattgaagccaccaactcccggaactccagccagtaaaacaccccccatattcaaaggggcatttaataaccgggtttgggaaattggctcaaatggaaaaccaagtggtatgcccattttttggatggga

SEQ ID NO: 125260 - DNA, 612 bp, Zea mays
  Clone ID: MRT4577_45709C.1
gccggccgggtccgggcaaccacaagctaaaataaagcatgcaccagaattctttttttcccccaaactcgccgccgccgccacggcgtccgccgcgtccctcagcggcgcggcgaacgacctgctgcccaagtacggcctcccgaaggggctcatcccggactccgtcacctcctacagcttcgacgaggccacgggcgccttcgagatccacctcgccagcacctgctacgtccacttcggctcccacctcgtctactacgagaggaccataaccggcaagctctccaggggcgccatctcggacctctccggcgtccaggccaagaagctcttcctctgggtctacgtcacggggatggtcgcgcaccccgaccagggcaccatcgagttccaggccggcttcgtctcggagtcgctatcagcctccatgtttgacgaggtgcgcacctgcggttccagcgctggcgcgcagctgcgcggcgcggctggggtcatcggagagcttgggctgctccccgttgcgcaggcatgaacctcgagtttgagaatccacgctaccggagaaccgcaggagcttccagtctgctgtcgttctagagtgcaggacgt

SEQ ID NO: 125261 - DNA, 366 bp, Zea mays
  Clone ID: MRT4577_4570C.1
gccttgccgagcttgctcagtcctagctcgtatctcccgtggccgcctccagccatctccaatggcgctatgggtgccagccgcctctctactagtgggtgcacccaggccctgcatgacgagatcgccccctatggccatgaacaccaaccctactctgctactccatccccatgtcggcctatagccatgaacgccgccaaccctggagctcgcactggcactgcccttggctgtgctcggcgcctagcattagctggacctcatctcctccctccccaggcaaatgccctgccagatcaaactcgcatttgctgtagctagagctctaactgacgccatggcacccagtggtctactgctgcc

SEQ ID NO: 125262 - DNA, 174 bp, Zea mays
  Clone ID: MRT4577_45710C.1
tcgtccgcccacgtctatcctgattcaacgcacgcttctcgtgtccgactaagccccaatcccgtcaccaccgccgctggtgctcggcgcgatggcgcagaaggacgccgccaatggcaacggagccaccacgcgaccgccgaccactccctccaccatccgtttctccaagtt

SEQ ID NO: 125263 - DNA, 904 bp, Zea mays
  Clone ID: MRT4577_45711C.1
ccggccgggaatagtcagtctgccacctgccagaaggcaacacacaagctaaaataaagcaagcaccagaactcttttttccccaaactcgcaagtcgcaacggccatgtctccgctgccccgccgccgcctcgtggtcctcgtcctcctcgccgtcgcggccacggcgtccgccgcgtccctcagcggcgcggcgaacgacctgctgcccaagtacggcctcccgaaggggctcatcccggactccgtcacctcctacagcttcgacgaggccacgggcgccttcgagatccacctcgccagcacctgctacgtccacttcggctcccacctcgtctactacgagaggaccataaccggcaagctctccaggggtgccatctcggacctctccggcgtccaggccaagaagctcttcctctgggtctacgtcacggggatggtcgcgcaccccgaccagggcaccatcgagttccaggccggcttcgtctcggagtcgctatcagcctccatgtttgacgaggtgcgcacctgcggttccagcgctggcgcgcagctgcgcggcgcggctggggtcatcggagagcttgggctgctccccgttgcgcaggcatgaacctcgagtttgagaatccacgctaccagagaaccgcaagagcttccagtctgctgtcgttctagagtgcaggacgttcagctgtggggtgtgttcgagtatctggttgttgcttcccggtctcaatggacatggatgctctgtagaaatgtatatcccatacgctgttgctgaacctgcgtaggatgtaggcaggctggctctcttctctcttgttttcctggatcatcgtatattcatgtcatcatcatgtgtgcaaccaaaaaaaaaaaaaaaaaaggggcggcc

SEQ ID NO: 125264 - DNA, 343 bp, Zea mays
  unsure (1)..(343): unsure at all n locations
  Clone ID: MRT4577_45712C.1
tcagcttgtggttcgtcgacagtacaggctngctgcaggatgaccatgctgcatcagcctcctcctgtgtcccgccctgtggacgtccgccctgccgggtgcctgaagaggcgcccgcctggtggtaacttcaactgcccgatatggcggtgctgctctcccttttgcctttctcgttccaggcgctcggggtgtgctttctgnccctttggntgtgacccgcgttgctggcctgctgttccctggcgtgcgtgcntttccgctgtcttgctgcgtgcactgttggctgctccttctccggcttggtgttctgattgggctgatccgncggctgctctttctg

SEQ ID NO: 125265 - DNA, 1368 bp, Zea mays
  Clone ID: MRT4577_45713C.1
catcgaggccggccgggatggaatagtcagtcttccacggcgccggcgggaacacacaagctaaaataaagcaagcaccagaactcttttttccccaaactcgcaagtcgcaacggccatgtctccgctgccccgccgcctcgtggtcctcgtcctcctcgccgccgccgtcgcggccacggcgtccgccgcgtccctcagcggcgcggcgaacgacctgctgcccaagtacggcctcccgaaggggctcatcccggactccgtcacctcctacagcttcgacgaggccacgggcgccttcgagatccacctcgccagcacctgctacgtccacttcggctcccacctcgtctactacgagaggaccataaccggcaagctctccaggggcgccatctcggacctctccggcgtccaggccaagaagctcttcctctgggtctacgtcacggggatggtcgcgcaccccgaccagggcaccatcgagttccaggccggcttcgtctcggagtcgctatcagcctccatgtttgacgaggtgcgcacctgcggttccagcgctggcgcgcagctgcgcggcgcggctggggtcatcggagagcttgggctgctccccgttgcgcaggcatgaacctcgagtttgagaatccacgctaccagagaaccgcaagagcttccagtctgctgtcgttctagagtgcaggacgttcagctgtggggtgtgttcgagtatctggttgttgcttcccggtctcaatggacatggatgctctgtagaaatgtatatcccatacgctgttgctgaacctgcgtaggatgtaggcaggctggctctcttctctcttgttttcctggatcatcgtatattcatgtcatcatcatgtgtgcaaccatgaactgcccccagaggcgtagcagcacgaattcgactagcatgcgttttgttttgtcgagactgaaggcacacgtacgctggtagagatagtgactgcgagggaaacgatgtattacaaagtcaaaacaatgacaaatgggttatagcataaatattattaaaaaatgggaatggtattctataagactaacttcagcaataaactgtatatagttttgaactctaaatataacgtttataggcttctttttcgtatccagcagtactaaaaggaactctaaagtagagatctaaagtagaggagcagtaaagtgtctgctatctgtggagtgcactgttagcagcagtacggaaccatcagtacggaaccatctagaaccaagcaaaagcagcagtacaaatattgtttacttattgtttggtaagagaatacaatattttttatagttggtaaaaaaaaaaaaaaaaaaaaa

SEQ ID NO: 125266 - DNA, 462 bp, Zea mays
  Clone ID: MRT4577_45714C.1
caaaaccaaaaaaaaaacaaacgcggggggaaagaaaaggagcagaagaaaaacacaccccacagccgaccgacaccggagaccacaaaagaaggactaccctaagggacaaccccacggacaaaacgcggaaaagcaccagggccaacaggccgacaacgaaagcctccgggcacaggcgaccagcccaacagagaagctgcaaggcaaggagacacccatgccggcaaccaacgctgaccaagaggacgaccagccaaacgaacacaccacaggcactgagaaacagccggcgcagcagcacaaggacgacctgcacagcaacagcgggcgcacaggacacggcgcccagaccacggaggaagaggacggaggcgcgggcaagcgacgagggctggaacttagaaccacccgacgccaagaaagcggaggggacaccaaccaaggagccgaggaggcgca

SEQ ID NO: 125267 - DNA, 1230 bp, Zea mays
  unsure (1)..(1230): unsure at all n locations
  Clone ID: MRT4577_45715C.1
cattgggtacctcgaggccggccgggatatagtttgtctgccacatcccaaaacgcaacacacaagctaaaataaagcaagcaccagaactcttttttccccaaactcgcaagtcgcaacggccatgtctccgctgccccgccgccgcctcgtggtcctcgtcctcctcgccgccgccgtcgcggccacggcgtccgccgcgtccctcagcggcgcggcgaacgacctgctgcccaagtacggcctcccgaaggggctcatcccggactccgtcacctcctacagcttcgacgaggccacgggcgccttcgagatccacctcgccagcacctgctacgtccacttcggctcccacctcgtctactacgagaggaccataaccggcaagctctccaggggcgccatctcggacctctccggcgtccaggccaagaagctcttcctctgggtctacgtcacggggatggtcgcgcaccccgaccagggcaccatcgagttccaggccggcttcgtctcggagtcgctatcagcctccatgtttgacgaggtgcgcacctgcggttccagcgctggcgcgcagctgcgcggcgcggctggggtcatcggagagcttgggctgctccccgttgcgcaggcatgaacctcgagtttgagaatccacgctaccggagaaacgcaggagcttcctgtctgctgtcgcctcgagccctagagtgcaggacgttcagctgtggggtgtgttccagtatctggttgttgcttcccggtctcaatggacatggatgctctgtagaaatgtatatcccatatgctgttgctgaacctgcgtaggatgtaggcagggtctcttctctcttgttttcctggatcatcgtatattcatgtcatcatcatgtgtggaaccatgaattgcccccagaggcgtagcggcacgaattcgactaaaaaaaaaaaaaaaaaaaaaaaaaaaaaaaaaaaaaaaaaaaaaaaaaaaaaaaaaaaaaaaaaaaaaaaaaaaaaaaaaaaaaaaaaaaaaaaaaaaaaaaaaaaaaaaaaaaaaagggggggccgnttttagaggaccaaagtttacttacccgtgcttgcaacgtaaaaccttttttttgggggcccctaaattaaattaattggccgggtttttacaacgtggggcctggaaaaaccctggggttccccaactaaatcgctttgaaaaaaatcccttttttc

SEQ ID NO: 125268 - DNA, 961 bp, Zea mays
  Clone ID: MRT4577_45716C.1
attgggtacctcgaggccggccgggactatataatagtcggtcggccccggcccgggagggacacacaagctaaaataaagcaagcaccagaattctttttttcccccaaactcgcaagtcgcaacggccatgtctccgctgccccgccgcctcgtggtcctcgtcctcctcgccgccgccgccgccgccacggcgtccgccgcgtccctcagcggcgcggcgaacgacctgctgcccaagtacggcctcccgaaggggctcatcccggactccgtcacctcctacagcttcgacgaggccacgggcgccttcgagatccacctcgccagcacctgctacgtccacttcggctcccacctcgtctactacgagaggaccataaccggcaagctctccaggggcgccatctcggacctctccggcgtccaggccaagaagctcttcctctgggtctacgtcacggggatggtcgcgcaccccgaccagggcaccatcgagttccaggccggcttcgtctcggagtcgctatcagcctccatgtttgacgaggtgcgcacctgcggttccagcgctggcgcgcagctgcgcggcgcggctggggtcatcggagagcttgggctgctccccgttgcgcaggcatgaacctcgagtttgagaatccacgctaccggagaaccgcaggagcttccagtctgctgtcgttctagagtgcaggacgttcagctgtggggtgttccagtatctggttgttgcttcccggtctcaatggacatggatgctctgtagaaatgtatatcccatacgctgttgctgaacctgcgtaggatgtaggcaggctctctcttctctcttgttttcctggatcatcgtatattcatgtcatcatcatgtgtggaaccaaaaaaaaaaaaaaaaaaagcggacgctgggcggacgctgggcggacgctgggcggacgct

SEQ ID NO: 125269 - DNA, 513 bp, Zea mays
  Clone ID: MRT4577_45717C.1
ggcgattgggaccctcgaggccggccgggatcgctctattcaggccgcccgccagcgatagttcgaatgccactactagtcgacaactgaagccaagggaaagtgacgactaaactaaatatggcggcgattctcgcgggtgtcggcgtcatcgccactgtcggcaaaggtttctcgggccgccgctggtgcaatgatatcgtcgtttggaagaacactaaaacggcggatggtgtgccacatgacgtggcgctgaaacggtcgcattggtacggcaagacctcgctgtcgcgtctggttggaacgctcatcgcgatgaagcctgtctacgcggtattgtagctctgctcccgcgaggtcatcatcatgaggcagaagaactccaacatcccgtggaggcagatgacgaatgagctgctgcatcttcacgtgtacgaggtgttacagagaatcgagatccatacctcgagactctgactactatctcatcccgtattatgtctacgacgaagg

SEQ ID NO: 125270 - DNA, 919 bp, Zea mays
  Clone ID: MRT4577_45718C.1
atatagtcagtctgccacatcccaaaacgcaacacacaagctaaaataaagcaagcaccagaactcttttttcccccaaactcgcaagtcgcaacggccatgtctccgctgccccgccgccgcctcgtggtcctcgtcctcctcgccgtcgcggccacggcgtccgccgcgtccctcagcggcgcggcgaacgacctgctgcccaagtacggcctcccgaaggggctcatcccggactcggtcacctcctacagcttcgacgaggccacgggcgccttcgagatccacctcgccagcacctgctacgtccacttcggctcccacctcgtctactacgagaggaccataaccggcaagctctccaggggcgccatctcggacctctccggcgtccaggccaagaagctcttcctctgggtctacgtcacggggatggtcgcccaccccgaccagggcaccatcgagttccaggccggcttcgtctcggagtcgctatcagcctccatgtttgacgaggtgcgcacctgcggttccagcgctggcgcgcagctgcgcggcgcggctggggtcatcggagagcttgggctgctccccgttgcgcaggcatgaacctcgagtttgagaatccacgctaccggagaaccgcaggagcttccagtctgctgtcgttctagagtgcaggacgttcagctgtggggtgttccagtatctggttgttgcttcccggtctcaatggacatggatgctctgtagaaatgtatatcccatacgctgttgctgaacctgcgtaggatgtaggcaggctctcttctctcttgttttcctggatcatcgtatattcatgtcatcatcatgtgtggaaccatgaactgcccccagaggcgtggcggcacgaattccactagcatgcgttttgttt

SEQ ID NO: 125271 - DNA, 362 bp, Zea mays
  unsure (1)..(362): unsure at all n locations
  Clone ID: MRT4577_45719C.1
tttgggctgatttatgtgcttgggtgttcttatcgtgnnnnttctatctctcttcctagtctagggcttggtggtgaagggaaggtaagacgcatattgtgaggaagaagacttagaaggagaagggttccgagtttcttgagcctgaggatcttgccgtttaggtccctcccgactcggagaatgggaattaggagtctaacagtgattctaaggattcgcatactaataacgtcacttagacggacgccattgggagtaggaaggtcgccgctacttatgctttacattgntcgtgtaaggttcctaggaagacttacgctagatcctgtaaggaattcggagaagaaacctaatggtaa

SEQ ID NO: 125272 - DNA, 438 bp, Zea mays
  Clone ID: MRT4577_4571C.1
ggggggcccaccaaaaaatttttggggggggaaaaaaacacctatccattttcagaacagaggaacagaccaaacacagattgattcgacggccctgcctggggggaaaaaaaccccgaccggggagcaaaccttgaggaaatcggcgatcttgggggagaaaaagggggggaaactccgggagggggccacgggcgggaaaaaaaaaaaatcgggggcaaaaaccctgggcccgagggacctttgggactccaaaaaaggctccacccactcccccggtataaatcgggcggcccaactgtacaaggaaaaatgggggcaaggaggctgctgttttaaaacacccaaaaaacctgacaaccgcttggttcattagggacctaaaaaaaaactcgaaaaattccccaaaggtgacaaaaaaaaaattcaccccatgaa

SEQ ID NO: 125273 - DNA, 387 bp, Zea mays
  unsure (1)..(387): unsure at all n locations
  Clone ID: MRT4577_45720C.1
ccacccccacncccccgcttttcagagaacnagcggaccaggcaaagccgagccgcaccgcaaccgcgaagagcgggcgnggcccccnnnncccagcncgncacggggccgcncgngcccnacacncccggnccgcccaaccaanaanccagccanccagccanccaccaccaccccgcngcggcgangggcgggggggggagccncncgggnnncaacccgccggncgggggggcggcggnggcggcgacggccaagaagcagcagcagcagcagcagcggngccgggngacggcggaccagcaaaggccggagcccggcagaaagggagcnccccaggacaaggaggaggaccncgaggccgaaangcgagagaccgagcgcggc

SEQ ID NO: 125274 - DNA, 208 bp, Zea mays
  Clone ID: MRT4577_45721C.1
gagactttccacttcaaacgccacgagcacctaacccgtctgggatgaggcctccaggaccatttatgaggcctggatctatgggtctcccaagattttacccagcagggagagcacgtggaattccacacagatttgctggacatgaatcttatcagaacatggggccacagagcatgaatgttcaggtaactcaacacagaactga

SEQ ID NO: 125275 - DNA, 298 bp, Zea mays
  Clone ID: MRT4577_45722C.1
tcgattctggtcgagcgcttagcctcacagctggccgatcagctcagctacgagctggccacagagcgcagctcgtgccagaagaatgagagtgcccggctgctgctcgagcggcagaacaaggagctccggagctagctccacgagatggagtgggccgtcaagtccaagttcaaatccaccatcgcggcgctggaggccatgattgcactgctagaggagctcagggccaagagggagcaggaggtgacggtgctgaagaaggccctggatgaagagacgcgtgcccatgatgctc

SEQ ID NO: 125276 - DNA, 652 bp, Zea mays
  Clone ID: MRT4577_45723C.1
aaaaaaacatgcttgcgggagttttttgatttaaacaaaaatgcagaatccattttatggtaaaggcagtaccttaacaaacttacagaactaccactaaacgggtttttttgcctcagcaatacaagaaaccaactttttttttttaccaaaaaataaaaaaacccctggacttgaattaaaaaataggaaagggcaccttttgaccaacgcttcccaggacaaccccctttgatgccttggcctattgaccacgggctgggctggttgacgtttggaatttttttcatttaccataatttggggagacctccctttggcataggggaacaaaagcaaaatcggtccaacattggtggcaaattcactaaactcaacctgaagcgggctttttggggacgaattttttttgacgagggttaaacaacggtggctcagggccaccctggttggtgcctaaaaaaacaagggcaaatacaattggatccttggatataaaccaccttgaatcttggtgggccatataaacctccacgggccttttggatgggctgagcaatccatctgagtactggggatcaacttcctcgccaagccatgctcgccttggtgcctcaccaatctgaatattcaacaggcttggtggtgggct

SEQ ID NO: 125277 - DNA, 334 bp, Zea mays
  unsure (1)..(334): unsure at all n locations
  Clone ID: MRT4577_45724C.1
ttccttctacattnctttagaaaggagactgatttatgttataatcttatnngctcccaaacagacactcaatacataaataaatgacaaattaagcttacaggaacagtatatatgtctatctatatgaatctaattggcgtattgtgcaccgccattgtcttgtcactcatagacccttgaacataactgtgtccgtaggatgaatcaaacaacgaatacaagtctgtagaaaagaacacggctctacattaaacaacctagcaatccaagctggactcgttatatatacagcaaccgatggtcccttgacagacgatcctgagtgagttct

SEQ ID NO: 125278 - DNA, 303 bp, Zea mays
  Clone ID: MRT4577_45725C.1
aattaaaacctatagtactagtagtagcaaaagagcatagaacgaatgaagcagagaatagtgcagcatgcagtatcgatcggggtctgctccgccggcggccggttggcatacaggtcttctccagttctccttctcaagttaaaatggcaccttggctggtgcgtcagcaggattctccttcttcgtccaagagcagcatcacgcggtagcggcactcatggctgcagaaggccatctcccccctgtacatgaagatgtcgttgccctggcccaggtccttgctgcagccatggcaccacc

SEQ ID NO: 125279 - DNA, 851 bp, Zea mays
  Clone ID: MRT4577_45726C.1
ccctcgaggccggccgggccgggatcaagcccaggagaagcaatcaagcaaacgtagtcgttcgtacagtttgtgaaccatctccattctccaagatcgagctagctagctaggttgtgttggaaggagaagaagaagacctgcacgggccagatggtgaggttgaggacgatggctctcctccttgttgcagtgaccgctgctgcggtggccggccttgccgctgccaatttccgggacgactgcgacatcccgtgggagccccagaacgccaggtttacgagcgacggcaacggcctctccatggcgctggtcagcaattcctcaggttgcatgctgaggacaaagaagcagtacgtctatgggaccgtgtcaacactcatccagctcgtcccaggcaactcggccggcactgtcaccacgtactacgcatcctctgttggagacaaccatgatgagatcgacttcgagttcctgggcaacgtgagcgggcaaccatacaccttccacaccaacatctacgccaatggcgtgggcaacaaggagattcagttcaagccctggttcgaccccaccaccggctaccacaattacaccatctcctggagcccctgcatgatcgtgtggtacgttgacagcgtccccatccgcgtgttccgcaactaccagcagagctacggcgtggcgtacccgacgagccgccccatgcacgcatactccagcatctgggcggcggaggactgggccacgcagggcggccgcgtcaagaccgactggtccaaggcgcccttcgtcgcaactaccggacatcacctcgacatctgcgactgccccggcggctacgcctgcag

SEQ ID NO: 125280 - DNA, 317 bp, Zea mays
  Clone ID: MRT4577_45727C.1
ccgattcggcggcgctctgggacgtgatggacttgggcggccagtgcggcgtccccggcgagactacagtaggacggacggcctagctgcccaaccccattatgaaccacggtggactactgcatgttccgcttatgcgtgggcgactgggagcacgactggcgcgtagatgcacacgacaaacgactttatggagcactagctttccacagttgaccgcaagcaccagccgtggctcattttgcccacgcaccgcgagctgtgctactcctccaacgcctggtacaccggcgaggggtccttcctgactgcaccca

SEQ ID NO: 125281 - DNA, 538 bp, Zea mays
  unsure (1)..(538): unsure at all n locations
  Clone ID: MRT4577_45728C.1
gcgtcacttacagcttcttaaatcttaataccagaggggggaaaaaaggcagggaaatattgaaacacgaaacaaggagagctaggcaatggaaatataaacacaattattccagggatcgggacgagaaagtaccgtagtacctaacaacaggaactaaggaataattctaagggtacccttagcaaggagaagaacattgtatattattctcgggaccatgtacggcctctcaatttcccacagttacgcgcgtcacacaccacaaacctttgcgcgcgctccatgtcattctccatgtctccgcggcgcgcgcggcgcacagantcgcagacaaaacatgcaacagacgtatgttagtggtgcgaggggctcaacagcgagcttgctcgccggcccggccgcctcgccntgtctgtgaggcgtgcttgttcgctttcgtcgtctgcgtcccttctggacgcccacaatggcgcccaggcttgcannactggagcagcggcagtgcgaaacaggtgaacggcgcttcaactccatt

SEQ ID NO: 125282 - DNA, 474 bp, Zea mays
  Clone ID: MRT4577_45729C.1
ctcgaggccggccgggccgggtactgccttcgtgggctgtgcgttgaatgtcaccatagtatcaactcgagatactgagaacgctcgattttacggaggtcctgtcaaggcatctgatatccttctaggatcaatggcgaagccgcccgcagcctctcctctgtacaaagctctgtcagaattgttcgacaagattgggaaataatcctctttcttgcataccttgcctcaccttgtaaatacattcgaatttgcgtagtgaattggttggaagcaattgcataactgtacagtaaggccattcttcgacacatgagaaggctccctgccttcaccagtgtttagtggataccagcaacaaaaccactttgtacatactctacattggattgacagtcgtatcaagatgtgaaaaaaggtctgacgaatatgattattgattcgaaaaaaaaaaaaaaaaaggcccctagggcc

SEQ ID NO: 125283 - DNA, 381 bp, Zea mays
  Clone ID: MRT4577_4572C.1
tagtagctcggaatcggtcgagtactaagtttaacattcagggccttgtcatcattgggggctttgaggcgtacacagggggcctggacactgatgcacggcaggacgcagtttgatgtgctctgcatcccatttctggtcattcctgctacaggctccaacaatgtccctggctcagacttcagcgttggggctgacacagcactcaatactatctgcaccatctgtgcccgcatcaagcagtcagcagctggcaccaagcgtcgggtgtttatcattgagactatgggtggctactgtggctacctggctaccatggctggactggcagctggggccgatgctgcctacatttttgaggagccttcaccattcgagact

SEQ ID NO: 125284 - DNA, 285 bp, Zea mays
  unsure (1)..(285): unsure at all n locations
  Clone ID: MRT4577_45730C.1
ttgccgccagccagcccattaaccctcgntcctgtcgcgcagccccgacctggaggtgcgggtcttgcccggcggcggcgcggtcagttgaaccatggcggactccaaggccacctcggcggtcaccctccgcacccgcaagttcatgaccaaccgcctcctggcccgcaagcaattcgtgcttgaggtgatccaccccggccgcgccagcgggtgcaaggcggtgttgaaggagaggcttgccttggcgtgcgaggtgaaggaccccgtcaccatctttggctt

SEQ ID NO: 125285 - DNA, 321 bp, Zea mays
  Clone ID: MRT4577_45731C.1
aaaaaaaaaaaaaagaaaaaaaaaaaaaaacaagcgaaacataatataaaaatagaaaggggcagaggggacacgggcgcttgccatcggcgccctactcgacgacgctgtcctactcctcctcggcgtcggggacgcgggcacccacagggtagactggtgcgttaacgcggtcagctagtccaaggaccagaggctctgggccggctacatggttgggttcaacaacaacgcgtccacccacaactgttgtgtatgcgtactccggcgggtacaacggctgtcccatatccggtacgcttgacgcatccgggagtgaca

SEQ ID NO: 125286 - DNA, 901 bp, Zea mays
  Clone ID: MRT4577_45732C.1
ttgcgctatttatcaccaatttgttttggaggatgatagctatgatgccgaggtcgaaagagctttcttggatgggatggctaaggtcatggttgacaggaaagcacaatttgtagacaagaagctggagttcttgaaaagtgttgggtatggtgagaatgagataaccaccaaggtaattccagtcattaacagcaccaaggatttgctgttggagcggtttgactacctcctggaaagaggagtggagtataagatactatgtcggatcttgcgcgtttttccgaaggtgctgaaccagagtaaggatatgcttaatgagaagttgaactacctcacagaggagctgggctactccttggagtacctgggctgcttccctgcatttctgtgctttgatttggagaacagggtcaaacctaggtatacaatgctttggtggctccaagagcatggcttgcttagaaaaaaattagcccctgcaacagtgcttgctaactcagagaagaggttcattagtaccctttaccttgtgcatcctgcagttccaaagttgtggcttgagtgtttttcttcaaggatacatatggactattatctcaagaacatcaatcagcatccagacaacatataagaattatattgacattgttaatggtacatggtatttgccatgtgcatccttttctctgttgaggtgtatttgttagatgtagcagctttatattggcatttttttttgctcctgcatacttatcagtaggtcgcaggatgtagcatgaaagggatacaccaatcagacagcaaaccttgtaagttgattgtggtaaagctgtgctgcaaatttgaactctgtttcagttcaaaaaaaaaaaaaaaaaaaaaaaaaaaaaaagccggc

SEQ ID NO: 125287 - DNA, 679 bp, Zea mays
  Clone ID: MRT4577_45733C.1
acggggggaaagtcgataatggaatcaaatacgcagtatttgcagaaaagagtcttcgtttattgggaaagaatcaatatacttttaatgtcgaatcgggattcactaagacagaaataaagcattgggtcgaactcttctttggtgttaaggtagtagctgtgaatagccatcgactacccggaaagggtagaagaatgggacctattctgggacatacaatgcattacagacgtatgatcattacccttcaactgggtattctattccacttctactttttaaattaaagggtattctgaaagaggtatttcttgtattttcacaatagctttcttttgaatccaatttcgagttcgattagaaggatagaaaggcgatgagaatgggaaaagaaaaataaaatattttattttaatgagttccccttttgagttccccttttttgcaattttcttattatcaattccattcatttattttatagaatacttttttattctatatctataaaaaatctttattttgtaaactaaaaaatacaatagtcaatattccttataatagatatacttaattatatcataagaatcttaagatatatttcgaatagatagaaatagtaaatttgaattgagacacatattctatgacagattttaacttaccctctattgtc

SEQ ID NO: 125288 - DNA, 197 bp, Zea mays
  Clone ID: MRT4577_45734C.1
tttcctcggctcaaaccctcaccaagccttcgattttttctctgaacccatgcctaactaaaaacctgattatttcatgcatccccatctccacaatggattcaatctcacagataataatctcaccttcaatattactcatgagcttcatatatgtcttaacaattattatccctatactgccactctatacccta

SEQ ID NO: 125289 - DNA, 412 bp, Zea mays
  Clone ID: MRT4577_45735C.1
acaccctagactgagtcgaagtaacgtcccagctgatgaccctggtgaacaacatctccatcaggatctccaaccgggagttccggccggggcactgcacgcactacttgaagcactcggggctgctcatgaacgtgttcagcaacgcgttcaacccggacatgagcccccgccggtacgcgcacgtcgacgtcgacttccgcaactcggagcgggactggtaccagttcaagtggcagaccacgtcgccgccgtggtccaagctgtgcgccatgccggggcgcgtgacgcgcgaggtgtacggccagatgaccgtcgcgacgagcgtcaacaaggggatctactacttcatccagttcctggagcagctgcacgactgatccatcgtgagatagatcatcaagttcaacag

SEQ ID NO: 125290 - DNA, 430 bp, Zea mays
  Clone ID: MRT4577_45736C.1
ccccgctttataggccgccgcccgcgccacatcgccaccgtctcgcaccgtcgcggccacccattctctctcgttcatcgacatgaatgccagggttggaaggaacgtctccataacaaacaaagagggcgtccaagaagccgaccggccggacgaaggatactacatccggtctgggatcgtggtagtcctgaagaacgcaaccatcaaggacggcaccgtcatatagagactaactttggccttacgcatggcgtgcaaggttacaggttagtcatcgtcttgagagttgagacttagtttgaggcgcgcgcccgaccttgacttgagccgtcggagggacaagaacatgaggaagaagggctggtggtgccggatgttgccatggacgacgagaaatggtttggtgcggtcgcatcggttccagtag

SEQ ID NO: 125291 - DNA, 285 bp, Zea mays
  Clone ID: MRT4577_45737C.1
ctatgacggcgcagcgcacgcgtgcgtaggctcgtgataccgctggcagcgcccgccctttttttttttttttttagaaagtccgaatataggtcaggtgactgatagacgaaatccgatcagggcatatgcaacaacagacggcgcgaccgattgacgagccataaaacgcgccgaggggttactgcaaaatccttttagaagcggagggggccccccatgaatagtccgaggaggggcctaaaatacatacgcccgggcctggtgatgttcgaaagcatccaa

SEQ ID NO: 125292 - DNA, 2240 bp, Zea mays
  Clone ID: MRT4577_45738C.1
ccgggaacggcctcgccccgctttataggccgccgcccgcgccacatcgccaccgtctcgcaccgtcgcggccacccattctctctcgtccatcgcatcgctccggctcccagcgcaatcgatccatccgtccctaggtgtgcttcagctatgcagttcagcagcgtgcttcccctagagggaaaagcgtgtatgagcccagtgaggagaggcagtggaggttatgggagtgagaggatgaggatcaactgctgcagcatcaggcgcaacaaggcactgaggaggatgtgtttcagtgcaaggggtgctgtgagcagcacgcagtgtgtgctcacatcagatgctggcccagacactcttgtcgtccgaacatcctttcggaggaattatgctgatcctaatgaagtcgctgccgtcattttgggtggtggtaccgggactcagcttttccctctcacaagcacaagggccacccctgctgttcctattggaggatgttacaggcttattgatatccccatgagcaactgtttcaacagtggcataaacaagatatttgttatgactcagttcaactcagcttctcttaaccgtcacattcatcgtacctatcttggtggggggatcaacttcactgatggatctgttgaggtgctggctgcaacacaaatgcctggggaggctgctggttggttccagggcacagcagacgccgttagaaaatttatctgggtacttgaggagatcaactctatcgtatggattacatggagcttgtgcagaaacatgtcgatgacaatgcagacataactttatcatgcgctcctgttggagagagtcgagcatctgactatggattagttaagttcgatagttcaggccgtgtaattcagttctctgagaaaccaaagggtgctgccttggaagaaatgaaagtggataccagcttcctcaatttcgccattgattccccagctgaatatccctatatcgcttcaatgggagtttacgtttttaagagagatgttttgttagaccttctaaagtcacggtatgctgaactgcatgactttggttctgaaattctgcccaaggctttgcatgagcacaatgtacaggcatatgttttcactgactactgggaggacattggaacaatcagatctttctttgatgcaaacatggccctctgcgagcagcctccaaagttcgagttttacgatccgaaagcaccattcttcacttcccctcggtacttgccaccaacgaagtcggataagtgcaggattaaagacgcgatcatttcacacggctgcttcttgcgtgagtgtgccatcgagcactctattgttggtgttcgctcacgcctaaactctggatgcgagctcaagaataccatgatgatgggtgcggatttgtatgagaccgaagacgagatctcaaggctactggcagagggcaaggtgcccattggcgtaggggagaacacgaagataagcaactgcatcatcgacatgaatgccagggttggaaggaacgtctccataacaaacaaagagggcgtccaagaagccgaccggccggacgaaggatactacatccggtctgggatcgtggtagtcctgaagaacgcaaccatcaaggacggcaccgtcatatagagactaactttggccttacgcatggcgtgcaaggttacaggttagtcatcgtcttgagagttgagacttagtttgaggcgcgcgcccgaccttgacttgagccgtcggagggacaagaacatgaggaagaagggctggtggtgccggatgttgccatggacgacgagaaatggtttggtgcggtcgcatcggttccagtagctagctcttccgatgttattaatatatgtatctagtggagtagtgcgaacagtgcaataagctgggcgagcaaagccgcggcaactcttggcttggggattgttggtgcatcttgtaaataataaactcggacgcagccagaagggctggtggtgccggatgttgccatggaccacgagaaatggtttggtgcggtcgcatcggttccagtagctagctcttccgatgttattaatatatgtatctagtggagtagtgcgaacagtgcaataagctgggcgagcaaaaccgcggcaactcttggcttggggattgttggtgcatcttgttaataataaactcggacgcaccaaatgaaacatgcccccccccttcttc

SEQ ID NO: 125293 - DNA, 2523 bp, Zea mays
  unsure (1)..(2523): unsure at all n locations
  Clone ID: MRT4577_45739C.1
gggaggcgcgccgcggcacggcgcggccggcacacgcggcgtagtagcgccaagcgaggccgcggccacgccttctccaccgttcgtccgtccattcccattctcatttccatttgcctcgctcgccttcctcccccgcactccactccattccaacgcaacggcctcgccccgctttataggccgccgcccgcgccacatcgcgggggtctcgcaccgtcgcggccacccattctctctcgtccatcgcatcgctccggctcccagcgcaatcgatccatccgtccctaggtgtgcttcagctatgcagttcagcagcgtgcttcccctagagggaaaagcgtgtatgagcccagtgaggagaggcagtggaggttatgggagtgagaggatgaggatcaactgctgcagcatcaggcgcaacaaggcactgaggaggatgtgtttcagtgcaaggggtgctgtgagcagcacccagtgtgtgctcacatcagatgctggcccagacactcttgtcgtccgaacatcctttcggaggaattatgctgatcctaacgaagtcgctgccgtcattttgggtggtggtaccgggactcagcttttccctctcacaagcacaagggccacccctgctgttcctattggaggatgttacaggcttattgatatccccatgagcaactgtttcaacagtggcataaacaagatatttgttatgactcagttcaactcagcttctcttaaccgtcacattcatcgtacctatcttggtggggggatcaacttcactgatggatctgttgaggtgctggctgcaacacaaatgcctggggaggctgctggttggttccagggcacagcagacgccgttagaaaatttatctgggtacttgaggattattacaagcataaagctatagaacacattttgattttgtcaggagatcaactctatcgtatggattacatggagcttgtgcagaaacatgtcgatgacaatgcagacataactttatcatgcgctcctgttggagagagtcgagcatctgactatggattagttaagttcgatagttcaggccgtgtaattcagttctctgagaaaccaaagggtgctgccttggaagaaatgaaagtggataccagcttcctcaatttcgccattgattccccagctgaatatccctatatcgcttcaatgggagtttacgtttttaagagagatgttttgttagaccttctaaagtcacggtatgctgaactgcatgactttggttctgaaattctgcccaaggctttgcatgagcacaatgtacaggcatatgttttcactgactactgggaggacattggaacaatcagatctttctttgatgcaaacatggccctctgcgagcagcctccaaagttcgagttttacgatccgaaaacaccattcttcacttcccctcggtacttgccaccaacgaagtcggataagtgcaggattaaagacgcgatcatttcacacggctgcttcttgcgtgagtgtgccatcgagcactctattgttggtgttcgctcacgcctaaactctggatgcgagctcaagaataccatgatgatgggtgcggatttgtatgagaccgaagacgagatctcaaggctactggcagagggcaaggtgcccattggcgtaggggagaacacgaagataagcaactgcatcatcgacatgaatgccagggttggaaggaacgtctccataacaaacaaagagggcgtccaagaagccgaccggccggacgaaggatactacatccggtctgggatcgtggtagtcctgaagaacgcaaccatcaaggacggcaccgtcatatagagactaactttggccttacgcatggcgtgcaaggttacaggttagtcatcgtcttgagagttgagacttagtttgaggcgcgcgcccgaccttgacttgagccgtcggagggacaagaacatgaggaagaagaagggctggtggtgccggatgttgccatggacgacgagaaatggtttggtgcggtcgcatcggttccagtagctagctcttccgatgttattaatatatgtatctagtggagtagtgcgaacagtgcaataagctgggcgagcaaagccgcggcaactcttggcttggggattgttggtgcatcttgtaaataataaactcggacgcagcaaatgaaacatgcccctcatcttcttccaaaaaaaaaaaaaaagctaaagacgccgtcacagcgtttggtgcggtcgcatcggttccagtagctagctcttccgatgttattcatatatggatctagtggagtagtgcgaacagtgcaataagctgggcgagcaaagccgcggcaactcttggcttggggattgttggtgcatcttgtaaataataaactcggacgcagcaaatgaaacatgcccctcatcttcttccaaaaaaaaaanaaaaaaaaaaaaaaaaaaaaaaaaaaaaaaaaaaaaaaccccccaacaaac

SEQ ID NO: 125294 - DNA, 585 bp, Zea mays
  Clone ID: MRT4577_45740C.1
cattgggaccctcgaggccggccgggatatttccccaccccgcgtatttcgcagcgccgtaatatacgcgagaggaccggacgaggtgacccaccgcgacatcgaaacctatgtagtccaccaaccccgaataatacccgcactcccaatgtggctcttcttgctaatagcgctacctaccatgtcgatgtaggatatccccgatgttaagaaacacctcgccgattcccaagaatcaacaattgcaggagcctacttttccaagaccttagcggtcaatgataacaatggcatccacgagatctgcaacactaaccgccctcttctatctaccctacctcgcctccaatgatctataacagcgcaactgttgacatttatccctacttgatcagaacttaggactccttcacaccgggcaagaaatgctgacagagaactgcattttccggtaatcagaaatatcatgacctctactggctgaatacacgactgatctgcaagatgcccattccgagacgccaaaagtgagataatcttatgatcaagagacatgattccttcatcttgtggacatctgttcaa

SEQ ID NO: 125295 - DNA, 1147 bp, Zea mays
  Clone ID: MRT4577_45741C.1
gcgcgtcattctcctcccctccttcccccggcaaaaaccccgcgtcggccactctccggaggcgactagggtttcagcccctgggacacgccgccggtcgtggcacctccgccaccggatcccggtacccgagctacgccatcgccgccccgcccccggtcaccgccggtgcgcttccgccgacaccagacgcagctcgtccgccccgtcacgtgcacctctgcgtgggcgcgggattggatagggtttggggtttcggcggctggcgccaaatcccaccgctgctgctcgcgcaggaggtctcgagccctcggggttcccctactccgctccggctggagttctcgatgaaacttgttctacagtgttcttctgttgcatgactcaatctacagttgctgaaaagaaagtatctgatctcatcacgtcttcttccaagaagcagagtggtgtcacttccaagaagcataaggaggaaggaagctgctagtttcatgtgatacaactgatgctggaaatgatgcacctcaggcccagctgatggtgttgcagatgatcgtcccaacgattccatattctctccaacataccatcatcaggtgtgaataacctatcaggcttagaagaacaaacaacacatgttcatgaaggaagctagtctggttcaattgcatcactcatgatgggtaaatgaactctcactaaggcaatcacgatttacctgatttatctatggtggtccccaagtttcgtcctggtctgcttccaaagcagacccggagttgtcctacgatgactcttgtacttgatcttgatgagagcacacaatatatgttcgatgccgcccctatctcaaggaattcttggatagggttgccagcgtgtttgagacaattattttcactgctagtcaaagcatttatgcggagcaacttctcaatgttcttgatcccaaaagaaagttgttccgtcatcgtgtttatcgtgaatcttgtgtctatgtggagggaaactacatgaaggatctgacagtacttggacgtgacttaactcgcgtaatgattgttgacaattctccgcatgcctttgggttccagttggacaatggcattcctatagaaagctggtttgatgatcccaatgacat

SEQ ID NO: 125296 - DNA, 2134 bp, Zea mays
  Clone ID: MRT4577_45742C.1
ggttgctcgagtccggccggcccgccggggcgctgcgcgtcattctcctcccctccttccacccggcaaaaaccccgcgtcggccactctccggaggcgactagggtttcagcccctgggacacgccgccggtcgtggcacctccgccaccggatcccggtacccgagctacgccatcgccgccccgcccccggtcaccgccggtgcgcttccgccgacaccagacgcagctcgtccgccccgtcacgtgcacctctgcgtgggcgcgggattggatagggtttggggtttcggcggctggcgccaaatcccaccgctgctgctcgcgcaggaggtctcgagccctcggggttcccctactccgctccggctggagttctcgatgaaacttgttctacagtgttcttctgttgcatgactcagttgttttgagttatacttcataataacaatgcaaacacgaaaaaagggtgctgcaaaaaatgcagtggggtatcatgccaatcctaagacaagtaggccatccagaagggcaactcaatctacagttgctgaaaagaaagtatctgatctcatcacgtcttcttccaagaagcagagacctgttggtgtcacttccaagaagcattctaaaggaggaaggaagctgctagtttcatgtgatacaactgatgctggaaatgatgcacctcaggtaccccctagcgtcttccctgatctgcaggcccagcattctgatggtgttgcagatgatcgtcccaacgattccatattctctccaacataccatcatcacaaggaaggtggtgtgaataacctatccaaaggcttagaagaacaaacaacacatgttcatggtagtaaggaagctagcctaaaatctggttcaaaccttgcatgcaacactcatgatgggataaatgaccactctggcacactaaagttgcaatcagctgggcaaagcacattgcttgaagtggatgagtacagtgaactgggaaacctttcctcagaagtatcagcaatatatcttgctatgcagcagtctaagttggagtgcattgatgaacagagtcaagattctacctcaacagaaggttatggtgaagctgaggagactgaagagtatgatgattttgacccctactcctttatcaaagatttacctgatttatctatggtggtccccaaatttcgtcctgttctccttccaaagcagacccggagttgtcctacgatgactcttgtacttgatcttgatgagacacttgtgcattcaactcttgaacactgtgaggatgctgatttcacatttccagttcattttaacttcagagagcacacaatatatgttcgatgccgcccctatctcaaggaattcttggatagggttgccagcgtgtttgagacaattattttcactgctagtcaaagcatttatgcggagcaacttctcaatgttcttgatcccaaaagaaagttgttccgtcatcgtgtttatcgtgaatcttgtgtctatgtggagggaaactacatgaaggatctgacagtacttggacgtgacttaactcgcgtaatgattgttgacaattctccgcaggcctttgggttccagttggacaatggcattcctatagaaagctggtttgatgatcccaatgacatggagctgctgaaattgctcccgttcttagaaagcttggtcggcgttgaagatgtcaggccttatatagcaaggaagttcaacctaagggagaaggtagccaccgcatcttctcttacaatagacatgcagatgtgatccgtccaatgctgccaggtatttttcaggtgccaaaggtcgccgtgatgacaaatgtaggaccggagctgatatagtggttcttgttgaatgtagcatgtcaggatctcctggctccttgcattattgtatgctctaccgaccgcaatgtacaattttcgctgcagttggcagttgtagacttcacttgcattttgttggcccagttgacatgggaagggcctacttgaacaaaaaaaaaaaaaaaaaaaaaaaaaaaaaaaaaaaaaaaaaagggaaaaaaaaaataaaaaaaactaaaaaaaaaaaaaaaacctattaaaaaatgagggg

SEQ ID NO: 125297 - DNA, 400 bp, Zea mays
  unsure (1)..(400): unsure at all n locations
  Clone ID: MRT4577_45743C.1
aggaaatattagtctctcttttttttcctgtactgagaaataaaactacgtagtatgtacagaagttacaatctgtcctacgaacacttttttttcttgtggtcaactggagttctgctctgcgccagctatgaagttcatcaccatgctcctggccttgttgatggtcatgaagcacaagaagaggtgctcctccaggtcatccagctgctgcctaaagctctcctcgttcttgcacagctgcttcagcacctccttcacgagcctccccttttcgccggccatggcgcggtgctccacgcacagctgcagtagcgcgagcatgtgctccccctcatcgcgcagccgtgccacgagacggcttatggggtccatgtnccggttcangttgtccgtgccc

SEQ ID NO: 125298 - DNA, 276 bp, Zea mays
  Clone ID: MRT4577_45744C.1
ggttctttctcttcctcacgcgcctcgacgtgcggggggagtctacatttcccgaggacgtttcctccgacgaggaaggcaacgcctacgtgaccgacgccaagggaagcaagatctggaaggtcgggccggacggcgcgctgctcggcgtcatcaagaacgccacgttcgtgcagcggccgggcctgcgccacaacctcgtcggcctcaatggcattgtctaccaccctaacgggtacctgctcgtggttcacaccttcggcggtgacttcttta

SEQ ID NO: 125299 - DNA, 312 bp, Zea mays
  Clone ID: MRT4577_45745C.1
tttttttttttttttttttttttttttttttttttttttttttttttttttttttttttttttaaaaacatttagctgccataacatgatagggttgcaaagtttacatgcctccaacaccagtcatgtacccccgttgaacatgaaacccgagtgagccccaaaaaaatgttctaaacttttaaaagggcatttttgacatttgacaacagcccacgggaggctaaaaaaccaggtcgtcctaccgttaacatccttcgtccggttttttaggattcaacaacaaccttggatcatgccggcacatccatt

SEQ ID NO: 125300 - DNA, 1459 bp, Zea mays
  Clone ID: MRT4577_45746C.1
cgggttacacttttgctcggttgttcctaattcctatcatccgtcggccgccgccccgctctgctcaccgctcacgcgacgcgccgagccgccgacgaccgcggtcgtgagtcgtgacccgcccgtcccgccgtgaggccgagtctgtgagtctgtgaccgtgattccattccctccaggcaggctgctggctgccaatctgccatccgccgaccgccgcccatccctccaggctccagcgatggcataggctgtcaggcatcaccgcgtcagctactcaggtcaggctagggcgttgggctgccagtggccagcctgccacctgctggtttaactccacgccgcctgcacctgccaggcaggggcgctaggttgccatccctccaggaaccgatcagccgagtagttgctgcctcgctggtcaggttagtgatctgaaaatctgaagttcatcctccaagcttcagtccgcctgtcaggtactcaggttgctgtttggctatttacttttattgatggaatcggctgtggaaggaaaggggaggactgcaagtgatggaactgattcagaaagtaattcgtttgacaagagggatgatatgtctgaagatgaactggtagtgcttggtggaaaaattgatgattcagtggacaatgtcaatattgatgaatctgaggacaacagaagtaaacaaggggtcaagagaaggcgcaaaagggtgaagatgaaggctacagctgaaactgaaaggagcaaaaaggcaaaatctaaagtttgggatgcctttactaaggtgactgtgccggatacgacagagaaggggaagatgatatcaaaggcaaaatgtaactattgtaagaagctatattcttacatacaaggatcaacaacatctcatttgtcaaggcacatgagaatttgtgccgtgtatttgaagcatgtggcaaagcagcaggatcaatctcttctaaattttgctccatcaacagcagagtctacttttagcacgggaggtagaactctagatgattatcgtagttctctaaggccttcaatggtggaggcattggtatgctcttctagctggatccgaggaacacatgatggaagcatgatatatgtggaagaagatgatgaggacaatgttgagaacattatgttcccaaaaagcttggtggaaagcaactaaatttggaagaattggatggagacaagacaagctaagctaaggagacgtcaagagtcaagactcaagagaagatgcatcatactactgctggctgctgctgcttgagaatatactgctttattgagaacattatgttgagaacattatgttttgagaacattatgttttgagctgaatatactgctactgatttccagtgctgaactgctgaatatatactactctttgttgaatatatataattatatactactatttctagggcgcga

SEQ ID NO: 125301 - DNA, 349 bp, Zea mays
  unsure (1)..(349): unsure at all n locations
  Clone ID: MRT4577_45747C.1
ngttcgcgtccttacaccgcgagctccgccagggggcacttttgggtaccagcctgatgaacttcagcgatgttcgggactaggggttctttggcatcgatcatcactgtgtctttttgcgcacttatgcggtctacttcgactagcggcttgagatctatcgccctaagcgcaagcatgaggtcaatgccggcaacaaggagggcagagctactcgagcgtctgcaaaggccaagggagaacagaaaaggactcgaccacatggtcgactttctagggctgaaccagcaccaccagctgatgcagagattgatgcatactgagagcagacgcatcgaatgattactta

SEQ ID NO: 125302 - DNA, 1931 bp, Zea mays
  Clone ID: MRT4577_45748C.1
ggagagggggaaggaaccgcctccgctaatctatagtcatatgtatgtagttgcttaaagagaagagaagatcgacaagagattggcggtaatggactcctcggagctgcacatactggccttgcagagggtgaagcaggtggagccggagaacgcgaccaagattgtcgctccctccggaagaaggaaagtgagaacaatcatatatatattgttgcttaaagagaagagaagagaagagaagatcgacaagagattggcggtaatggactcctcggagctgcacatactggccttgcagagggtgaagcaggtggagccggagaacgcgagcaagatcctcggctgcatcctcctggaggaacccgacaaccaggatatgctgcagctcgcctacggcaacgacgccgaggtgcacgccaagatcagccacgccaaggccatgctggacgccatcgtcgcgtgctgctcctcctcgccggccttcggctaccactactggccgccggtgcccaataaggcgcaggcagaggagtacgcgttgcagccgcagcactacagtggcggagggtgctactacgcctctgagaacgcgctcatctacaatggcggggggccgccgaggtccaggctgtcgtcgacgcggcgcccctgccactacttcatcaagggaatctgcaagaacgggcagagctgccactactcgcaccaccggcaggaggcccaggtctgctccggcgcgctggagaagctggagctggagatcattgagctgctcaagtcgcggcacgggcagccgctgtccatcgcgtcgctgcccacgctatacggcgacaggtacgggaagagcctaaaggccgatggctacctcacggagagcaagcggcatgggaaggccggctacagcctgagcaggctcatctcccgactcagcaagatcacaaccatagaaaggccgcacgggcagcactatgtggttctggcggaggacgccggcaggtacaaggagttgatgagcaggggcgagagaggaggagacatgggcagcagctcgcaccaggtatacctcaccttcccttcagagagcaccttcatggaggaagacgtggccaattacttcggtttgtatggttcggtgcgcgacgtgaggatcccatggcaggagaaacggatgtttggcttcgtgagcttccacaatccggagacggtgaacaccatactcacgatgcgcatcccacatttcatcggcgaatcaagggtcctggtcaaacgctacatagagaaatccaagtgcatcgaacgctatcgtccgagggcgcttcgtcgcttcgtcggcatggacatggacatggacatgaacgacgatgatgatgactacgacgaccagcctccagcccggatggtgatgaggaatcagcaacgactactggcgacggagaagcggctgatcgagctcgagaggaagcgcttcttcgcgatgccgccgcagcagtaccagcacgtctacttcgactgcagcatcggggacgacgacggccagggccagccaccaccacgacatcttcccctcatcataacccaaccagctcgggcaagcagcagcagcagttacgacgacgacgacgacgacatccaactcccagaaagcccattcacgtcgtcagccgtgccgatgctgatgtaatgggccgggaaagggaaaccaaggtccacttaattagcttcctttgttacacaggacaggacaggacacaaaaacaccctcttttttgttgtagatataaacaaattaagggagtcacagtacacagagagagttggtgttcttagaatgcaggcacactggtgagttttaaacaagggtgccagaaagaattacttattagctgtgccataataataataagatcgtcgtctctgtttgtgccttc

SEQ ID NO: 125303 - DNA, 152 bp, Zea mays
  Clone ID: MRT4577_45749C.1
cgcggtggagcagagagaaggtgggaatgcggctcgagcagattggacgcgcgtgttcaaaggataggaaattcaaggcggtttgcgtcatcgtttggcaggacgtggcaaatcaaccaaacggtggaaatgccatgtgctcacgatttggg

SEQ ID NO: 125304 - DNA, 1042 bp, Zea mays
  unsure (1)..(1042): unsure at all n locations
  Clone ID: MRT4577_4574C.1
nacaacctganaaatcgctggtcctctgctggctgacacgtatgtaactctcttaaaagtcgcaatgcatggtatgggcaaatgcttgccaagggagagttgagtcctgacatgggtgatagtatcaaggggaagggaatgattcaggtaatggaatgacttttttctttccattttgtcttgttttattctgagaagatgtcaaagctattatagtactacatccgttctcgaatatttgtcgcccgctagttcatttttgaactaaaccacgacaaataaaaaagaatggagtgagtatttgataaccctgacatttgcagccatccaattttgcttttttacacggttaccatgatcattttaccattccattggacagggtatctctgcagttggtgcattttttgagctgcttagtcaacccagcttaagtgtgcagcacccagaagaaaacaagcaggttgctccagctgagctatgcccaatcctgaagaggctttacagaatactgataaaaaggtttgtgctatgtatcatcactactctccatatttggagagtttacagtgtgcttgaggagtgagtgccgcagtgcagacgaagtgagaagtgaccacttctcactcattcattttattggtttcattttactctcctgattagatatagacctgacttatgtgcagggagctcccagcaagggacattcttcaagccctgagggacgaaacgatgaatgatcctcgggaaaggattgagatggcacaaagccatgcattctaccgcccgtctctccttggaaaaccatgatctagttagtcttgtagattagtagaatataaacggacgctgtgctgcaggtttctccactgtgcttgctgtccttgtgtccgagctacatggggatggggctttgtcagttgtcgaattctttgtgcttcctcgttgccatggtgtacaagagattactgaaccaataaatgttctaagtgcatattatatgaacacccaatttgaaagtacccgaggaagatttctt

SEQ ID NO: 125305 - DNA, 609 bp, Zea mays
  Clone ID: MRT4577_45750C.1
gcacgagccgagggcgcttcgtcgcttcgtcggcatggacatggacatggacatgaacggtaaatactttaatttaatttgttggtgcagccagcaaattaatacttaattttgtatgtagacgatgatgatgactacgacgaccagcctccagcccggatggtgatgaggaatcagcaacgactactggcgacggagaagcggctgatcgagctcgagaggaagcgcttcttcgcgatgccgccgcagcagtaccagcacgtctacttcgactgcagcatcggggacgacgacggccagggccagccaccaccacgacatcttcccctcatcataacccaaccagctcgggcaagcagcagcagcagttacgacgacgacgacgacgacatccaactcccagaaagcccattcacgtcgtcagccgtgccgatgctgatgtaatgggccgggaaagggaaaccaaggtccacttaattagcttcttttgttacacaggacaggacaggacacaaaaacaccctctttgtttgttgtagatataaacaaattaagggagtcacagtacacagagagagttggtgttcttagaatgcaggcacactggtg

SEQ ID NO: 125306 - DNA, 317 bp, Zea mays
  Clone ID: MRT4577_45751C.1
tttttgttttttttcggatgcaacgggaacatatgtgccattttaaggtatatacagatgtttattacactgctataagaaaggtcctcaagcaccaggttggcctaggcgacggtgatggagacgttgtcagcgcggcagcgcgcgaggtcgtgccaccatagtaggctgtcacagcccttagagttgtcccctgaggaggtcgcaggaccatgggccgatgaggcggactagacaccgagaggagcctgtggagcaggcctagcatggtctctgccacatcactgtccataacaatctcgttctattagcatgct

SEQ ID NO: 125307 - DNA, 580 bp, Zea mays
  unsure (1)..(580): unsure at all n locations
  Clone ID: MRT4577_45752C.1
ccggccgggacccccacatcacanntacgccatggcccgcaccaagcagaccgcacgcaagtccaccggaggcaaggcgccccgcaagcagctcgccaccaaggcggcgcgcaagtcggcacccgctgccggtggtgtcaagaagccccaccgctacaagcccggtaccgtcgcgctgcgcgagatccgtcgctaccagaagtcgacggagctcctcatccgcaagctgcccttccagcgtctcgtccgtgagatcgcccaggacttcaagacggacctgcgcttccagtcgagcgccatcggcgcgctccaggaggccagcgaggcctacctcgtcggtctgttcgaggacaccaacctggctgccatccacgccaagcgtgtcacgatccagcccaaggacatcgcccttgcgcgccgtctccgcggcgagcgctcgtaagcacgtcgccaccatggccgcgtcctagcgctcctcgcctcccctgcctcgcctgcgccgtccatttacctccctcttgtacaattaccccttgatgcgatctccttgccgtgtaaaaaaaaaaaaaaaaaagcggcc

SEQ ID NO: 125308 - DNA, 549 bp, Zea mays
  Clone ID: MRT4577_45753C.1
taaaaaaaaaaaaaaaaaaaaaaaaaaaaaaaaaaaaaaaaaaaaaaaaaaaaaaaaaaaaaaaaaaaaaagaaaaaaaaaaaaaaaaaaaaaaaaaaatgtttgtcccaaaaaaaaaaaaaaaaaaaaaaagttttgtcctttccccgggcgggccgttcaaaaagggccaatttttggaaaatttccttaaaattggcggcccgtttgaaccttccttttagggggcccaattccccttttagggagtcgttttaaaattaattggccgtgtttttacaacgtctgaattggaaaaaccttgggtttccccaatttaatcgctttgaaaaaaatccccttttccccagttgggttaatagcaaaaaggccccacccattcgcctttccaaaaatttgcccaccctaaatggcaaatggaccccccttttaggggccctttaagcccggggggtttggggtttccccccagggtaaccgttacttttgccagccccttagcccccgttcttttcgtttttttcctttcttttttcgcccctttcgccg

SEQ ID NO: 125309 - DNA, 439 bp, Zea mays
  Clone ID: MRT4577_45754C.1
ttggagccagcctgcgggccaaaacccagatgggccaccaccaccaccaaccacaaaccaaacataccggccccaaaccacccccgaccaaaataaaccccctttaaactagggggaaccccggagccaaagccaaccaaaaaaccaaggcctaacggaccccaacccttaatttcctccattcccctccttggtgccctaaccccccgccggggttggcacctggaacttgcgggccgcggccggttggcggttttggcccaccacccccgggacccgccccgcttgggcctttttattccgccataataagggaaccagccccggcccggccccaaccttaagaataacccgccaaacaaattcgccctggcgcccggggaagggaaaggggccgtccttgacccccgggaacggtacccccgcccgaaaggcgccg

SEQ ID NO: 125310 - DNA, 205 bp, Zea mays
  Clone ID: MRT4577_45755C.1
ggccgggctccccttggccgacgaccccctgcccatttcttcctctctaagatttttgcgagccagccaaacatctagaccgacacccgctagccaatagcccttctgccaaggtgacaatgcttgccgtttgtagtattgttgctaaggtgagagatttaaattgaatggtgagaaggtaagtaataggaggaaggaaaggggg

SEQ ID NO: 125311 - DNA, 457 bp, Zea mays
  unsure (1)..(457): unsure at all n locations
  Clone ID: MRT4577_45756C.1
tcgatggcgtccctgtacgtgggtgacctggctgagaccgtagacgagccgcagctccacgcgctcttcagccaggtcgcgcccgtcgcgacggtgcgcgtctgccgggacatcctaagcggcgtctcgcttggatatggttacgtaaatttttactcgcgccaggaagctactcgtgcgctagaagctttgaattttaccccattgatcggaaagtacatccgggttatgttctctaaccgggatccaagtctgcgtaagagtggacgtgctaacttgtttgtaaagaaccttgagcctaacattgatagcaagaacctgtatgagatcttctcctcctttggcgcaatactgtcatgcaaggtggccactgattcagctggtcagtcaaaagggtatggntttgtacaatatgagactgaggaatctgccgaagctgccattaacggacttaatg

SEQ ID NO: 125312 - DNA, 1432 bp, Zea mays
  Clone ID: MRT4577_45757C.1
aaaaaggctaaaatccaaaaaagttggccttcctcgagctagcggctagcgccggtgactcgaccggtgaggccaggatccttggctcgaagaagcgatcgagcaccacacggggttatagatcgacgaaggatccaggatgcggatgagctgcaacgggtgccgcgtgcttcgcaaggggtgcagcgacaactgcgccatccggccgtgcttgcagtggatccgcagccccgacgcgcagggcaacgccaccgtcttcctcgccaagttctacggccgcgcaggcctcatcaacctcatcaccgccggccccgaacacgtccgacccggtatgtgtatcatcagtgtacgtacatatatatatgcacctatctaaaagatccgtatacacatttctcgcggatcctgcttccctgtgtgtgctccaagcctccatgttgtgatctgatgatctccgtttataactttatatatgtgcagcaatattccggtctctgctgtacgaggcttgcggacgcatgctcaacccggtgtacggctcggtcggcttgctctggtccgggaactggcagctttgccaggcggccgtcgagtcggtcctccgcggcatacccatcgcgcagccgccgcccgccgccacggctgtcccgcctctccggtcgtgcgacatccgccacgtcgccaggagggaggcaggccgcggcgccgtggatgccggcctccaccgaatggccaacagctcgcgggggcagttcaagcgatccggcgcccagcacagatccgcagactccggcagcatcgagctcgtcttctcccagccgtcggcggcttcgtccatgctggtcgacatccgacaggcgcagccactgaactgggcgccacgccatccaagcccccaccagtactactccgcaagccatgacgacgacgccgtgcgtgagagcgacgacagcaaagcctcggtggacaccgtggatgtctctcatgtcagtcagtcggaacccgcggagccaccgagagaaagcaatgagcgggcggatggtctagacctcacactaggtctgccaccgactgcgcacaaggtcgagccgtcgtcagacgttgacgacgaccagacttctcacagaggcgagccgacgaagctcggcttggccatggcggattctcgagctagataatgaaatcgttggatatactactcatccgatcgatcgacagggagttttgattgcctggaactcgtttatgtcttcatttgtagttctgtaggggtggctatatatggtgttttctagttttggaaactgtaacaacagtgtgtgccctctttttttttgcattttttatgtatgatacatcgtttcttgatgtgttcttcccactatattttaaggggatgtttggtttatagggactaatgtttagtcccttc

SEQ ID NO: 125313 - DNA, 665 bp, Zea mays
  Clone ID: MRT4577_45758C.1
tcgaccacgcggcacaacgtatatcttagatagtttaattttgataatgggtccaagatatatcaccctatgcatcttcctagtacttgtcttacatggagatacaactttggcagaaacttgcaggcagtttgttaaatgggatccattctgctttagtgcaatgtgcaaggcaagttgttttatagagggaaaatcctccgatggttcctatgtaaaggggcacagatgtgaatcaaatggatatcacgctgtgtgtgtttgttttctgtgtaaaaatttggtatctaatgacatgcggatctatcttcttttgttcctctctgtcatctaggagtgtttgtctaaataattatatggtaaaatagttaactagtatgtttactattagagttatgtagcactagttaactagtcgttatttcttcaatttcttatatctagaaacatgtttttagttgtcaagcacttcaataatatatgtttgttttcctttattataaatttaaagagagtaattgtaagctttttgtctatagtcttgtttactcaagagttatatatatttgtaatgtgtcgataaatagtataattctacaggtacaatcacaagttcgttgctgtgcaaaaaaaaaaaaaaaataaaatgtaaattcaaaaaagta

SEQ ID NO: 125314 - DNA, 298 bp, Zea mays
  Clone ID: MRT4577_45759C.1
ccccttttcatgcgcgaggaggggccgtggggaccaccaccagcacctccatgcgcgcgcatctcgcggtggtgctcctcctcctcctccccctgctcccggggcgggcgctctcctgttcctcctcctcctgctgctggtgccagggccgggagggcggcgcggatgtggcgctcatggggctcgcccgggacggatccgcggacaccggcaacctcagtactagtgaaaatggtcggttcagctatggagctgccagttcttcccggacaagagcattgctggacgacttttatga

SEQ ID NO: 125315 - DNA, 274 bp, Zea mays
  Clone ID: MRT4577_4575C.1
gaaagaaatttttgttgttctttttgtgaaaaaaaaaattttgagggccaaatttttttttgaaccttttggggggcgggtttgttgcatttaaatggggggggtgattatgaaaacatttccggaattagatataaaaagaaattttggggggcatctaaaggagaaaagggtggaacccctgtgttggtcaaccatttgtgggaattttggggccctgcccataaaatattaattgggtcaaacaacttttgaaggaaacaagggtccctac

SEQ ID NO: 125316 - DNA, 531 bp, Zea mays
  Clone ID: MRT4577_45760C.1
cttgcccttcctaggccgacccagcttcaccctaccactatgtgagggcttactaagagacactgaatcacctgatttttgccaatttgaattattgacaaaatctatatccagaagctcttccattatttccccacatagattatgaagcatgagtgggtctatctcatcttcttcttctatcgtttccggttcagtagcagttatagcaattccatctttccctccatcaggctcaaccctattcgagtacaacttactaatcacatcaatcgaagcagcaatctccccaccattgccccctaatgagattccaatgctactaaggtttgctactgccgtatctatgggaatgttaaaaactttatcaaaaattggaacattaaaaacattacacatacctccattcctttcagttttcaggcgctccgcccgggcaagcgaatgctcatccgttgtacaagatctcctcttgcgaccagatggcagctcagtctccgggatcgccgcaaggcgctcaaccctggcggc

SEQ ID NO: 125317 - DNA, 548 bp, Zea mays
  Clone ID: MRT4577_45761C.1
gtaccgggccccctggcggttttttttttttttttttttttttttttttttttttattaaaaaaccctttggttttggaacaagttaccttgggctggcctggaaaattcgattaaaaaaaaaagttggtttaatggaccccccacatttttggccccacctggaattttttcattcccaaatttggaaatagggtttattttcgggccttttggcccccccttttcctttgggggggggaaccaacttgagcgccgggagaacggcccttttgaaattcgggggatggttcaacttctttttcgaaaacaagaagggggggacccaccctaccaaattggcctttccgggaagtaacaacaataaccccggggtcaaaccccccgtgaacaaaggaaccagcgggacgttcaagttgaaccccaacaaaaaggccacccccgggaccttccttaagggggggttccccgttaacatggggcggaacaactggttgaaactttccccctttctggacaccttgggcaagaaaacgggttttgggaatt

SEQ ID NO: 125318 - DNA, 1090 bp, Zea mays
  Clone ID: MRT4577_45762C.1
gccggcagcctcgtctctgcctatccacagacctctctgtctctccctctcccgtgggtagcagggtgggtagctctcctcctcctcctccccctccccggccgtggtccgtgggtatggaggagaatcaagagaagtttgctccggagagcagcggcggcgacggtggtggctcggtgagaacgatctgcgtcttctgcggcagcaggccggggaaccggccgtccttcagcgctgcggcgctcgacctggggaagcagctggtcgagaggcagatgaacctggtgtacggcggcggcagcggcgggctgatgggcctggtgtccaaggccgtctacgaagtccctagcgccgtcctacctgacgacgtgtcagcggtcatattgggagaggtgaaagtggtgagggtgagagaggtgcaagtggtgagaatgatgcatcagcccaaggcggtaatggcgcaacatgccgacgctttagctgcccttccaggtgattaggggacatgcgaagaacttctagttattttagcgtaagcgcagctgggcatccacagcaaaccggtggggttgctcaacgtggacggctactacaacagcctgctctcgctgttcgacaaggctgtcgaggagggcttcatcgaccccaaggcacggaacatcttcgtcctcgctgacaccgccgccgacctgctgactaggctcaccatgatggcgcgcctggcagccgacgacgacgatgctactactacccccagaggagacggagacggagacggagacgaacacaagggggccaccaccgctgcaggcgtcaaaaggaaaaggggctagatcgattatagttgttgctgttgttgttgtattcttgtgcctatccatccgtgcatgcatgcatgtatcctctctagctttctagtaggtttcgttcctgcatgcaatctgtggatcctgctgtaaccaagctagtacgtatctcctaagtactaactactagtgaagctgcagtgtgtacctgtcgtgattaattaataataagccatgcagctacatatttatttgatgtaaaaaaaaaaaaaaaaaagggcggc

SEQ ID NO: 125319 - DNA, 509 bp, Zea mays
  unsure (1)..(509): unsure at all n locations
  Clone ID: MRT4577_45763C.1
cccacagcgtccgcccacgcgttagttaacgcaaacagcaccaaagcagaagcccagatagcattgaaaaacatgaaagaaaggattactttaacccgaacggatatatgagacccagatcagttgggatagactaactcgcggtgccggagaggagtgtanangacaaaagccataccaaaaataggtgcaccgccgatagcgcggatggaggatgcgcaaattgcccaggctagggtacggaagagcgaacgaagaacaacaaaagggatgattgatggtcaagctagttccaacagtaccattataaccggtgcagacccacatggtgggctcggtgtctggtcctccgcagggactcggggattcaagagctcagagaaagcatgacgctacgctgaacaaagaacagcagttgatgcgattcgtacagtgggtccggaacgagcacaagatatgcgaaaaggggcggggagcggaagagatgcagcgttacgagccgttgctaa

SEQ ID NO: 125320 - DNA, 285 bp, Zea mays
  Clone ID: MRT4577_45764C.1
aaactgaacctttttttgcaaaacattttttttgttgtgtctttctattactatgagatcagaaatgcttttaaagccatataatcataggggggggggaacacttatacagggatttgtatcaaccactcctgggattggacaaacatggacacctacccaattttaaaacagtaaatcccctggaagcaatgacacatttatttgagataaaaaccaaacttacgcctgttcggacaaaacatgaactaaaacactgacatggacacaactgtgtggaggact

SEQ ID NO: 125321 - DNA, 272 bp, Zea mays
  unsure (1)..(272): unsure at all n locations
  Clone ID: MRT4577_45765C.1
tcggtattcgtcccgccagcacaaaaaagggatttgctagctatgcgtanaacgaatgacgacgcagggcggcaacaggtcgacgacgacgctggtcgccgccgtggacgtagttctggccgtggcggcggcgtcgtccctggccggcgtggcgtccgcggagaatgcgggcgggttcgtggtgacggggcgcgagtactgtgacccctgccgcgccgggttcgagactaacgtgttcaggaacgtggcctgcgcgacagtggaagtggtgt

SEQ ID NO: 125322 - DNA, 846 bp, Zea mays
  Clone ID: MRT4577_45766C.1
atggcgagcggcagcatcgtgaagaaggaggtcggcgagaaccacgacgtgctcctcttcggcgtcaacaacagcgtcaagggcgacctcgcgccgcagcacccgatccaggccaccgtccacaaggaggccaagttctgggcggataagaagaggttcggggcggaagccatctacggatccgctttcaacatccgcaaggatctcgatgcccaaatcctctccaagttccaaaggccccctggtgcattgccatcatctatgctaggatacgaggcgctgactggttccttggatgatttcgggtttgaagattatctcaacttgccccaagattctgacagcttccatgctccagacatgcaccacggaatggagaaaaatttgctaaagataggtatatgcaagaaatacattcatactagatctagaggcgatagtggaggccgcggggtgcggttgccaaatctagccccctctcgttcggatccggcttgtccggcgctggaggctgaccctcaagccaccaccagcggagaggtgacggcgcggacgtggaggtggcagagtgaggactatggaagtccaacgcggcgtggcgatgcaagaggtcgatgcaggcaggtcgatgcgggtggcaccagcggtagcagaaggctggcgtggacggcgtcgggaggttggcgcgacaacgacaaagaagccagcctgactgatggcgtgaaggtcgacgcacgcgccaacggcaaagaagctggcctgactgatggcatggaggtcaacacagtgatgacagggagtccaatgatggtggtgtgtgccacaaggcatgctgagactgactga

SEQ ID NO: 125323 - DNA, 1355 bp, Zea mays
  Clone ID: MRT4577_45767C.1
gacacctcaccttcttctcccccaaaaacgcacactgcaccaccgcacacagatctaaccgaaacccacccccaccggcggcgagccgccgacgagccagccatccaagatgcagtacaacaacctgggacggtcgggcctccgcgtcagccagctctcctacggcgcgtgggtgaccttcggcaaccagctcgacgtcaaggaggcgaaatccctcctccaggcctgccgggacgcgggggtcaacttcttcgacaacgcggaggtgtacgccaacgggcgcgccgaggagatcatggggcaggcgatccgggacctggggtggcgccgcgccgacgtggtcatctccaccaagctcttctggggcggccaggggcccaacgacaagggcctctcccgcaagcacgtcgtcgagggcctgaaagcctcgctcaagcggctcgacatggagtacgtcgacgtggtctactgccaccggcccgacgccaccacgcccatcgaggagacggtgcgggccatgaactgggtgatcgaccaggggtgggccttctactggggcacgtcggagtggaccgcgcagcagatcaccgaggcctggggcgtggcgaaccggcttgacctcgtcgggcccatcgtcgagcagcccgagtacaacctcttctcccgccacaaggttgagtctgagtttgtacctctttacaacacttatggcattgggttgactacatggagtcctctcgcttcaggggttctcactgggaagtatagcaaagggaatataccccgctgaaagcaggtttgccctagacaattacaagaacctggcaaataggtccctggttgacgacacgcttcgaaaagtgaatgggctaaaacctatcgccgctgaactcggcgtttcgttagctcaactctccattgcttggtgcgcgtcaaaccccaacgtctcatccgtgatcactggtgccaccaaagaaagccagatcgtggagaacatgaaggctctagatgtcatcccactgctgacgccggaggtcgttgacaggattgaggcggtggtccagagcaagcccaaacgcactgaatcatacaggtgaaggcggtaggtacgtacgggcctacgtgagcgtgcagattgtgagtgttcgtccgaatggagtttaggcctctccagtaccttgatttcacgaaattatatccatggaacatggtcccatgtattctttctgggcgtcccaagtcgtggtgctgtgttccaaacatctgtccgtcctgtgtgtattctgcctgcgtttcagattcagattttttgattttggacccaatcaaccctgcactgcactgccttgtcgagg

SEQ ID NO: 125324 - DNA, 1444 bp, Zea mays
  Clone ID: MRT4577_45768C.1
cggccgctcaggcggcgggctccccaaaacgcacactgcaccaccgcacacagatctaaccgaaacccatcccccacccccaccggcggcgagcggcgcaccgccgacgacgagccagccatcgaagatgcagtacaacaacctgggccggtcggggctccgggtgagccagctctcctacggcgcgtgggtgaccttcggcaaccaactcgacgtcaaggaggcgaaatccctccttcaggcctgccgggacgcgggggtcaacttcttcgacaacgccgaggtctacgccaacgggcgcgcggaggagatcatggggcaggcgatccgggacctgggctggcgccgcgccgacgtcgtcatctccaccaagctcttctggggcggccaggggcccaacgacaagggcctctcccgcaagcacatcgtcgagggcctcaaggcctcgctcaagcggctcgacatggagtacgtcgacgtggtctactgccaccggcccgacgccacgacgccgatcgaggagacggtgcgggccatgaactgggtgatcgatcaggggtgggcgttctactggggcacgagcgagtggaccgcgcagcagattacggaggcgtggggggtggcgaaccggcttgacctcgtcgggcccatcgtcgagcagcccgagtacaacctcttctcccgccacaaggttgagtctgagtttgtacctctctacagtacttatggcattgggttgactacatggagtcccctagcttcaggggttctcactgggaagtatagcaaagggaatatacccgctgaaagtcggtttgccctaaattcggcacgagggacaactacaagaacctggcaaataggtccctggttgacgacacgcttcggaaagtgaatgggctaaaacctatcgccgctgaactcggcgtttcgttagctcaactctccattgcttggtgcgcgtcaaaccccaacgtctcatccgtgatcactggagccaccaaagaaagccagatcgtggagaacatgaaggctctagatgtcatcccactgctgacgccggaggtcgttgacaggattgaggcggtggtccagagcaagcccaaacgcactgaatcatacaggtgaaggcggtacgtacgggcctacgtgaccgtgcagattgtgagtggcgcggagggattctcggcattcgtccgaatggagtttaggcctctccagtaccttgatttcacgaaattatatccatggaacattggtcccatgtattctttctgggcgtccccagtcgtggtgctgtgttccaaacatctgtccgtcctgtgtgtattctgcctgcgtttcagattcagattttttttttattttggacccaatcaaccctgcactgccttgtcgaggaccgtggtccgtggatggcaatggttcttacttcttactggtt

SEQ ID NO: 125325 - DNA, 166 bp, Zea mays
  Clone ID: MRT4577_45769C.1
gcgcatagcacaccaacgaaaggtagcgcccacacatgcacactgacactgcgctacgacaagtgacccttcctcaacccagcgccaggtctgctgctagcactggtccactctgttccaattctcatgtccaaacagtacaccacaacgcacgtgccactactca

SEQ ID NO: 125326 - DNA, 439 bp, Zea mays
  Clone ID: MRT4577_45770C.1
ggcaatcttgcagcatatataatataaccagtaagaaccattgccatccacggaccacggtcctcgacaaggcagtgcagggttgattgggtccaaaattaaaaaagaaaaagaaaaactgaatctgaaacgcaggcagaatacacacaggacggacagatgtttggaacacagcaccacgactggggacgcccagaaagaatacacgggaccatgttccatggatataatttcgtgaaatcaagtcactggagaggcctaaactccattcggacgaacactcacaatctgcacgctcacgtaggcccgtacgtaccgccttcacctgtatgattcaagtgcgtttgggcttgctctggaccaccgcctcaatcctgtcaacgacctcccgcgtcagcagtgggatgacatctagagccttcatgttctccacgatctg

SEQ ID NO: 125327 - DNA, 891 bp, Zea mays
  unsure (1)..(891): unsure at all n locations
  Clone ID: MRT4577_45771C.1
cggggtccatctacggcacnnggcgtctcacagcctcaccccaactcgtcgccttcctcgggccgcccttcgtcgcggagaggaggtcacgcggctgattcccgccgcttgcgatcgggttcgtagggagcaggatcagctgacgcgatgttccccaggatttcccggctcggggcgcggctcctgcgcgagtctagagccgagacaagagctggaaacttgctaaacagtcaacgcattttctttcaagatcatgttaaccggcattcgatcccagtggtgactcctgctgtattatcgatgcggaatgcccttttgtcaactgcaacaagtggtgatcaggatgaaagtagtcaggcaaaagataaaatctcggtaacatttgtcaacaaggatggctcagaaaagacaatatgtgttccagttggaatgtccatgttagaagctgctcatgaaaacgacatagagcttgaaggagcatgtgagggctcacttgcgtgttctacttgtcatgtaatagtaatggatgtaaaatattataacaagttagaagatccagcagatgaagaaaacgatatgcttgaccttgcatttgggctcacagaaacatcacgccttggctgccaagtgatcgcgaagcctgagcttgatggcatgcggctggcgctacctgtagccacaagaaacttcgcagtagatggctatgtaccgaaaccacactgaagagacgtaacaggggtcttatctcccgaggcgtcttttgcatgcatgccagcagttgcatagataaagcaggagcgagacaaagggtgttcatgtatattgcagctgtatcactgtatgtatgtgccattgtgccttgtaatatacatataataataaaggtgctcg

SEQ ID NO: 125328 - DNA, 784 bp, Zea mays
  Clone ID: MRT4577_45772C.1
aagcagtcaggcaaaggataaattctcagtaacatttgtcaacaaggatggctcagaaaagacaatatgtgttccagttggaatgtccatgttagaagctgctcatgaaaatgacatagagcttgaaggagcatgtgagggttcacttgcgtgttctacttgtcatgtaatagtaatggatgtaaactactataacaaattagaagatccagcagatgaagaaaatgatatgcttgaccttgcatttgggctcacagagacatctcgcctcggctgccaagtgatcgcgaagcctgaactcgatggtattcggctggcattacctgtagccacaagaaacttcgcggtagatggctatgtaccgaaaccacactgaagacagtcgggtacaccacactgaggcagtcatcttgggggacacggattcgtacaagtcaattttgtagtttatagcctgtataacttaactacacctttgctacttgtagtcggggtagctaggactaccttgttgagggagggttcgttcattgatggacccctccattactcccagataacagtgcttccttcatctgggcgaataaacatctgccttgtaatacaagtgaaactggccaagacaaacaggaagatgctggtggatcaaaaaaaaaaaaaaaaaaaaaaaaaaaaaaaaaaaaaaaaaaaaaaaaaaaaaaaaaaaaaaaaaaaaaaaaaaaaaaaaagggaaaaaaaaaaaaaaaaaaaaaaagaattttgggttgttcccactgtttaaggg

SEQ ID NO: 125329 - DNA, 483 bp, Zea mays
  Clone ID: MRT4577_45773C.1
ggccgcttttttttttttttttttctttttttttttttttttttttttttttttttttttttttttttttttttttttttttttttttttttttgcccgcccggcaggggttacaaaaaaggacacgggttatacattattacgacttacaaaaaaaaaaaaggtacccccggtttaaaaacccaacgggggagcattgccccaaaaaattatccctccagccctttttggtgaaaccctgggctggaccgggaaaaaaacaggcctattttttattcacactttggaaacccaacaaactggtcaagggccccggccctggggggggggccctaccaaggggatcaagggggcgggcttagggaacccccaaagacacccgggtggggggggggggccctttgttttggggcaaccaaggccactcatcaagaggggtggataataaaggccttctattgggcgagaaaaagggaaaagcca

SEQ ID NO: 125330 - DNA, 1407 bp, Zea mays
  unsure (1)..(1407): unsure at all n locations
  Clone ID: MRT4577_45774C.1
gcacacagaacggatgtttattcgcccagatgaagcactgttctctcttctctgcaagtaaccaagggattcatcaaatgaacaaaccctcaacaaggtagtccgaagccacccggaccggactacaagtaacaaagctgtagttaagttacaggttataaactacaaaattgactgctgtaagaatccgtgttccccgatatgaccgtctcttcagtgtggtagatgaccgtctcttcagtgtggtagatgaccgtctcttcagtgtggtagatgaccgtctcttcagtgtggtttcggtacatagccatctactgcgaagtttcttgtggctacaggtagcgccagccgcatgccatcaagctcaggcttcgcgatcacttggcagccaaggcgtgatgtttctgtgagcccaaatgcaaggtcaagcatatcgttttcttcatctgctggatcttctaacttgttataatattttacatccattactattacatgacaagtagaacacgcaagtgagccctcacatgctccttcaagctctatgtcgttttcatgagcagcttctaacatggacattccaactggaacacatattgtcttttctgagccatccttgttgacaaatgttaccgagattaattcagtaaaactgatgcatttagtgccatctattcctctagatgtggaaggagcagctcttatcttttgcctgactactttcatcctgatcaccacttgttgcagttgacaaaagggcattccgcatcgataatacagcaggagtcaccactgggatcgaatgccggttaacatgatcttgaaagaaaatgcgttgactgtttagcaagtttccagctcttgtctcggctctagactcgcgcaggagccgcgccccgagccgggaaatcctggggaacatcgcgtcagctgatcctgctccctacgaaccctagaacagctcacaagacaacgaatcagcgcaacagcgtgctaggcgagcaatcagcagggctcagctagtcggtgtcacaaaatgaggtgtactcaaggggaagctgggagacagaaccgatcgcaagcggcgggaatcagccgcgtgacctcctctccgcgacgaagggaatgacgaggaaggcgacgagttggggtgaggctgtgagacgccgtgccgtagatggactttccctggataagacaaanaattgtagttagcagtgaaactagaatatcaatggcaacaataacaaaaccccaagaaaattagggcaggttagactgctagagatggaacccacatgagccaccagcccanaagaaaaaacatttgataaatanaaaaaattcattactaaatatagtatatattaatataaatttgagagtacattacgatcataccattac

SEQ ID NO: 125331 - DNA, 1569 bp, Zea mays
  Clone ID: MRT4577_45775C.1
gcttcccgccgtcgtggagaggtcacgcggctggttcccgccgcttccggacgggttccgagggaggaggatcagctgccgcgatgttcctcaggatctctcgtctcggggcgcggcttctgcgcgagtctggagcggagacgagagctggaaatttgctaagcagtccaggcattttgtatcaagctcatcttaaccagcattcgaccagagtggtgacttctactgtattatcgttgttaagaactaaagattggtagtgaataatctatttagatgaacatgttcccaattaccattcattcttgctaatagtaaatgtatcactagttattgattcacttaatgatctacattgatttggactatatctattattttcatgatttggtttctattcgatgaatctatctatacattccccattctgaaacggctgttgcaaaagaagatcggcattatttttcctcagcaagttagcttttttagagaactacaagcaaagcctttgtacttttgtactgcaggagtgatggtttctatctcaagtttatttgtattaattttttgtttatatattttcagcggaatgtccttttctcaactgcaacaagtggtgatcaggatgaaagcagtcaggcaaaggataaaatctcggtaacatttgttaacaaggatggctcagaaaagacaatacgtgttccagttggaatgtccatgttagaagctgctcatgaaaatgacatagagcttgaaggagcatgtgagggttcacttgcgtgttctacttgtcatgtaatagtaatggatgtaaactactataacaaattagaagatccagcagatgaagaaaatgatatgcttgaccttgcatttgggctcacagagacatctcgcctcggctgccaagtgatcgcgaagcctgaactcgatggtattcggctggcattacctgtagccacaagaaacttcgcggtagatggctatgtaccgaaaccacactgaagacagttatgtacaccacactgaagacagttatgtacaccacactgaggcagtcatcttggggggcacggattcgtacaagtcaattttgtagtttataacctgtataacctaactacacctttgctacttgtagtcggggtagcttaggactaccttgttgagggagggttcgttcattgatgaacccctccattactcccagataacagtgcttccttcatctgggcgaataaacatctttcgttttgtgcgagagtatgtagtgtactcagaaatatttgcattgtagtgctcccaatatttgatcttttgctacctcatctaccacactgaagagacggtcatatcggggaacacggattataacaacagtcaattttgtagtttataacctgtaacttaactacagctttgttacttgtagtccggtccgggtggcttcggactaccttgttgagggtttgttcatttgatgaatcccttggttacttgcagagaagagagaacagtgcttcatctgggcgaataaacatccgttctgtggcaaaaaaaaaaaaaaaa

SEQ ID NO: 125332 - DNA, 299 bp, Zea mays
  Clone ID: MRT4577_45776C.1
gccggccgtcattctaacacagcgtcactcccaacagaaatttcaacaatcagtcaccggcaggggacaaggtcacagacacatcgaggaggatggtacacggccggcctcgtccagcacgcgacctcctcggctaccacctccaccacggggtggtcctcgagccgagcagcagaggaaggcggcgtggccgccgccgcccgcttcttcgccgcagcagccgcacaagaaacctcccgcggatcacacaaagtccaggcaaatgcggtcgccgacgtaccgggcaacgccgctacatc

SEQ ID NO: 125333 - DNA, 452 bp, Zea mays
  unsure (1)..(452): unsure at all n locations
  Clone ID: MRT4577_45777C.1
cacagaccgccaccgccagtcgccattgctcactgctctgctcagcgctccatgtcgtggcccaaattccgtgactcatcttccttctctttgccgggctgcgcgtgcataccacggacgaacgcactgcccccaatctactgtaagtaatctactaatctgtaaatctgtaatccctaatcctagctttgtggccatatatggacgcacacaccgctcggagaaggacctgtccttgctgctgccgtcggcgcgcacgcccatgcccccttgctgccgctcctcttcctgaacagcctgcacggcttctcctcggctgctgcaagcctgcaaagcgtggttgtaggctgtagcctactagcctctccctcccccacccncacacggccacacacttgtcacttgnngttttgtttggatattgttcgaatccctcgctgaaatcatgtatt

SEQ ID NO: 125334 - DNA, 436 bp, Zea mays
  Clone ID: MRT4577_45778C.1
cttgttaaagtgcctgtggtttatttcccctaggagccggcgaatgggtgtttttccagctccttgcgggggggggggggggggcggaaaatggcggggggcgcgcggcacccaggggtggccaggggggggggcggggccctccccaccccgggggggggggaagggggggcccgcccccccggggggcagggggcaggccttttttgggggggggcagccggcggcccgcggttggggccttgaacttgccaagcttcgtgctcccccgcagaggggacctgatgaggaccgtttggagggggggccaccgggggacccagaaagaaaagaaaaaagggggggggccgtggggaccccagagagggggatccctcggggggcgaaaggggccaccgggggggggagaactcccgggaggaaaacgcggggcttg

SEQ ID NO: 125335 - DNA, 291 bp, Zea mays
  Clone ID: MRT4577_45779C.1
aaaaaaaaaaaaaaaacccgctaaaatttatcatcaccccccttttggccaccaaactaaaacctttttttttttccccaaacacaccacaaaaacaaaaacccctttaacctcttccagccccaaagtgaataaatcattataacactctacacaaaagatgctttaatctttcacacccatacccctcatgtatgaatcatcccttttttccacagagaatcttttcccccccttattttctttaaacatcttctcctgcaccactccatacactaccccttttttttt

SEQ ID NO: 125336 - DNA, 693 bp, Zea mays
  Clone ID: MRT4577_4577C.1
atggcccggttgagatcaaggatatcttggctcaaggagggggatgcaaattcaaagctcttccacttgcatgccagacatcgaaaaagaaagaactttgtggcaagcttggtggatggcaacaatattctttctagtcatattgacaaggctgcagcggtggatcagtttttctctaatctgattggaactaatgtggacagggactggactaatgatttagatgcgcttggtttaccttctcatgacctgtctgagcttgatgcacccttttctgagaaagaggtgtgggagaccatcaatggcttaccacttgataagggtcctgggccagatggttttacaagaaggttttatagagtttgttggcaaataattaaggaggacctcatggcagttgtgtcgcctgtttggagcaggaagttcaacaattttggcaggcttaacacagcttatatatccttgattccaaaaaaggagggagcttaccaggttaaggattttaggcccattagtcttgtacacagtgtcgcaaaactcatcaccaaaatccttgcaaataggcttgctagaagactttatgacatggtctcacctaatcaaagtgctttcattaagggtcgtttcatacaagacaattttatgctggtgcagcaaacctcgaggcttcttcatcaacaaaaaaaaggctag

SEQ ID NO: 125337 - DNA, 284 bp, Zea mays
  unsure (1)..(284): unsure at all n locations
  Clone ID: MRT4577_45780C.1
ccngccggggatggtacccatagccagcgatagctggtagataacagagactgcatcggcgcaagtccgcatagactccgttgtagtatataggtcggtttctacgtctgcgcgtacacagagggggatagaagatagatcgcctgcaccgtcctggtgagcagctcgagcatcggggcgctggcggccttcgccgcggttccgtgtgcgacctgcgggtcctccgctgtcgacccgtcatcgacggcgctgcccgcggcctacgtagttgcggactagcattc

SEQ ID NO: 125338 - DNA, 322 bp, Zea mays
  Clone ID: MRT4577_45781C.1
gggaagggtactgcctgacaatacctttgttttccctaaagggcgggttcaccaaaaaaccaagtcaacaagccaacaggatcctgggtcattaacttctttttaaacttttgggatacataaagagaacattcaggtcccgcctaacactaacaggggttgaccccccccagttttttaacaagagtcatcaacaggggccatgtttaacatatttattcgaccaggtcatcatcgtcatcggggaggggttgcccaggggcagttgaaagctcaatttaatgctgttgttgaagggccatataaatctgcactttggggg

SEQ ID NO: 125339 - DNA, 734 bp, Zea mays
  Clone ID: MRT4577_45782C.1
gggacctcgagccggcggggaatctaattccccaatccccgccttcctcggttccctcaccgcgaaccctaaccctagtccaccccgctcccatggacgaggatgctggcggcgcctcgccgccgccggtgccactggctcacgtgcccccaccagctcgcgctccgtgacggagacggtgaacggctcccaccgcttcgtgatccagggctactcgctcgccaagggcatgggcgtggggaagcacatcgccagcgagaccttctccgtgggcggataccagtgggcggtctacttctaccccgacgggaagaaccccgaggacaactccgtctacgtctccgtcttcatcgccctcgcttccgatggcaccgacgtgcgtgccctcctcgagctcacgctccttgatcagagcggcaagggcaagcacaaggtccactcccactttgaccgctccatggagtctgggccgtacaccctcaagtaccgcggatccatgtggggttacaaacgattctttcggcgaactgcccttgaattatcagactatctcaaagatgattgtctgaaaataaattgcactgtgggagttgtagtgtcaactatcgattactccataccgcactctatccatgttccagactcagacatcggctatgattttggttcactgttggacagtcaggagggtgctgatgtcattcttaatgtgggaggagagaggtttcatgccc

SEQ ID NO: 125340 - DNA, 1924 bp, Zea mays
  unsure (1)..(1924): unsure at all n locations
  Clone ID: MRT4577_45783C.1
cnncggccgggaaaaagaaaagaaaagaaaaactcaaaagcgcacggcgggccggcggcacgccgcacggctacggcagaaaagttagcaacaacaaaccagcggagctcgaaatcgaattccccaatccccgccttcctcggttccctcaccgcgaaccctaaccctagtccaccccgctcccatggacgaggatgctggcggcgcctcgccgccgccggtgccactggctcacgtgccccctcttcagcaacccaccaccgccgccccctcgcatcgggacatggcggcgtcccccaccagctcgcgctccgtgacggagacggtgaacggctcccaccgcttcgtgatccagggctactcgctcgccaagggcatgggcgtggggaagcacatcgccagcgagaccttctccgtgggcggataccagtgggcggtctacttctaccccgacgggaagaaccccgaggacaactccgtctacgtctccgtcttcatcgccctcgcttccgatggcaccgacgtgcgtgccctcttcgagctcacgctccttgatcagagcggcaagggcaagcacaaggtccactcccactttgaccgctccatggagtccgggccgtacaccctcaagtaccgcggatccatgtggggttacaaacgattctttcggcgaactgcccttgaattatcagactatctcaaagatgattgtctgaaaataaattgcactgtgggagttgtagtgtcaactatcgattactccataccgcactctatccatgttccagactcagacatcggctatgattttggttcactgttggacagtcaggagggtgctgatgtcattcttaatgtgggaggagagaggtttcatgcccataagttagtgttggctgcacggtctcatgtattcggatctcaattttttgatgatgaatctgatggagagaagagtgaggttaatgagactgatgaactaaaagagttttctattgatgatatggagccaaatgttttcaaggcaatgcttcacttcatctatagagatacccttgttgatgatgatgagttgggcgcgtcaagctctgatggttctatctttgatactccggcagctaagttgttggctgcagccgataagtatcacttagcaagactaaagtcgctatgtgaatcttacctgtgcaagggcatatcagtggcctcagttgcgagtacgttagcattggctgataggcaccatgccatggagcttaaagctgtttgcctaaaatttgctgctgaaaatctttcagctgtaatgcggagtgagggtttcatttacctcaaggacaactgcccatctctccagtcagagatactgaaaactgttgcagggtgtgaggaccagtgcagcagtgttgggaagagccagagcgtttgtgggcagctctcggacggtggcgattccagttgccgcagggttaggcaaagaacctgaggtcaacccagaactgacatggttagccagctcttgctctgtaaatgacgatggcaatcatctgtatgtgaagaaaaaacaatttgaaggagctgtaactagctgtatctcatcatgctccttacatcttacctgccgtcttgtttgtaactagttgactgtttggtcatgagcagttactgaatcgatgtgtagacagccctgcaaatgctcacgagtcaacgataaacatggtggccttgtgtcttggcaactggtgtttgcagcaggcgggccagcagctgtctgctactaatatggatccgttgattttgttgtattcttctttcgactggaaggtatcataagtcaattaggaggtgattcttatatgtattcgttatgctgcaaaagtgaaggtgacatttttttttggtttattggcaagtacatggaatttac

SEQ ID NO: 125341 - DNA, 358 bp, Zea mays
  Clone ID: MRT4577_45784C.1
ttacccgtcgcggacgggggcggcacttgtttgaccgcagacaccaaggcgcccagccgcgccgcactaggccgcggaacgaaagctaggagcgtcacacgccggggccgaccgcggccaccggaccggacgcacagggacgccaaacgcacagacatcaggcaggaaggtcctcgtgctggccgagctggcgctcgtggccggcggcgccgccggacagggcgaggaggggggcgggcccaccttgccgatcacgtcgagcgcgccggccggggggggacacgaccagcagtgcgagagatgacgcaaccacgacggctggccatggtaccaggcacgggagtgcacgtagatgcaa

SEQ ID NO: 125342 - DNA, 190 bp, Zea mays
  unsure (1)..(190): unsure at all n locations
  Clone ID: MRT4577_45785C.1
atacgggatagcgnacgaanaggaacagagatataaggaccgttgaggggcagagatacaaaagccagaaataattggggccggtttaatgggactgctgaacccagccttggcaacgataagcttaaaggccttcccgtaagttgaaccaggcatacgagtctacaaccaatacgttacatttagtatt

SEQ ID NO: 125343 - DNA, 680 bp, Zea mays
  Clone ID: MRT4577_45786C.1
ctggccgggaaaagcagcaagcgaggcgagcaaggaggcaccttgagcttgcggattaggattagctccggcaaaaggaagctggggaagagagcaaggaatgaatggagcgagataccaaacccttgcctcccccaaccttaccatacttccctctctgctttgcacccatgccactccagtattaatcccttccagttccacccgggcatcgccggcacggcggcgccggagcgagcagcaatggacgggagcgcagagccagctcagccccgaggggatggagtacatggccggcgcgctccgggcgggcgtcgtcccgctcgacctcttcggcaaggcgcgcaccacctggaaggtcggcatcttcgcctcgctccagttctggacgcgcatctcctgccgcttcctcttcttctaccccggcaatggcaccgccatgcccatcgactgccgctccaggtcgccgtagcgtcctcctggcagccaggcaggcgtcacccattgttcacctgctctgtctctgcctgcagtctcctctgcagctacgcgtttgttctgtcattcatttgttcggtccctcagggctcaggcctcaggctcagcaacacaatttgacacatgcgcccattcttgtacagaccaaaaaataatattaatactggtacggtacaaggcag

SEQ ID NO: 125344 - DNA, 1176 bp, Zea mays
  Clone ID: MRT4577_45787C.1
aacctcacctaatacactgaccgggaagcaagcaagcgaggcgagcaaggaggcaccttgagcttgcggattaggattagctccggcaaaaggaagctggggaagagagcaaggaatgaatggagcgagataccaaacccttgcctcccccaaccttaccatacttccctctctgctttgcacccatgccactccagtattaatcccttccagttccacccgggcatcgccggcacggcggcgccggagcgagcagcaatggacgggagcgcagagccagcccacggcgcccctcatgccgctgcctttccgacaggcggcgaggcggcgcagcacggccacgggtacaagaggcgtcacggcgtgcagcggatccggcaggaggatcggcgctggagctccggcctggtgtggtttctggtgatcctgtgcacggtgctgaccatcggcgtgatcgtgacgggcgccaccgtgttcgccgtgtacctgctgtacaagcccacgacgccgtacctgctggtctcgtccgcgcggctggagacgctggcgtacgaccagtcgggcaccatccgcgacctgcagctggcgctgacggtgctggcggagaactccaactcgcgcaccgacgccaccttctcccgcgtcaacctcgccgtgggcttccgcggcgccgaggtggcgctgctccgcgcgggcaccttcgccgtgccgcgccgcagctccttcccgctccgctaccaggtcgtgtcggcggggcgccagctcagccccgaggggatggagtacatggccggcgcgctccgggcgggcgtcgtcccgctcgacctcttcggcaaggcgcgcaccacctggaaggtcggcatcttcgcctcgctccagttctggacgcgcatctcctgccgcttcctcttcttctaccccggcaatggcaccgccatgcccatcgactgccgctccaggtcgccgtagcgtcctcctggcagccaggcaggcgtcacccattgttcacctgctctgtctctgcctgcagtctcctctgcagctacgcgtttgttctgtcattcatttgttcattccctcaggctcagcaacacaatttgacacatgcgccattcttgtacagaccaaaaataataataataatactggtacggtacagtgcaaaaatcgacagat

SEQ ID NO: 125345 - DNA, 1838 bp, Zea mays
  Clone ID: MRT4577_45788C.1
tcttcggaggccgggccagtgcacgaacctctccgtagtcctactcttgtccgacccgcgcggccgccgccagcccgcgccctcggagcccccttccgcttctcctctccgggaatggcgtcggcgcgaggaccttgcggaattagtgtccgttctgacttcagttcagcctgccttattcacaaggctggagccccatcgaattctgtttctggcgtgatggctgttcaggttcaccgccaccgtaacaaggtccgcaatggccaagctatcaggtgtgcaatggcaactggaaaagagcagggtgcaatttccactgccagtagcggtgatcaaaccaagggcggtttgcgtggaaaattaaacaaagttgttttagcttatagtggtggtttggatacatccgttattgttccatggctcagggagaactatggttgtgaagtcgtttgtttcactgctgatgttggccagggtgccattgaattggaagggttggagaagaaggcaaaagccagtggtgcatgtcagcttgttgtgaaggacctcaaagaagaatttgttagtgaatatatatacccctgcctgcgtgcaggtgcagtttatgaaagaaagtatctgcttgggacttcgatggctaggcctgttattgctaaggcaatggttgatgttgccaaggaagttggtgcggatgcagttgcccatggttgcactggaaaaggcaatgatcaggttcgctttgagcttacattctatgctttaaatcctgaacttaaagtggtggcaccttggagggagtgggatatcacaggacgtgaagatgctattgaatatgcaaagaaacataatgtacctgttccagtttcaaagaaatcaatatacagccgagaccgaaacttgtggcaccttagccatgagggtgacatcctggaggacccagcaaatgagccaaaggaagatatgtatatgatgtcgattgctccagaaaatgcgccctcgaaacctgagtatttggagattggtatcattgctggtgttcctgtttcaatcaatggccgagacctctcaccagcatccctcctcgcggagctcaatgaaatcggtggaaagcatgggattgggcgtatcgacatggtggaaaacaggctggtcggcatgaagtcacgtggggtctatgagacccccggtggcaccatcatggcagccgcggtacgcgagttggagtccctgaccctggacagggagaccatgcagtggaaggacatcattgccctcaagtacgccgagctggtctatgctggccgctggtttgacccgctccggcagtcctttgatgccttcatggagaaggttaccgcgacgaccactggttcagtgaccctgaagctgtacaagggttccgtgaacgtcgcgtcccggaagagcccctacagcctgtacagggaagatatctcctcgtttgagaacggggagatctacaaccaagctgacgccgaggggttcatcaggctgtacggcctaccgacacgggtccgggcgatgctggagaagggtatctgagtagttgcctgcttgatttagaaataaaaacatctgtttcccagtgattgcagacagatgggtgtttggtggggagttcaccatgctgttttaccatccgtttacattgtccaaaccaaaatattatcattgctacatcagctgcttttctcattggtttatattgagcagaccattctggtcgattatcgtcaaaaaaaaaaaaaaaaaccgcgcctgctactaggaggcatccgcagcctgaccggacgcggtgcatgcgacgatcatagctcttg

SEQ ID NO: 125346 - DNA, 120 bp, Zea mays
  Clone ID: MRT4577_45789C.1
ggtccgtgtggtactccggggtatggtttcgagggtgagcggatcaagactacagcggggggggtaaagtaccggtggtgagacggctgcctatactgggccatggtcgaccactccttc

SEQ ID NO: 125347 - DNA, 262 bp, Zea mays
  unsure (1)..(262): unsure at all n locations
  Clone ID: MRT4577_4578C.1
ggcaattcggacaacacctggttggccagggcttcttgggctcctgaacgaacttggagttcttgaggccctcctcggggaagttggccggcatcttagggatgatgaagccggggatggcgaaccccgggaggaagggccaatggcgcttccactcccggcggaagaaaaccggccacggnncgaacgtcttcatcttctaggcctccggctccggctccggctgctcgcgatctcctcgcaccctcctcctccggtttcg

SEQ ID NO: 125348 - DNA, 686 bp, Zea mays
  Clone ID: MRT4577_45790C.1
ggggtcatcccttatttcctcaggagaaatgtcaacaagattatagtcttcagaaaaatgcttctggtggggcattctgggagatatcattactatataatgataaatcaaaagaaaaaccagctttggactttagttcacagtttgatatgccccttgatatagttatcgataagtgcattattcaagaaattttgcttcagtataaatatgttagcagcttcacgatgaagttgcttgaggagggttttgatctttgtgcacatctactggctctgcggcggtaccatttcatggaaatagctgactgggcagactcctttattgcttcaatttatcagaagaaatggtcatttgttaaatctgagcagaaaagatcggagatccaaggacttatggacttggcattgcagagatcttcatgcgattctgatccttataaggaaagattatttatatacatgagggagtcacctgtggattctgttgatgcctctccatgtggtcttgatttgctggatgatatcttgttgggttataaagctgaatggccaatgaatattgtcattacagtagatgcactgaaaatatatgctgaaatattctgttatcttcttcaagtcaggtttgcagtggttttccctgactgaagtttggagatttttaaaggagttgacacagttcat

SEQ ID NO: 125349 - DNA, 520 bp, Zea mays
  unsure (1)..(520): unsure at all n locations
  Clone ID: MRT4577_45791C.1
tcccggtgtgttagtgtaatanatatacccctgcctgcgtgcaggtgcagggggatgaaggaagtatctgcttgggacttcggtggctaggcctgttattgctaaggcaatggttgatgttgccaaggaagttggtgcggatgcagttgcccatggttgcnactggaaaggcaatgatcaggtagtgacgctgttagccggtgggggggggggtctggtcatcttgtaatgctacccttattctgcaggttcgctttgagcttacattctatgctttaaatcctgaacttaaagtggtggcaccttggagggagtgggatatcacaggacgtgaagatgctattgaatatgcaaagaaacataatgtacctgttccagtttcaaagaaatcaatatacagccgagaccgaaacttgtggcaccttagccatgaggtattgtccatttttcatgtttattgcttcaagttttatcaaagcattttttgtagtttaatatttttcttctttacatgtaggac

SEQ ID NO: 125350 - DNA, 1027 bp, Zea mays
  Clone ID: MRT4577_45792C.1
ccgaacttgtggcaccttagccatgaggacagaatcttagttaccagaactttacaagatggttacgttccaacttttaagccaatatatgcaaaatgccacattagtgttctgaattaatgtcctgcacttgtcgacacctttaaccaaacaacatgacgcccatctttgatgcgagatgaagtgaatcattctctacattgcagggtgacatcctggaggacccagcaaatgagccaaaggaagatatgtatatgatgtcgattgctccagaaaatgcgccctcgaaacctgagtatttggagattggtatcattgctggtgttcctgtttcaatcaatggccgagacctctcaccagcatccctcctcgcggagctcaatgaaatcggtggaaagcatgggattgggcgtatcgacatggtggaaaacaggctggtcggcatgaagtcacgtggggtctatgagacccccggtggcaccatcatggcagccgcggtacgcgagttggagtccctgaccctggacagggagcccatgcagtggaaggacatcattgccctcaagtacgccgagctggtttatgctggccgctggtttgacccgctccggcagtcctttgatgccttcatggagaaggttaccgcgacgaccactggttcagtgaccctgaagctgtacaagggttccgtgaacgtcgcgtcccggaagagcccctacagcctgtacagggaagatatctcctcgtttgagaacggggagatctacaaccaagctgacgccgaggggttcatcaggctgtacggcctaccgacacgggtccgggcgatgctggagaagggtatttgagtagttgcctgcttgatttagcaataaaaacatctgttttcccagtgattgcagacagatgggtgtttggtggggagttccccatgctgttttaccatccgtttacattgtccaaaccaaaatattatcattgctacatcaaaaaaaaaaaaaaaaaaaaaaaaaaaaaaccccccccc

SEQ ID NO: 125351 - DNA, 478 bp, Zea mays
  unsure (1)..(478): unsure at all n locations
  Clone ID: MRT4577_45793C.1
tcttccttcttcacttccatcactctagtgggttgtcgtccacatgctcagcctcgggttttctttttttttttttttttggcncggcngnnnctttttttgggtggggggtcatctgccctgngctttctttcttttttttgggagagagagaaaaacccctcatagggaaagggactattgntcggtgctggctcaccctcctnaggcttcgtttattgcacttgcgcacgccgagcccagtgatcgctgggtccctgctgccgttcatcggcttccgccttctcctgtggagagtcctttcctgttgtcttataagtgtctcttcacgttctccctttctctggcccctcggtttatttttttctatccgaaagggcttctccctgatcctggttccttccctttcttttccgctttttcccttcctgactggttccccttccttccggaaccctcctttttttgctgtcctttt

SEQ ID NO: 125352 - DNA, 348 bp, Zea mays
  Clone ID: MRT4577_45794C.1
gtattccccccaataaagggggaccccaaaactactgggagggagaagggctccaaaagaatattctttttacacaaaaaaatttttttaaaaaaccccttaacaaaagccgagggcggattcaaattaggcccaacctttaaacatggggataaatttgggggcgaatgaaaaaataccccccccatttttttcccccaaaggtttttttttaaattcaaaaactccctggctccaggggccccccccggtttccaaaaacgggcccaaaaaaaaaaggaagggaaccctttgagtatgcgggaaacaaatcttttaaaggggcccaaccctccaaagggtcaaaaa

SEQ ID NO: 125353 - DNA, 418 bp, Zea mays
  unsure (1)..(418): unsure at all n locations
  Clone ID: MRT4577_45795C.1
gcatgcccagtgtccctcgcggcgacacccctcgatctgcgcgagagtgcgagaccacagcggctcgccggcggcgatgatggctggcagagctcatggccacagaaaccgcctccgccgcctcatcccgcggctcctcctcctcctcgtcgccgtctacgccgcctccttcgcgatctacctcctcctccagtcccattcccaccaccagtcgccgccggaccccacccccaggactgaagcccgtgacggtgtcctggcgccgtcgtcctcgcagaagccgtggccgcgcctcccctccttcctgccctgggtgccaggcngcccgtgccgccgncgncgntgnncncctgggaggncnacnncnncnncggcnncncccgccgcggggncgnccggcccgcgggccgcggcngcg

SEQ ID NO: 125354 - DNA, 562 bp, Zea mays
  unsure (1)..(562): unsure at all n locations
  Clone ID: MRT4577_45796C.1
actctcctctcctccacggctcagccggccgccgccctcctctctcctctcctccacatctctggcgcgtctctcctctcctcagccatggaggcacagccggccgtcggccgtggaggcacagcagacctgcgccaccgccggccgcctaccccacagcagatctgcgcccaagaccagcagccagccagccatcctctgcggctccactccgccagcgccctagaccagcagccagctatcctccacctccactgctctctattttgatcatttgtgaatttcaatggcaacaaatagtgaggcattgtctgtcggtcaaagtaatgactcctatgacccactcaaagatcagtcacgaaggccaaagtcaaatgatccaggatggaaatatgctcatggtcttaatattgatgagttcgatgatggttactgatcatgcataanagtcgtaacttgtgtggttgaacttgtgttgttgaacttgatctgtttctttttatgctaaaaattgggttgtgaactcaagtacttaacttatgtttaacttattctatattcc

SEQ ID NO: 125355 - DNA, 301 bp, Zea mays
  Clone ID: MRT4577_45797C.1
agcttttctaattaatagccaaagatttcatatctaactttgtaaccagaattatacagtaagttgacaccacttagatttaaaggcagacagttttgctttagtacaatagtatacattttataatgatgaacttataatgattaagggacatttctatataaatactacaatagttttatgcacaacttcccattaaaaatgagatatacttattgtttgtctgattttactctgggagtaatctttttaaattacctttacatatatagtcactggcaactgggaataacatgatccg

SEQ ID NO: 125356 - DNA, 313 bp, Zea mays
  Clone ID: MRT4577_45798C.1
aatattttaatgacatatattaatcatattgggtggcacaactaatgttcgtgtgcaaatgatttctaacatgtcattgaaagctctcaaattaccacaggaatcaccacaatccgttattatgaactgcataatcttatccttttatacaacttttcatttctagtaactataaagctataatctgaaacatctcatcctactaaaacgaatgccagatatacctttacctattcatcatgaaattaaaaaaaataaaaaccactttttataggcccttatcacctaaagatcgttctaataatattatctc

SEQ ID NO: 125357 - DNA, 385 bp, Zea mays
  unsure (1)..(385): unsure at all n locations
  Clone ID: MRT4577_45799C.1
cccgggtgggtgtccttttttttcatccacaggccgccaactacaagcggggtgaggggggagcgaatgaagcgacgaagaccctngataggggcatatcggagtttgtagtgatggcggcggacacagagcctctcgagatcctgctccacctccccttgttagctgaggttttttacttgccatatgtgttttttttttgggttgaangggggggccntncttntnntntnacaagactcttttttgcttgctcagtgaccanttttgagggttgcctgctgnnccttctgatncagggtctcangggctcccttgcggagcttcttatttgttctgccgtccccttttcggtgtgtttggcctcttcgtgctttgggggggg

SEQ ID NO: 125358 - DNA, 1074 bp, Zea mays
  Clone ID: MRT4577_4579C.1
gtatatttaaccataagaaataggttaatcccacagcagactttaatactatatgctaaataaagtgttatctttctggatcatctagtctttgaaacacatgcagagcttggtctaaatattctttgcggtagcatgtaatagaaatcattgacttgggtgtttgacatagcaagcacttgatggttttaagttactaatgttcaatttttctgagtatccatattaatgcagaaggccatagttcatttccttgtcgttatttttcactgagaaagaacaaaacattgacttcttgggggagtagacttattaccaacgttggtgtcctgttatctagtttaacctgaacctgttcttgaaaactgtgtcagaaagtcggtttgttctataatatattgtctgtgctatgagctacaataagcaagagtattttaaattagaaagcagttttctaaatgatgcaaaggcagattggtttgagattgcacatggaattcttttagtgaacatcttatcttagtcaagcagtagttaagattaactgttttacttattacccccaagaactctttgaaactcgactaactattctgtggtttctttcaggtagatgactgttttggccacccgcagtgggttgtccataccatgtcctgaaggaagcaaagtgcggttggcccagcttagtggggatatcagcagccctcccctgaagggcgaattccttttgctgttttaacccatgtttgttaggccttttattccagaaacctatgcaaaactctgctataagtttgccaagaaatgctaactgcagttgttatgttttcagcaatttcagggtaagaagatgttaacaagcaaagcaacctctctgcatttgcagggaattgcaggggaagccttctctcagtttatccctttcttagggcctctttgcatttgcagggagggcttatctcggtttatttcttcttcatactctacctgagtgggaacttttgatgctgagtttgtcttatgcctatttattttaagtcgaatgaaatatgaaggccaaatcttgactgg

SEQ ID NO: 125359 - DNA, 212 bp, Zea mays
  Clone ID: MRT4577_457C.1
aaaacagaaaaagctttaagcagttctgccatcggggacatagaggttccacattttgaccccggttatggaacagtaaattatacagacgtacgggccctggcaacacaggaaggtccttgagccgagacttatcttaccgccaaaccaaatgccattggtggttttgggagggaggtaacaattgttgccatcacgagggggtgtattat

SEQ ID NO: 125360 - DNA, 443 bp, Zea mays
  Clone ID: MRT4577_45800C.1
ctactaccctgactgttcttttacgactgctaccaaactattatgatcatgtccctgcctatgagaaccttcttataactaagctccttggcctccacacggtgaaaccttctactggtcgaaagttgcggtttggtgtactgggacacatgtttcgcactgaatagagaatccaccgtatgtctgatttgacaggatcatcttgaggcctgactactgctaaatgttaaattgacaataacacaactctgcaggatgaggatcttaactataccttttatactcgaaccttcctggcgtgaggctctacttaagcagattgaaacagacagcgattttttgagagcacagcagataatggattactgtctacggctgggcgtccatgatagacctccacagcacttgacagcacgtgcattttatctcatgagcatggcctc

SEQ ID NO: 125361 - DNA, 660 bp, Zea mays
  Clone ID: MRT4577_45801C.1
aaaagtcgaccaaatttcactctcgcaaggcacaagacaccagacaagcccacacgtatcgacagctccccaccacgactgagacaggagggccggagataccttgccacacctccaaagcacaacaccataccaaatcacagaacgacacatctgctggcggacgaatataccccaagaggaggagcaccaggagctatggcccgcccgcacgaccacaactaggaaggaatctacaactgcgacttccaagtagtttgaactacactcacatcgatctcccatcaaggagctcgggtcaaagacgatgacgacgcacggcaaccagatcaagcccctccccgccaagagaacattctccagacacctcttaggcaccacgactacagaaggatatgaagccccagcaacaaagttgcaccccaggcacatgaaaagtcaataccgggagaaccgccggcgcccttggggcaagatggaacgatgacatcaaaaatgcccagcaaggatcaacatagaaggcatggaactttccaatgctccgaacaagctgccagagcttatgaggcaaaaacgagaaaaactccagggaacacttgcaaacctaactatacatgacgggcaccaaggggtgacaaacctcactctacatcactctga

SEQ ID NO: 125362 - DNA, 235 bp, Zea mays
  Clone ID: MRT4577_45802C.1
gcggccgcccttttttttttttttttttttttttttatttttggactttcttgatttagttttaaacggggacacagggacctataaaaactgagatacaaatcctcagccaaaaactaagtttcatacaacagagaggacgaattgccgcaggaaaacaaaagatttctaaaaccctcttctccacaaaggtatacaacaagcccctggtgtcacctgaccaagagttccccac

SEQ ID NO: 125363 - DNA, 376 bp, Zea mays
  Clone ID: MRT4577_45803C.1
gggaccaaaatgataggctaccttcaaatttattaaacgaacatatttgcttttgaattctggtacacaagtccaagttgattgcatgatatatggatttacaacatcactattttcttcttttatctttccaaaaatataaacactaaatctatttggcaagaatcgactctgcctatatttttatttttagttttatacagacctaattatctttatttgtatggtaatacgtaggattgcatttattgttcaacaacgcaaaaaaaattttgataaggctacactattcttgccgtaccgggattatcttagtttcgcgcccatttgatgttttagtaacttaatccatatatattaacataattttaggtac

SEQ ID NO: 125364 - DNA, 278 bp, Zea mays
  unsure (1)..(278): unsure at all n locations
  Clone ID: MRT4577_45804C.1
caccaacacgcgcgttctcgtgaacgggtgttccatcggcggacaccctacaggatccgagggcgctgcncagtggatgccggagaggttcatgctatacggctggcacaagtccaacaactacagcggccattacttcatgtacctgtcgatcaactctgggcgcccgatctgaatcggggtcaacttcatgctcgcttaccatggagatcatgctcgccaacctcatgtaccattttcactgttaagtacccaatcacaaggaatacggtgaatgg

SEQ ID NO: 125365 - DNA, 1146 bp, Zea mays
  unsure (1)..(1146): unsure at all n locations
  Clone ID: MRT4577_45805C.1
cactcctatgggcgattgggatcctcgaggccggcccggtgccccgcttcgatcacgaggcacccatccgaacgctggcacctggtcgcgccacgtctccgcacaataccacatccacatggtgcacccccccccggctgtctctacctcctcctcctcctcctccagtcctccctcgctcttcctcctcgcgaaacgacgcggaggaggttgccggtcaggccaccgccgcgcccgcccgcccgccggagacccggtccgcagccaacgcgtgacgtagggaggacacgcagccatggccacttcctcctcgtcgctcacaacgctccactcccgcttcctctctcccaccccttcctcgccctacatggcggcgctgccccgacggcgaagggccggagcgcggtaccctcgcatccgggccattgacctcgaccagaacacgattgtggccatttcggtgggcgtcgtcagcatcgccgtgggaataggtgtccctgtgttctacgagacccaaatcgacaatgccgccaagagggataatacacagccatgcttcccctgcagtggttctggcgcgcaggtatgcaggttttgcagtggaaagggcattgttactgtagtacttggtgcaggcgagactgaagaatcgcagtgtgtcaactgcgagggcatcggctctttgacatgcactacatgccaaggcaccggaatccaaccacgctatcttgaccgcagggagttcaaggatgacgattgatgaaggttttattgccatctttggtagtatatgtcaaagatgtaacatcacgtctaatttgaggacaaagttgcggactcagaagagatgtacctatcagccataggaatcatctgattgttttgtgtttatatgttccagtttggtaaatatagatggcagtcgccctccagcagagaagataatgtctcaaatttaagtgttgaacgttttttgcgggagatgtagtacacattgttcttctggttttgtcatgcataattgcaaataaacaacgcgagtaaacaaaaaattcaaaaaaatttgcaacccaaaaaaaaaaaaaaaaaagcggcccgccgcccgtntagaggatgccaagattaaggtagcgcgtgcatgcgacg

SEQ ID NO: 125366 - DNA, 183 bp, Zea mays
  Clone ID: MRT4577_45806C.1
gtctgttgagggccgcgtgaccagactccaagcaaccccagtctgtcgctggctgcatgtctgccacataaagatggggcgagcaaaagatgcagatgtgcttcgctgagacaagggactgcggtctgggtttttgggcaaaccatgccacgaaaacccctgatcgatcctggaacacagccg

SEQ ID NO: 125367 - DNA, 326 bp, Zea mays
  Clone ID: MRT4577_45807C.1
ccggaatctccgggtcgactccacgcgtccgcccacgcgtccgaaaaaaaaaaaaaaaaaaaaaaaaaaaaaaaaaaaaaaaaaaaaaaaaaaaaaaaaaaaaagggggcggagggggtggaggatctaatgtttccaacgtttggttgcgaggtatgagatcttttatgttgtctctagagttcactaaattggctcgactgtcccacggtttacaatggaaaaactgggaaatccccgatcttacccactttgaagaccttgccctttattccccgtttgggtatttgggaagaaggaaaaaggcccgtcctaccaacttttcc

SEQ ID NO: 125368 - DNA, 359 bp, Zea mays
  unsure (1)..(359): unsure at all n locations
  Clone ID: MRT4577_45808C.1
ccggagccggaccggaacaattcccgggacgacgagcgcaatagaatgcggccgcccnaanaaacaccanggggagggcacacaaagaaacccggccgaccccccacacaaagaacagagnggggaaggacagcccacccacagaaaaggccaccccgagccaacaggacagagggggaacaaaggacgcccggagagccgcagggagcgcaanacacggcaggcagacaacacagaccacacaaaaacggaacacagagaagcggggggaacccacccgcaggcagaggcacaaccagcgagcccgaagcacagaaagagaaggaaggccagaacgagagccgagaaaaagcccccaa

SEQ ID NO: 125369 - DNA, 735 bp, Zea mays
  Clone ID: MRT4577_45809C.1
cgctccgagaatcttcgctcctcgcggcgccagcagctcgtgctactgttgggtcgcgctactccctcgcggatggaagcgcctgcagccgccgagactgttcgtccacgccgccgtcgagacattctcccctcttccaggccgccgccgcctcaggtaactgccatagaaattcaagtgcccaaactgtggggagttagggcatagaaagagcagctacaagtgtctcctcaatggaacaaagaaaaggaaacagaagccgaggaaaaacacaacaaaccaatggtttcccaaaaatgataatggttcttccgagcaccagcactagaatctatgtcacatgagcttgttaccactgagcagctgggaaccactgcatgttcatcacagcaacttgctacaatgccttcttcctctgaccaaatggttgcagctgttcaatcctgcaatgagcagcttggctgtaatatgtccccacctaggaaagtaaggagatcttgtatgcaaaagctaactccgaagaaaaagatctaagggatgtttgtaatctgtccccacctactactacgacttaggtgtaatgtgtttctgtgtattgtgtaattcgaactattgtaattggaactattgtgtttatgtaatgtgaaccagttcaatgaaaccagttcagttcagtgtaaaaaaaaaaaaaaaagggcccgctcgcggtctagaactagtcgttctagatcgcga

SEQ ID NO: 125370 - DNA, 319 bp, Zea mays
  Clone ID: MRT4577_4580C.1
attataatggagattgatctctcttcttgaatccagatattcctatgagtttccatggcacatcacatgaatgtaactccgaaattaccagaggtgacctattgcatcctgccattcacacggtaggacccacgttgtattcattcggctcgcctatgggacccgacggctgattcctgttttgtgccataagatggctccatggtaccataactcacgctctactcatacttatccagattggacgcatcttttgagtgcgctatgctagcaatgatgttgatatgatcatctaacactccctaatactgacatgcac

SEQ ID NO: 125371 - DNA, 402 bp, Zea mays
  Clone ID: MRT4577_45810C.1
ctctgaaaaaggggggaggccgggggtatataacataggagaaaaattccggcggactaccgacaagttgcattactcataaacgcactccttgtgggggcataagagcgctgagtgacgctaaaggatgggacggaatttagtcggttaggccgagaatttcctagtaagagggaggacattgcatctggataatgaaccactggaaggcaggaacgaaccttcgattaaggtttggccggctttaacccgaatacactgggtagatccaacaacaagtgcgggttaaggcaaatactgaaacgaataaccatgatagagaggccattattgtctcttctatagaggcacaaatagagatcgaggttccacccgtggcgcttggaacgctatatccttccc

SEQ ID NO: 125372 - DNA, 4031 bp, Zea mays
  Clone ID: MRT4577_45811C.1
actcccttttctactcgacccataatactgatagagtcagattaaatcatcttatcgatgtatcctttgaatttgttaattattatcatggcagtgttcgagattgcctgtgctgtgaacacttgaatgtagctaacattagttttgtccttgagtgtatcttggcaagcatttttattttttcagatgtttttaaaatattaaaatgatgtattttttgttgtaatgatggtccatcgattgagtgacaatatttatatgtttaagaaaaagaaagtgaaagagcctctagctaagttggttaggtggtctgagtagcactccctaggtcctgactttgaatcctagtgggagcgaagtttaggcagaggttaaaaaaaaggttactcgatggttcccctggttgtgtgcacacgagatggactggcctatggagggaggatcctcgtgtaggggctgggagggctcaaagcacgattgtacgagtaaagatctggtctataggggcggtctttcccctatcggtcgagttgttttattagagtttgtgcccatgtaatgcacacacatatatctgtaggtgatatttttctattcccatgggccgaattttttttgtttatgtgtaagtaatattttattggttgtaaaggtctaactattagtatttttggtgtctctttgcaggaatcatggttctgaagtcgcacacaaatctgctagatatgtgttgtgaagatgtgtttgacttccaacaacctttaagatctcctcgtcatgtggtgaactctcctggcatcatatctgaccctgattgggaaagtagtaatgatggcaactcagttggttctatgcctttttgttttaagagaaagattattgttgcaaatttccttcctgtgatctgtgcaaaaaatgaagctaccggagaatggtcctttgccatggatgataatcaactgcttgttcaactcaaagatggttttccaattggtaatgaagttatttatgtgggtagtttgaatgttcaagttgatcctattgagcaagatcgagtttctcagaagctcttcaaggaacacagatgcgtacctacctttctcccagctgaactccagcatcaattctatcacatattctgcaaacagcacttatggccacttttccattatatgcttcctgtttgtcatgacaaagatgagctctttgaccgttccctttttcaagcctacgtgcgggccaacaaaatttttgctgacaaaattgtggaggcagtcaattcggatgatgattgtgtgtgggttcatgattatcacctcatgcttatcccaacccttttaagaaagaaactgcaccggatcaaagttggtttcttcctccacagcccatttccctcgtctgagatctataggacactgccagtgcgggatgaaattctaaaatcacttcttaatgctgacctcattggctttcaaacttttgactatgcccgccacttcctttcatgttgcagcaggcttttaggccttaattatgagtccaaacgtggccacataggtatagagtacttcggccgaacagtgagcctcaagattcttgctgcaggtgtacatgttggccggcttgaggctacattgaggttgcctgctacaattaaaaaggttcaagaaattgagagtagatatagtggcaagttggtaatattaggtgtagatgacatggacatctttaaaggtatcagtctaaaactgcttggcttggagcttcttctggaaagaacacctaagcttcgaggcaaggttgtccttgtacagattgttaatcctgcaagaagcatcggaaaagacattgaggaagcgaaatatgaagctgaatctgtagctcaaaggataaatgataaatatggttctgctaattacaagcctgttgtcctcattgactactcaatacctttctatgaaaagatcgcattttatgctgcatctgactgctgtattgtaaatgctgtgagggatggcatgaatttgataccgtatgagtacaccgtatgcaggcagggaaatgaggagcttgataagctcagaggtcttaataagagctcatctcacacaagcacacttattgtgtctgaatttgtgggttgctctccatcacttagtggagcattcagggtaaatcccttggagtatggaagatgtggctgatgcatataccagtgtaccagacctgacacgatatgagaagaatctgcgccatgaaaagcactatcgctatgtcaggtctcatgatgttgcttactgggcacgcagctttgaccaggatctggataaagcatgcatagagcaatacagccaaagatgttggacaactgggtttggtttaaattttagagttattgccctttcacctgggtttagaagactgtctctagaacacctagcctcgtcttataagaaggctaacaggaggatgatattcctggactacgatgggacccttgtgccgcagacatcacacgacaaatctccaagcgctgaacttatctctacccttaacagcttgtgcagtgatatgaagaacacagtatttatagtcagcggacgaggaagagattccctaagcgagtggtttgcttcatgcgagaacctcggtatcgctgccgaacatggttactttatcagatggaacagagcagctgaatgggagacaagcttctcaggtatttattctgaatggaagctcatcgcggaccctatcatgcatgtatacatggaaacaactgatgggtccttcatagagccaaaagagagcgctttggtatggcactatcagaacacggatcatgactttggctcgtgccaggcaaaggagctagtgagccatcttgagcgagtcctatcgaacgaacctgttgtcgtgaggcgtggccatcagatcgtagaagttaaacctcagggagttagcaaggggatttccgtggacaagatcatccggaccttggtcagcaaaggggaagtaccagaccttttgatgtgcatcggaaacgatcggtcggacgaggacatgttcgagagcatcaacagagccacctccatttccgagcttcctgccgctccagaagtattcgcctgttccgttggccccaaggccagcaaggcaaactactacgtcgatggctgcgacgaagtaatcagactgctgaagggtgtcacagccgtttcgctccaaaaggatactgccggccatagccatgcggccttcgaggatacgcttgaggttgtcagctgatccacacaagtagtcagtcagctcaaactagctacgtccagtgtgttcagcgtgccaatctcaaatctccactgcatgcaagctactcatcactccaaaccatatgtgccaagtggtggaactctaaattggacggagacaagtatcgccattgctgacacagagacagaacagcggtcacaaactgcaagttccagcgaatggcgtcgcagttgatgattcaatgacgacgacggaaatcacaaaccgcaagttttcaattcgtaggctaagacaactagtgggacgccatacattttgtaggcggctgatctggtggtgaaagggtggatgtccctgctagagccccagcttacggcatctgggagagccttggaagttggaccccgacgcttgtgctgcactgaggactgttacactattttctttgtacagaacaaacaggtgtggttaggcgattagcgctgtgacgattgattgtaattcacccacgtaccattgaggaaattaatggctgcgatggtgaagcgccgtgcgcatggcacattgtatgacgttcactcagtattcggttcgagtttaaagtaggatgatgcggggtaacactgttgtctcgtttttaccataacaacaacaacaataaagcatttttgttcttttaagttaacaaaaaaaaaaaaaaaaaaaaaaaaaaggatttaggcaaaagggaaaaaaagggcggcgctactagaggatccaag

SEQ ID NO: 125373 - DNA, 114 bp, Zea mays
  Clone ID: MRT4577_45812C.1
tggttctgctagagccatggtcgatgagttaagttgtcataccgataagtaattccggtgcagtaactgtaagagttacatatttacctagagtgtggcacacttgatgttagt

SEQ ID NO: 125374 - DNA, 404 bp, Zea mays
  Clone ID: MRT4577_45813C.1
aaatggttaattcaggtaatggctaaaactgacactgccacccagggggatgcgggacaaattattactaaatcatcgccgttaaaggactaaactagctagctagccaggggttatactacagaaaatagttttttaagggggggacaccgccggcagaagcgtaggggcatggagtcggttgttgaaggccgaaaatcgccgtaagttgttgggttatttgcgccgcaaaaagccccggaacctggccgttttgcggttgttgttgcaggatggactggaggaccaacccaaaaatcgcctggaaccggggctgcggttccacctgcctgagctgttggaaaaactgttgccgaaacaactggaactgaggcaagcagtagggcgtccccgtcgggctgaac

SEQ ID NO: 125375 - DNA, 298 bp, Zea mays
  unsure (1)..(298): unsure at all n locations
  Clone ID: MRT4577_45814C.1
gttacaaagcgtatcaaattagttatgtttttttttggatcagttgatgtaggacttcagtattggttacatgttgatgtgaatcgaattcgattttatttatgatttcatgtgaatcaattaatgtaggacttgcatgttggttacttgttgatgtgaagtatgctgtaagtggtagctcaaagcgctttcaggagagaatgttctctcttgaccacttgatctatattctatagncagagaatatgaaagtaaaatctcttatatcatcaaacctttgaattttcagaggagaggt

SEQ ID NO: 125376 - DNA, 136 bp, Zea mays
  Clone ID: MRT4577_45815C.1
ggccgggccgggttcaccgattcgaatctactgcgtcctgcgtccctccgaccccgagctccgaagccacatgatcacgcgtggctttcctcgcgtgtgaccgaaaaattcctggcgaaattcccaacttgtgagt

SEQ ID NO: 125377 - DNA, 220 bp, Zea mays
  Clone ID: MRT4577_45816C.1
cgagagattgagatggcacagaagctattgaactctgacctgggtgagctcatcaacaagatgaaactggcccagcagtatgtcatgaccagcctccagcaagagtacaaaacgcaaatgctgactgctgctcacgccctggctgtggatgccaaacacttactcgaatgtcgttgaccaagcaagactgaaaatgcttgggcagacgagaccacactga

SEQ ID NO: 125378 - DNA, 301 bp, Zea mays
  Clone ID: MRT4577_45817C.1
aaaaaaaaataaaaaaaaaaaaaaaaaaaaaaaaaaataaaaaaaagtcaaacactataaaaaaataggaagttaattattcatacatacaacatacataactcttatataaaaaaacctaaaataaaaattcgctggccctctttttacaacctaattactgtaaaaaccctgtcaataccaaacttattctttttgcaccccataattcatttcactacctctcgttataaaaaataggcccttaaaaaaccttcttcccaacaaatttacagcctttatggaaaatcccactttccct

SEQ ID NO: 125379 - DNA, 874 bp, Zea mays
  Clone ID: MRT4577_45818C.1
gtcctgacgctgtcgatcttcccaggattttggtcaaaagacactggagcacacagcctgggaacatggtgaagtttcttgcttctatgcactccgcaaatcacttgcatcattcagacatccaacctgttgatgttcttttcgtgaacactagaaatgcttgctagtatttattcctggcaaatcgtctatgtgtttcaggtacgcgcttgtgctgatcgcgatgtacaacgtgtgggacctgatcgggaggtacgtgccgctgatcccgtgcttgaaactgacctcccggaagggcacgctggcggctgtcttggcgcggttcctgttcatcccggccttctacttcacggccaaatacggcgaccaggggtacatgatcttcctaacctccttcctggggctcaccaacgggtacctcaccgtgtgtgtgctcatggaggcgcccaaggggtacaagggccccgagcagaacgctctgggcaacgtgctcgtcgtctgcctcctcggcggcctcttctccggcgtcgtgctcgactggctctggctcattggcaagggctggtgagtactgagtacggtcttctgcgcgtgggtctttgagggggatcgattagattttagatctctgtttcgacctcttgtttttgcttaaaaaaacagaaaacttctgtctttaggtagctagtcagagaacacggatactgtaatctgtctaagtttgaaattttctttcgggtgcaatcactcccttttgtttccgacttttggatgttgtatagtattttggaatgaaatattattgaggtgtgagcttgagcacctgggtgtattttcttacaatataatttagctcttgcaaaaataattccct

SEQ ID NO: 125380 - DNA, 845 bp, Zea mays
  unsure (1)..(845): unsure at all n locations
  Clone ID: MRT4577_45819C.1
actcctatgggcgattgggttcctcgaggccggccgggaactgatacggcagctccgccatgaccggggccatccatggcgggccctggccctggccctggccccggcacctctgatcaatgcagccgtgggcacggccggtcgagccgcgcagccggtgatccggtgaacagtgccacggatctcggattgattgcgggtagtaatcgattcgatcgagcgcgctgcgtttcgtgtggctcctcgccgctcagctgaatagctgatctgatcagccgcgacgccgcagcagcatgcatccctggtggctcgcgcgcacgtgactcggggccggggtgccctacacggtatcgacacgccattactcggtgtcgggttttctgaccgtgatcggtgatgaggtgcaaaattgcttgttcgtgctgccaacgcaaggatggataagcagattacgggctctgaggatgctgaaagtggtgatgctccatctcaggatgatgctgaatgaatctacggtgaactaaggtgtggttgatccttgtctgtttgttacgagagatgaatcttttggtgcatggtagatcgagttgatcctgttctggcgtgaacaatctcctggtgtaattaatcctggtcgccttggttaatccttggcaaactacgattgatgttcgctggatttcccaaaaaaaaaaaaaaccgattcgcgtcgctactgccgtgcaattcctgctatgcatgtgtctctgtctgaactctctgtatttctgctacgtgagtagtagtaacagaaatggggatgtcctctgttaaaatnnaataataattgagacagtatttttggc

SEQ ID NO: 125381 - DNA, 215 bp, Zea mays
  Clone ID: MRT4577_4581C.1
gtaagctcggatcctctatagctgccgcccttggttcgttcttttttctgacaaatgcggcttaccttcttcgataaacacacgaaacatgttttcaagatcgagctcccacacggcatattgcttaagttaaattgtccaaatatcacaggctgcctctcttccatcattaaacatatctgttcttgacttgatttctggactcatacacatct

SEQ ID NO: 125382 - DNA, 366 bp, Zea mays
  Clone ID: MRT4577_45820C.1
accccctttgatccgagcgcagccgggcgagaccatgccggccacggacttccatggctactcccggttctcatacttctgccgaatcctccttttcttccgtcgggacgacccggcgatcacgatcacgacgggtgctatgccgcagcctgtcgtctacctggtgctctaagattcatacgcccacctcgacgcgcacctcgcggacctgatcagtcatcgcgctgatcgtgatgatgagttcatgtccatcaagcagatccagcgcgagttgcactcgcacctggtaacacatgatgagttcccacccgcggatgtcgaggaccgctcgagccgctcctacgcgcttcggcgcccagcattgat

SEQ ID NO: 125383 - DNA, 719 bp, Zea mays
  Clone ID: MRT4577_45821C.1
gggaccctcgaggccggccgggccgggatcctatcgtggtcgcgccatgcctcactgtcctcctaagccatcctccagcttcccatggctccccagactctacggggagaagctgcaacgacgagatggagaaggggagcacgggacagcgcgggaggatctacatacgggacaccggccttgaagacaagcggtccaaggcgaaccaataccaaactacgtcactggcgcatagcgaggggacgaacaccaacgaagactgacgcgcactgcggataagcggatggcctacactcaacaaagacaataccaatgagaacgcggcacccactaccgctgcatgagacgccaagtcacccggccacatggaaactcagcttgcatccgacgcaagattacgccaacctgacgacgtgatccatgggccgcaaggacggggcgtccatgtaccccagcagcatctaaagataatctgaaatgtgcggaagacccattgcatctagatatatctgcagctggccttgtaaggttcgatgcaaggcctgatagttagaaccaaagagctgtttatctgagaaccatttaaaggtctcagagttctgctgatatggatcactggaacgatcatatgaagcttaagatagaactaattagcttgacatactactgtatcatgactctgtactcgcataccatgatcttattgcatctagagcgag

SEQ ID NO: 125384 - DNA, 146 bp, Zea mays
  Clone ID: MRT4577_45822C.1
agcgagcctagctttcatctgtttggattcatcatgtgcataggagcaactggcagcaaggatgttgaagacagtattgcaaggaattcttctgtattccgatgggtaacttcgtcttctctttttatatgtactcactgtttaca

SEQ ID NO: 125385 - DNA, 331 bp, Zea mays
  Clone ID: MRT4577_45823C.1
tcggtaggtgtgaagatgtttgctgggtgaaaacgaaccaaaaaaaatgcggttccaatcttgcggattgcctaaaatccttggtggcgcccttaaaagggccttggttggttggccttaaaaggaactggccggggtaccccggttggccatgtaatccatgcgaattttgccccaattttaataatagctgaggaaccacccgttggttaaccaaagaagcctggggccttgtccaggatcattgacctttttgggcttggaaggggcgggttcgaactttttggaggggatcataacatccgcccggggtggctaacccttggaaaaa

SEQ ID NO: 125386 - DNA, 322 bp, Zea mays
  Clone ID: MRT4577_45824C.1
aaataattctttttttttttttttttttttttgttttttttttttttttttttttttttttttttttttttttttaaaaaaggcccccaccgggggacttaaatttcaaacgatccccccggggggggcccaaactgggggaaactcccgttgcattgccctcaacccggcagggcctttgacccattggctctacaaaaaaaaacggcaaacggatcggaagaccgccctgcccatgcattatattactagcatagaacaacctcttggtttccacaccagggtgggccctaagcaaaagcttggacttccccctcagggt

SEQ ID NO: 125387 - DNA, 164 bp, Zea mays
  Clone ID: MRT4577_45825C.1
gtgacatactagccacatataaggtttattttttacacaacacaaccttacaaggcagagggtcatcttattatcaatgctttctcatatagcaaacatactgagaccattatctcactatgctatcacaccattatcttttcactattttttcactgaacatt

SEQ ID NO: 125388 - DNA, 312 bp, Zea mays
  Clone ID: MRT4577_45826C.1
ttgtttttttttttttttgttttatgtggtacgtgctttgaacagattttttttttttaaaattaaaagggggccgggtcttctttggataaccccttacatgggaataattgcctcatcaggtttattagtaggagccggggaatgaaaagaacatcaaagggaaattaagcgcaagggccatgaccatggccactgaaatggggcttaattctgattattacaacatgctctgccgggccgggtacttggttatatgccagttttgccagccggggtgcaccccgccgatgcggagaggccatcgggggc

SEQ ID NO: 125389 - DNA, 403 bp, Zea mays
  Clone ID: MRT4577_45827C.1
cgaggatccgggcgacctctacggggtgatcgccgtcgacgacggctccggctcgcagaggctcttcgaccggaacaggtccgacgtccagtcggtccgcccaggcgagcaggcggagatcacgggtcccggccgagccgtgtcgggcgccgacggcttcgccgtcagcttcgatctcatggaccgagacacggacccgtctccggacgacgaggtgagcaaggaggtggtggtgtggaacccgctggacgccaccagcgacgagtacgacgttatccgcagcaggacggtcgccggcaagcacgggctcgtcgagctccgctacgcggtgatgacggacgcggcggtggccaccgtggaggtcctcgtggccgagagcagcgaggacgtcccggacgtctac

SEQ ID NO: 125390 - DNA, 203 bp, Zea mays
  Clone ID: MRT4577_45828C.1
ccacaaaaaaaaaagcccagttttacccggaagatcccaatcggggtctaagggaacaaaaaagcaaatatccgggtggcccattcagaacccagcttggcgggatgggggcaacctttcttttaaaaatcagaaggacggtttcctaacggcccccctttttttccgtggggggggccggccctagttgttaatcctttaaa

SEQ ID NO: 125391 - DNA, 233 bp, Zea mays
  Clone ID: MRT4577_45829C.1
cggacgctggacagcgtcttcacaaacgccggcgcaaactctcgcccgaacccgacagatcttaccattccctattagtccatttttctccgtccccaaatgattcctttcagacttttcggatataacccccccctttttatttaagagaaaagaggaggcatctccgtccacatcggcagccggcatccaatcggcaaccgtgctggactttatcctcgacacggcatcac

SEQ ID NO: 125392 - DNA, 467 bp, Zea mays
  unsure (1)..(467): unsure at all n locations
  Clone ID: MRT4577_4582C.1
gctnctggtcgccgtcgactgttaaccaccaacacaggtgtgctcaaagtcgaagtaccatgtctgggggtctgacgcctgcccagtgccgtctggccaaggaagttgtttaactgatgacaggtgaacccggcgaccgaatcccctgtgatctttttttcttaacgacaacggaactaatgctggggggggccttgttttttatgttccaacctctacgaaaggcgtgaacgatctggggactgtctttgacagaggctctttgtaatatacatgtctgtgaagatgcggactacctgcacctgaccataaataccctatataagctttactgctccctgggattggcttggagcttttcctgctcagcttagctggaaggcaaaaaacgcccccttgcgggtggtcccgtgccatcactgtgataccactctggaatagctcggattctaaccttgcgtcaaacc

SEQ ID NO: 125393 - DNA, 251 bp, Zea mays
  unsure (1)..(251): unsure at all n locations
  Clone ID: MRT4577_45830C.1
ggccgctttttttttttttttttggactaaaggacctgtttgtatcgcataaatcaaaaccaatatctgaaaatcgaaacagacagggcntctcgcaggtacatctcataaaaatcccaatttcntgaaataccatgacacnnatcgctgtcttaacannaaccacaaaggncnntcggaccacccnnagtcttnnnacaaacctcnnaaaacatcagacgagnttcttgggacccgccatctgtgggctc

SEQ ID NO: 125394 - DNA, 546 bp, Zea mays
  unsure (1)..(546): unsure at all n locations
  Clone ID: MRT4577_45831C.1
atcaggttcattatgtttatgctttacaggggccccacccggggggcgccaaaaaaaaaaaaaaaaacacaggccaagccgccccccgggggccacacccccctaaggaccccgaaaaaaaaaggccctcaccccaaaaaaaaaaaaaaggggaaaaaaaagccacagcgacacaggccccaccgccaggaggaccgggcaaacaacgcgccggcggaacacgaccgcctttgggggggaaaagagccgccaacaccccccggaaaagggggggaggccccgcccaaaaaaaagagggcggcaaaagcaccacccccgcgggggagagccccccagggaggaggagcaaaaacaacccccgccagaatttgaaacttaaggaaaacagacgtgggggaaggggcgaggcacgccgagaaagggggggtggcccccttacacccaccggngaagataaccccctgccgtcgagggaccgtgtggaggactacaagtgaaaaaagccacggcaaagatacgacatgggggcaacgcccgggggggggg

SEQ ID NO: 125395 - DNA, 343 bp, Zea mays
  Clone ID: MRT4577_45832C.1
agtatgagtaatgacagtggagagcaacgaaacgaaacccaggtttgatgaacgataataggaataatgctgtaaaactagcaaacacagaatgagaccctaacaggtgcggcggggaaaccagccgtgactgcccagggttgacatgcattgcactaacactagaacgatgatgaataaaccacaaggcaaggaagtatctctgggaggcaagacaagcacgggttctgaacataagaggcaggcttgtgactatggggcaccatgtggccacccacaacacatgcatggacaggctggtcgggatgaaacaaaacaagcatcacgggcacgaaatgatcct

SEQ ID NO: 125396 - DNA, 509 bp, Zea mays
  Clone ID: MRT4577_45833C.1
tcgcgatctagaaccggacgcgtgggcaacccccgatgcgatgggtgcccctgcccctcgatagtcgcgccgctctcctgcccgttcggccgttccccatttgcctcgtcgcccaccgccccattagcgccgccctcccctatccgacccaacgccgccgccgccgccgcatagacctcgccggcgcctctgcgccgccccgtggcctccagaggtgctattcgcgcgcgatccgccgctgcgtccgtcgctctggcatcgattcggcggcgctgggagtatgtctctggtgcaagtgtgctgaagatgaaggagaggagctctttatgtgaaagtgcagccgatggaaactggggtttgaaatataaaaggaaaagaagcaagttaaccgttagcccatctaatgagaatgaggctacctcaccaacatctgactctccaatgagccatggttccaccaaaaagaagttgaagcatgacactaacatttctccatcagccaacgagat

SEQ ID NO: 125397 - DNA, 558 bp, Zea mays
  Clone ID: MRT4577_45834C.1
ggttgtgtgtttttttttttttttttttttttttttttttttttttttttttttttttttttttttttttttttttttttttttttttttttttttttttttacccaaaccgccctgcctggaaaatagatagaccgaaaaaacaggggccgggggggggaggacacaacaaggtgcaacagggggagggatggggcccccccccactgacaccgggccccaccaccattaccacccgacgcaaactttatttagcccacgtaactcggagcccgcaccggacacgtccaccccaaaagaactggtagctacctaccgggcgtcgtcccaaacacacccccccccagggggggacccccgtaaaaaccggaggggactaaaaaaaaaaaacccgggtaaaactgccatggacccccggaagggaataccccgccacgcgcgcaagccaatcccttgggccctggccccccccctttggtgcccacggccttacttggtggccttttggggctcctaaagaaaaaaaacctcctcccccttgggggccggcttctgggg

SEQ ID NO: 125398 - DNA, 374 bp, Zea mays
  Clone ID: MRT4577_45835C.1
atggttacgttggcggtacacatacagggccattggcccaaataatcgtttttcgcccttctaaccttgaactccatttccatactgcttcattcttgtaccaaactggccgtcaacacggcctcacctcggttcatccgtttcaattacacaggatttggctgatatccatggactgattcaaatcttacccgggttggcacatgtttatcgagacgttcaacaacggatgcagccctaggactgacgtcgggtcttacgctgaaatgtccgcggaaccccgatttgggaatcttcctacgcatattcatataagtatccccgcacgagagcatgggactgaatgatgcgtcacaagtctagacggcggtaga

SEQ ID NO: 125399 - DNA, 2484 bp, Zea mays
  Clone ID: MRT4577_45836C.1
caggccggccgggccgggttgcgctctttctctttcctcacgacgccgccgttgggagccctgcttcgggagagccccaacccttatcaaaccctaaatcaaaaactacccaaaaaaatccgcaaaatccagaaaaaaatcccaaaaatcaccacttgattggagatggcgacgcaagggcaagcggcggctggatccgcgtccgagtccggcggctctccggctgccttagctgcagcagccgcggcggcggccgcgttcccggcgacttcgctctacgtgggtgatctgcacgagagcgtgcaggacgcgcagctcttcgacgttttcagccaagtcggcggcgtcgtctccgtgcgcgtctgcagggacatcaactcccgcaagtcgctcgggtacgcctacgtcaactacaacaaccagggcgacgctgcacgagcacttgaactgcttaacttcactcctatcaatggaaagcctatcaggatcatgtattctaaccgtgaccctagctcgcgcaaaagcggcacaggaaatatatttattaagaatcttgataagtcaatagacaacaaagctttatatgacacattctgtgcatttgggaatatactttcatgtaaaattgcaacagacccttcaggagaatcaaggggctatggttttgttcagtttgagaaggatgaatctgcacagtctgctattgataaactcaatgggatgcttatcaatgacaagaaagtgtttgttggaccttttgttcgcaagcaggacagggaaaatgtctcgagtaatatcaaatttagtaatgtatatgtgaagaatctgtcagatactgttactgatgatgagttgaaggagatgtttggaaaatatggaaccataactagtgctgttgttatgcgggatagcgatggaaaatccaggtgttttggatttgtcaattttgaaaatgcagatgctgctgctcaggctgttcaagagttgaatggcaagatattcaatgataaggaactgtatgttggaagagcacagaagaagtctgaaagagagatggagttgaaggagaaatttgaaaagaatgttcaagaggtagctgagaagttccaaaacacaaacttgtatttgaagaacttagaggagaacattgatgatgagaaattgcgtgaactctttgctgagtatggcaatattacttcctgcaaggttatgcgggattcgaatggtgtcagcagaggttctggatttgttgctttcaaatctgctgaagatgctaaccgagctcttacggagatgaatggcaaaatggttggaagcaagcccctttatgtagctcttgcgcagcgtaaagaagacagaaaggcaaagctacaggcacaattttcacaaatgcgtcctgttgcaatggcgccttcagtaggtcctcgcatgcccatgtttccacctggtgtccctggagttggtcagcagctgttctatggtcagccaccaccagccttcatcaaccctcaggctggatttgctttccagcaacctctgatgcctggtatgaggcctggtggtccaatgccgaactttatgatgcctatggttcagcaaggacagcaaccacagcgtcctgctggtagacgtgctggtggaatgcagcagcccatgccaatgggtggtcagcaacaggtgttccctagaggtggtcgtggctatcgctatcctactggacgtggaatgcctgatcctggcatgcacagtgttggtgctgtgatgccaccttcatatgagatgggagggatgccaatgagagaagctgccccccaacctgttccaattggggcgctagccactgcacttgctaacgccccaccagatcagcagagacttatgcttggtgagaacctgtatcctcttgttgaacagctggaacgtgagcaggctgccaaggtcactggcatgcttttggagatggatcagacggaggttcttcacctgctggagtcgccagatgctctgaaagccaaggttgctgaagccatggaggtcctccgctctgcccagcatctccagcagagcaatgtttctactgagcagcagctggctaatctatcattgaatgatggcgtcgtctccagctgaacgttaatgtttctgatgtttcggaagtgctgccagtttttgcttgaatactaccctatctagagtgtaatgactttgtttacttggtttgttggagttttagctgctcctattactaggggttggttttgtcttgactttgttattttggttgcatggataatcgtttcgtttggatctattgtccgattgttactcgaattacaacagttgagtttttgggcgtcattggttttctagctgatatttcattaccctatttaccgttaagtgtagcgccacaagcaaattctactacatgggtctgtttggttatatggattaagatgtggaaggagtaaattggattttttt

SEQ ID NO: 125400 - DNA, 203 bp, Zea mays
  Clone ID: MRT4577_45837C.1
acgggcctggccatcaagctaggtgctcgtctgaccgaggtgcggaggaacggaacctgcccctggctcaggcctgatgggaagacccaggtgacaggcgagtaccgcaatgagggtggaacgacgccggcgataaaagcagtgactgtcgttatatcaacacaagtcgacgagatagtaaccaatgttgagaccgctgctga

SEQ ID NO: 125401 - DNA, 454 bp, Zea mays
  Clone ID: MRT4577_45838C.1
cccaaacaattttttcccttaaaaataatcccctcccctttaaaggggccaaccagggcatggcccaccccccccccccggggggggggggacccttttttccccacccccccaaaaagaaaaaaccaccgggctggggggctaccccggggcccctttaaatttttaccgcccccaaagttcccccaaaaaaaaaccccccccgaaggtgccctgaaaggggagggccccggttttttttgaaaacccaaaaaaaaccccccccgggggggccctcaaaaggggaaattcccccccccgggcggggcgtttctaggggaccccagcccggacccaaactgggggaaaaaaagggaaaaagggttcccgggggaaaaagggtacccccccaaaattcccaaaaaaaaaaagccggaaaaaaaaggggaaaccccgggggccccaaaggggggcc

SEQ ID NO: 125402 - DNA, 478 bp, Zea mays
  unsure (1)..(478): unsure at all n locations
  Clone ID: MRT4577_45839C.1
tnccgggtnaatttttggttttttngaaaaagcttgtgggnaaaaaaaatgaaacaaaccggtccaaaaaacgcagttagaaaaactgaaccacccctaccttaatgggggggtgggaccatcaaccattgtaaacaagttcaaaattttactggggtcgaattattttggaagttgttcatttaacagagggttaaggagatgacccaaaaatttttttaatgaaaaatttggcagttgatgaaatgaaaagaatgggaggaccaaaaaatgggggtaacgggaacaggtttggtttngggaggtgaggtgatatggggcaaggaagnggtgttgggagttttaggagaaaaaaaacgggtgggagaagtaatggaggggttggggggggnggaggagtatggaaggttgtggggctttttggtaaaagggggtttgggatggggacttgggggaaagaaggggggggggggggggg

SEQ ID NO: 125403 - DNA, 511 bp, Zea mays
  Clone ID: MRT4577_4583C.1
agcagtggtaacaacgcagagtacgcgggcgtctacttaaattcgaacgggttttcaaagcacaaaaacgcatacatatgtctgttttcaaagcacaaagagttctagatgagattcgctggcgttactacgaggaaaccgttatgatactgaatctcatgccttatcgagcatcgtatcccatcttaaagttggtttattcggcagcagcaaatgctactcattatagggatttcgacaaaacgaatttattcatcactaaagccgaagtcagtaggagtactattatgaaaaaattcagacctcgagctcgaggacgtagttattctataaaaaaaacgatgtgtaatataacaattgtactaaatatagtaaagaaatcaaaataatctttagatcaatctaagatttcgattcccagtaaaaaaaaaaagaaatataatagaaaaatatgggacaaaaaaaaaaaaaaaaaaaaaaaaaaaaagtactctgcgttgttaccactgct

SEQ ID NO: 125404 - DNA, 442 bp, Zea mays
  unsure (1)..(442): unsure at all n locations
  Clone ID: MRT4577_45840C.1
ttttttttttttttttttttttttttttttttttttttttttttttttttttttttttttttttttttttttttttttttttttttttttttttaggggaccaaaacatgtttttttttttttggaaaaacaaaagaacaaaggggggggtgcttttgcttataataagagttttttcagcttcgaaaacaaaaaagttgccagtttgaaagtgaggatcccaaatttccccaggagttttgtcctaaaatagggaaccggtgcaaccaggaattggtgcaaagaaacgcaagggtcccattgggaaaaaaaatggataaattcccctttggcccaaaaagtttttaggggaatgtgaacaacccaccaattttttttgtttgggacggggggttgatggccccccacaaaancaaaatggtgatggaaagggggccccccc

SEQ ID NO: 125405 - DNA, 1387 bp, Zea mays
  Clone ID: MRT4577_45841C.1
ccggccgggagctatctcaatttctcagacccatatggaagtccaggtcctcacctactcctccggctatatatgaaccgtgcacctcctccatttcttttcagctctactcgaagagcgttctaccaccacaccacaatctaaaacccaaacgaaataaaaggaagaggtgaaaaaacaaaaggtgttgtgcaatcgatcatggtgaccgtggccaagatcgccatggagtggctccaagaccctctgagctgggtgttcctgggcacgctggccttggtggtcctgcagctgcgacgacggggcaaagcgccgctgccgcccgggccgaagccgccgccgacggtgacgacctgcacaacaccctccggctcacgcgcgacaacatcaaggccatcatcatggacgtgatgttcggcgggacggagacggtggcgtcggcgatcgagtgggccatggcggagatgatgcacagccccgacgacctgcgccgggtgcagcaggagctcgccgacgtcgtgggcctcgaccgcaacgtgagcgagtcggacctggacaggctccccttcctcaggtgcgtcatcaaggagacgctccggctgcacccgccgatcccgctgctcctccacgagaccgccgacgactgcgtcgtggccgggtactccgtgcccaggggctcccgcgtcatggtcaacgtctgggccatcggccgccaccgcgcctcgtggaaggacgccgacgcgttccgcccgtcgcggttcgcgccgcccgagggggaggccgcggggctcgacttcaagggcgggtgcttcgagttcctgccgttcgggtcgggccgccggtcctgccccgggatggcgctcggcctgtacgcgctggagctcgccgtcgcccagctcgcgcacgccttcaactggtcgctgcccgacggcatcaagccctcggagatggacatgagcgacatcttcggccttactgcgccgcgcgccacgcggctctacgccgtgcctacgccccggctcaactgccccttgtactgacgccgtgcacgtggcgcgcggggactgccactacgcatgcatgcgtttggactttggtgttcatccctggggtggggccgccgtgggggaagttaggagtttggtggctttctagctctgtcttcttgttttctgtttattataaattttcccaacccttccatgcctgatcgatgtgcggtaataattgttagaaaatgtgacattttgtatgtaatcaatctatggggtgcaattgttatctcgtcaaaggacacaccactcgacttgcaccccttcatgtatatatatacatacacgaacatcccctgcaataaagaaatcgctgtcaaatctttcggaactcc

SEQ ID NO: 125406 - DNA, 236 bp, Zea mays
  Clone ID: MRT4577_45842C.1
gaacagtatataagctgacttcataacatttggaattatatcagaagcctatgaatacacatctagacatacacaatcaagaattaacaacaacaaagccttttatcttaagcaagttggggttggctagagtaaaaaaaccaatagaacccacaaagtcaaggttcagtcacatggatagctgttttccatgcactcctattcaaggctgaatctttggatatatatcatccttt

SEQ ID NO: 125407 - DNA, 823 bp, Zea mays
  Clone ID: MRT4577_45843C.1
gctgcaagtactgcttttatgatctgtgccttgactgctgtgtggagatccgcagaggtgagattcctggaggagaagagataatgagagtaaagcctgaagatagaggccgagcatatctttttggtactactaactcaaaggatgggagtaaaaggttctccatgaggaggcacagctcatccctggagaatgagccttccaatgtagtaggttctagtgagggggcaaataactctctggagctgtggaaagcagaaagtgatggtagcataccttgcccaccaaaggagctaggaggctgtggcggttcgattttggatctcaagtgtttttttccagaaaagatgctttcaaatttagaagaacgagctgacagaattatgaggagcgaagtatttgcaaaagcagtagccaaaagaagtgaccagtgcccttgttatgaccattcaggaaacataagaactcaggacgtgcgagagactgcaaatacgaaaggctcaagtgataaccatctctactgcccagttgccactgctatcaaggaggatgacttggcgcactttcagatgcactggacaaaaggcgaaccagttattgtttctgatgttctgcatttgacttctggtctaagttgggaaccattagttatgtggcgggcattgcgagagaaaaagactaatggtgacgtagaagatgagcactttgctgtcagggcattagattgccttgattggtgtgaggtcaggagttatatttcattgaatgtttgagtgcattctgtgaccttttatatttatgtatatatttaaatgtttccgtt

SEQ ID NO: 125408 - DNA, 264 bp, Zea mays
  Clone ID: MRT4577_45844C.1
ctccgcaaacgtgatgcatatcaagattttcaagagggagatatggatcacggttgctgaatctgctgaagaggaaggctatgctacttcaggaagaggtacttgctaatgaaagcgaatatgacgaggcagaagatgatatattctgtcggagacatggaatcaaactgtacgaacatgtgacagcctcgacaacgatccatatcaccgccaagaatcccacggatcactggcgaccccacgattcggataatgcagcggacc

SEQ ID NO: 125409 - DNA, 242 bp, Zea mays
  Clone ID: MRT4577_45845C.1
gaatgaacaatctttgcttgaaaacatttttacattaaaaacgcttttcaccatttggggagagcgttaggataggtacacacataaccactaataaggttggccatacatgtatagcccaaactgtttgcagatgtgtttgaactatataaggtgggtactggcatattaggcattcactacgtaagaacaagccatggttgactatgggctatggcatttaagaataacataacattaca

SEQ ID NO: 125410 - DNA, 436 bp, Zea mays
  Clone ID: MRT4577_45846C.1
gcgtacatcagacagcaactcgaacggttgctcttcctctgctctccgaggcatcgtcgacatgtcctccgggtcggaagtgcgttgaaaaggaatcccggagcacgcgcgccatcacatggtgaaccgaatctcctcgatcataatcaacgaggtgatcaatggactgaacatggacgccgtgccgtgcataaacatctgcatgctcggagagaacatgcgctacaacaagaataagctccgtttgctccggaagcggatgtaaccaagtcgagccattaagccatcacatctttttacccccggaatataccatgggtgcaccatacgtatgattattaccaaaataactatagcaagaatgagaatcttgcgaggatatacatcgacaatgtcgaggcgccatggaacccaaaaatccagagtatggccatcc

SEQ ID NO: 125411 - DNA, 340 bp, Zea mays
  Clone ID: MRT4577_45847C.1
caaactgcagaaactgatagatgagcagcaaccacaatctgcactgtgctagagagggctcacctcattagcatgccttgttcggtttttcatatggcatatggattggaagggattgagctaacggataagaactttgacttgatatagattggaacccatccaatcccctcaaatccatatggattttgatgaaaccgaacaagcactaagttgaattggacagctcacttcaatccagacccctaaaccttttgtaggccttggttaaaattgttgtgaaatcagatggctactcgaggctgggcacttggggtccggaataataccgaaaccttct

SEQ ID NO: 125412 - DNA, 364 bp, Zea mays
  Clone ID: MRT4577_45848C.1
atttgctagcagatcatcttcctactctttactttatttattgtttgaaaaatatgtcctgcacctagggagctcgtatacagtaccaatgcatcttcattaaatgtgaatttcagaaaggaagtaggaacctatgagagtatttttcaaaattaattagcggcttctattatgtttatagcaaaggccaagggcaaaattggaacactaatgatggttggttgcatgagtctgtcgattacttgcaagaaatgtgaacctttgtttctgtgcgtgggcataaaacaaacagcttctagcctcttttacgttcatctccaccagtatgccctctcatactctatataaacacatcaacagcatc

SEQ ID NO: 125413 - DNA, 1266 bp, Zea mays
  Clone ID: MRT4577_45849C.1
atgctggggaggagggtgcaccgagttgggccccgcctccgcgtgggcagcggcccgctccttccctcagtgatcgggggagaagggcgttcgccgtccgtggcgctgtcagctgccgcgtgtccggctccccggcctgagcggctctggtgctgcttccggtgccgcctcctaccgctggggcggagcgtggctgcccgtccgccgcacgggtgttggttgcgccgtgcgcgggcaagccacctccaggtcctccctgcgcctccgggtgcaccgggggggtcgcacaacacgtcgtacgccacgagggcggcgttcgtgttctgggacagtcccgtccgcgcctgtggcgaggacgggagtgaggacctgccggtgcgcactggtgcggccgccgttcgccggtgcggtgttggtgggcaggtggccgctgtcgtcggtgctgaggtggtggtcgccataggtgaggcttcctctgccgaagcggttgcctccaccgacgagaccgtcagtgccacctgcgctccggacctccggctccttggctttaatggctggttctcgtccctcgtaaggggacgtcgagaaaaaccaccgagggcgctgctgacgcctaagtctaggtaccatagttatcccaagtacgtctctctcgctcggtttttggaccttcggccgctctgtgacgagctgaagccggaggcagcggtggcgcggacagatgcggtgttggctcgaacagaggcttcgtcggcccaggagcaggtggcttccctagccgaggagatgcagcagcggcagctggagcttggccaggtcatccgcgagcaggaccaatcccgggaccaagctatcgaggctgacattgtccggctatctgcagggttcgagacggctcttaacgagtccgtcaagaactgcaaggcgcttgcccaggcggctgagcagaaggaggccgaccgcgtggccatcagactccgcggggcgctgcaccacggtgttaggcgggccttcgccgtgctcgcttcccactacgacgtggatctggagcggatcaacgaggggtactgcttacccgacgaagaggaggccgccttagccgaggtccagaggctcgacgcggctgtcgagggcccaagagcggcgctggcttcctcctttgaggtggagatccttccgcccgtgtcgccgtctgaggccgggccagattctgccgagggtgggaacgacgccgagggtgctgctcctccccctgccgatgtatga

SEQ ID NO: 125414 - DNA, 383 bp, Zea mays
  Clone ID: MRT4577_4584C.1
accatagcgcccgatgcccaacgtggttatgaggagagaaagggccgggatagagtactgccatacgctatgctaaaatatagtgaagggtcttcactcgccaccgagtgacctcaaggaggagcttacgaaatgagtgagtgcactagaatctgtatatcattctcggaccctgaatctcaagtctaagacaagatgtgcccttacgcacttctttctacccaataacgctacttataattgatttaccatgcatatttgataattttgatcagacccaataactcaacctatgttgttcatcacgtataccccgtttacccctcaatcagttctatcgacccgctacctcttaatgctgtgctgcctgcagatagaatcat

SEQ ID NO: 125415 - DNA, 558 bp, Zea mays
  Clone ID: MRT4577_45850C.1
atggagcggctagccgaggcgtccgctcaggccgggacccttgcggagggcctggttgtggccgtcaggtctgcccagtccgcccaagctatggcctcacagcagcgtgcccgggccgaagggctcgagacggctcttaacgagtccgtcgagaactacaaggcgcttgcccaggcggctgagcagaaggaggccgaccgcatggccatgtccgaggctatctcagccttttgtcgggcctttggcctcgacgatcagactccgcgggcgctgcgccacggcgttaggcgagccttcgtcgtcctcgcttcccactacgacgtggatctggagtgggtcagcgaggggtactgcttacccgacgaagaggaggccaccttagccgaggtccaaaggctcgacgcggctgtcgagggcccaagcgcggcgctggcttcctcctttgaggtggagatcctttcgcccgtgtcgccgtccgaggccgggccagattctaccgagggtgggaacgacgccgagggtgctgctcctgcccctgtgttgtggactctttcctag

SEQ ID NO: 125416 - DNA, 777 bp, Zea mays
  Clone ID: MRT4577_45851C.1
gccggccgggccgggatattcattgttcggcccccaagcgagagcatactccgcattgcgaatttgcaagctaaccatggcaccctcgcatgcccactctcgctccgtgccgctcctcctcctcgtgataggagtttgttgctgctgcagtggagcatcatcgcccgtcgtcggtcgtctcgacgacgacccgacctgtcctcgggagccgacggcggcggtggcagccgtgtcgtcagctgagtctagctacgtcgagccacgccggtgccagccgccggcgccgcacatcgcggtggccgtgttcccctacgacgtcgacccgatgcagttcgcgctgaacctggagtacaccgaggccgagttcttcctgcacggcgcgtacggcgtggggctcgaccacgtcgcgccgagtctggcgctgggcggcccgcctccggtgggcgcccggaaggccagcctcgacgaggtgacgaggcgcatcgtcgcggagtttggcctgcaggaagttggccacatcagggctatccagcgcacggtcggcgggattcctcggccgttgatagacctcagcgcccacaacttcgctagggtgatggacgaggcgttcgggacccgcctggaccctcccttcgatccctacgtcaacagcctcaacttcctgctggcctcgtacgtcatcccctacctcggcatcaacggctacgtcggcaccaaccccatcgtcgacggctaccagacaaagaagcttctggcagggctgctgggggtggaggc

SEQ ID NO: 125417 - DNA, 699 bp, Zea mays
  Clone ID: MRT4577_45852C.1
tatcaagccccgatgtcttatgtgtaggagtttcaatttgatcagcccactttgactagcattacaaattacctcactgtcattttttactttgttgcatgcaattaaatatcaagcagttctccaatttactaacaaattgcttggaacgaattattggcatttttgtttggaatatttgggacactacacatgtacttggaattatctcttacccaagtgaggtgctgtgcgcctgtgccaacagtatcaaaaccattagtgtacagacacgatgtttatgagcacgaatatttagggcatgtttggttcagctttttctgatcaacttttctgagaatctgactgtggagagaatctgactgtaggaagaatatgagtatcgtgggcattacgtgcaaagaaaaattaagtggtgcaaaggtttcaggatctagaaagcgacggattcctactatcatgacaactcggccgattctgtgttcatgttgattttggatgatttttaccaaagcaatttttatagaagcggtctgaaaagctggatgtttgatagtccagagtaccttttggtggccagaagctgaaaaagcccaaacaaacagtgcctcagaaggaagaaccatccattttttccctttccttaccacagctagcactataacatatctagtcctcatatacataaacaaaggcata

SEQ ID NO: 125418 - DNA, 1379 bp, Zea mays
  Clone ID: MRT4577_45853C.1
ccggccgggccgggagcatactccgcattgcgaatttgcaagctaaccatggcaccctcgcatgcccactctcgctccgtgccgctcctcctcctcgtgataggagtttgttgctgctgcagtggagcatcatcgcccgtcgtcggtcgtctcgacgacgacccgacctgtcctcgggagccgacggcggcggtggcagccgtgtcgtcagctgagtctagctacgtcgagccacgccggtgccagccgccggcgccgcacatcgcggtggccgtgttcccctacgacgtcgacccgatgcagttcgcgctgaacctggagtacaccgaggccgagttcttcctgcacggcgcgtacggcgtggggctcgaccacgtcgcgccgagtctggcgctgggcggcccgcctccggtgggcgcccggaaggccagcctcgacgaggtgacgaggcgcatcgtcgcggagtttggcctgcaggaagttggccacatcaggttcctgagcccctttcctgctcatgcatcggaagtaccacggttctgatgtgcatcttgaattttggtttgtgtgcacgtgcatacagggctatccagcgcacggtcggtgggattcctcggccgttgatagacctcagcgcccacaacttcgctagggtgatggacgaggcgttcgggacccgcctggaccctcccttcgatccctacgtcaacagcctcaacttcctgctggcctcgtacgtcatcccctacctcggcatcaacggctacgtcggcaccaaccccatcgtcgacggctaccagacaaagaagcttctggcagggctgctgggggtggaggcggcgcaggacgcggtgttccgggcgcgcctcttcgagcgcctcggcgaggccgtgccaccgtacgggaacatcacggtggccgagttcacggaccgcgtgtcggcgctgcgcaaccggctggggcggtgcggggtcaaggacgaggggctcacggtgccccgccggcaaggcgccgagggcgccatctgcaccaacgtgctctccgcggacacggactcgctctcctacgcccggacgcccgccgagctgctcagcatcctctacctcaccggcgacgagcgcgtgcccggcgggttctatccggagggtgccaacgggaggatcgccaggtccttcttggcaagccacatggaaactagccaatgcaagctgcccgaggccatcagtgccctgcgtagcgtactacgagtgctgcgtgcatgatttgaactacgtgtccgtgcagaaacccggagcatatatatggttggatgaacttgcaaagtttgctgaataatataacagtggattgatatcagcaagtggtccaccaattcttcc

SEQ ID NO: 125419 - DNA, 653 bp, Zea mays
  Clone ID: MRT4577_45854C.1
cattgggtacctcgaggccggccggggactctctatacaatagccagggtctcgctcctctccaccacgtactccactccatccatccatcatcatcctatccatcgaacaccttagcactgaggacgagggcctccctcggtgccgcctccgtggccccatcaacacataaaggacgcggcggagaatgatccggagcaactgatgcatgatgatgaccgtgacgatgaggaggatctgcaggatgagcactacactacaacatattatgacgtcgaccaagacggcggaagcatcgacatcaccggagcgtccttcgccggcgtggtggacgctgccgaggacgcaaaatctgctgtgggcccaccagaggtgtaggcctggtcatcgccggtctcctcgtggtggccttgctcctcctcctacgtggcggtggcggcgccaacaccagtcctcgtcgctggatccacctcgactatgcatctcctctactgcgcggaggtggcttgaggcagcatcaatggcctcctcaccacgtgccttcacccgtagtcgacttcgtgcccatacccttcagctgcggtgatgactgatcggaatgaccccgtcgtcaaaccgcagcatcaccgccctctccgtcaccatcatcgtca

SEQ ID NO: 125420 - DNA, 572 bp, Zea mays
  Clone ID: MRT4577_45855C.1
attccccagaatgcgcgaatccagacgcgtctatctcagcttgctgcactgcactaccctgccctgccatcatatcgcaccagactgcagccgaactccacccacggagagacatggctgctccaatactcgcgacactggtactgcatcgtgctcctgaccccaaccgagttgactcccccgggcgcgacgcacacggcgatgacgtgttccaccgtgcacagaacgctgatgccgtgcctgccgtccgctcagatgctcggggccatgccgccccacccgcgctgcggggacctccgacgcctgctgcaacagggcaacaacacccccgattgacgcaacatctgcgaatgcctcaataacgaccccgacggacccaacgcgagaggcccctacatcagtcgagacgccgcactgcccagaaaatgacgcgtcgccctgccgcacgacatcacgaccaacgctcactgccacaccattaataaacggacgcgtgatgtgcccgtacccggccaccaatgcatgcatgatgcaggaggagatgaacaatgtaaagtcactggtatcctacg

SEQ ID NO: 125421 - DNA, 331 bp, Zea mays
  Clone ID: MRT4577_45856C.1
gcaggaccggaccggagggcccgggacgacccacgcgaccgctgaaaccacccaggcacaccgagacaatgtgtggggtaaggggggacaacccgcccggcccacccaacaaggaggaaaacaggagccagacccagagagggaaaccccacgaacagccggccggagggcagagcggcccagagagaacaagacggaaagcaggacggaaaaacccgcaggaaaagaaaccgaaaagaacgcccaacataccggcgagaagaaaggcaacggccaaaaaccacaaaacagcgaagagagagaggaaaccaaaccagccgcagcaaaggca

SEQ ID NO: 125422 - DNA, 239 bp, Zea mays
  Clone ID: MRT4577_45857C.1
taaaggaaaacaacgggactcgaggccgccccttttttttttttttttttgggtgggggtgggtcttgctttctttcttttggggcgcctgggtttttgggatggatttctttccctcactgccgttggtggtgtgcatataaaagcctgaccctgggcgtgtgcacaggcacgcttgttctcattccttccgtgctggggggcgggcttttctccacgtcgtagagagcctcatcctt

SEQ ID NO: 125423 - DNA, 314 bp, Zea mays
  Clone ID: MRT4577_45858C.1
caaaaaaaaaatcttttattgccaaactttttgctccttttcgggtttaaaaccttaacaacttgtccattattttttcggcttttttaaactcgcggagtaattttttttgctgccaaatttggggaaaaaccttttgtaacctgtgcttttgggccctggaatgctgctcacctttatgaaaaccattgcctgaaagctgaacacaaacaagtttgcttttttggtgaactcactattcgggggggttttaaggttggtataaaagcccattggttccttggacccgcaaagggaattaagaaagatgggcc

SEQ ID NO: 125424 - DNA, 205 bp, Zea mays
  unsure (1)..(205): unsure at all n locations
  Clone ID: MRT4577_45859C.1
aacagccggcagtgagcgtggcaacacggcctttgaagcgggcggaagggcaggttagcgctttctcggccgaggtaccatacattatgatgttnanaatggnncctagggggagaagctggtacgggcccggtcggccggtcttctgggcggtggggggcccctgggcgttctttcttggggctctgtgggtgggggggggggg

SEQ ID NO: 125425 - DNA, 1649 bp, Zea mays
  Clone ID: MRT4577_4585C.1
gggtccctcgaggccggccgggccgggcttcacaatcgtctcgcaaagattctcgttggtcagtttgagacttagccttggaggagaacagaacagccacgatgacttcgccgattcagctcgcggccgcgcctttgctgctgctagtagtggtcgcgggcacacggtcgagccgcatcttttcggtggccgactatggtgcggcgggcgatgggttccgctacgacacggcggcgattcaggccgctgtagacgcctgcgcggcggcgggcgggggccgcgttcttctcccggcgccgggcaactacctgacagcgaccgtccaactccgctcgcgggtggtgctggaggtgccccccggagcgcggcttctgggcgggaccaggcaggcggactacccgcccgagtcgcgccggtggtacgtcgttctggccgagaacaccacgggcgccggcatcacggggggaggcgagatcaacggccagggcggggcatttgttgtcaggcccagcgaggtgaagaacgtcatggtgagctggaatgccaccggcgattgcctgggcgatgagtgccggccgcggcttgttggcttcattgactctaaggatgttaggatccacgacatcacactcaaccagcccgcctactggtgtcttcaccttgtcagatgtgacaacacagtcatccacaatgtgtcgatatttggagattttaaaactcccaacaatgatggcattgacattgaggattctaacaacactgtcataactgattgccacatagacactggagacgatgctataagcccaaagtcgacaactggaccagtttataacttgacggcaacaaactgttggatgcggactaaatcttgtgctatcaagtttggaagtgcaagcttcttcgacttcaaaagactggtttttgacaacattacaatagttgattcacatcgaggacttgggatgcagatccgggatggagggaatgtgaatgatgtggtgttttcaaacattaaaatgaggaccaggtactaccatcctttatggtggggaagagccgaaccaatctatatcacaacttgcccaaggcacccagattcaaaagaaggcgccattttctgataccgatgagatgttgatgaatcttatgtctgaaaatggagtttttctggctggatctaagcatgggctgctccgcaacctgaaattcaagaacatagaccttacctacaagcgttggacaaactacacgggagggctctatgattacaggcctgggtgccaggagatggtgaagcacaagactggtggcatgatgctggagcatatctccggtctggagattgacaacgtgaggatgagatgggcgagaggaagcctgaagggctggaatgttaaccctatcctcttccggccatcaaccatcgataatctgtctttccatgactggcagtcagtggatgttcagtagatttaagtggcacagttgtattacgtgtgtatctatcagaataaaggggtgattcttttgtgaaatattgaaatgtgttaataataagcaatcccaacagcatttaagcttctgcagggactggtgtggtttgctataataattttataaatctgaattcaaatgtttgattgttc

SEQ ID NO: 125426 - DNA, 241 bp, Zea mays
  Clone ID: MRT4577_45860C.1
tgcataatgcatgacactggcgggcgctctaagatgcatgtagaaggccgaccttgatgtatgaagagtggtaatacagttgactggactaaattcaatttggttgttacatgtgaatgtatgtatggtcttagctttatgtattagagtttgatataatgtttgaatggttgtgggtgggcgatgatgtttgttgggatggctcttatccaataggtgatgaactgtggtggagtgtgcc

SEQ ID NO: 125427 - DNA, 344 bp, Zea mays
  Clone ID: MRT4577_45861C.1
tactgctgcgagaagactacagaagggggtctcgtgataccatttactttcacagcggttaggtatttatagttaagtgtggagtgcaatgcaattcaatgcctgatattcgcttctttacttgttggattgtcctcatcttctctcatagcaatcaaatcacacttccatcttctcatctcgtaaaccctataccctggtttcagtgacatcgatatcgatcgaacatggatgatgactaccatgtgatcgtattgggcactgatcttaaggagtgcattctcagtcttcttctctccgtagatggactcatggctctgcacatggtcaggtatgactattac

SEQ ID NO: 125428 - DNA, 183 bp, Zea mays
  Clone ID: MRT4577_45862C.1
catgcatggtagacactccggcccaaccagaattgataagtggaagcgtatgggtattaccagcaacgacactgtccctaataccgtacttctccgctccttgactctgctctgcatatgttgtaaatgcctgtcattagagggaggggccacccagacggtgaacttaccggcggacgcctc

SEQ ID NO: 125429 - DNA, 305 bp, Zea mays
  Clone ID: MRT4577_45863C.1
aaacaaaactcaggccctggaaacttcggttggccccaggaagggtcataaaattggctcaaacttaaaggatggcaaagtttctaagcaaaaccccgctgggataccctccataggtccacgtccccgtccccccccaccttaaataaatttgaaaaaatttaggcagagaaaatgggttcagcagcaaagataaccccggccgggaccccaatccttcttaagcgggcgggatctccacctcgccggggtcaattccctggtgggggcccttggggcccttgccggtaccggggccccccccg

SEQ ID NO: 125430 - DNA, 263 bp, Zea mays
  Clone ID: MRT4577_45864C.1
gggggggggtttgtattaggggggggggtttaccatttttccttttttgtttaaaccaccgtgtacttttaatcgattcgaatctttagaatgtatttttgtggataatgctttgttcacgtacaaaaacttaattttttttgtagtaattttccagttgacaacttcctatatttttgttaatatcgttgggttgtattttcttttaatggcattctcatttagtgcaactatctttttcatcttgatatcatttttttata

SEQ ID NO: 125431 - DNA, 239 bp, Zea mays
  Clone ID: MRT4577_45865C.1
ggcctccaaacaaaatctttttgggatgaaaattgcaacaaataaaaaaaccttatcccggatgtttgacaaaaacccgtaaattgccagttttccccccaattcttatatctggttttgcattggggaaaaacaatttttgccacacttcccattaattttttgtttcaaaggacacactttacctacatccgggtttaccgttccacacattggccaacggatttttccttcacact

SEQ ID NO: 125432 - DNA, 1351 bp, Zea mays
  Clone ID: MRT4577_45866C.1
aataaactgataactacgaccttaacgactagagttcgagtattctcgtctcatctgtggaagaggagagaagactgaagagaagggaagacatggccgtgacggcggaagcggcggcagagatggtgttggagcggcgggcgtacgcgcgggtggggctcctcggcaaccccagcgacgtgtacggcggcagggccctgtccttcgccatcgccgacttttccgccaccgtccacctccgcccttcgcccgagctgctcatccagccgcatccgcaccacgacctcgtcgccttcccctctctccctcaactcgtgagccgtttgcaaagtgaaggatattatggaggcgtccggctgctgatggctatctgtaaagttttctacaactattgtgttcaaaataacatcagtttaaaagctgaaaatttcaccttatcatacgatactaatattcctcggcagtctgggctgtctggttcgagcgcgattgtttgtgctgctctaagctgccttcttgacttctataatgtcagacatctaataaaagttgaaatgagacctaatctgattctcaatgctgagaaagagcttgggattgttgctggacttcaggaccgagtggcacaggtttatggtggactagtttatatggattttagccagggtcatatggacaagctgggtcatggcatatacatgccattggatgtcaatctgcttcctcctctatacctcatctatgccgataaccccagtgactctggcaaggtccacagcactgttagacaaagatggctgtcaggtgatgattttataacatcacgtatgaaggaagtagcgcagctagcgctcgatggccacaaggctttgctgcagaaggattatactgagctagcgagatttatgaataagaattttgatctgcgaagggagatgtttggagatgatgtacttggtgcattgaacataaagatggtggatgtggcacgcagcgtgggcgcagcgtccaagttcactggcagcggaggcgcagtggtggcgctgtgcccagatggggattcgcaggtggagcgtctccgcaagggatgccaggaggccggctttgtagtacagcaagtgaaagttgccccctcggtgctgacggacgaggagctgtcaagtttattattagcttcctagttgaacgataagaaaggtgaacaagacaacaaaacagttgtgcgacgttccttcatttgtggtgttttgatgtgtgcgatgatgtgtctgtttagttgatattcaatataagagacggtttggaacttcagataaaagaaaaaaaacaaaaaatataggtggggtcacaa

SEQ ID NO: 125433 - DNA, 353 bp, Zea mays
  Clone ID: MRT4577_45867C.1
gatcctctgagggtggactgctgacagacgcagatggacagccgtgatacacacttgtagtgttgggtgagattgagaaagcagcaccctgatgtcttcaacatgatgcttgatagtctgggagatgggagattgactgaccgcaaggtaaggacggtggatttcattaacacacttctgatcatgacctcaaatgtacgaagcagtgtcatcgagaatggtgcacggtagatcggatttcaccattgctctgatgagaatgacagtgagttcagcaggatcatgagcctgcacatggacgagatgaagcattgtctacgacctgaagtccttaaccgtcttgatgagatgat

SEQ ID NO: 125434 - DNA, 257 bp, Zea mays
  Clone ID: MRT4577_45868C.1
cacaacacctcggctcgtcagatcgactgggcagaagggagcagaagccagtcggctcgtccgcccgttacctgtcgtcgctatggccgccgtggaggtgtgcgtgaaggccgccgcggggaaccccgatacgctcggcgattgcccgttctcgcagacggtgctgctcacgctggacgagcagaaggtcgcgtacgaggtcgatctcgtcgacctcggtaacaagcccgaatggtttctgaacatcagcgcacagg

SEQ ID NO: 125435 - DNA, 2085 bp, Zea mays
  Clone ID: MRT4577_45869C.1
aggcctcctcctccctaagccttggatctggtggtaacgttgactcctcgaacgatccctgtcaccggcaggcagttcagtgcagatcgaggtactgccgtcggcacactactagtgtatcgtcccagcttctctggggacaagacaacccgagggctggtatggctggagttgaaggtcctggaaacccgctgctcacgcttggtctgggccggtcaccaagttcctctgagacgaacagcaaggtcagctcccccacagcctgcatgatgtctccatcttcagtgaaagaggctgacgaggagtcgtcgatggatcttggtctgagctttgatctctgtcttggtcatgacactgcacatcgtcacaagaagccatcggcaggtgctccgaagttggaccttcagttgagcctgtccacctgttcgcctgaatcagccttgaccaatgtaagtgccaatgatggcttagagacagtggcagatactactactactctggaaaagctagagccctggatcttcaggaattacatggcttcatcatcatcatatgcatatgcttctgaagcaacctacggcctttctttgccaaagatacctgaagatgtcgtggtcgtgccttcaacaacagacgtgtcatcagccgttacggtgagcgtgaaaagcccggctccgaaacggagcaatattagcacgaaatgctgccagttcccagggtgtgagaagggagcgagaggagcctctggttactgtatcgcccatggcggcggcaggcggtgccagaaacctggctgccagaagggagccgaggggaggaccatctactgcaaagcccacggtggcggcaggcggtgccagtacctgggatgcacgaagagcgccgaaggccgcaccgaccactgcatagcccacggcggcgggcggcgctgcagccaggacggctgctcgcgcgccgcgcgcgggaggtccggcctgtgcatcaagcacggcggcggcaagcggtgccagagggagagctgcaggaggagcgcggaggggcactcgggcctctgcatctcgcacggcggcgggaggcggtgccagttcccggagtgcgccaagggcgcccaggggagcacggggctgtgcaaggcgcacggcggcgggaagcgctgcacgttcccgggctgcaccaggggagccgaaggcagcacctggctctgcaaggcgcacggcggagggaagcgctgcgcccaccagggcggcggcggcgcgtgccccaagagcgtccacggcgggacgcggtactgcgtcgcgcacggcggcgggaagcggtgcctggtcgcgggctgtaccaggagcgcgcgagggcggacggagcactgcgtccgccacggcggcggcaggcggtgcagggccgagggctgcgccaagagcgcgcaggggagcaccgacttctgcaaggctcatggcggagggaaacgctgcgtgtggggccaggagggctcgagcctcggggccggcgggccgccgtgcgacaggttcgcgcggagcagggtcggtctgtgtgcgggtcacggcgctctggtcgaggaccgctgcgtacacggtggcggctcgttgggccctgcccctgctatcgggcagctgacaaccgattgtgagcctgctgctgctgctgctgcaacgaggggcgatgctgatatggcggacggagacgaggaagcgttcctgacgctgggatggaacggcgacggtgagtctgctggcggcacggccccggccccggccccggccccgttcatggagggcagggtccatggcagcgggttgcttgctctgctcagctgctctggtaatggcggcgcctcggcggcttcgtcgtctggcatgcgcacctggatgtgatgttgtaggtttgagtagtgacagtgtcttgtcgcaatgcctgaatccggcggcataaacggctgcccccgtgtagcagaaataataaggggtagccagcagggtcatagtgtgttattgctatcgttggtctgactgactgtgtgtattgcccgtgattgattgaaagtctgtcttatacattgtgaaagtggtt

SEQ ID NO: 125436 - DNA, 760 bp, Zea mays
  Clone ID: MRT4577_4586C.1
gtgttccagaactgcttcttgttcctccgccggcccatggacaaccagcgggacatcgccacggcgcagggccgcgcggacgggcgcgagagcacgggcttcgtcttccagtactgccgcttcaccgccgagacggggctcaaggacgcgtcccgcccgcccatccggagctacctcgcccgcccctggcgcgagttctcgcgcacgctcatcatggagtccgacatccccgcgttcatcgacaaggccgggtacctgccgtggaatggcgacttcgggctcaagacgctgtggtacgccgagtacgccaaccgggggcccggcgccgacaccgccggccgcgtcacatggcccggctacaagaaggtgatcagcaaggaggaggccgaaaagttcaccgtgcagaacttcttgcacgccgagccgtggctcaagcccaccgggacacctgtcaagtacggcttctgggcgtgagcacatattcttgtggagaccagaggatgtcgatgaagcagaggaagtcatctatgcctagtttgcctatgcatggtggtaaatcactaatcgtccattgttgggagcatgttcatccacggacggacgagataaggtgctgagttgatatgaccataatccatgtacagtgtgtcacctgaacacttgtttgtactgatttggatgctgtcagacatgtcgtatttgtgaatcggaattctaggactattatgctagtaaaaaaaaaaaaaaaagacgcccgctc

SEQ ID NO: 125437 - DNA, 136 bp, Zea mays
  Clone ID: MRT4577_45870C.1
ggccaatcgagctccctggattatcgaggatcatggtgcagatctgcacgcagatcgtatttggcctcgtgtagatcatggctctgatcgctggcaccgccgatgtattataaatggtgatgacggacccgaatct

SEQ ID NO: 125438 - DNA, 284 bp, Zea mays
  Clone ID: MRT4577_45871C.1
gctgcttcttcttgctctggggggaacgagagagagagagctagagagagagatagatgtaggggagaggctaggagggggggctctaacaaagatgttggctgggttcatcgggcatgtggtggaggggcccgcggaacttgtggcggctggcagtcggactccgtcgcccatgacgaaggcttgtgatgtcgtgggggcgcttcctggccgcgtccgagccggccgtgtgcgggcaggtctggtatcacgggcactttgcctactcgcacactatgccaggg

SEQ ID NO: 125439 - DNA, 191 bp, Zea mays
  Clone ID: MRT4577_45872C.1
ggcaagcggacatggccgcgatcgtagcctagaaggccgtggaggagagaatccagttggtactgcaactggatcggacggggaaggcggttgcgtaactgagattggagcaaatggctcaagacatggactcagaggatttggtgattcatcatcggaatcacagagaggatttacgatggggtgatcca

SEQ ID NO: 125440 - DNA, 467 bp, Zea mays
  Clone ID: MRT4577_45873C.1
aaaagggggacccggagaagttcgcggactgcatccactggtgcctccccggcgtgccggacgtgtggaaccaaatactttacacgaggatcctttccaaaccgccttcttggggttcttctaatgttagccccttatccatcccagtccctgcctccccggtgaggatcccaagcagggaaggtagggtctttttctaccacagcctaagcctaggaaaagtgtacggtttttcgttctctttctcctcctttttagtcggtagggtaggttgagtgaaggttagagcaaaagggaaatggagggggaggttactaatggcatggcatgtaggatctttgaggtgtaaatgagctgtgagttttgccaattgagcaaacagcagctagctcgtagacagttgcgctatgcacatgtatgtatatatatatataatataaagccttcttcctgctgtactgtatgct

SEQ ID NO: 125441 - DNA, 643 bp, Zea mays
  Clone ID: MRT4577_45874C.1
atttcaaatccacgacctgctacagttgagtgtctctcgagacagttccttcccggcccgatcccggatcctctccgccggcaacgctcgtcgaagaagtgatgggggaggtgctcggcgtgttcttgtacatagtagatgtaggttcagtttccgttctggtgtgttgggcgtgatgcctaggactggcgatatgccgatgaggagcgcgccgcctgcgcgtacgagcagcgcatggtggctagcggcgatgctttggttggtggcggtggcgtggtgctactcgctgctgcgtgattcatcgtcggcgcatcctccaataagctcggttgctgccatgatttggagaaggattcgtccccttcctctgttgcttcaagctgccatggaggtggatggagcgatggtgatgctagaggatctggtttttgcaggtgggttcggagcatatcagcagcggcagatcaggtggagctacggcgcccgctggcaaccggtcttccacaccatggcgttgccccttctggccgaatggcggccgtgtatttcctcccagcctaagagcgataggggaggcagatgcatcttctatctggagttcgaagcggttccaagctgctgcgatggtctcgtcgccccaagt

SEQ ID NO: 125442 - DNA, 1029 bp, Zea mays
  unsure (1)..(1029): unsure at all n locations
  Clone ID: MRT4577_45875C.1
ttccccttttatcatatagtataaaaactataaatgggtgatacacgccataccgctaagttgccaccttactttgctacctatctgaaacacaacatgctaagattactcacgccataccgctaagttgccaccttactttgctacctatctgaaacacaacatgctaagattactgagtaaccttgatgttgtgggacagattcgagcaaaacttcttcaatagtgtcaaaatgcatgagcagatgtatttacgggaagggtggcctgtacacggttgttgaccaagtgatccgcacacccagtcatttacatggattgcttgcttccagcatgaggaaacaatggcagctattgtgatcacattttacaaatccggtaaagggtctcaactgatcttctgctgagatgcctcgacgtactgcagcgcgagcttcctcaccttgtcaccctccttgatcaaaaagtttgcatttttggcgtcgcggtggaagctcattaccttgtcagttgttttcgcgacagcccacttatattgatcgaccgtgatcaccgcactcttgcaaagtggcctgatctgctctttcacgaacatttcaaccttcttatatgtcgagtttgaggcatctgacgtacttttaccggcttgatcacgcggcctcttcttcggatcatctccaccttcagctgcaccacggtttnnnnnnnnnnnnnnnnnnnnnnnnctgcttgctgatggtttgtcactgcaggatttctctttagtgagctctgagttctttggtttgctgatcacttcactgtctcttgtcaaatcatcctcgtgagattgattagaattaggttaaccgattgctgccttttctatctctctcgaagcctccacatgcccagtaattttatcgagcatgttgcaatcaactgaaatttctataacaggtccatttgatttttcatgcttctcgctgcacctatcgccttcagtcaggtttgcggcatttgttttgtttgctgcaacgtcctcagtgt

SEQ ID NO: 125443 - DNA, 801 bp, Zea mays
  Clone ID: MRT4577_45876C.1
gtcgcacttgaagcaaaggttcaatgtcccttgttctgatagcgagtctgtatatcatatagtataaaaactatagaatgggtgataactgttcagtcgtggagcatgctcatgagataccgctaagttgccaccttattttgctacctatctgaaacacagcatgctaagattactgagtaaccttgatgttgtgggacagattcgagcaaaacttcttcaatttcacctgaagcacttgttcatcatgtcaaaatgcataagcagatgtatttacgggaagggtggcctgtacacggttgttgaccaagtgatccgcacacccagtcatttacatggattgcttgcttccagcatgaggaaacaatggcagctattgcgatcacattttacaaatccggtaaggggtcaactgatcttctgctgagatgcctcaacgtactgcagcgcgagcttcctcaccttgtcaccctccttgatcaaaaagtttgcatttttggcgtcgcggtggaagctcattaccttgtcagttgttttcgcgacagcccacttatattgatcgaccgtgatcaccgaactcttgcaaagtggcctgatctgctctttcacgaacatttcaaccttcttatatgtcgagtttgaggcatctgacgtatttttaccggcttgatcacgcggactcttcttcggatcatctccaccttcagctgcaccacggttggggttgactcctttcggttctttgctgcttgctgatggtttgtcactgcaggatttatctttagtgacctctgagttctt

SEQ ID NO: 125444 - DNA, 493 bp, Zea mays
  Clone ID: MRT4577_45877C.1
tcgatcacgcgtccggccgggccgcggagaccatataatgttccaacggatcacgctctttatcgtttcaaacggtatccttgacatcctgcggatcggcgactacacagcgctctacgaatgcatcatccgcaactagaatcagttctaccgtctgagcaagcatggcaatggtcatagtctgtccatgatggccctcaggaaggggacgaccgatcacgagtgacatgtccaagtgctccgagggtatgagtcaacgagatgcacggggggacggttatgcaccgcgttcactaggcacctcatcgaccacgaccacgcgatgatgatgggcccgagccacgacataccttcaggacgccctgttgctcaacactctggcttacaacgagatcggcggctttcctgtgcagcacatgaccgcccgtcgcatccggtgcatttaccacgtgaacaaccactacgcgcactgcagcatgtgcgacattctcgg

SEQ ID NO: 125445 - DNA, 445 bp, Zea mays
  unsure (1)..(445): unsure at all n locations
  Clone ID: MRT4577_45878C.1
gcgaaaaaaaaaaaaaaaaaaaaaaaaaaaaaaaaaaaaaaaaaaaaaaaaaaaaaaacattgggggccncctgcgttttgttttttttgggacatataaataaataaatagatttatttcgtattgcgatagatacaaaaaaagctcaatgcaaaaaacaaaagggggggggtttcgcgtgcggctggggggacttttctatgctaccggcacggagtccggcccctcctcttcctgctgtagcggcgtcaggaacctcaaaagcgccgtcagcaccgcctgctacaggtgcgccggctgcaactgtcttaagaacgccggcaggggcgtcagcggcctcaacgccggcaacgccgccagcatcccctccaagtgcggggtcagcatcccctacaccattagcaccttcaccgactgcttcagggtgaactaaaacctatacca

SEQ ID NO: 125446 - DNA, 405 bp, Zea mays
  Clone ID: MRT4577_45879C.1
aggcagcgagcggctgtactcttcttcctttgccacgcgccgggccaaggaagacagagagagatcgccggtcctgttctctccgtcggtggtgcggttgactcgcctgcctgagcgagatctggctgcactccctagggatctgttcacagatctatccgccatgatggtgacgatctgctgcctcgctgctggctatgtcggtggaccaaccatggttgttattgccctgaagcgcccacacagttgcgccgtcgatgatgacatctaccagccccgtgttgttgcctgaaacagcgacacccttcccatctacgagcccggcctagacgatgttgttaagcttttccggggcaggaaccttttgttcagcactgacgatgggaagctcgtggctgaggctga

SEQ ID NO: 125447 - DNA, 501 bp, Zea mays
  Clone ID: MRT4577_4587C.1
cccctgccggacccggtccgaattcccggtcatcccacccgttctttgttgtgagcctactcgaggagaccctgtagcagaagaccaaagatggcaagcctctttgcgacgtcctcaaggagggaggcgtcctccctggcatcaaggtcgacacgggcaccattgaggttgttggcaccgacaaggagaccaccacccagggccacgatgacctctgaagcgctgcgctaagtactacgaggccggtgcccgctatgccaagaggtgtgctgctctgaagattgtccccaacgagccggaacaggtcgccattgacctgaatgctcacggactggctcgctacgccattatttgccatgagaacggtctggtgccaatcgatgagcctgagatcctctgtgatggacctcatgacattgatcgctgctcttacttgactgacacagtccttgctgcctgctacaggcttgaacgcgtaccatgtgctgctggagggtaccc

SEQ ID NO: 125448 - DNA, 393 bp, Zea mays
  unsure (1)..(393): unsure at all n locations
  Clone ID: MRT4577_45880C.1
aaaaaaaaanaaaaaaaaaaaggggggggaaggggagggaaaggggggggggggggggagaanccacaagggggggaggaagagaaaggggggtccttattatgttgtgaccccgcnactgatttaccctgtcgccgcggcgtgctcaccgaacggtcgaccacacagaacgacgatggtcgtgacggcgctgcaccagaccaccagcttcctcgggcaggccctggtcgcccgcgccgccggcgtcgatgacggcgggcgcatcaccatgcgccgcaccgtcaagagcgttccccagagcatatggtacggccctgaccgccccaagtaccttggcccgttctccgagcaaacgccgtcttacctgaccggggagttccccggtgaatatgg

SEQ ID NO: 125449 - DNA, 364 bp, Zea mays
  Clone ID: MRT4577_45881C.1
caaatccttcgagagcaaggcgctcctgcctaaatttgcgaccaggaaaggggacgctttttatttatagcgaaccaccacgcactgacactatatgtccagatgatgctcatggactaactgtgcgcgggcgacgcgagtggaacgcagactggcggagcagcgcgaactcctgcttgatgtgctaggagggctggaacacgagcaggctgagcaccttcttctgcttgcccgtgcacgtgcacgcggcaccagaaggaggtgatgagactccgcgcggtgccgccatcctgacgaatgaagcaggggttgcgcgcgcaccggaaagctggatagaagccgctggggccgcagacggtgaaac

SEQ ID NO: 125450 - DNA, 854 bp, Zea mays
  Clone ID: MRT4577_45882C.1
cctcgaggccggccgggtcagaatccttattctccctgcctcctcaaagcaggtcctcggttcactgacagccaagacgcgcgagatatgacactaagaggtatatggactaatttatatggactaatttagtctcttcgttttattttgttttattttgttttattttagtcactaaaatactaaatatgaaaactgttaatttccgtatttagcaatttagatactaaaatagaataaaatagagtgactaaaattaatctatagaaaccaaagaaccctaaatcagtagagcatgcaaaaagacggatcaccagcacgcactaggacagactcagtgggggcctttgcccttcatcacgggttgggtagtgccatacttccatcagcgaaaggtgacgatgatggttgtagaaagcatgaacaatgagtgactgtgcacttagcagttcaatctttgcgtcctctgatggcaaaaaagctgatctatatatccatagacttttgctgaaacctctgcatatctatctatctatccattcgctcgtccgataaaccaaagccttacactcttttttatttctttcttcctgtgttggcgcgcgcgtgcaggcgatcccgagggaggcgaggcagtacgagctgggggaggcccggtactacatggtgctggcgtgggcggcggtgctgtggcagtgcttcttcctgggcgcggtgggcgtcatcttctgcgtgcacacgctgctggcgggcatcctcatcgccgtgttcatcccggtgacggaggtggcggccgtcatcttcctgcacgagagttcagcagcgagaagggcgtggcgctagcgctctcgctc

SEQ ID NO: 125451 - DNA, 2454 bp, Zea mays
  Clone ID: MRT4577_45883C.1
gaccctcgagtttgctcgttcctcgaaaggccgccaactgcgcaactggccctcgctagatgtagctggggcgctctctaccgccgctagggtttctaccgccgccgtcgatgggcgccctcaccgacagccggaagcgtctctcggcggaccactgcctctcggccgaccaccgcctcccctacccctcctccccgccgtcccttacccctcccttcaagcgggccaagctctccccaattcctgaacacgatccctccacctccgatttcccgcctatccgtccctctccccaaatcatccactccgctgcggcggcatccacctcctccacgccgggcccatccccctcttctaccaccgcttccaccccgcttccgcacaggcgccgactcccaccgccgccattccagcgctcgatccacggcccccagcggatcctccgcgtcttccagcttggaggggccgcacgggcccacgccgccggccactcatggttctccccgcaatcacccccgcctcgtcctctcggactccagcagtacgttgagctcgtcaacagcgtcacccacccggcgccgcccactcccgccgccattaccaatgctacgaggcaggcggaggcggcgcccttcgaggtggtcgccatcgaggaggatgaggacgagaggaagcagcagaacgaggaggaggtgatggggagcgtggtagtgagaagggtgccaccatacaaggagctgtacgaggcgtcgcgacagaagcgggatgccaagctcaagacgctcgagtttgaggtgcggctcacggagcagggccgtcttagccttgagcggcttgccgaggccctcccgcgaattacgccaaagaaggaggaggtgcctgaaccttttgttcctcttactgatgaggatgaagaaatgattcgtcaggctcttcatggcaagaacagacatgagaggttagcagtacatgaaccttcaaatattgtgataacgagggagatcatgcaatgcttgaataaccaggaatggctaaatgatgaggttatcaatttgtatcttgatctgcttaaagagagggaactaagagaacctcgcaagttcttaaaatgccatttcttcaacacctttttctacaagaagctgatttccagtgggtatgattataaagctgttagaagatggacaacaaaaaggaggttagggtacagtctaattgactgtgacaagatatttgttcccatacacaaggaagtccattggtgtttagcagtcatcatacacaaggaagtccattggtgtttagtagactcacttggtggcatggacatgaaggtcttgaatgtcttggccaagtatattgtggatgaggtcaaagacaaaagtggccaacagatggatgtgctctcatggaagcaggaaggtgtcaaaaaccttcctttgcaggagaatggatgggactgcggcatgtttatgctcaaatacattgacttctacagcagagatatggacctcattttcggacagaagcaaatgcattacttccgcaggaggacagcgaaggaaatactgagtttgagagctgaataaaccttggaggacatcataagtcattttggctatgttcagaattgttggaatatgtacttaacaaatgggtgcagcggcttaaaggtatagcactgagtgcaaggaatttggaagttctccagttgcacaacggcaccaagcgatggccaagcaaccggttggaattttgcatgagcacagtggtgcctttaagttttgccagtgagcatttgcagggcataaatgggtggaatgaggcttctcctggcattagattgcaatgagattcctcagagacagctggattatggatgacttagaaactatatatagcagtgatcttgagcttcctgtgaggtgtgagctgaccaagtgagcaatcaccggtttaggctgtatgcccagcttcggtgcagagttttgtataatgttcaaatcccttttgttctttatgtttgtatttattttttaaatagtgctaattcccttagccgattatgagtgtatctggaatggctgatccgttacctgtagttttaggcctttggcatggctctatctccttgcacagttaaccgaggagcatgttgggcagagcatttgcacccccaattctggcacaaggtgtaagcataataacaaatgaatatcatacagcacgagcccaataagcagaagaccaaatatactaaaaaaaaaataccttgtttgtttgtcattatctgttgtatcagcatcacgctcacttccagcaagatcagtagatgacattttctctacaagctttgtattctttgcttcaataccatctcggtctttctgtctccgggtttcagaaaattgttttttgtcagccaactccagacccgtattcccttttgtctcc

SEQ ID NO: 125452 - DNA, 1204 bp, Zea mays
  Clone ID: MRT4577_45884C.1
ccctcgcgtccgccctttgaggtgcggctcgcccaggcgggccgtcttagcctcgagcggcttgctgaggccctcccgcgaattacgccaaaaagggggacgcgcctgagccttttgttcctcttactgccgaggatgaaaaaatggctcgatggactcttcatggagcaggaccgagacgccctccgttcatgtaccttcaaatattgtgataacaagggagatcttgcaatgcttgaataaccaggaatggctaaatgatgaggttatcaatttgtatcttgatctgcttaaagagagggaactaagagaacctcgcaagttcttaaaatgccatttcttcaacacctttttctacaagaagctgatttccagtgggtatgattataaagctgttagaagatggacaacaaaaaggaggttagggtacagtctaattgactgtgacaagatatttgttcccatacacaaggaagtccattggtgtttagcagtcatcaacataagggacaaaaagtttcagtatctggattcacttggtggcatggacacgagggtcttgaggatcttggctaagtatattgtggatgaggtcaaagacaaaagtgaccaacagattgatgctctctcatggaagcaggaaagtgtcgaaaatcttcctttgcaggagaatggatgggactgtggcatgttcatgctcaaatacattgacttctacagcagagatatggacctcatttttggacagaagcaaatgcactacttccgcaggaggacggcaaaggaaatactgagtttgagggctgaataaaccttggaggacatcataggtcattttggttaggttcagatatttgttggaatatgtacttaacaaatggctgcaacggcttaaaggtatagcattgagtggaatgattttgaaaatgttccggatgcacaacggtcaagcaacaggttgaagggaattttgcatgagcacagcagcgcctagttttgacagtgagcctttgcatggtcaagcattagattgcaatgagattcatcaaagatagggaggtatagattaacttggaactatatatatatataccagtgttcttgagcatcctgtgagctgtgaccaagtgagcaatcactgggttaagctgtatgaccggcttcggtgcatagttgtgtgaaatgctcaaatccctttgttttt

SEQ ID NO: 125453 - DNA, 965 bp, Zea mays
  Clone ID: MRT4577_45885C.1
ttgggaccctcgaggccggccgggtcggcacgggaggtgccgctctccccaccgcgtgcccacgccggcctcctctgctgcagctccactcccgtcgtcctcggcctccgctcccgctccgccaccgctccgagccgccgcgcgcggccactccttgcccgcaggaaccgggacagccggagcgacgaggagaccgcggcggagcccaagatcatcacggtcgggcggccggggaagagcgggcggcggcgcaacaggaagcagcagcagcagcagcagcagacggcggcgaaggaagaagaagaagaagaagaggaggaagatgaggacgaggaggaggagcgtgacgcgacgatcccggaggtggtgacgaaccggatgatgcggcgggtgggcgcgtcggtggggcttccgctggcgctgggcgtggggttcttcccggtgttctactacctgaaggcggtggcgaaggtggacgtgccgacgtggatccccttcggcgtgtcgttcgtcttcttcggcgcggcgctggccggggtgagctacggcatcgtgtccgcgagctgggaccccgcccgggagggctccctgctcggctggaacgaggcgcgccgcaactggcccgtcttctgggactcgctccggggacgctccccacctcgccggggctaggagtttgtctcggaaacttgggctcttgcattggtgctgctgtgtaaatccacgtcgatcgctcgagttggggttggggacggggctaggagtttgtggatggaatggattcactgcagtgctcattcggttattcaggaaccatctatggtacgattccatttgaagagggggcgagaagccccggttgtgactgtgtgtaggcaatatcagttggattgcgtgtatcctcctaccgcgatgcacaaacaggagcctagagctgcgtcattttcagcgtgaactcgtcggcg

SEQ ID NO: 125454 - DNA, 213 bp, Zea mays
  Clone ID: MRT4577_45886C.1
cttgaggtctggagcagcgagcgagtgccagcctcggaaggaacgttccagaagcgcgagactctaaaggccgtcgccttcccattcttcctcgacgcgtaggtctcctcagatcagataaacaatggtgaaggctgttgctgtccttggtacgagcgatagtgtcaagggcacgatctttgtgacccaagagatagatgggtctaccgctgt

SEQ ID NO: 125455 - DNA, 392 bp, Zea mays
  Clone ID: MRT4577_45887C.1
gcgtcatgggtatgaacacaacctacgcggtgctatgataactattgcggacgatagagctagcgcaggcactcatgttgactgacaatctggccaactggtcctgctcgagctcaaaggagccaacactgaatccctacctggcaaccagcctgtatgtgccacggcgggtgccggtccggaactagacggcgagcttggactaatgtttgggcaagccgttggacatctactactaacacaaactgattacaccaaggggcctacggtccttccaccagagactctcatacagcaccgacgtgggatcatacaccaccagagcgctatgacacgcctacagaaccaacagagagggcttcctctgcgagattcgtaggggcatgctcaag

SEQ ID NO: 125456 - DNA, 246 bp, Zea mays
  Clone ID: MRT4577_45888C.1
taagctcggaattctgctcgtttattttggagcacctgggtacagtagactggcccaccaacttcccatgagaacgattttaaagtggtatcgcgatccactaacaccacaactttatctgttgtattatattattaatattttatttacaattgatccttataattatcaataatctatcattgttcatccttttactctaaatgataagtttcattaactatttctttatgatgcctattcttt

SEQ ID NO: 125457 - DNA, 392 bp, Zea mays
  Clone ID: MRT4577_45889C.1
attcggctcgaggaggactaaggctctccgttctcggatgacgcccggcctgtggctcctagacatccttcaagccttagagtcagaaagaccgccgcccctgatttgaccatggagggtaccatagccccgacagcgggctgcatgttgggagcgaaggggctgttcctgtcgtgcggagatagcacagacgtcctcgggctccttataactggatgttgccgacacagagtatgccgtgccatgactgcgcactatatgatacgagcttgagcagcgcctgatcaggaggctctatggcgtgaactgggtgatactgagctgcctgcgcaacctgggctacggccaggaggcatcacatcagacccgtctgaattaaagaatagtgttac

SEQ ID NO: 125458 - DNA, 224 bp, Zea mays
  Clone ID: MRT4577_4588C.1
cccgatcgagaaatcctagctccgtcgcgcgccggcgatggaggcgccggacgaggaggccgtgctggggctccctgagggcgagcggcttctggaggtggccctcatctccgcgcaggggctcaagcccccgtccggcgtgcggcggcggctgcaggcgtacgcggtggcctgggtcgacgcggggcacaagctccagaaccctcccgacgccacgggcggcc

SEQ ID NO: 125459 - DNA, 299 bp, Zea mays
  unsure (1)..(299): unsure at all n locations
  Clone ID: MRT4577_45890C.1
caaacagccaaccaagaacaaaaaaggccaccgccaccacngaagccgaaggccgggagggccncggcacgaagancggncgccgcaaggaacaggcgaaagacanggccnccaggcaccccgncgcnggagccgcggccgncancgcngncagcgccgngggcgccnacnncnngnggcccgnggcggccccggccgnggccangangaaggcgccngganccggcggngngcncgncncccgcgcggcgnnncncgcgaagaaggagcngnacnncaagcncnngcgcaccgggggc

SEQ ID NO: 125460 - DNA, 599 bp, Zea mays
  Clone ID: MRT4577_45891C.1
aattccaaaaatcccagccctgaaaccctagccgcaatctgcctcgacttctttccaaccttcatccatgggacttattggtttagggacttaaaaaagtccctaagtcccatctaaaccaaacagagggacttatagggacttaaattgggcacttgggacttatgaaataagaatctcaaggatgtagggacttatagttgtaatatggtttttttagtccatcttaagtctcaggaaccaaacaggcagggaaactttagggacttaattgggattaaaaaaatcctaggacttgtgaaccaaacagggcctcaatttattccggaatctggattctgccgcagcttctgctagaccttcatatgttgatgaagttggtggactgctgcacgccctaaagctgtctgatctccatgtcctcgactgagcagtgcttggttacataattgctgaattgattttggctgctggtcgaacttggtcatgcatggcatatcaagggaaagagctgtaatttgtttggaagttgtgactttttgtgtttgttattcagaggtctgtactcatgagagcttgtgaccgtatcaatgcaccga

SEQ ID NO: 125461 - DNA, 552 bp, Zea mays
  Clone ID: MRT4577_45892C.1
tcagcctctttgcgaagccctcgatcacgaaatggcctggcgcaagggtttatctgtctgcagagcttgatgggctgcagtactctttcaagcccgcagcctacacgcagctgttcaaagctactgcagcatcaaccaatgcaacgccaaactgctatgcgttcgtcaacggcagcttcgggttcccggacaaggtcttctcgctgccgctggcaggatcaatgcagctgatgaggttggagtcggatgggcatctgaggctttacgagatggggatacctcacctggaactgcgcatggtgctcgatgctttaagcactgtcatggacttctgtgactacccactgacatgtggcgattaccggtgtcttgcagtgcacgacatgtgttcttgccccagttccagccatttcaggctccgaagcgaacgacatccagacgctgggtgcgtgcccttggcaagcagcgccttctgcgaccacatgctgataccgctcgcaacgtttcttctttcgttacaccacgttccagtcatcagccacccggggcatc

SEQ ID NO: 125462 - DNA, 249 bp, Zea mays
  Clone ID: MRT4577_45893C.1
gagagaaccgagattactttcagacatcacaccacatgtactacttaaacaacccttgtgcccttgctgctactacatgagatgcaatcacaccctcctttacaataaattaccactggtgcacacgtgaatagtacaattcgacacacactgcagattctatattaacctgattatgtgctgtcctaccagactaaccaaggacaataatctaccacgcatgcatgtgaggtggtcggtccatgcaca

SEQ ID NO: 125463 - DNA, 267 bp, Zea mays
  Clone ID: MRT4577_45894C.1
ctcggccggccgccggcagccgcccgctttgtcaaaggccgcggcagcgtccctccgtcgttcgtcttcagaggtggcgcggccttgagagcatctccagcgccaccatctcgccccggacgcgtccctcctctacatctccgcacactcagaccttctccatgcgcgcgaggaggtcgcggcagagcgcgctctgcacctagaggcactggcggtgtacgcaaaggctgtggacatggtggaggaacaccatgcggttgccggccc

SEQ ID NO: 125464 - DNA, 346 bp, Zea mays
  Clone ID: MRT4577_45895C.1
aaatttagaagcgcccctcctcctctcccccatccgtacccaatctaatcgacacccggccgacatgcgccgcaagttcttcgctggcggcaactggaaatgtaatggaaccgcagatcaggctgacaacattgcccaaaccctgccatgacggaaatgctccctcttcacatgccgctgaggcccctgcccgccctccttatgcgtacctcccgccgccacagagccatcctccgcccacacccccaccccgctgctccaaactgctgcgcgaacaacgcagccccctcccctgccgaaattacccctgaaccgcctcgacaaccttgccgctacccatgtcccc

SEQ ID NO: 125465 - DNA, 376 bp, Zea mays
  Clone ID: MRT4577_45896C.1
aaaaggaaaaagggccgttttttttttaaccccaacatttttgaaggggccttttaaagttttttatggaccaaccggcgggggggggggaaaaattcccttttttggggcctccaaccaaatttttaaaaaggattgggagggagacaaaaaaaaattttgaaaagggcccagggcccggggtttttttaaaagcttccaagggcaagcaaagaaaacccaaaagcccccggtttctttaattttgaataaaaaggggggttatttgtttcccagctaaacccccgcaaaaaaattttctttccccccgctggagaaagggggggttcaccactccggccgggggggtaaaaagcctttgggggcaaaccccacc

SEQ ID NO: 125466 - DNA, 358 bp, Zea mays
  Clone ID: MRT4577_45897C.1
taagcgaacataacctcggagctagtctctgtgtgtctagaatagttgagcaatgacgacgggatcaagaccgcctttgtccacgatggagcatcgctgagcaaggacgacgctcttcttcctctcgctcctctgactgatgctcctcatgtggaccactacttctctgcatggaccgggtgacgccatcgactgcggagcgagctgctcctgcaggtgcaggaggccgccacgatccaatacgagcctgagagcgagcggcacctgctgccagcgctgccgctgtgccccgttttgttcttgctggaactaggacgtgtgcttctgctactgcatcttgaagatccactactgcacc

SEQ ID NO: 125467 - DNA, 648 bp, Zea mays
  unsure (1)..(648): unsure at all n locations
  Clone ID: MRT4577_45898C.1
ctttacagaccacagttagggacaacattgttcaaatacaaaattgagatattgaagtctgagaaacaattagtgaaaattttattcacatagaaatttgaggtgttgaaggaaactgagaaggaattagaaattccaaagaaaactaaaaaggaagtagagaattcctgatgaagatttgcattaaagaacacatataatttctatggaagctttccactgaagagaaaaggtttttgctgctggaataaaaggagagcttagacggtcaatattgaacaagttcatgatgttatcacaattaataaatatctattacctattgtctaccttagtttcagtcccctcccttatgtaacgtaagtggaccaacgatataggacactcatttttttggaccccaaaatcaatcttgatatatataaaaaatagnaataaataatagccatcatcaaccgatcgcttgataggcatttgagacacaaaatacctaaactaggtcatgcacgtgtatattctgagttcgagaggcatgcatatgtgctacttaattttaaatttatagtgttcttgtaatanaatctttgaagtgtttagttgaatgatctgtacttgagtcttgagttcacagttgaatttgtgttcatg

SEQ ID NO: 125468 - DNA, 425 bp, Zea mays
  Clone ID: MRT4577_45899C.1
ggaacaaaactttttttttttcatttcaattgttcattcagggcattgctcacactgaccctgccacccatggggatgcctgacacatttttactcaatcatcgcccctaaatgactcaactagctagctagccagcggcttttctacaacacatatttttttcagtgggggacaccccccgcagcaacctaggggcatggagtcggctttttcaagccccacattgccctcagttgctgcgctttttgcgcccccaacaaccccccaacctggcccctttgcggcttctgcttcaggatggactggaggaccaaacccaaaatcccctggtacccgtgcttgggctccacctgcctgagctggtggcaacactttttccccaacaactggcacttaggcgaacaataaggcgtccccctcgggc

SEQ ID NO: 125469 - DNA, 291 bp, Zea mays
  Clone ID: MRT4577_4589C.1
accacgacgtccggccaagcctccgaaacgaatccagaacaacgcaacaaaaccccgggttcaatgggacaatggaacggaactccccgccgggggctccccgccgggcttgaaccgaaggggagctacggctacgacatctagagcatggacggctccggggccgggggcccggtgccgtggagcgcacatcacaacggctcctccgaggcctgcctctcctaccaagactggtgtgcagactgctggatcacacatcaggcgctgcagctataaacccagcttgaacag

SEQ ID NO: 125470 - DNA, 197 bp, Zea mays
  unsure (1)..(197): unsure at all n locations
  Clone ID: MRT4577_458C.1
caaaagaaatgtctacctatattatttggaaactggcccttaattgncgagtgaagagagacatnccgctcaacatttaagggagagtcgccacacaactctaaaccacacaacattttcagatgcctacttagagcactcatttctcatacgtgctgaagcttccacccaacttagcatctctcagacaaacatat

SEQ ID NO: 125471 - DNA, 157 bp, Zea mays
  Clone ID: MRT4577_45900C.1
acctgcggtatccgggccgggatctccacggcttgcccacaccgttcggtaagaccgcagaataaggtagcatgctccttcgctcgggtggtgtatattgctcacttataggcgaatgccggttcgattccagattctgtgctctgcacacgcacga

SEQ ID NO: 125472 - DNA, 672 bp, Zea mays
  Clone ID: MRT4577_45901C.1
ggccgcttttttttttttttttttggtaaaaattaaaagtcacttgcagatgcgctcttaatacttttagacgactatagttttaatacattgaatttgctggctctcagtcttcgaatatacttacaaaggtagtgtttacacgtgtacgtttttagatgtgaatgtgcacaagctagcgttgtgaatctctatgtgtgtactgtgtatgaagaataattggtcatacgtaatatacacaattggtcatgtacatataacagatgcccacgtacgtacgtaatcaacacgatatcgcttgcagtattacaaagacgtacgtggctgtgtactacgtagatataccgcgcgcggacatactcgtctttgttttgttgagctagcgatcaatccatggagtagcagatgtgtttgaaggcatcaacgtggtcatcgtcgagagccatgaagaggtcgacgccacccttggccgcgcacgacggcaccaggatcatgagaccctcgacggggaggtcgggcggcaggaaggcgcacggtgccccgtacccgaagtcgaggtcatggaatctgaaccccagccagctgtccacctccaggtccgggcagaaggccgtgcccggacccgcggccgtggacgccagctcctcgccggcgcgttccgccatgtccccg

SEQ ID NO: 125473 - DNA, 420 bp, Zea mays
  unsure (1)..(420): unsure at all n locations
  Clone ID: MRT4577_45902C.1
aaaagtcatcatgactgtttacagagattgcattacactaatacattcctttcctatttttttgtttgggagcaatgatagcagaggagattgaagggcctaaaaccccgggtatccttgcttccaaaggagcccttatggagcacctaaagaggtaatgtagtgatggaattaccagtcccaaacaaacacagtagcaactcgcctaggctgtttgcaatccttacaaaaaacacaaacgcaaacaaccaacaaagttcttccccaaaatcaaatacacagaattcaccaaagtcatatagaggggacagcttaatgcattcggggacaacactaagcgcggagaaggccatcctccctgaaaatcgaattgcaggaccgctcggnaacattgcacaattagcatgctgccgaaacaaa

SEQ ID NO: 125474 - DNA, 473 bp, Zea mays
  Clone ID: MRT4577_45903C.1
gcgtgcgtgtactgggctggtattacagggtcgaccttagcgttcgttcttgcaaatagatagcctattgcgggccagcaatggcaggcaaaaattaagccttcttatgctccttggtctttctgcatgtgctggtggcggcgaccattgttgggtaggctggcaagctcctatgggtttgcttaatcaagcgggcctaatagcagcgatggttgcggtatgtgaaagcgcatgctttaagcgtacagggctggtcaagacggtaacaactggcattgtacctataagacaccttggtctctacaaacagatatctggccttaatgacaacaagtagctgctgctgcattatattgggaaaaaacatgagggcacaacagcttcgatagttgagatagcaaagcttggtggctactctcaggaagaatagtttctttcattgaaccaactaagttcattgaactctggttatt

SEQ ID NO: 125475 - DNA, 461 bp, Zea mays
  Clone ID: MRT4577_45904C.1
ccggtgccgcctcacggcgagcaaccgaccgatttgacccttttgccggcgatgcgctcttggccttaactggccgagtcgtgcctccgtcgccgatactttgaagagattaccagagcatcaaagctcgccatcgctctggatactttatgatgggataacatcataggattccggccctatagtgttggtcttagctatcggactaatgattaatagcggacagtctgatggcatgtagcatttcctagtcccgaggtgactttcttggtcttatgacagacgatcgactgcgatggcatgcgtcaaggctgttctcattcgtcactaacgaacggtgggggctagaggacgagcagactccgtcctagtgtccaccataaacgacgccgaccagtgatcggcgagtgccactagtaggaccccgctgtccccttatgataaatctgagtcgttgcctt

SEQ ID NO: 125476 - DNA, 265 bp, Zea mays
  Clone ID: MRT4577_45905C.1
gatgctcactagtctgcgtccgccctttttttttttttttttttttggggggttttttttagcggttaaaagcaaggcgtgccaccgcatatattaaggggagctgtttcctacctagctacagccgagccgtacgtggtattaaacaaaattaaaggagatgatgatttttctcgccacgtacgttgttggcacgcgcgcgagcgcggtgcaatggtacgtacggtacaattccggtccactcccggggttatgcatgcatggc

SEQ ID NO: 125477 - DNA, 751 bp, Zea mays
  Clone ID: MRT4577_45906C.1
atgcgttcactcgagcagcagcttctgcatcctgacgaccaggggcggatctacgaccggggctgcccgggctgcagccccggtcgcggcctagtacaagcgaataggcccagtacaagccgtgtctccgcctacagcctccagccgcgtgcctgcgtcggggcgtcgcgtagtcgcgtccagtccgccagcggagcagctcagcagcaccgaagtggagacgagcaagaagcgccgaagcggagcagctcagcaacgccgaagtggagacaagcaggaactgccgaagtggagaagaggaggaagcgccgaagcggaacagcacggagaccagcatgaagccaggaagcggagcagcgctgcgtccagtggcagatctagatttcgctacgtccaggtctccagaaagccaagcaccagccaccagttaaagcctcattcagttaaattagactatggtttaatctggattgaatcggatccaatctagcccacaattcatgccaaaaaaatccagaattattttatttttcctctcttcagttaaacccgctatggttccccagggttttggatctggccgaccgaccgactcaagttgttcctgtttgttttataaaggtaggaatatgatatatttcactcgagatcggtcactgtaataatacaattcactagctaaaaatatgtttgtagatatttaagatgaaaagattttgaagcatttttaaggcttaagaactcggaagat

SEQ ID NO: 125478 - DNA, 399 bp, Zea mays
  unsure (1)..(399): unsure at all n locations
  Clone ID: MRT4577_45907C.1
gtaccgtccggattaattcccgggtcgacgagctcactagtcggcggccgcccttttttttttttttttttttttattacaaactaataaaaattactagtgcatgatttttncttaacaattaggacagtattaagtgaacagctgacatattcacatatcacccaaatcaccaccaaaaacggggtttatgccttttaagaacacaatctatgaaaaaggcgaagacctacacagtgaacaagctgccttgtaataaaaggggggaaccttatccactgtacaggcgtgccctatacacatgcccgctccccttgatttgcccccctaaatggacctacttaactgaaacacagggggcctgcggagcctccctaccttttggctaaatttaaactt

SEQ ID NO: 125479 - DNA, 169 bp, Zea mays
  Clone ID: MRT4577_45908C.1
cgagcggccgcccgggcaggtacatgatgtccacaaacatgcaagagctggatgtggtgtctacgttagcgtcaacgtctactgctgattcatgatatttggcacatctgctctatccataagtgtgtaccggtgcacaagaggggcctgtgatttcacggaagcattg

SEQ ID NO: 125480 - DNA, 299 bp, Zea mays
  unsure (1)..(299): unsure at all n locations
  Clone ID: MRT4577_45909C.1
aacctcactatcctgcgccgccctttttttttttttttttgggtattttttaaaaatctttggggggancaaaaacaaccccaaccttgctgatcaatttgcaaggactacccctcctctcctccctctaatttcaaggctttaccaacgaattaacacatctttctactcctcttaaagcatttcaacatactcatctcaccctcaccattcagaattcaaccctctccttatatatatatttcccacaatatccctttctccacttcccttcccaaccttttcccccccagccattt

SEQ ID NO: 125481 - DNA, 367 bp, Zea mays
  Clone ID: MRT4577_4590C.1
gttacctgattcctttgctaaggtggctagatgggtcattgcaaatacacttgtatattgacatccttgtttagtatattgttttgactacggatactgatggtcctgtcctgtcacattatttctaagctcttgccttatcatgggaaacaggctctaactctcttaaagtctgtggattcaacgtatgaaatggctgaggacatttggcaggtccttgcaaaggcaaaatacttagattgggagaagcattccactgaacgactatggaggatggaaagtttgaagtatgttagatattaaacctaaaacaacacagcactatcattttgctctagatcatactgtgcttatattgatatggctg

SEQ ID NO: 125482 - DNA, 152 bp, Zea mays
  Clone ID: MRT4577_45910C.1
tctacgcgtccgcggacaggcatactacagcgctggagtgaatatagactaacagcctagcgccaatatctatttctatccatctttaaacgagcgctgattgaaggccctttcagagtagtcaagccccgagctaccgctaggcatactag

SEQ ID NO: 125483 - DNA, 998 bp, Zea mays
  Clone ID: MRT4577_45911C.1
tgcgctctttccctcgaggcgggggctctatacctctctgtctgcgacgcggttggataggctaccgccgctaggtgccgactgccgaggccctcaccggcggcgaagagcgcccgccaggtacattctctctttcctgcccgctgtgtactgtgaaaccgagttcccaaactctatcttcaacctagctatttggctgtttgatggctactaatagtaacttctaacactctgccaaaaaaatcgggttcgcatgaacaatcgcagcaatggcagcaaggtgtagtagcctttcctcgccatccttgtcggtccatggacccctccgccgcaataaacccagcaagagactcgctccatgcctgccatcgtcgccaagaccaggagccgctgctctgagagcgcgtgctgcgaaacttcctccaggggtgagtgacactgacacaggccggggggggggggggggggaccaaaaaacaaagagagggttagctggtgttcatttttctgctgtgcgttcaggttgaagcgcccagggtgcaaccgaagctgagcgagcccttcttggggttcacccagaccgcggagatttggaactccagggcctgcatgatcggcctcatcggcaccttcattgtggagctggtaatggatgggcacgacgtttgaggcgttgcttctattctatctgagtttcgttctcaatgttcgatggaccggcttcttaatctccaggtgctgaacaaggggattcttcagatgattggggtggaggtgggcaagggtctggaccttcctctttgaagggtgaccaaacagtaacattatcgtttgctggtgtattatgctggccgaaaaacatgaggggtttcacttgcttttgacttggtggctacatatgcatgttcatcatgcatgtccttggatatccggatgttacaacaccaactgtgttaatgacttggtggctggccgcttgacagggttaattggtgaac

SEQ ID NO: 125484 - DNA, 928 bp, Zea mays
  Clone ID: MRT4577_45912C.1
cattgggtacctcgaggccggccggggttgcttgctcatgtgtggccggcgctgagactgagagtacagctcgctcgctgagttagtggctctggccgtctgtgaaccaagaggacttgtgtgaggtaggtgaaacgaagtcgtcgagcgctctttccctctctctatacctctctgtctgcgacgcggttggataggctaccgccgcaggtgccgactgccgaggccctcaccggcggcgaagagcgcccgccagtcccagcaatggcagcaaggtgtagtagcctttcctcgccatccttgtcggtccatggacccctccgccgcaataaacccagcaagagactcgctccatgcctgccatcgtcgccaagaccaggagccgctgctctgagagcgcgtgctgcgaaacttcctccaggggttgaagcgcccagggtgcagccgaagctgagcgagcccttcttggggttcgcccagaccgcggagatttggaactccagggcctgcatgatcggcctcatcggcaccttcattgtggagctggtgctgaacaaggggattcttcagatgattggggtggaggtgggcaagggtctggaccttcctctttgaagggtgaccaaacagtaacattatcgtttgctggtgtattatgctggccgaaaaacatgaggggtttcacttgcttttgacttggtggctacatatgcatgttcatcatgcatgtccttggatatccggatgttacaacatcaactatgttaatgacttggtggctggccgtttgacagggttaattggtgaacaaaaacgtgtgccttgtgaaacagagaaagataattgatgccaccgtgaaattagtactggtttataaggtagtatacatcggtacgaatacgacaaaaaaaaaaaaaaaaaagcggcc

SEQ ID NO: 125485 - DNA, 275 bp, Zea mays
  Clone ID: MRT4577_45913C.1
aattccccataccgatcaccgaacgaccttcacgccatcctcggtctctcacgaaggcgttccgcgcggttgtcggacaggagagcaggaagatgagggagtgcatcttcgtgcacatggggcaagccgggatccaaatcggcaacgcgtgctgggaactttactgcctccagcacggcatccagcctgatcgccaagcgcctgcagataagaccgcgggacatgacgatgatgccttcagcaccttggtcagccagactggtgctgggaagcac

SEQ ID NO: 125486 - DNA, 789 bp, Zea mays
  Clone ID: MRT4577_45914C.1
ttaaagcatgatgtctaactccaatttgcaattccattgccaatttcatggggcacaaaacatgaactcaagtaatgaacagatactacttgttaattgttaattctactggcataagcacaaaaacaatgcagacatattgtgtaaacagtttgaagatgttcaggtatacattgccatctaaaattgatgctccaataaagaacaaaatatggaacttttggaaggaagcacaaatgaccagctacattatatcaaacacaggctaacagtggccaaaagaagtcattaaagagtatgggtttcattgactaattaccaagttaacaagcctgctgcctgcactaatgaagccccgattcacattcccaccccggcatatagccaagtggattatgtgaccttcccagcacagcacaccagcaggatgtttgtgagccccgcaagacaagcaagcacaatgcgtatcttcagttcttcactgtgtcgaatcaaatggatagctcaacctgcttaagtggacgagcagccaatagtaacctgctgtgctgaatgcgctcgcgagaaattacctgcccatcaaatcattaagacactgcagtgagtaaggtaaaagatctaaggaacaagatgcacaatgcgttgtgtcacacacacaaaatgcaagatcgaaacacactacccctttccatgatcaagcaaacacgcagaagatcaaaagaaacaggacagaaggcccaaacaacgaaaaagatctatacatgtgcagctgtttggatgccaactcgc

SEQ ID NO: 125487 - DNA, 371 bp, Zea mays
  Clone ID: MRT4577_45915C.1
cggcccgggcatccacatattattgagaccaactagcaacatacaaagcacattagtgtaccaacaatggcagccaaaatattttgcttccttatgctccttggactttctgcaggtgctgctaccgcagccattttcccacaatgctcacaagctcctatagctccctttcttcccccatacctctgaccagcggtgtctacaatatgagaaaacccaattcttcaaccctacaggatccaacaggcaatcgcagaaggcatcttaccttaatcacccttgaccctacaacaacacgaagccctattacagaagaaacacttgtgatgcatttgacgacacaaaacatgaaggctcaacaactacaacaa

SEQ ID NO: 125488 - DNA, 748 bp, Zea mays
  Clone ID: MRT4577_45916C.1
aaccttcccgcgccacactcccccttcgtcttcccccgccgctccccaattcgaaaccctagccagggttccaaagccttccggatcgggagaggaggccaccggacgatggccgacggcgcgctgctcgacctgctgccccagatccacgccctcttctccgaccagctccgcgtgatttcgtacaaatggttaagccggaatttttctgtgtcatcaaatgacgccaagaggttgcttcaggagtttgtcaacaaacacgggactgatcatgaagttatttacagtgtgtctgggtggttaaagaacaatccccaaaattattgtgtacaactcacttcaagctctaaacttgaagaagcaaggcgaacctttaaggattcttgttcagttcaggtttacagtatccaggcatgtattccaaaagatactgctgtactttggaatcctgaatttgtgcaagcagaggagcttttcaaccagccatttgatgaagaaaattgtttgagagataataggttttgtggtgtaaggaattcttttgtcaagcgaactaccacaggaaagcatgtgagctcaatgcccccaaagcctacaaatagtgttgtagcacctgcagtgccaaaacctagtagtgctccaaaagggcaatcttctatggttcgacagcaagatctaccagctgagaaggataatgccccggtcttggataaaactgttaatgctccgtctgtcacagagccatcag

SEQ ID NO: 125489 - DNA, 222 bp, Zea mays
  Clone ID: MRT4577_45917C.1
attaaaccaacctttttgcttgggggggacattttttttgggtgggaccagaaacaaacaaccggaatcacgtgaaaagatacggagctatctgatatgggatgggcaaccctggaaaggaattctggtatcttttaaggtaaatcctattggttgcaaacggttcaaaaccaaaaaaaaagaattcgaaaaacaaaaaggggggttaaataaaaaccgggg

SEQ ID NO: 125490 - DNA, 253 bp, Zea mays
  Clone ID: MRT4577_45918C.1
tgttatattcttcatccttgtaacgtttgtcacctgtattgtcttcctaaaattgagcgcgtgccgcatgttaggatgaaccagcataggaaccgtggtcttctccgcttcgtcaacttgcctctgcacgggttgaagcttctttctgccgatcacattcgtgtgctcctgcgacttgtaacaggtttgccgaacctgcggccgcgaaagtgcttgctcccagtactgttgctcctactgctgttgctccagc

SEQ ID NO: 125491 - DNA, 429 bp, Zea mays
  Clone ID: MRT4577_45919C.1
cccacgcgtccgcccacgcgtgcgctgaaacgcgggtgctagtgagctacccccaatattaggtgtatatgtcaggaaatggtctgatacatactactcacacatttatcacttggtgatacaatacgatctctgagcagcctaatgggctaggagcgactgcatgatagcagaaagctaatcttgatctctgccctataataggcattggcttatgtgacctggaatggctatacttatttgatgcacgcatgccagggtggacaccatctttactatcaattctaccaagcatctgatggtgactgtcttagtatagcttctactgtggacagtttgtgcatctagttgtctgaatctatgaagacctgactgatctatgattgaaacaatgatgctctatgtgaacttagggatattgtgtacgca

SEQ ID NO: 125492 - DNA, 266 bp, Zea mays
  Clone ID: MRT4577_4591C.1
cctcgcttgctttcgggggggtaaaacaacatgcgaccttattagcatcaatatagcacaccaaacagccacatgacatgccccgccttttacgggtaacctatcaaaccccaaagctgctgttctaccgaatagattacggtctcaacccttcagaatggaagggctgaggagccttcagatcgtcgcctggaaaggatgctgacccctattggcaaaagacactgcgtctgccccaggatgcttaaatgcgaacagggtgcagt

SEQ ID NO: 125493 - DNA, 111 bp, Zea mays
  Clone ID: MRT4577_45920C.1
agtcgccgcaatgcgcacagcagcactcttcctcgggaagatttcaaatcaccgcggcctcaaccatctacagctcggcacggcacaacggctgcacgaaaaatttcgcac

SEQ ID NO: 125494 - DNA, 442 bp, Zea mays
  Clone ID: MRT4577_45921C.1
ggggggtaaaagaacaacaaaatcccgacccatttgactaagggcattttacaaacaaaaaaacatctcctcttaggaaaaaaaaaccccccccaaaaaaaaaagaaaacccttgggcttaatttgggggggcccgtgcaggaaaaacccattgatttttaggccccgaggggcttgcaaaccaagggggcatgcttggcgaactggttgctgaactggccgggcttttccgggggggcaaacttggccaaccccggggggggcaacagctggaaattctgcaccaaccggcccagggggatccccatgataggcaccccgaggataatcccaaggcaactccgggggcccaccccaaaggcaccaatcggaagacgttgccgggggcctccacggactttttctcctccaaaaaacgcttgggccggaactcgtcggggcc

SEQ ID NO: 125495 - DNA, 1248 bp, Zea mays
  Clone ID: MRT4577_45922C.1
cattgggtacctcgaggccggccggggccgtatgttgtgttgcgggggtgtggtgtggccgccgagccgaaagcggcagcattcgtcgtctcccagatgcgcatgcggcggtagctagcttccgtcaccgctcccccagtaggccagtagcaccaaatctctagcgaggccgcccgcaaccgtgtcccggggttgaggatctgcgcggggccgtcctcgcgcgcgccgccgcatccccgccgtcccactccggcgaggctggctgcgttccgtcgtcgtcccccgcaccgccgctgactcctggaacaggaaccagcttcttcgcccccaccatctcacgtccagcgtcgcgaactcgcgatggcgggcgccgccactcctcctccgtcgtcgtcgtcgtcggcgtcgtgtggcacggacgctgcctacctgctgttccgcggggagacgctgctccccgacggcgtccacgcctccctctacgccgtcgctctcgcgtactgcttcgtggggctgtccgcggtcacggcccgcttcttcaaatccatggagcagatcatgaggcactcccgggaggtggtggtcggcgtggacccgcgcaccggggcacccgtcgtgaggcgcgacaaggtgtggaactacaccatcgcggacattgctctcctcgcgttcggcaccaacttccctcagatctccctcgccaccatcgacgccatccgtaacctcggtcaactcacagcaggaggtctaggtccaggcacactcatcggctctatggcgtttgatctgtttctgatccacgctgtctgtgtggttatgccaagggcgggatcaaagatgaagatctcagacctgggcatttggttagtcgagctcttctggtctttctgggcctatatctggctctatgtcatcttagaggtgtggacgcctagagtgatcaccctctgggaggcatagctgacagtcctgcagtatgggctgcttctgctccatgcgtatgcgcaggataaacggtggccatttgtgttgatcccattgtacgatcctgattcctgaatgaatgcctttttcttttgcaaacttatctcttttatgttttcttttacaaagtctgctgcttcctctatcaggcgattgcctctatggaagtgattgcctagcggcatatcaaaaacatctgtacagaaacattgatgcgaacaaaagttaagaacggaatgatgtcccttgtgcaaactgaaacaa

SEQ ID NO: 125496 - DNA, 167 bp, Zea mays
  Clone ID: MRT4577_45923C.1
ctgcactggtggtgtccgtggtgctcccagagtgaagcgatagccaggagaggcgacgatgcgcaagagggcgctctcctccgcgctcctcctgctctttctgctgaccacactccccgagcctgctaagaagctacaagggcttgcccaggcgagcaacggcttct

SEQ ID NO: 125497 - DNA, 277 bp, Zea mays
  Clone ID: MRT4577_45924C.1
catgatcgtcgtttgatcatcgcgtcatcagctcgtcgtacgctctggagttcgggatctgccgtgcgtcgtagcggatattgcgagctacgaccgaggacgagaggtagatacggcgatccgcgcagatttcgttcgatcgtggattggtgacttggtaagagcgagaggagaagcgcgatgtcggcgtgttcggcaggtgttcgggagtccaagggcagaccaggcaccgcgctggctcgtcgacaagctcaacgagaccttgaatgtggaaaga

SEQ ID NO: 125498 - DNA, 412 bp, Zea mays
  Clone ID: MRT4577_45925C.1
cgctcgcttggtctttggacccgtggcgaacagaacatcctcagctgcgcgatccagggccacacgggccactagagctcacgaggcgctgataccggagcctcacgccggacgggatagccccgctgtgcatcatgcctgcatgcctgacgtatgtatcgttgggactggcggtgcacggtcatggcacttgcgctatcctacgtgcacgctcgcaggtactgcactagttgcatcaataagatcgtgacccgaataacactggcgcggtgttctgatccctttagctgcccactcattcacccacatgccgaggcgccggccatctaaacgcaccattgttactgacggaatcatgcgacaggataaagcttcgatcttgccccctatcttctaggacttaagggtggta

SEQ ID NO: 125499 - DNA, 544 bp, Zea mays
  Clone ID: MRT4577_45926C.1
agattcaaaaggctttgttttttgttgacacatataaataagtcaagtactaacaaacagagagtcaaaagactcatgttccgttcgctatccatttcgatgaaaacttcttccatcttgccatagatttccaaactggtagcacttcttcctacgctctccttggcagtatcaaccatctttttgcttaccaactaaacttaagagatggaaatgtatgagggaaactgattacatcagcaaaccacatagaccagtttgaatttcactaacctgccacttaaggacagcaagacttcttgtgtgcatgggagactgaggaaggaatggagggatgccaagcaaaccacagagcaggacctggcatttatactaccgtgagaaaaggaattaaacagccataagaatttgaactaaaaacgtggaccaagaccatgtcacggccgataactgaaaaggaccattgcggtggaggcagccgtcaggatcaggacgcgtgtgtagcgtttggtttgaatgtaatggcgtgtgtgtgggccgtgta

SEQ ID NO: 125500 - DNA, 443 bp, Zea mays
  Clone ID: MRT4577_45927C.1
atctgaatcaattgaaaatccctccaaatcaaatccaacccgaaaacaacaaagaagccctcaaaatgcacttgacgaagagcttctatctcctctttgccttatgcactgtttcctttactcttcctactcctcagcccgctccggtggacgatacattgagcaagcgttatgatggtgatgatgaatgcgatgttgtacttggaagtgacggtgttgccagcaccgatcgctcatgttaagcttgatttttcatcggcttcaatgggggtactggctattctatggaatttgagggaattgaatgtatgaactttctttagatggataagctttgaaggcctctatcaacggtgtccattcatgtgttgaaagcaaacattacctaggtatacaacaacctctcacatctaggatatatcaaagtcaatcacttgaatagt

SEQ ID NO: 125501 - DNA, 286 bp, Zea mays
  Clone ID: MRT4577_45928C.1
cttgtgagtagcatgatctcacagggtggcacagacagctttattactctctctccggttgagaaccaagatggagatctggttacaaacaatcagtggctgacatttcatacactgtttccaaggatagcatggtcctcgctagacctctttgagcagagggacgtcattaaagagctcacactgcgaactaagcgcaacagatcactaatagcatggataggtgagagaccgtattcaatctttcagatgattgctgtagcgtgcaaaccatgagctagaaaac

SEQ ID NO: 125502 - DNA, 187 bp, Zea mays
  Clone ID: MRT4577_45929C.1
ggggtggggtttttttgaggaacacaaacaatcccttttttaaatactataacttgtgcaaacttttttaggaaaaaaaaaagggccatttggcacttataatagtggggcaaacctagagggggaacaaaaaatcgactggggggatgaaaaccctcgacccaaaaaaacacggggctggacaacc

SEQ ID NO: 125503 - DNA, 142 bp, Zea mays
  Clone ID: MRT4577_4592C.1
aactatatttaagcagggatgctattgtttcctgtcatgctttgctgtacttgtgatgtcgcaagcttcgtgtgtgtaattagcaatctgctagctcgtctggcttcaggtggtcatcgtgactgaggataagcagcagcca

SEQ ID NO: 125504 - DNA, 796 bp, Zea mays
  unsure (1)..(796): unsure at all n locations
  Clone ID: MRT4577_45930C.1
ccggggnggccgacgtcaaggacggcgggcagcgtaatccggcaagccaggagtcggtcagcaagcagtcacccacggtccagcagtatgacccagagcagaactggaagctagaccagtctgccacgaagcaactgcgaccaaacgaggcattcggctggcagacaacgcagcggtcgaattcgggggcgcaagcgaaggcgtcgagtgcggcttttggtccagggagacctcaggcgtcgcagatggggaggccgagatgctcggaggtgaagccagagcagcagcagcagcagcagcgagacgtctcggtggctcaaagaagaccaaaaccgacagtgcctaagccgccgccaactgagcatgatgaatatccagtccgcgcgaagcaacagcaacagcttgcaaaggatggcaagctggaggctacgaagcgtaagctacaggagggttaccaagaattcaacaacgcgaagaagcagcggacgatccagatggtggatccacaggacctgccgaagcaagggagccggaacctggcgctgagcggcaagccgaggaacagcagcaacatcaggaaccggctggccgtccgccgctgacgctgatcccgtccaccccatccatgcttttcactagttctggagacccgccctgcttgtatactataacctggatatatggatcagtctagcgtttcttttttttggggtccagcaccatatacacatatacttgtagcccccctctaacgtctttgtcttgggtcatacttatagagatatattaacggtgc

SEQ ID NO: 125505 - DNA, 136 bp, Zea mays
  Clone ID: MRT4577_45931C.1
taccacactttacacgcacaccaccttcgctcctcagggcccccgaaatgtcggacgaaggcggcgccggcgagcagctgagcgaccgctagaaacaggagatcaccaccaggttcctatccaacgcgccagcagg

SEQ ID NO: 125506 - DNA, 807 bp, Zea mays
  Clone ID: MRT4577_45932C.1
actctccaccgatcccctcaccccagcaccggcggcgcacagctcgacgacccgagcgatcctgcggaggcggcaggcatggtgcacgtcaacttctaccgcaactatgggaagaccttcaagaagccaaggcgtccgtatgagaaggagcgtcttgacgctgagctgaagctggttggggagtacggtctgcgggccaagcgtgagctctaccgtgtgcagtacgccctcagccgcatccgaaatgctgccagggagctgctcaccctggatgagaagaacccccgccgtatctttgagggtgcagcgctcctccgccgcatgaaccgctacggtcttctcactgaggaacagaacaagcttgattatgtgcttgccctcactgttgacaacttcctccagcgccgtctccagaccatcgtcttcaagaatggcatggccaagtcaatccatcatgctcgtgtccttatcagacagcgccacatcagggttggaaagcagcttgtcaacattccttctttcatggtgagggtggacactgagaagcacgtcgacttctctctcaccagcccccttggtggtggccaacctggaagagtgaagcggaagaaccagaagaaggcctcaggtggtggtggtgatgacggcgaggaggaggaagactaagcgcccagcctcacccgcataactttcgttgcagaaatgttgagattgccttgtggaaactcgaaatgattccaactttccttcttggaatctttggtgtagagcttttgttggtcagatctttttgctgtcggtctaaat

SEQ ID NO: 125507 - DNA, 2347 bp, Zea mays
  Clone ID: MRT4577_45933C.1
tttctgtcctgaccatccggtccccgtgcgccagatcattcttgatgaatgtcccaaaatgctagactcactcggtcactctccatccgctatccctagcatttgtttttataccacgtcgcccgccagggactggcccccaatcgtggagtggaaaccctactcgtccccttccgcagccgtcgccgcccaattcccccacccaattcccactctccgctcgacagatccatacatgatgggagaggccaaggagaacgacgtttatgaggaggagctcctggactacgaggaggacgacgacaagacggtcgatggctccgctgctaagcccaccggagaggtcgcaaagaagggctacgtcgggatccacagttccggtttcagagacttcctgctcaagccagagctgctccgtgctatccaggattgtggttttgagcatccttccgaagtgcaacacgagtgtatccctcaagccattcttggaatggatgtcatctgtcaagctaaatctgggatggggaaaactgctgtttttgtcctttcatccctccaacaaattgaccctgttgcgggtcaggtagcagcacttgtactgtgccacacaagggaactggcttatcagatatgccacgaatttgagaggttcagcaaatatcttactgaagttaaagttgctgtcttctatggaggtgttcacatcaggaagcataaagatttgttgaagaatgaatgccctcatattgtggttggcacgcctggtaggatacttgctcttgccagggataaggatctctccttgaagaatgtgaggcacttcattcttgatgaatgtgacaaaatgctggaatcacttgacatgcggagagatgttcaggagatcttcaaaatgactcctcatgataagcaagtcatgatgttttcagcaacgctcagcaaggagatccgtcctgtatgcaagaaatttatgcaagattttcttttttggggtgtgtcattttttgtgtgttggtaactgggggcggttaccttctgtcctggtctccctggtcgacatctccagtttgctgcacactcaatgttcatggtttcacttaattggacttcagtggcgctggttctcgtacgggttttgatttggaattaagcattttggagtagtgttcagtgcataactgaacttctgtatggaggctgcatgtactgacggtctattggtatatatactgcagacgctggaatgctaattttgtatcatttgcccccgatggaaatatatgttgatgatgaggcaaagttgaccctccatggtcttgtacagcactatataaaacttagcgaggcagagaagaaccggaaactgaatgatctcttggacgctcttgatttcaaccaagttgtgatattcgtgaagagtgttagcagagctgccgaactgaataagttactttgtgaatgcaacttcccatcaatctgcattcattctggaatgactcaggaagaaaggctaacaagatataagaacttcaaggaaggccacaagagaattcttgtggctacagatttagttggcaggggcattgacattgagcgtgtcaacattgtgataaactatgacatgccagactcagctgatacttatttgcacagggttggaagggctggacgttttggcacgaagggacttgcaattacctttgtttcctctgcttcggattctgatgttcttaaccaggtgcaagaaaggtttgaggtagacataaaggaactgcctgagcaaattgacacctcgacctacatgccatcataaatgggaaggacaactgagaagagaggaggataggggagtgagcagccgtctggagatggttacctttgaactatccgatctggaggatttgatttgcctcctttgtgtactttaaaaagggcagccaggatgatgatctgtattttaagacaatgctgtctgtttgggtttaggattttgctttgtcgaaaactagcacacttattgtactactgagcagcatatttgttttcatccctgggttaaaaaaaaaaaaactgatgcgtctaaacacttctgctggcctgaaaagagcaccaccgtcttggtctcccagcagcaggcagcattgactcgctaaaaggttacaattctcagatgcggatgagccagtcgtattcagcagcctgtagttacaattctcagatgccgatgagccagtcgtattcggcattctgtgttttgtttggttatcttttgctgagccatggaaacagtttctgtttttaaaaaagccaaaaacaaacgcaaattaattggggtggtgaccaaaaa

SEQ ID NO: 125508 - DNA, 393 bp, Zea mays
  unsure (1)..(393): unsure at all n locations
  Clone ID: MRT4577_45934C.1
ctacttcactatcttcgcctttatcgtcacccacagggggtaccaggaactgggacaggattaggagctgccttcaggactccaaggtctgtaggagcctgcagaacaagaatgagaagatcgcacacctctcccagaatgaatgcagattgatgggaagttgcattcacaaagtaacttattcagttcggcagctctgctaacactcttcacgaatatcacaacttggttgaaatcaagagcgtccaagagatcattcagtttccagttcttctctacctcgctaagttttatatagtgctgcaaaaatatacgattccaattatttagagaaanccatnnnnnnnannnnnnnnnnntnnntnntattaaaaaaaaaaaaaaaaaaaataa

SEQ ID NO: 125509 - DNA, 1281 bp, Zea mays
  Clone ID: MRT4577_45935C.1
ggtacccgggcccttcccgcgagttttttttttttttttttttttttttttttttttcctaacttggtaattttctatctgctattgtcaacatgtttaattatagtataaagtataattgctatccttgacaaatatatgtattatgcaaacatgcggagagatgttcaggagatcttcaaaatgactcctcatgataagcaagtcatgatgttttcagcaacactcagcaaggagatccgtcctgtatgcaaaaaatttatgcaagatgtaatgccctgcagccttctccagctttcctttccaaagtcatcatattttattcccattgctcctgtgggggtcctcctgtagctgttagtcatctaccagctttggagttgtagttgggtcttctgctctttctaggggggaggattctattcctcagtgtctccatttgtagtacataagtcagttctctttgctttttttcgttatcccacaccttctgtcctgaagatgcggtctccgagctcctggtcgacatctccagtttgctgcacactcaatgttaacttggtttcacttaattggacttcactggtgctggttctccaactatctcgtgcgggtggagaaagaattcttctgctggagttgtatttggaagcaccgttgcaaaacttaagcatatttggaaagaatctagtgttgaacagtgcataactgaacttctgtatggaggctgcatgtactgacagagggggtctattggtatatatactgcaagactgacgctggaatgctaatttgtttcatgtatcatttgttcccttacatccgatggaaatatatgttgatgatgaggcaaagttgaccctccatggtcttgtacagcactatataaaacttagcgaggtagagaagaactggaaactgaatgatctcttggacgctcttgatttcaaccaagttgtgatattcgtgaagagtgttagcagagctgccgaactgaataagttactttgtgaatgcaacttcccatcaatctgcattcattctggaatgacccaggaagaaaggctcctacagaccttggagtcctgaaggcagctcctaatcctgtcccagttcctggtaccccctgtgggtgacgataaaggcgaagatagtgaagtagaagaggacaatgacgagagcgagcatggcgaggaggtaggcctgaaataatcaaataactatcgtaggtagtcaacatttacagactgcatgaagtactttagaggctgatacagagtt

SEQ ID NO: 125510 - DNA, 2214 bp, Zea mays
  Clone ID: MRT4577_45937C.1
attgggtacctcgaggccggccgggacgtagcggtataggtagagaggaaacttggccccaaatcgtggagtggaaaccctactcgtccccttccgcagccgtcgccgcccaattcccccacccaattcccactctccgctcgacagatccatacatgatgggagaggccaaggagaacgacgtttatgaggaggagctcctggactacgaggaggacgacgacaagacggtcgatggctccgctgctaagcccaccggagaggtcgcaaagaagggctacgtcgggatccacagttccggtttcagagacttcctgctcaagccagagctgctccgtgctatccaggattgtggttttgagcatccttccgaagtgcaacacgagtgtatccctcaagccattcttggaatggatgtcatctgtcaagctaaatctgggatggggaaaactgctgtttttgtcctttcatccctccaacaaattgaccctgttgcgggtcaggtagcagcacttgtactgtgccacacaagggaactggcttatcagatatgccacgaatttgagaggttcagcaaatatcttactgaagttaaagttgctgtcttctatggaggtgttcacatcaggaagcataaagatttgttgaagaatgaatgccctcatatttgtggttggcacgcctggtaggatacttgctcttgccagggataaaggatctctccttggaagaatgtgaggcacttcattcttgatgaatgtgacaaaatgctagaatcacttggtaattttctatctgctattgtcaacatgtttaattatagtataaagtataattgctatccttgacaaatatatgtattatgcagacatgcggagagatgttcaggagatcttcaaaatgactcctcatgataagcaagtcatgatgttttcagcaacactcagcaaggagatccgtcctgtatgcaagaaatttatgcaagatgtaatgccctgcagccttctccagctctcctttccaaagtcatcatattttattcccattgctcctgtggtggtcctcctgtagctgttagtcatctaccagctttggagttgtagttgtgtcttctgctctttctaggtgggaggattctattcctcagtgtctccatttgtagtacataagtcagttctctttgctttttttcgttatcccacaccttctgtcctgaagatgcggtctccgagctcctggtcgacatctccagtttgctgcacactcaatgttaacttggtttcacttaattggacttcactggtgctggttctccaactatctcgtgcgggtggagaaagaattcttctgctggagttgtatttggaagcaccgttgcaaaacttaagcatatttggaaagaatctagtgttgaacaatgcataactgaacttctgtatggaggctgcatgtactgacagagggggtctatcactctattggtatatatactgcaagactgacgctggaatgctaatttgtttcatgtatcatttgttcccttacatccgatggaaatatatgttgatgatgaggcaaagttgaccctccatggtcttgtacaggtaatacaagaatactctgcatttgagtcgtgcacatttttttatttattttctctaaataattggaatcgtatatttttgcaacactatataaaacttagcgaggcagagaagaaccggaaactgaatgatctcttggacgctcttgatttcaaccaagttgtgatattcgtgaagagcgttagcagagctgccgagctgaataagttactttgtgaatgcaacttcccttcaatctgcatccattctggcatgacccaggaagagaggctgacccgatacaagaacttcaaggaagggcacaagaggattcttgtggcgacggatttggttggcagagggatcgacattgagcgtgtcaacattgtgataaactatgacatgcctgattcagctgatacctacttgcacagggttggaagggctgggcgttttggcaccaaggggcttgccataacttttgtttcgtcggcctcggactcggacgtccttaaccaggtgcaagaacggtttgaggtggacatcaaggagctgcctgagcagattgacacttcaacatacatgccgtcgtagacccgcgccgacattgcaaggaggacggaaggagaag

SEQ ID NO: 125511 - DNA, 335 bp, Zea mays
  Clone ID: MRT4577_45938C.1
gcccgttacccgaataatgggtgaccaccggagatccggagcgtgagttgaccatgatttaatcattaccgctggtgctgttggctgaccataatgagctcgtgtgcgcacaactgccgcaattatgggccttcgaagccattggttttatgcggcaggatccatggacgatagatgaactattgggcactctcccctcggttggtgaacaactaaaccgttttttcagtctcgcggggacgcaagaataacttgcgcttcttgtggcacatctctgagaggatcttgattacacaacgtctaaaattgtggctgtacgtggtttctcaatgaaa

SEQ ID NO: 125512 - DNA, 222 bp, Zea mays
  Clone ID: MRT4577_45939C.1
tgtccaacagcctcctcaccttccgcttcgtgtccgccgcggacgaggcctactacagctacggcgtggtagacagcgccgccgtgctcacgcgcttcgtcctcgactcgtcggggcagatccagcgcctcatgtggatcgacatgacccgctcctggagcctcttctggtcctacccgctcgacgagtgcgactgctaccgcgcctgcgggccctacggcg

SEQ ID NO: 125513 - DNA, 712 bp, Zea mays
  Clone ID: MRT4577_4593C.1
ctttttatgagtacaggtaatgaaagatgacaaactggtccttatacgagaggacaatccttctgctcaggcctaaaccagctgagccatcaccttaggccctcccctaaaccagggagtccctgatcatcctactcacccggtgatgagggtgaatacccttcatcgcacactttttggaaaacatgttacttgcacccttttacttatcccatatcttgtaatcaaaggtgattgttaatgtgggctctctcatgctcaccatgcaattcgattcccatcccatattccaggcttaggcagtggtagagagaaataggtaaataatgcatcaagggaaggatggacttgccttcgtcgaagctttcctggcacaaaaggttaatctcggaggggtcgggttcctgcccttcttccggagctaagagttccggaggatcggatccctcttccgcggaataaagctctagggaagctggcccacaacgaccagtggattcacggcgccatagggacttcggtgagcaatccaccatggccccaagctcccgtgccccgaaatccaccacgtgtgcgagttacaaccccggacgcatccctaggactcctccctaaccctcgagccaccgcacaagcgtagattgctagaggcagcaccaaattctctctcctcggttccatggtggcggtacaggctagggaagggatgagg

SEQ ID NO: 125514 - DNA, 562 bp, Zea mays
  Clone ID: MRT4577_45940C.1
actgagggtgcctaggttaaacaagaggaaccggttatatttgttttgcggtcgaacacaaacaatttttgttggtgacttgtttcttatgattctacatatttcaaggtttatgtgctgtcctaaaaaaaaaaaaaaaaaaaaaaaaaaaaaaaaaagaaaaaaaaaaaaaaaaaaaaaacataaaaacaaaaaaacacaaaaagaaaaaaaaaaaaaaaaaaaataaacaacatgaaaaaaaaataaaaaatacataaaggaggaaaaaaaaaaaaatatggtccttggcctgacaccccattgggggaaattttacaaaattcccaaaaacgaaagccccggtggaacctcaccttaaaaggcccccattcccccctatttggggcagttaaaataaaagggacgaggtttaacaaatcggcattggaaaaaccctggggttcccaaagttaaatggtctggcactaaaccccttttttaaaagtggggaaaaaggaaaaaaccccacaccgtaaccccttcccaaaacagggccctaccgaaaggtaaattgaccccc

SEQ ID NO: 125515 - DNA, 606 bp, Zea mays
  Clone ID: MRT4577_45941C.1
atgccgacagtgagctacaggaggtttgctcacatcctgggatttactgatggagatatctcaggagacaaaatcaagattcatgactttcgtcctcccaccaaggatgaagccaaggatcttcatatctctgagtctgatgaatattggaagtctaccaatctgataaggcgattgaggaaagccccttccagctctcatggacaagctgctgccggtacctcgcgtccctctcctggtcgtggatctcccacaccacgtggtcgtggtcgaggttgtggtcgcgggatgggagctcgactggctcatggtattacagctttcttttctatgtgcaggaacatatctttcgatgttcatgagctggcgaggcgtcagcgagagactgacgacaacctccgccgtcaggcctcttccatgggtatgccatttgctccccgctcgcctgatgtgccccttcatcctccttcgccagagataaatgaatggcaccagcaagcctatggggtgcccttcatgtcggcagaagatgaagaaggagaagaggaagaattttttgatgatcgagagcaccagtactatctcatatcatatgctatacaatga

SEQ ID NO: 125516 - DNA, 176 bp, Zea mays
  Clone ID: MRT4577_45942C.1
accggccaaaggctaaggccaaggccaaggccaaggatcaaaccaaggcccaggctgcagccccagcttcagttccagctcaggctcccaaacgtacccaggcccctacaaaggcgtcagagtagatatctgtgccaacatgaggacagaaggactggtgcgaccccccacccccg

SEQ ID NO: 125517 - DNA, 353 bp, Zea mays
  Clone ID: MRT4577_45943C.1
gtcgtattatccgcgacgacatcaacgaacttccgctcggatgacgaagacgtgcagcgacatccacatggcggacgacgccgtcgccagcggagcggacgttcgccgcgcaggggcagcaccggcatcacgtcatctaccagggagcagcagcagcagcacgacgacgctggctgcggcggcagctaccaccacgacaaggactacatcatcatgcagacgcaggcgaggagcgggctggcgtgccagccgacgatctccgtgatgggcaagggcggacagccgtgacgctgcctgcgggcgcatcgcaacggtagacaccacgtgctgagggagatcgccctgccgtcgca

SEQ ID NO: 125518 - DNA, 156 bp, Zea mays
  unsure (1)..(156): unsure at all n locations
  Clone ID: MRT4577_45944C.1
tcgaggggagactgaaatnacggcatcagtagcagacgcaaggcgaccacgtaggagtgaccggcatcagtctgcggcagcgacgcccaacaacggcaccttatgggcgccgacgacgacgacgctgccgcctgccgtgtggccgcccgagaaagg

SEQ ID NO: 125519 - DNA, 451 bp, Zea mays
  Clone ID: MRT4577_45945C.1
aacaaaaatacagggcccaaggcatggaaccccctccattccaaactaccataagaaaacatcatattggtttgccacagggtctcattgggggaaccaggaacgatgtccaaacaggttatcgcataagggcccggccacgttacccttaaaaaaaaaagctcacaccccacaggggccggcatcactcaaggcatttccgttacaaaaggacaacccatttggggcttcgattatttatccccgaccccaagtcagtcaaccctggatacccccctcaagccccatatttaggccctttccaaaacttaaatgccacctcgggcaggaagcgctcaacaagcataacaagggttccaccacccttcaaaaaccccccaaaaaaaaaccctttaaccaaatcaacacgtgttactcccccctgcccctgggccaacaaaattggatgaaa

SEQ ID NO: 125520 - DNA, 210 bp, Zea mays
  unsure (1)..(210): unsure at all n locations
  Clone ID: MRT4577_45946C.1
acccacgcgaccaaccacgcgtccgcttgatcacatcgctngcttgccgtccacctccctcgccttttgctccactcccgcgtccatcttcgtcctcttcctgttctgtcgcttcgttggggggggtggggctgccttccgagaaatttgccccggggagatcgtccttgccctcttcgacttgcatctctggtacaccgggtttatttt

SEQ ID NO: 125521 - DNA, 189 bp, Zea mays
  Clone ID: MRT4577_45947C.1
cattggtgtgctaacagggcatataggatgtggcttttgtccagctgatagtagttagaggcttacaacttaggagcagcaccaactgaaggtgctaattgcttggatctccttcattgggatagttggagagggattggagtaccactttccttccactgttacctggtacttaatgccctaaagata

SEQ ID NO: 125522 - DNA, 1318 bp, Zea mays
  Clone ID: MRT4577_45948C.1
gcaagtggaaccgtttgcctctcgcctgcatcctagtccggcggccgcacccgggcagctccggcggttccccgccgccgtcctccgtctatccccgactgcgctagagctccgtctcatgggggcgtccgaatctctcctatctaggcagcagcttcagcagccgcggcctcagtgggcggatgagatcacgacggtgtccgagggccggcgcgacgacgccgacgccgatcccctcgtccgccgtatccggtctctcaccatagctcctccgctattgagctcccaatctgaagcggaagcagagagcagcctcacggatatcctcgtcgggaagccctctaactcctcagccacctctggaaatctgaacccaaatgtcctagctgagcttttcgccatgtaccgcgaatggcaagaagagaatgccaagaaaattagccgaaaacagatccaacatggaacgtcttggtgcaggaggagatagaaaacaagatagaaacagctgatgcattggcagttaaacttctccagcggttcaattattgtcttacttacatgagatccacctcccacaatcttgctgaagtgcatccgctgcagatcgaagttggtgagtcaaagggcaggttaactgaagtcataagcaactgcgatgcattgtgtaagagaattgctgcagaaggaccagaaagcctacgatcatctgttcaacctttcatggctgctagagcggaggcagaagggagtggttcacttgacccaaaacaagagtcctgaattgtacaatctaactgctgacagcatgcgcaaagaaacttcagaggatgattagtttgtcctgaacaaatatattatataaacacgtttaggaattgttcggttattctcaatacatatggattggatgagattggaaaaaattaagaagaagtttgacttgtttgggattcaaacctatcaaatcccactcaattcacgtggattgagagctaatcgaacaagcccttataatgttggaaaacatgttttagtcttagaaaccgtctacattgacactagtatatctatcacgttaaccaacgtatcattcgaatggagaattgtatcattcgaatagagaattgtagatctttactactagacgcatagcgtagatgtagtggaagtagtcgaatgttcttgtgttcattcatcctcaagtttgttgttgattactgtcgcaataatagcagcttctccgcggtgttcacacatgtggtgatgaaacgatgtaataccattgtgctagcataatatcacatccagctttaaggag

SEQ ID NO: 125523 - DNA, 193 bp, Zea mays
  Clone ID: MRT4577_45949C.1
caagagctatgactgccccgcgcacgcgaacttaaaattcgaattcaggtagaggagctttatcattgtcctacatacatccctgggcctaacacacacttaacaagctctacacagctcaacatattcaagcaccacacaacgcctgaggtgttgacaaccttactctacctgtagcaacaccatctcgact

SEQ ID NO: 125524 - DNA, 196 bp, Zea mays
  unsure (1)..(196): unsure at all n locations
  Clone ID: MRT4577_4594C.1
ctatcaacaaaacggtgttttgttggagactaagatgttttcgagctcatgtgtagtggcaaacgctccatctttttggcaagctgagaaggagcagaacttttttcctgcgttttaanncannncgnngccttttggggggggggggcccattaatcgaggagatcgcatacttgaaaaggggaggataataccc

SEQ ID NO: 125525 - DNA, 332 bp, Zea mays
  unsure (1)..(332): unsure at all n locations
  Clone ID: MRT4577_45950C.1
gccgcagtgtgctggattcgctcttagcagggaaaacgcagagacttttttttttttttttttttttttttttttattttttttttttttttttttttttttttttttttttttttttttttttttttttttggggacccggggcttgtgggcctgggaggttaaaatggggggggggttgggggggggcgggcctaaaacggggctttttccatttttatgggggttgcttcnctacccgggaacgacgggggggcaaagggctcccgggcaacagggggggncgccgagcctgggttgggcacgggtccgggggcgtccgcccgttctgg

SEQ ID NO: 125526 - DNA, 400 bp, Zea mays
  unsure (1)..(400): unsure at all n locations
  Clone ID: MRT4577_45951C.1
ngggggttctttttttttttttttttttttcttttttttttttttttttttttttgaattcccactgaaaccgggttttgaattaaagaaaattaactttggtgctgggcccttccactcgaatgggatccaaaaatcctctccggattttttctggccgcgggaggccaacattttgctttggataaattagggtgggggtttggccacccacccccttggccggccccccaagaaaaggacttatctgaattcccccccaaatccccttggggccttttttggcgcccacccccggaaccaatccccgcccagctgggaactaattgcttttaacacggttgagcccaattcccggctttcctccccgggcatgccagagtttaagtttttttttggg

SEQ ID NO: 125527 - DNA, 393 bp, Zea mays
  Clone ID: MRT4577_45952C.1
tttttttttttttttttttttttttttttttttttttttttttttttttttttttttttttttttttttttttttggcaaacaaatccctttaaaaaatcctttccattcagaacaaacgggaagcaaacaaccttgacccagggcccggaaaaaaaaatcacagggatcgacaaacaagaacaggaggccctaaagggacaaccgccccttggaaaaccaaaaaggggccacccaagggggggcctaggggggaacaaaggcgataaaaagacggggttagcaggaaccccttcattcaaaaatggctacaaaaggaaaaaaacatggggggccgaccagaaaaaaaaccctgggaccggaaaaatttcaaaccttaacagggggaggcatg

SEQ ID NO: 125528 - DNA, 692 bp, Zea mays
  unsure (1)..(692): unsure at all n locations
  Clone ID: MRT4577_45953C.1
ggtacgcctgcaggtaccggtccggaattcccgggtcgacccacgcgtccgggaggtggtgcggagcgtgtcggcttcgagctcctcgcaaaagtgtggcgtcgcgctaggctgcggcggagcctctgtaaggaaggcgggagcttgacagcttcaggaaaggcccgtagcggtgacagcgacccggagtcatgagcgacagcggcgagcagaactacggcgagcgggaatcccgttctgcttcccgaagtggaagtgctcacggatcggggaaatctgcacggcatacacctgcaaggtctcgctccaaggaagactcaaggcgttctagatcaaagtccaggtccaggtctgaatctaggtctagatccagaagaagttctagaaggcattatacaaggtcacgatcacgatctcgctcgcatagacgatcccggagcaggtcttacagccgagattatcgcaggcgccacagccacagccattctcccatgtctactcgaaggcgtcatgttgggaaccgggcaaatcctgaccccaactgttgtcttggcgtgtttggngttgagcttatacaccacagaaagagacctaaagagaagtgttctctaaatatggccccattgnctgatgtgtctattgtatatgacccagcatctagacgttcaagaggatttgcctttgtatatttt

SEQ ID NO: 125529 - DNA, 506 bp, Zea mays
  unsure (1)..(506): unsure at all n locations
  Clone ID: MRT4577_45954C.1
gcagcagcggcagaagggcacgttctaatgaatctaatatatgatatacaacaaggtccatttcagaaattatgagggaaaacatggtcgttgcaccggcactgaaagacgtcctcgaaccggagcccctccagagcagcaaacaaaactgaggcagccatgaggccccctccaaaaagcctgctctgccgcgcttttatggtcttgccgtggaacgctttacatacactgatgaactcctactagaacaacaacatcagttgaacaaccctgcccgccgctccattacagtgctttggaaatcctcctcagaatttgaagaaatttttaaaaaaatgtaccatatctgcagcccaacaacttacatatanttccgtttaatgatctgcactcaactagcatatcgagggcagcagcatgataacgatactaccaggagccggccatctctgcagaagcagcagcttcacaaggatcttcacaaatgggtggtacaatcttccctt

SEQ ID NO: 125530 - DNA, 672 bp, Zea mays
  Clone ID: MRT4577_45955C.1
atgaccactcaagctagcatgcaagcagcgagaacatacatagctatttcagccatgtcatcctatgggcgcaccaccgcgcatgatcggcctccagcatcacactcgccagaactttgcgtgagaggggatgaagtccactgtcagactcctcatcgcccagcgatccttcagaaagctcgatgacgaccttctcgctcgaaggtacctcagtgtgtaccagggttccgaggtatcgacttgcaatgactacactacgctgtcgtatgttccgtcgttgaagaatatacaacctgcctagagagcgggtgaattacacttgatgcgctcgtgaggatgaccggaattactgcaaaggagcaaggtgtgaaggatgaatcctcatcagcttcttcaggctcctatcacgatggtgtatggaacacatgggcccagctggctgaggaggagtaggatgatgatgctgacctttttgatgaggagaccgaagatgacaagaactatgctgaagacttccatggagctgtcaaggtttctgacaagaagaaagaatctggcaagccatcacatctacttgatgcgaagccatgggacgatgagactgacatgcgcacgcttgacgaagctgatatgaatgtccagatggagcgactgctctgctgggatccgagc

SEQ ID NO: 125531 - DNA, 430 bp, Zea mays
  Clone ID: MRT4577_45956C.1
gcccacaagcgcatccttgcgcaggtgcatcggcgtcgggcctgcatgcgcctcaacaccgcgcaatttcaggtcgaaccacttctgccccaatgcccccagcaccacgccgatggttttcttctcgtcctccagaatcgggccttgctcgatatgcgcttcgaaatacgcgcccaccttgtggccactgacagcacgcgtgcccgcatagccaatcgcattcaacgcatcgcccacgctgacgccgtccacatcaaccttggccaaggtatcagccaaactgaatttctcggcaaacacgcccgagcccatcatgcacggggggaagcgtgagccttcttcgttggtccacaccaccactttcagcggcgcttcggtttcgatcttgatgtcattgagagggcgcaacacttccacgcccgccagcacg

SEQ ID NO: 125532 - DNA, 718 bp, Zea mays
  unsure (1)..(718): unsure at all n locations
  Clone ID: MRT4577_45957C.1
gggtaccctcccggnccgtccgggctcgccggcgacgagcctccgcggaaaccagtgccaagccagaggtgcttctttctccgccagactgctgctccgcgcgagaagagccaccacggagtctgcgtgactcgggacggtggagaaaatcagcggcacagcgtgggtctcgcgacctccagcgaacgagatccctaagtttcgatccactgtcccagtggatttgggactgcgatggaggagcagttcatcctccgcgtgccgccatccgtcgcagagcggatcgagcgcctcatgaatgaatccgcctcctcctcctccaaccccgacgaggcctccctggacctctccttctcagaggatggaagaaatggcacatttatgatcggtaatgagagctttcctgcatctctcttggatctacctgctgtggtggagtcatacaaaacatatgatgattctgtactaattaaaactgctgatgttggtcagatgattatggtaagagaagaaaatgatcctgctccagaaggagttgagtacaagcatgggcttactcctccaatgagggatgcacgcaggcgacgtttccgcagagaaccagacttgaacgcagagctggttaaccaagttgagaagcatcttatcaaccagaacgccagtgcgacaggaggcgaagaaggtggtgatcgtaagaacctccagtagctcgtgcagc

SEQ ID NO: 125533 - DNA, 162 bp, Zea mays
  Clone ID: MRT4577_45958C.1
catcagagccatgccgttcaagagcaagttcttagctgccctggccgtgccgagacatgcgcagctcctagaaccggcgtattcctgtgaagtattgttgtctggccacgcctagtttctatgtcgattcctattaggcggctcttcatggctggtgctcac

SEQ ID NO: 125534 - DNA, 892 bp, Zea mays
  Clone ID: MRT4577_45959C.1
gaaaaaaaatcaaaaaaaaaaaaaaaaaaccagtgccaagccagaggtgcttctttctccgccagactgctgctccgcgcgagaagagccaccacggagtctgcgtgactagggacagtggagaaaatcagcggcacagcgtgggtctcgatttcgcctgcgtccgagatccctaagtttcgatccactgtcccagtggatttgggactgcgatggaggagcagttcatcctccgcgtgccgccatccgtcgcagagcggatcgagcgcctcatgaatgaatccgccgcctcctcctccaaccccgacgaggcctccctggacctctccttctcagaggatggaagaaatggcacatttatgatcggtaatgagagctttcctgcttctctcttggatctacctgctgtggtggagtcatacaaaacatatgatgattctgtactaattaaaactgctgatgttggtcaggcagagctggttaaccaagttgagaagcatcttatcagtatcatgcatggagtatctgtcaaccagaacgccagtgcgacaggaggcgaagaaggtggtgatcgtaagaaacctccagtagctcgtgcagccaagcagcctggggttcaggagcccgccgcgaatggagaggaagctgatcctgagaggagcgacagtgatgattcagataactgaaatggaggacctggactgggtgcagcctcagtggtccaggcgagccatgccaaacttcgcaatttgaataaatcagaatgtatatattgtaacaaacaatgtgttcgttgttcgctgaagcatgtactgtcacggtaaacatgatgtgacgctctaatgccaaacaagatgatgttactgcaagaaaaaaaaaaaaaaaagcggcc

SEQ ID NO: 125535 - DNA, 161 bp, Zea mays
  Clone ID: MRT4577_4595C.1
aataccagcacaaagctatctgtagttatctcatcccaagatgacttgaccagatgacagaagactcactatccttgatggggtaggtgcgagattgaacatgcatccagcctcccaacaactcacagtgagagagaactgtcctggttcacagtgcaacc

SEQ ID NO: 125536 - DNA, 342 bp, Zea mays
  Clone ID: MRT4577_45960C.1
ttgttctttatagtgcttgaggcggggcccacacaaaccctgcatatagagacaatgttctctaaggagccatttgctcgttttacacaacagcttgttagactcttatgaggaccgtttcgatgtgaaacaacactcaaggggcaggctgaggttaccaatgtcaccagattaagggcacagttttatgtctttttggcgtttgcccattttaggtgggggaatataaatgtttaaacccgtgagcccggcctatggtccgcctctagggacaaactgttcatttcttaagaaagcttttggattataccttttgccaacaaaattccgcctacggaaaaa

SEQ ID NO: 125537 - DNA, 1287 bp, Zea mays
  Clone ID: MRT4577_45961C.1
gggccggctcttattatgagtaacagcaggcgccgttcgatggcgtcctgactgccgcgtggagcccagaatgacgcccaagccaggagaagattgtttggagatccatcttccttttagttccaagccacaatacctggccacacctacgcacggcgttaacctgcccaccgtgaaataattgctacctatttctctcgccggcgacgagcctccgcggaaaccagtgccaagccagaggtgcttctttctccgccagactgctgctccgcgcgagaagagccaccacggagtctgcgtgactcgggacagtggagaaaatcagcggcacagcgtgggtctcgcgacctccagcgaacggtgagtcgagatccctaagtttcgatccactgtcccagtggatttgggactgcgatggaggagcagttcatcctccgcgtgccgccatccgtcgcagagcggatcgagcgcctcatgaatgaatccgccgcctcctcctccaaccccgacgaggcctccctggacctctccttctcagaggatggaagaaatggcacatttatgatcggtaatgagagctttcctgcatctctcttggatctacctgctgtggtggagtcatacaaaacatatgatgattctgtactaattaaaactgctgatgttggtcagatgattatggtaagagaagaaaatgatcctgctccagaaggagtcgagtacaagcatgggcttactcctccaatgagggatgcacgcaggcgacgtttccgcagagaaccagacttgaacgcagagctggttaaccaagttgagaagcatcttatcagtatcatgcatggagtatctgtcaaccagaacgccagtgcgacaggaggcgaagaaggtggtgatcgtaagaaacctccagtagctcgtgcagcaaagcagcctggggttcaggagcccgccgcgaatggagaggaagctgatcctgagaggagcgacagtgatgattcagataactgaaatggaggacctggactgggtgcagcctcagtggtccaggcgagccatgccaaacttcgcaatttgaataaatcagaatgtatatatttgtaacaaacaatgtgtttgttgttcgctgaagcatgtactgtcacggtaaacatgatgtgacgctataatgccaaacaagatgatgttactgcatgtactagcaaaatagttataaataacaactgctaagtagcattttattggatttaaaaaaaaaaaacgacagcacggaattcgagctcggacccg

SEQ ID NO: 125538 - DNA, 326 bp, Zea mays
  unsure (1)..(326): unsure at all n locations
  Clone ID: MRT4577_45962C.1
ggccgcngttttttttttttttttgcgaggaagccaagtgactcaatgaatcgaagagtacagaaggaccaaagctgctgaccaacaggagcaaaaaaacacgcaagcacgaacaatacctgaccgccgaaaagaacagcggacaacccaaccatctgagcatgtcagacaggggacgttaaagtaggggcgggggggcgaacataccggaaaacaatgaaccgggcaacattaccaaggcgaaagggagccacccgcaacactagggtagggcctagagacaaacggcaggcgacaaccgcttatgccaagagtagaccaacgcc

SEQ ID NO: 125539 - DNA, 312 bp, Zea mays
  Clone ID: MRT4577_45963C.1
gtccgaattcccggtcgcccagcgtccgtccaattcacaggacacagctatactgtgcgggttcgcactccacgcaccgtgcgcgctgcaacgaagcagaaatgttgctggtgaggcgcagcaacgtgttcgacccatgtcttcatggaccttttcgaccccttcgacagcatgttccgctccatcgtgccgtcgccgtcgtcggcggcggcgggctcctagaccgtggcggtcttcagcgcccccattgtctggaaggatacacacgaggctcaggtgtttaaggccgaccttcctcccgtgaagagggag

SEQ ID NO: 125540 - DNA, 413 bp, Zea mays
  unsure (1)..(413): unsure at all n locations
  Clone ID: MRT4577_45964C.1
caactaatgcatgctatggaggcacggccgctgtctttaatgctgttaactggattgagtggagctcttgggatggacggtatgccctggtagttgcaggggatattgctgtatatgccacaggaaatgccagacctacaggtggagttggagccgttgctatgctaattgggcctaatgcacctttaatttttgaacgaggacttcgtgggacacatatgcaacatgcctatgacttttacaagcctgatatgctttctgaatatcctatagtagatggaaaactgtccatacagtgctacctcagtgcattagaccgctgctattctgtctaccgcaagaagatccgtgcccggtggcagaaagaaggaaatgatagagatntcaccttgaatggatttggtttcatgata

SEQ ID NO: 125541 - DNA, 218 bp, Zea mays
  Clone ID: MRT4577_45965C.1
cactatcacaatagctataactatcacatgcactcgtccccgagcctagatcctatacagcagaccgcccgtccttttttttttttttttttttaatttcattttttgcggtatttaacccatttaacaacaaaccctataccttcttttccacaacacaaatatccatctacatcactatactacatttttccacatttacaaaaacagacagaaaa

SEQ ID NO: 125542 - DNA, 418 bp, Zea mays
  Clone ID: MRT4577_45966C.1
ggcccccaaaacggaaaccccatgggttattcttaacaaaggccaaagagagaccaaaactggggaattcgttccaggggggggggttttaagttaaaacaaaaaaaggacaacggggccaaaaccagggggggccccggggccagggggcccggtcaaatttattcccagcatagccaagccggaaaaagggggggggcccaaagggcctggggggccccccccggggggggggggaaaatttattttttttcttccccacgggggctggaacatggggggggtcagggggaccacccgggtggtggccccccacccgggggggccccccggggaccagcttggtaaaaggggcgttcaggggaaacccgggcttggggcccaaaagcctgcccggggggccccggggaaagggggg

SEQ ID NO: 125543 - DNA, 562 bp, Zea mays
  Clone ID: MRT4577_45967C.1
gggcgcgctggtccagataattttctttttcatcgaactgtccatgccaaacacggactgctcatacaaatatttatatttttttttgccaacacgacgctaaatctatccacaacattgtcaccacggacattagagcaacaaggtcaattctagttcactcggacacgactaatccgtcgccatcgatctaacgcggcaaccacttgtacgagtatatatatggaggaagggcgtggataggacactggcgaggatcagctggagtgcttcactgaacaagccactacttgagcccagtgcctaagccttgtcttcacaagctgtgggttatctcctggactgcaaattttccatgactccaaggggttattagagtgcgtactaggacttccggggctgggcgtgccgcagaggttgggcgacgacttggtggccaagagagacggtgctgagctcgtagaaaaccgcattttgggctcggacagctgccggttgacagcaaagtagatgtcgagggccgggagcgtgtcgcacaggtcctgcccgcccttgtgctcgt

SEQ ID NO: 125544 - DNA, 263 bp, Zea mays
  unsure (1)..(263): unsure at all n locations
  Clone ID: MRT4577_45968C.1
gtttctagtgatagctttgctcttgctcgctctcctcgcctgggcgactggactccgtgtgcgcgctcctccttcatccactgcgccatctcctccagctgcagcaggccggcgcggcgttgcctccgcttgctcccccctcgcgctcgccgncggcattccggcagttccagctccggacgttccatagtgtagcgccgggatgggtgacccgagcgcctccgccgaccccgtcgcccggcgccaccacttttagcaaaagg

SEQ ID NO: 125545 - DNA, 307 bp, Zea mays
  Clone ID: MRT4577_45969C.1
agttttcgccgctctcggcacctcctctcgccccggcagctgctctgctctgcttccctcccctcttgcagatttctagaaacaggaaacacagggggcagaaatggcttccaactacgtggacaccacgggggaggaggggaggttccacgcccacggccaccacagcaacagcaccacgccgaccggcgaggccgcgtcgcccaagaatacgcggaggagatggcccgggtcggcatcggcgccgtccggcgcaggccacagactcgcttccacccacgccgggtccttcaagtgccgcttccat

SEQ ID NO: 125546 - DNA, 580 bp, Zea mays
  Clone ID: MRT4577_4596C.1
tgaattcggcacgaggtccacagctttgaatgaagccctgcgagaagaagtccagcgacttaagatagccgcaggacaagtcgggaacatgaatgggaaccccttcaatggtggactccagcagcagattccatcctatttcgtgcagcagcagcagatgccgtacttcggtggccaccaggctcagcatcagcatcacagtcaaaaccatcatcaccggagtccatcaaacgggagacagtcgcccagtgatcagtccctaaacgactccatggatttcgtttgaggacaatataccggggcaagtattacatcgtataccaactgcagttcagcaccgtaaagatagctagtgtacaatgcatgcatatgcctcattggtagtgtagtttagttctttgtatcgttaatctggaagtggctccagtatgtcaaaatggtgttttattttcttctttcctgggttgtggagtaatgtgttagacagaactagccacctttagcaatttatgtaaatcttgttagcctttcttttctccatggtggaaggttcttgttatctgtcattgttttgtgcccc

SEQ ID NO: 125547 - DNA, 218 bp, Zea mays
  Clone ID: MRT4577_45970C.1
ttttcgtccacgcgttcggccacgcgttcggttgggttttccagaaccgctttgggagggacaaccatttccgaaacataggtctatcttattttatgcacaactggtttaaagagacgggagagggatttctatctagcaccggggtggaatttacctgtcgactttgggggggttggggttaagcggaaggcaatttttaattttgggttaaaagg

SEQ ID NO: 125548 - DNA, 239 bp, Zea mays
  Clone ID: MRT4577_45971C.1
gggtggggtttaacaaagggtaggggggctggcctaataggaccaagcaatcttttttggttttccttgggggcctaaaagccttggtactggattttgtttacacataaaaccctggttaccaacgcgaaaatgccccaagggaatacggagacaaagcccacgacccgtgggatagagtactgacaaattcggttaatggaacacaccacacgggactttggattggcacaacctgg

SEQ ID NO: 125549 - DNA, 353 bp, Zea mays
  Clone ID: MRT4577_45972C.1
gcgccaacccttccgcggacacgtactctgcattcaaggatcatgacgcaccacaagatcagggccgccatggtggtaatcttggaaaccagacagatggagcagatcgtgtcactaatatcaatgtcactcgacagccagatcctactgactggcccagactcaatcattgccagatctgtttgtgttgacgctgatcctgatgatcgtttaaagattgggcacgaccttagccagaccactggaatcgccgcatgctcatgtcgcttgaggtatcacagtactccagcgctgtataccatcgacggacttgggggagcctgataggtacctatcctgccgaacccatgaca

SEQ ID NO: 125550 - DNA, 698 bp, Zea mays
  Clone ID: MRT4577_45973C.1
tcgaggccggccgggccgggtattagaccattgattgcctccagcatagacatcaatcatgccaagctcggtatgacgatccgtttcgtgcgtgttcgctaatgagcaaagccagacgcggatgtcgtcaaaatagtagcacatctccctcgcaccagcgacgggccctcgtaggtggagatcatccgacatgtgactcttgcgcactgaccatcaaggatcgatgtgcgagaaaagctgaactacaacgtcgtgtactgcgggtactcctattttattgtcctggtggtctccaacagatcatgagaagggatcatctatcattgaattctgacatctaataccgaagatgatgaatcttctgttcatgaacgcgaggaagctcgatatcttgctgcatttgaagaaaggaacttcatgttgaaagagatggtgatgaatgggagaattgcagcacacgagcatgacagaacatgttgagcagctgtaccaattatgaagaagacttcgtacgatatggatagcgatttgcggatctctacatcgacttcatagaacatttgcctgtcggcctctttccgtaagatttccctctgtatgggaaagtgatcaacagtcactggaacgatgtagtattgaattgagctgatggtatgcttgcagatgttcctcatgacattgatcgctgcgcttacgtc

SEQ ID NO: 125551 - DNA, 306 bp, Zea mays
  Clone ID: MRT4577_45974C.1
gggccaaaaatttttaataatatgggaaatttcaaagggaaactccccaccatgggaaaattttaaaggaaaagggggcaaacaaaaaagggggacaactaaagaaatgggcctttccaaccctgaaatttgggcggggggagggatagcaaaaaacaactttcccaaaaaagggttttttttaaaaaccctgtactggaaacaagcccctgtccaataaaagggggggtgctgaccgtaaaaggggcctaacattcccgggggggaaggccccttcaaaagataaagggggggggggaccacccc

SEQ ID NO: 125552 - DNA, 778 bp, Zea mays
  unsure (1)..(778): unsure at all n locations
  Clone ID: MRT4577_45975C.1
agtgcgngcaggggatccgtcaaggcgttgtcagtggcttgggatttggcttgtcattcttcgtgctttactccacatatgccctctgcttctacgttggagcaaattttatgcttgatggcaaggccacgttcaccgatgtgttcagagtgttctttgctctgctcatggcgaccataggcgtttcacagacaagcgcgttaggtccaaactctgccaaggccaaagcatcagcatcaacaatatttgcactcattgacagtaaatcgaatatcgatcctagtagcgatgagggcatggtcttggctgacgtcactggcgaactcgagctccgccacatctgtttctcatacccatcccgccctggtacgcagatattcagagatctcaacttaagaataccatccgggaagacggttgcgcttgtcggggagagcggctgcggcaaatccaccgtcatcgctctcctggagaggttttacgaccctgattccggcacgatcacattggacggcgtggacatcaaagacctcaagacgggttggctgcggcggcagatggggctggtgagccaagagccggtcctgttcaacgacaccatccgcgcaaacatagcctacgggagagaaggcgaggcgacggaagaagagatcgtcgccgccgcggaggccgccaacgcgcacgagttcgtttcggcgctgccgcagggctacggcaccttggctggcgagaggggcgcccagctgtccggcgggcagaagcagcgggtggccatcgc

SEQ ID NO: 125553 - DNA, 465 bp, Zea mays
  unsure (1)..(465): unsure at all n locations
  Clone ID: MRT4577_45976C.1
tcgtacaagatcaaaggaaagcttccaatgggggggcgaccccagaagggaggataacccccacaaaaaggccggggagccccacaggaaggaggagggggacccccacaggaaggacgccgggaaccataaggaaggcttcggggaaaaaaatcaaggacaaaatcaccggcaagcacgggaacaagtccggcaaccacagggaaaagagggacagaaaaaaaaaaagggagaaaaaaaagcacgggaagggccacaaccacaacggcggccacagtaccagcagcagcgacagcaactgaaatctggtgtcgcagcacaggtgcaccaaaagtatgctggttggatggaggatccataccagctgatgctgatgtagggtttcactggtgtaatgcttgcatgtatcgggctattttattcaaaaagaaaaaagaantaccagtcagggatggtttgtttgcc

SEQ ID NO: 125554 - DNA, 341 bp, Zea mays
  unsure (1)..(341): unsure at all n locations
  Clone ID: MRT4577_45977C.1
ccggctgcgagcgccacgcgtctcggtggagcgtctcgcgtaccggcttccggctcatcactttcctctcggttgctgtctcttccagcatcggcnaggttcatcnccttcatgcctcgtcatctggagcctcgctcggccctaccagctcgcattgtacccccggccccgccgtgtctgttccctggttcgtcattcaagcgcccaggtcgagccatcgccccgcttgggaaatggcagccacggctcatcncnncgtctcgaacctccatccagcttcctcacaattcccttgtnntccttggcgccttcgccaaagggccccctctccttcaaatctt

SEQ ID NO: 125555 - DNA, 446 bp, Zea mays
  Clone ID: MRT4577_45978C.1
gggaaaccggggtcattcgttttttttttaaaacttggccctttcagcgccggtggggggggggacgggggatgcgtcccggggggggacggggaaccccccccttttaggggtcacccgggcgttttggaaccccccctgggggggccccacccccacccaaaaagggggggatttgaacacccctggttggggtaaaaaattgagcgcaaaaccctgccaaaaagaaaaaaaaacaatccctttgatgcacaaaaacttttcaagggggttggggggggccccctttttaacaaacaagggggggaagaaaaccaatgcctataaggccctggggactgaaaagttcaatttaatactaaacgtccaggtgacccaagtgggggaccccccaaaaaggtgggggggcataattaaaaggggacatactgggccaacaaaaacaa

SEQ ID NO: 125556 - DNA, 460 bp, Zea mays
  Clone ID: MRT4577_45979C.1
gaggattttcgcaagatctataagcaagaaaaaccaagtgtaaaatcaatgcaggaaatagggaaggcatgtggcgaaaaatggaatacaatggcatttgaggtcagcattttctccttgcagcctgatagttgtgttccattagttatttaccaccttatgctgcctgctgatgtaaattgcttgattccacaatggtgatgcgaatttgaccacggtgcactggatatgcagtttggtttttgcctatacttctttttttcctgatcaaccattttatgtgggaaacagtatatagggatcagaaggtctttatattatgctttatttggttaatgtccagtctccagttcaaacttcaaagaacatgagctattgccacccttttattctaatggtgaagaagcgatttcccttgggcccatggcccatttcttgtttaagttctttcacaagttta

SEQ ID NO: 125557 - DNA, 389 bp, Zea mays
  Clone ID: MRT4577_4597C.1
gggaaagaggaacttcttttttttggggggccccatccctcagccaaaaaactttattttggaattccccccaaaaagcaacctaaaaaagggcccccccaatgatgggttggggggaggagggcggggggtttgtcaaaacaagggggacaaagggcaacaattggtgtatttgaaaaagggggggggggttacccccaaactgcttggaaaaagggaccaactggtgctgggtaaaaaaggaaacccaaattggtgaaactagctcgttaaaagggaaaaatatttgctggtgaaaaaaaaccggggggttcaggggggccaattggttaaaaggaaaaaatttttgttgctgaaagaaggcaaaacctaccgggcaaaaggggaaa

SEQ ID NO: 125558 - DNA, 649 bp, Zea mays
  Clone ID: MRT4577_45980C.1
cccgggcctgaggatgataaagttgtcatgcagaggaagcaacatgcacggcacattgatgtcattagcccctctaagtcaagaatggcagtgtcttcattttcttctgtgagccctgttaagaagcaacctaacttgtctcatcagccaaaatttttgctagaaagcaccaatagttcaaatcaccgtgcaagcgaagtttcaggcgccgtgactgccactacaacagcaggtgcctcttcaaccctggcagctcagttagtttcaaataaaggacctgtatccagtgctgcaacccggaatgagaagccagttctagttacaaataaacccctgcaggttcttgtaccatcaaaatctgaagcgcagaaacaggcttccctaactggcagcgcaagcactcaggtcgtttcggtatcaaggcccttgagtgccccgcaagtccctgcagcaaaacaaagtgtgccagccacaacagctcagaacgcacctcttctttctcgctcagtgagtgctgttgggcggttaggaaatgagccctccgccaatgctcctagcttcattccccggtcacgaacctatcgcaatgccatgatggagaaaagttctggtggcgtaagcagtctcacacatcagcaaggttcatctg

SEQ ID NO: 125559 - DNA, 347 bp, Zea mays
  Clone ID: MRT4577_45981C.1
tgcgaaagacgcccttatattgggaatcgccgaaggcctaatttctattactttatctgtagaatgccctgactgcgtatttgcaatacacgcgtggggatcagacccatctttgattgagaaatatctcttttttgattgacctactctctgggctggaggaggtcaaactggagatgcaactctactttgttgctctttaagttagaccagctccagcccaaaatgtatggcatcacgctctgaaagatttgtacctacaacatccaacttttgcacacccccgttttaccaaaccgcactaacagcgctttccgataaagaaataggaattaggcctcctacga

SEQ ID NO: 125560 - DNA, 183 bp, Zea mays
  Clone ID: MRT4577_45982C.1
gcgggcgcccaccatccgaaaagacttacatattttttggaagtcacaaacatcatccaaataacttgggtattgaactttaacttataagcaatctaaaagagggcaccaccaatgatggcgctgtggtagaacgcttttggcgttgtcaaaacaagttggttgattggcacaaattgttgc

SEQ ID NO: 125561 - DNA, 347 bp, Zea mays
  Clone ID: MRT4577_45983C.1
gtctcattcaccttccatttgtatactacgtgaacgtgacggggctcagcgtggggcggacctgggcgaatggccctgcggggccgttcgtgttggacccgtccacctgctcctggacgacgatcgactcggacactgtgaccacacggtgaacggcgcctgtatacgcagctctaggcgaggagttaccgacaaaggtggcggaggcgaacgagtacacgtcgctgggagcacacgacacgtgcttcaacacggacgaggtggcggtggaccgagcgccgcccgtgaaactgcacatgtgaacgcggcgtgcgacctgacactgtcgatggagaacacgctgatcc

SEQ ID NO: 125562 - DNA, 661 bp, Zea mays
  Clone ID: MRT4577_45984C.1
ctcgaggccggccgggaagatctcctgtgctcgatctccatctcgacgcgtcgtcagcgactgactgcactaatgctgaacatgccgtgccgtgatcgggccagcggcccagtccgcgccgcctgactgcccgtcgtgccgactctgcatccccgtcgctcgtccacctgcccacggcctatccattgttctcctctaccctgcctcgagtcgcgactgtctaccgataacgtcgaacgaggatgcaggctgaccagcagacgccatgggtatagtggctcacgccacttccctacccccgcctaccatcaagacactctggcggaggacaatgatttcgacccgttgagcatgctgaggaccacgacttccagaggagaacggtggacccagatgtgtcccacgtgcttcgtccgatgctgtgagcgtccgcattgctgatgcccaaggtgcttatcacagtcgctgtgatcatccttctatatagatacgatgccaccctattctgctgctgcctgttctcagcaactgtgcatgtgattgacgtcgtccagcttgcactatgagacagatcacatgattaatcggacctatttaaatgcgtatattagcattcctctatccgtgccagatactgatactccgtggccttttgatggtt

SEQ ID NO: 125563 - DNA, 1330 bp, Zea mays
  Clone ID: MRT4577_45985C.1
cggccacgaatatctcggtcgctgtatactcttaccttgcgccgccgccgtacagtctagagagaaccggcacagccgccgcagtccgcagatgtcgatcgtggtggcatcggaggtcgcgaccgctctcgcgagccgcggcgcggtcgtcgccctcgagtccaccatcatctgccacggtatgccgtacccgaagaatctccagatggccatggaggtggaggccatcatcagggacaacggggctatccctgcaaccatagccgtcctggacggagtccctcacgtcggccttaacaacgaacaattgaagaggttggctataagtggaaggcaatttcagaagacggctagaagggatattgtccatgtcatcgcatctggtggcaacggcgcaacaacagtttcggccactatgttctttgctcacaaggttggcataccagtttttgttactgggggcattggaggtgtgcatagacatggtgaacaaactatggatgtctcctcagacttaactgaacttggaaagactcctgtagctgttgtatcggcaggtgtgaagtccattttggacataccgcggacacttgaatacctggaaactgaaggggtgactgttgctgcttacagaaccaatgaatttcccgcgttcttcacagaaattagtggatgccaggtgccatgtcgtgttgattctccagaagagtgtgccaaaataatatatgcaaacaagaacctacgtcttggttctgggattcttattgcagtaccgatccccaagcagcatgcaacttcagggaaaattatagagtctgcaatacagacagctctaaaagaggcagggtacagtcaacatctgcacttctggaatgggaagatccgcgttgtagggttacgctcgcggatggagtagcacaggaagcaaaccatttacgaggatggaagctagctgcaggttgggaactggatgtgattgagatgtgtctgagtctgacaagaataggttgcctgcctgcctgccactttggcaccgtaatgagatgtacgccatcattgtattataattagatgttttttgggatgtaatctgaatttggatggttctctatactgaaatcatctgctttgtgagcggaattatggaatggttttggcacttccatttaaaaaaaaaaaaaaaataaaaaaaaaataataaaaataaaaataataaaaaaaaattatgataaacaaaaaataaatgaataaaaattactataataaacccccgacaataaaataaaagaaatttattagaaacttacaaagccttactaaaaaggggggg

SEQ ID NO: 125564 - DNA, 264 bp, Zea mays
  Clone ID: MRT4577_45986C.1
gaggggcccgagcggccaagttttgctggttgcttccgggaagcttaccctaaaccaacgggtttatgcttgttcgtggcgggtttttagaagcccatctgtgtttttggttggcaaagtcgctctgtgtcacactgttagaagctcgcgattggataactaacgtgttttaggtaggactccatgacctctaaacaccatggactgtggttcgatggatggtgaagcccccgacatgctttattttcatacaatcttacggac

SEQ ID NO: 125565 - DNA, 378 bp, Zea mays
  unsure (1)..(378): unsure at all n locations
  Clone ID: MRT4577_45987C.1
tgcttgtttatgtgcttggtattctatggcctatccctctgcgttgctgcgggagcggcgcggctgcgcggtcaaattcgcctgtggtgtgttatccgttgcgtgatatggtcgtgtagtgacgcggtagatgtgtagtccgtcatcatctactgccgtggcggctgctgttgatgtttcttttgatcgggtggcggttgtggtggtggggtggcgtatgatgcttatgttagctaagatgcatgataagcgtactgtgtcgttgatgtanggtgttatgtcggtgcggattcatgatgtgtggaatgtgatgtcggatgtggtgcctatgggtcttcctactctgttgctgggtcgggcggttcggggtgcgaatgt

SEQ ID NO: 125566 - DNA, 650 bp, Zea mays
  Clone ID: MRT4577_45988C.1
ctgccttaaagtgtcgatttttatatttctcaaggctttttttttaggaggcaaatacgattttccatctatatatagtacgtaaacatccttttcatacatcaggccgatcggatccataccaaatacacacagtacatctcacactccaccagacagtacacacgtacacagctgtcgtttcgtacacgctcaatactgctcaagatcaaccggccgcgtagctagaccaggcacgcggccgtacgtgctttcgtctatagctaaacgcctaaaccaggcaccgtcgtccttagttccttacacacacctgacaccacgatcgggaagcacgccggcgagggagagcagagcagagtatagaaaaccatggccaccggccggctcactcactccactccaggtcctggcagcccgcgagcggggtccctttgcggcactggttgtgcgcgtacggcttgcacccgtgcttgatgacgccgtgccccttggggagcggcccgcagaggcggttgtagctcaggtccagtttctgcagcgtggacagccgctccagcgacagcggcacggtgccccggatgaggttgtgggacaggtccaggtacgtcatctccggcgggaacaccagctggcataagaacgaagtcgag

SEQ ID NO: 125567 - DNA, 2114 bp, Zea mays
  Clone ID: MRT4577_45989C.1
ggccgcttttttttttttttttttgggaggcaaatacgattttccatctatatatagtacgtaaacatccttttcatacatcaggccgatcggatccataccaaatacacacagtacttctcacactccatcagacagtacacacgtacacagctgtcgtttcgtacacgcttaactgctcaagatcaaccaggccgcgtagctagaccaggcacgcggccgtacgtgctttcgtctatagctaaactcctaaaccaggcaccgtcgtccttagttccttacacacaccacgatcgtgaagcacgccggcgagggagagcagagcagagaaaccaaggccgccaccggctcactcactccactccaggtcctggcagcccgcgagcggggtccctttgcggcactggttgtgcgcgtacggcttgcacccgtgcttgatgacgccgtgtcccttggggagcggcccgcacaggcggttgtagctcaggtccagcttctgcagcgtggacagccgctccagcgacagcggcacggtgccccggatgaggttgtgggacaggtccaggtacgtcatctccggcgggaacaccagctggctcatgtcgctgaccctgttccggctggcggggctgacgggccccatcccggcctgcctggccgcgctgtccaacctgcagttcctgaccgtctcccacaccacgctcgagacgagagccagctctcccagcacacgagcacatggcgtccaccaccctcctcgctgtcttgctgctcgtggctgcgtccgcagcgccggcgcggtcttgctcacctcgcgacctgcaggcgctgttgagcgtgaagcaggcgctagggaacccgtcaacgctgtcgacgtggaccccagcgtcgcccgactgctgctcgtgggaccacctccggtgtaacgacgccggacgcgtgaacaacgtgttcatcgacggcgcggacgacgtgcgcgggcaaatcccgtcggcggtgggcgggctgacggagctcatgtcgctgaccctgttccggctggcggggctgacgggccccatcccggcctgcctggccgcgctgtccaacctgcagttcctgaccgtctcccacaccaacgtgtccggcgccatcccggagtccctggcgcggctgcgcggcctcgactcggtggacctctccagcaaccagctgacgggcggcatcccggcgtcgttcgccgacctgcccagcctccggtcgctggacctcgggcacaaccagctgacgggcagcatcccggcggggctggtgcaggggcagttccggtcgctggtcctgtcgtacaaccagctgacgggcccgatcccgcgcgacgacgcgcgcgacgagatcaacaccgtggacctctcccacaacaagctgacgggcgacccctcccacctgttcgccgccggccggcccatcggcaaggtggacctgtcgtggaactacctcgacttcgacctgagccagctggtgttcccgccggagatgacgtacctggacctgtcccacaacctcatccggggcaccgtgccgctgtcgctggagcggctgtccacgctgcagaagctggacctgagctacaaccgcctgtgcggcccgctccccaagggacacggcgtcatcaagcacgggtgcaagccgtacgcgcacaaccagtgccgcaaagggaccccgctcgcgggctgccaggacctggagtggagtgagtgagccggccggtatggttttctatactctgctctgctctccctcgccggcgtgcttctcgcttcccgatcgtggtgtgtgtaaggaactaaggacgacggtgcctggtttaggcgtttagctatagacgaaagcacgtacggccgcgtgcctggtctagctacgcggccggttgatcttgagcagttaaacgtgtacgaaacgacagcgctgtgtacgtgtgtactgtctgctgaagtgtgagatgtactgtctgtgtgtatttggtatggatccgatcggcctgatgtatgaaaaggatgtttacgtactatactatatgtggatggaaaatcgtatttgcctcaaaaaaaaaaaaaaaaaaaaaaaaaaaaaaaaaa

SEQ ID NO: 125568 - DNA, 291 bp, Zea mays
  Clone ID: MRT4577_4598C.1
caatgagccatctcagcttgacatggacctgtacgctcaggggctggctcgctatgccgttagctgccaggataatggcctggtgccaaatgttgtgcctgaaatccttgttgatggcactcatgacattgatcgctggtcttacgttattgagaccgaacatgctgcctgcatacaatgtgctcaacgagcaccatgtgatcctggatggtactctcctggagctccaacatggagacatacaggctccgactctaagtacgtgactcatgacgtgattgctgatgacac

SEQ ID NO: 125569 - DNA, 843 bp, Zea mays
  Clone ID: MRT4577_45990C.1
gctcgcgcacccggccgtgggcggcttcttcacccactgcggctggaactccaccgtggaggccgtgtcggagggcgtgcccatgatctgccacccgcgccacggggaccagtacggcaacgcgaggtacgtgtgccacgtctggaaggtgggcacggaggtcgccggggaccagctggagagaggggagatcaaggccgccatcgacaggctcatgggcggcagcgaggaaggggagggcatcaggaagaggatgaacgagctcaagatcgctgcggacaagggcatcgatgaatctgctgggtcggatttaactaatttggttcatctcataaactcctactgatcgatccttgtattgggtaccatgttccggatgatgagttggaataaatcaaaacttgtgttccagtcgatctacgcttctcatcattcatcatcatcaatggacaacaaaacctacagctacagggtttagaacattaacagacttgttttcgagcttcctcaggattcaacccagttgtgctagagcatcgtctctaacagattatggatgttctcctgatattagtaacagattatggatgttctcctgatattagcactgtagcttattgatcgagctgcaaattaagatctgtataaaaacaagcctctattctcaaatatttattgcccgctagttcatttttgactaaaggcgaagtatcatgtgcacaccacccatcggtgcacattgttgggcggaggacgaacctaactagcacacaggaccgtgggtgaagatgcattcgactcttcgaacgcctgtaacggaagataaagtcaagcagagtgggt

SEQ ID NO: 125570 - DNA, 357 bp, Zea mays
  Clone ID: MRT4577_45991C.1
gtcacggcgtatttgcagacacaattagaagaaacatggaaagcattgttttcaagccttagatatgggaaaaactttagtggtccgggctgtttccgccatgctgttttatcaccattaggatacgagactgcattgtttaaagggcttagcgaagacatagattgtcaaggtgcttctgcacatgatctatggcaaagccccgatgacaaaaaaactgctcggttatctgagtttggagaaatgatcagagactcttttggatttcctgtaaacagacatcattctgataagacagtctcgggtcattataacatcctctttgtccgtcgagaagattatttagcccatccacgc

SEQ ID NO: 125571 - DNA, 743 bp, Zea mays
  Clone ID: MRT4577_45992C.1
gggggggagcgggccaacctcatccccggcttcaagtcgggcgcgctgcccgacggcgtggaggaccgggtgcgcggccccggcgtcgtcgtcagctgggcgccgcaggaggaggtgctcgcgcacccggccgtgggcggcttcttcacccactgcggctggaactccaccgtggaggccgtgtcggagggcgtgcccatgatctgccacccgcgccacggggaccagtacggcaacgcgaggtacgtgtgccacgtctggaaggtgggcacggaggtcgccggggaccagctggagagaggggagatcaaggccgccatcgacaggctcatgggcggcagcgaggaaggggagggcatcaggaagaggatgaacgagctcaagatcgctgcggacaagggcatcgatgaatctgctgggtcggatttaactaatttggttcatctcataaactcctactgatcgatccttgtattgggtaccatgttccggatgatgagttggaataaatcaaaacttgtgttccagtcgatctacgcttctcatcattcatcatcatcaatggacaacaaaacctacagctacagggtttagaacattaacaaaaaaaaaaaaaaaaaaaaaaaaaaaaaaaaaaaacaaagcgcgcccatcatgtgcacaagccgcccacgcatcggtgcacattgttgggcggaggacgaacctaactagcacacaggaccgtgggtgaagatgcattc

SEQ ID NO: 125572 - DNA, 217 bp, Zea mays
  Clone ID: MRT4577_45993C.1
cgttgatcctcatcctcatcctcctcatcagcagcagcagtgcagcaataaggagtcgtccatggacatgcagatccccgccgaccttatgatccggatcggcgagtccgttttccctctccacaaggcggtgatggtgtacaagttgggcgtacatccgccgtgccgtcaaggcttcagagagctcgctggcctccacgaccagcaggatgggcgg

SEQ ID NO: 125573 - DNA, 268 bp, Zea mays
  Clone ID: MRT4577_45994C.1
taaaaaaaaaataaaaaaaaaaaaaaaaaaaaaaaaaaaataaaaaaaaaaaaaacaaaagggtaagaaaaaaacaaaattaagtgcacttccttacaacattattaactattttttaatttaccctaaatttaattcactttacctaatttttacatcgccctttactaaaaaaaccctttctttccccatcttaatcacctttaatcttttccaagttttccccaatttactttatttcccacgaatttccccacctttttccctt

SEQ ID NO: 125574 - DNA, 503 bp, Zea mays
  Clone ID: MRT4577_45995C.1
attggtacctcgaggcggcgggcggacttcaccacgaccgcagtccgccatgtattgcgagcgtctctgctctccctcgatcgagatcagcaatagagagagatcggctgtccacttctccaacatggagctgcaccgggcctccctgctcgagcgagatctgcacgagctgaaatatatctgacaaagtggggtgcatatgctgcctgagggctggataagtgacaggtacaagcatgtccgttgtggccctcacgagcgcaaactcctctggcggcgcttgtgacgtctccacgccgcttatctgactcctggaactccgcctcattgtcaatctacccatcctcggactcgaagacggtgccaacgacggcagatcaatacacctattctttgcacctgatgctcctcttcttctacgtgcagatgtaccttatactcttcctcagaagaatgcccctcaccgagacgcgtgaactctgagctgtcagaggtgtccgact

SEQ ID NO: 125575 - DNA, 514 bp, Zea mays
  unsure (1)..(514): unsure at all n locations
  Clone ID: MRT4577_45996C.1
ggtttgttttttttccccccaaaaaaatgcggtgtatatatcatgtgaacttactacactggtaggtaacaactactacgtctaataacaaggagtaacaaccagcagggcggtggggggggagttcccggccaggcgagcccaccccacggcggtgctggtacttggaggggtggccatctgggttggcgggcgggacgctgcgcacgttcttcaacagggcctggatcttggacaggatcatcggctgcgaggggtccccgggggagggaggtccgccgccgaggcgggcaccccccccgctgctgctcgtgggatggtgggtctcctgcaggttggtcttctcgaagatggactggttctcgggctcggcctcctcgaggcgccgcttgagggacatgctcgcgtagtcctgcccccccggctccgacttccgcttcggcagcgcgacgctccgcaggcggtcgggctnctcctggggctggctcggcttcagctgggacatatccgactc

SEQ ID NO: 125576 - DNA, 282 bp, Zea mays
  Clone ID: MRT4577_45997C.1
attacattcctacgaagaagggcaggagccagtatttcatcaataaatgggtgccaaaggcagaaacaggccgttccatagcgagacttcacgggtacagagtactagagcactaatttcgttcggcgagatgaactctgctagatactaaaatgcatacgacaggttaagtcgcaatttgtgattgcccagcagatgcatgtggttaagcctctgctgatattgcttatttatttccgatacattgccggctgtttatgtttctgaagagtcttcaactcc

SEQ ID NO: 125577 - DNA, 363 bp, Zea mays
  Clone ID: MRT4577_45998C.1
aaacccaaaaaaaaattttaatgggggttttaaaaaaggtaaaaaaaaggggtacctactggggtaaaaaaccccggggaaaaaagggtttacaaaaaaacttttggaatttgaaaaaaaaaggaaactaaacaaaatcctttagttgggaaaaaaaaaactttaaaaagggggggaaaaaaaattcgggcccggggggggaaaaaccacaccccaaaatggttcgggggggaattttgggaaaagggctttaaccctcaaataagggttagcattaccagaaggaaacccccccagggttttgggcctttccttggaaacccgggggggaaccctggggggaaccctggggtcaacccggaa

SEQ ID NO: 125578 - DNA, 290 bp, Zea mays
  Clone ID: MRT4577_45999C.1
ctcggtgtcgcctgaaccgtaaataggaggggaacgagctctagatagacaaagccgagaaggggatcacccgatcgggggagaaaggcaccaaaaacaagaaccaatggtccacggcgctttttctcagggtggactaccccttccttcttcttttcccccgcttacttccctaacttgttcggtcgcggatccttcccttccgccgccggttccgctaaaacggcccgggttagtggatctctttttttttttccaactttttttggaatccatagcttgcggagcac

SEQ ID NO: 125579 - DNA, 1462 bp, Zea mays
  Clone ID: MRT4577_4599C.1
cgcatgaggggggcgacttcctcgaattttccttctcttctctgaccgactgatcttagcgaccttctccctcgaatttttccttcgtgcttagcgtagcggtagcgccgatcctgttcctgtgccgtgccggcttggaaaataggagggagaagatcaacgccgccgcggtgcggcctgtggagtattaaacaaagatgcgcagagccgcagagcccggcgccggcagctagcagccaacgcgaaacaaaccatcgtcacccaatagccaccggccaactgtcaagcactccttcggtgcttccccatctgcgccgcgccccgaaccctccggaccccgcgagcgaggccgtcgccggcgcgcgcgagatttgagctgaggccatggagtcaccgttccgggccgacgtggtcaaggacaaggcggcgctggtcaccggcgggggatccggcatctgctttgagatcgccgcccagctcgcgcgccacggcgcgcaggtcgctatcatgggccgccgccgggaggtcctcgacaaggccgtcgccgcgctccggtcccagggcctccgggctgttggtttcgatggagatgtccgcaaccaggaggacgcggccagagtgcttgctgcaacagttgcacattttggcaagctcgacattcttgtcaacggtgcagctggcaacttccttgcttccccggaggatttgacgcccaagggattcagaactgttcttgagatcgacactttgggtacatacacaatgtgctatgaagccctcaagtatctgaaaaagggtgggccaggaaaaggcccgtccactggtggactaatcattaacataagtgcaacactgcattacagtgcttcttggtaccaaatccatgtctctgctgctaaggctggggttgatagcatcacaagatcactggctctggagtggggaacagattatgacattagagtcaacgggattgcacctggaccaattcaagacaccccggggctgaggaagcttgcacctgaagaaatgagcaaggggcttcgagaaatgatgccattgttcaaatttggggagaagcgggacatagcaatagctgcgctctaccttgcttctgatgcaggcaaatatgtaaatgggacaacactggtggtcgatggaggtctttggttaagtcaccctcgccatattcccaaggaggaagttagggagctgtcgaaggtggttgagaagaaggttagggcctctggtgttggtgtaacatccagcaaattgtgatttgcatttgtgtgatctgtagcatcgatcaatatgttattacagaactttattgtctatgtggtctaattagcgagtttgtttagttgagtaacttgacatatttacagtacatttgtttcttcaaagttccatttgagacagttttgattgatatgtgatgccagccaagaagttccatttg

SEQ ID NO: 125580 - DNA, 253 bp, Zea mays
  Clone ID: MRT4577_459C.1
gaggatggagggcacactacccagctaagcgcctgaaggttaaccttgcgcgctgtttatgctagcacgcggacagcgatgcccatctgtcagctggccacatgagaacgactgcatactcctttggccccaacgcgttatttgcgcatggcgtatctaactatgggacttcctaactagctgtttgaactcacggtgctctactttatggcactactaaaagactcgtcacgctggtgtagcactcgtatgt

SEQ ID NO: 125581 - DNA, 2937 bp, Zea mays
  Clone ID: MRT4577_45C.1
atggcgcccaagcggaaagcctcgagttcatccgccgcggtgattcccccaatcgaccccaacagtcagttgcctttcgcaggtaaccacatgtctgttgtcttcgagcccgaccttctccacctcgtgtccatcggggtccttcccccgagggagctgtgttcttggcggatttgtcatggggtcactgtcccgacagaggataccaatgagtccgtaatttacgttccttttcttctccacggtctcggtcttcccatttctccctttttccgcggcctccttgatttctatcatcttaaactgacccatttgaatcccaattatattctgcaaatttccatttccattcatttatgcgaagcttttcttggcatgctgccacattttgggttgtggaagtacttgtatcactgtcgccctgggatggccggggggcagcatcagttggttgggggtgctagcttggagatgcgtcgtgggaggaagactgagtatcttgaaatccctctcaaagacagtatcaagggatggcgcttggaaaggtttattgttgagaaccatggcaattctctcccccctaggtcgggaagacagccgaatgttcgtactccaagttggaccgaatcccccactgatcaggaggtagctgaggcaggtgctttgctagctgaagttgggctgctgaaggagaggggtctgactgctgaggctgtggttgctgattttgttttcaagaatattcagccgttgaaagacagggcatacccagcttacctgtaccgaggcctagctgactcaactcgggtcaccaacagaagaattccctctgtagacttggtgaaccgacttgagatgattcttagaggcaaggtatcaaatgttggtgccctagtggcatattcagcctggaacctgcctcctcccaaggccttcactctttttgtgtcgaatccgcctgtcactgatggcagtttgggccttagagtgcgaccctctgctgaagaaattagcgtcttggttgcttcactcgggggaattcctgatgatgaacggcaggtccattttgaggtgcctctggatcctagtgacgcagaaataagtgctatgcttgatttgctggctgaggactcttctgatgctgctcctgctgggacgttggtggtggcacctcccccagaagctgatataaccttggatattcagaaacctgtcaccgaagaagaaaaagaagtgcctgttcctgaatttactgacgctgaactcgatgggggtgctctacctgctactgaccccaatgggtgtgctccttctgctgctgaccccaatgggtgcgctgtctatgttgttgatgaagacgactgtgaggaagaagatgaggtccctttgactcggaagaacagtcggcagtatgtcgccagtggtgaaagtagtggagttccttctcctgctctgtctgccctcattggtctgcaagaattgtccctggcgaatttggatcagactcttgaggatatggttccagaggatctattatcagagccagcagatgatggtgtgatggaggtttgcgctgatgtgctcgatgctgggttgaggtcatcccgtgcctcatcgaccttagaacgcggtcttgagggtcaggagactgacttggatcatcttggtcccatggaagtaactgagggtccatcagccttagaggcggctactgcagagaactcggtcctcagggacggtgttgacacttgcccagcccccgaggatgtcgccggggatgactcggctcgggtgggaagcgcaagccactgcccagcccccgagggtactgccggagatgatccggctcaagtgggcagcgcgaaccgtgacccagcccccgagggtgtccgagtggggtctccctcttgtacttccatggacgttcatgcgggatcgcctccgcactccggctgcatggtggtagcccaggctttggatcagagagtcgctttagagggcagcgtccccgctgaccaagttttgggctctattgatggcactgaattggtccctgctggttcgttgcaagctgctttgggtggcgaccttacgcccggtcatcaattgatctctcatgacttgggagtcccttcgttcttttccaacctccaggctttggtggacgggatggctagccagttgaggttgcagggtgcttctgttccagaaggagctttgtctcttgcacgttggaatccagtgttactccaacgtcgtgtctctgacttggaggcgactaatgctgatatgactcggcagatttccactcttgaagaaagacattctcgagatcaggctaaactggtccagcgatgctctgattttgaagaaaagtattctcaaagccagactgaactagctcaggtctctgctgccctagatgacgccaatgcactgagctcttcccttcgcactcagcttgattccgaaaaggaagaaaaacgtatccttgttgcttctcatgacaatcttgacagactctatcgcgactctagcaactcgctgaccatcctggagaggagtcatcgcttcaccatggaggagttagacaaccatcgctgtaagctgcaggaatccgcggatgaagtgatatggctcaagcaattgatatcggcgaaggatgctactatcaaagaacttcgtgcttccaagaaatccatcgcccaggagctagaagccgctcagttggctgctaaggttgctgaagaaacttccattactctgagagcccagcgcgacagagccatggataaggccattcgtgcgaggcgaatcttgatgaggagacctggtgtggttgttcctgaagatataagggctgacgtgaatgctgctcatgattcctcaagtcgcccttcctcgtcggttgcccctgagaaagatatcacgaaatag

SEQ ID NO: 125582 - DNA, 266 bp, Zea mays
  Clone ID: MRT4577_46000C.1
ctcgcctcgggtcatacccgaagcagggagttgatttagccgctgcagccatgagcaagttgcatctgagtctgtcaggatgccatgtccgagattgttggtgatgccaaggagtagagtaggacggtcactgagactgtggtacttcagattggtctgaagaattatgatccagagaaggtcaagcgtttcactggctctgtgaagttgcaccatatccctcgtcccaagatgatggcgtgcatgcttcgtgatgcccagcatgt

SEQ ID NO: 125583 - DNA, 547 bp, Zea mays
  unsure (1)..(547): unsure at all n locations
  Clone ID: MRT4577_46001C.1
ggccgggnaaagttttccgacaacaccgcctgtttatctatctctccttacaccattcgtgagagtgagctctaactgctggcacccaggtgacatttagtaggggtcgattaatgaataggaagatatacaaccatgactttggctctgcgcaacatcttctcgtacgaagcgcatgacacatcgaatccgggcgcgaggatgacttactacgcttacctcggacaatatctacctggagcctcctgcacgtccatcttgtgtataatactcgaagagccccaaacgtggtcctgtctacctcgcgaaaatctcttagataatctgcacccttccgtctgtcctctagattacctgcatctaccgcgtgctaccacccatataaacctccgtccgagatgcctctcgattccatttctccatcggcatctcttcataggcaagtatcttgaagctcatatactggatcgtcggcatcatccattatatacactcaatcctgttgggactgtcaatgtgctcttagctaccaatgtcatccttggta

SEQ ID NO: 125584 - DNA, 332 bp, Zea mays
  unsure (1)..(332): unsure at all n locations
  Clone ID: MRT4577_46002C.1
tttcttgaggcttttttgtgaacttggtggacatgagggggggggggatgattgttttttgtgaaaggcatggngctcgggctgtcaggaggctagctggtcctaataatagggttcctgcagatggaaatattgatgaattagcagaagcccaaagaatcggtgctggtaaacttctgaggagaaatgcggaaaatgttgctgctcgattagaacaactggaggctcaggtggagcaaatgcttgatggtctgaatgaccctaatggagcgaagaactttccttttgataaacttgttggattccaaggcctttcttcaatttgtttgaaa

SEQ ID NO: 125585 - DNA, 234 bp, Zea mays
  Clone ID: MRT4577_46003C.1
gatttcagatctccatttgggcgtgagaacagattttattgacttgagattgcttcactctaaaagcataagttcactaataacatattggtcccttcaaaagcataatttcactaataaattttcccagataaccgacaccacaaattgaaccacatttttcttggtacaagagcacgaacggctcccaaactgaagaacctctgcctgccatccacaagccaacaagcaaat

SEQ ID NO: 125586 - DNA, 114 bp, Zea mays
  Clone ID: MRT4577_46004C.1
cttcttctgtgcttcagaggcatcgttgtacaaagatgcctctgaagcacagtagaggacgaactgtttctcttatcaacgcatagactgtcagtgctgttaaagaaaaagaaa

SEQ ID NO: 125587 - DNA, 456 bp, Zea mays
  Clone ID: MRT4577_46005C.1
gggggggggggttttttttttttttttttttttttttttttttttttttttttttttttttttttttttaaaaaaaaaaaccggaagcaactattgacacaacagcaattaccttacagcaatttcttttgggtcccccgggaaaagaaaggggcgggggggggaaacaatgctttaaaaaaaatttttgccccccccccaaactacacaactttgcttgcagcacacacacaagttttataaaaaacaaaagccgataggcactcctaattcgggtaaacgagacaaaaatgcacactgggacggggggaaggaaaaaataaatacgtactttgggacagagcgggaattttaatggtcttttttttgcaaaaataaaggcaataggaggtacacggggtaaatgatccccggaatggaccctaaaagggggaggaagggggggatccaaaaatt

SEQ ID NO: 125588 - DNA, 231 bp, Zea mays
  Clone ID: MRT4577_46006C.1
aaatttcccaaatccggtgaactcacaccgtcatcctcacctcgtcaccaacgccggccttccttccattctccatcgcctctcagtcggataggcgccggttggcggaaattctgttcggactattcatcttgacggcatgtctcattatcacagcgccgagtgtgaagtgatggagcatgagtactccatcgtcgagccagtcgatgacatcgagtgggaggatgagta

SEQ ID NO: 125589 - DNA, 358 bp, Zea mays
  Clone ID: MRT4577_46007C.1
ggcagctggtgaagtgcgcatacaatggtatgggattcgcttatcaaatctggatgatctcccgttttctggagtgcttggatagtagttctaacttgcagataccttttgaggatcagcgaagggttctgaaaggagcctgtgagaaccctgtttcccaaagaagatggtttgttttcccaaatttcttcgacaactaaaattagcttccacctaacattttctggctcacagccaacaccgcactgtttggtgaaattaaataaaaattgtatgactgtttggcgaaattaaatcaaaactgtatggagtttaaatgacactagaatgataatgtttttcttgctactaaggccat

SEQ ID NO: 125590 - DNA, 653 bp, Zea mays
  Clone ID: MRT4577_46008C.1
cctcgaggccggccgggccgggatagagagctgctcacctgcctatctatctaacgatagacacagaggaccgctagcgtagctagcatgctaccatggcagcaagaaagcaacaagaggatgtgctggggatgctgcttcgccaacagaagtaacgtccaacccttctctaagaccgccgcctgtgagtggatacctcctccgtgcttcggtgtgcacatcatcgcgaagaatctcgtgcatccaacgaaaggcatcctcagtgccgctgcactggtgtcatcctaccatgctatacaggattgcactgaggctgatcttcgcgttgaccaaatctcgcatgtatagcagatatcatgaactatccgctatttaggatgttgagggggagaaatgcagctcgcacactacgtggggcgtgcatcttatcgcctgtgaatgcagatctctaaaaaagaggagaataacattgaatgtggtccatgtggatgacaagacaaccgacaactacctcgctagcgtccgtctctgctctctgcttttacccccatgagcccagaccaattcgagagaatctgctatgctcgggcatacctgattcctgagagtcaccgctatacggtcgagattatgatcaacatacgattctacat

SEQ ID NO: 125591 - DNA, 219 bp, Zea mays
  Clone ID: MRT4577_46009C.1
aacaaaacaaatttacaagaaccaactatgtattctatgcaaactcataataccccaacagtctttgtacttattcttgcacaactctgtgtttacatttaacatacaataatccctaaagttacacattatttatcttctaaacttttagtttcctcacataactaccaatatttaccaccttttttacctctataaatattttcgctatatccatca

SEQ ID NO: 125592 - DNA, 377 bp, Zea mays
  Clone ID: MRT4577_4600C.1
ggagaatcaaattctccgtttccgatacacatcggacatgggtgaacaacacccggccgagcacaaggtggttgtggaactgagttccaaggatcttgtaccgaaacatttgaccgagcagcagcgtctgacttttctcaaacttgtcggaccacgctacaaccccgatacagacattgtgcgcatgtcctgcgagaaattctccgctcgagctcagaacaaacgttatctcggtgacaccatcagaaacttaatcaaagaggccaaagaaggcgactccttcgcagatgtgccccttgacctccgacaccacaaaccaaagattcactacacattccctgaatcatggaaaatgaccgaaaaccgaaagcgttagc

SEQ ID NO: 125593 - DNA, 812 bp, Zea mays
  unsure (1)..(812): unsure at all n locations
  Clone ID: MRT4577_46010C.1
ttgggtacctcgaggccggccggngactcgaggccggccgggacgatcccgaattcagatctcctcaccaagtcaccttctttctcaacaccgcaaatatggatcacgcaaagttggcgcgtatgcaggcgtcagtgcgcattggcggcaagggcactccccgcaggaaggtcaagaaggtccacaggggcgctggtaccgacgacaagaagctccagaccgcgctgaagaagctcaatgtccagcctatccaggccattgaggaggtcaacatgttcaagagcgacggcaacgtcatccacttctcggcacccaaggtccacgcctcagtacccgccaacaccttcgccatctacggacacggtgaggacaaggagctgacagagctcgtccccggcatcctcaatcagctcggccccgactcgctcgcatcgctacgcaaactcgccgagtcttaccagagcatgcagaaggagaagggcgaggacggcgagaagaaggacgacgacgaggaggatgacgatgacatccccgacctcgtcgctggcgagaacttcgagtcgaaggctgaggtcgagtaagaagctactccagtcttagccaaacaaagactaggcagtgttgaggaggaggctacgtgcaatgatggcctgccgcatgtacattggttttgaggacttcatgaatgcaatgatcattacggtcagcagccgcggcgagttttgcatgcacataccgggctggtgttatacctcgaaaaaaaaaaaaaaaaaagcggcccccgagccgaaaaaaaaaaaaaaaaagcggcc

SEQ ID NO: 125594 - DNA, 308 bp, Zea mays
  Clone ID: MRT4577_46011C.1
ccccaccgcgtcgtacgtcggccttcggctcgcgccgagacctcccgccgtccgaccctgacccctcagccttctccgtcccgcctcggccctcgacggccgccggtatacaccgcgccgtctcgagacaggcaccggcggcccgcggctggcggctgactcgccgctgacgcagacgatgacgggtgcggtgacaggcctcgccgcggggcacctctggcagcaccgtcgtcgctacctggtccgacgtgccccgtgtggcgcgagacgtcgcgctccctggccttctccggccgctccagctgtgc

SEQ ID NO: 125595 - DNA, 745 bp, Zea mays
  Clone ID: MRT4577_46012C.1
tttgctatctataattgtcagcttgaatggtgggctaaatagttaggtggtccatgattcttttgcgattagcataggtgctttgtggtgatatttgcttagggaatctgattgtccttaagctgaattttgctgcacacattctctctgttgtggtaataattgagtgaagtaaatcatgttttctgtgaaagtgttatacataaattgtagctaacttcgttatcttgttggtgtaaaaatatcatggccataaaactagtagtttgggagttatgattttctcaagcccagtctcagaatgtgtccaagttttgtacagatttcgaaaatgacgttgtttgcctaagttaaactgaaaatcagcttttagtaattataggagaattgtggtacttttcttaagctttccaacaaatttttgatcaccctttttggtgatctataagttaaattacagttgtttgaagtgtgatctctgaatctgtccaaatctggcagcagagcctttttcatgtcttttgactttgataggtattgaattaacctgagatgtttataaaggaattgtagacaattctattagatatctaaaaagtctaggatcatcagatttggatgcctgaaactccagttatggatttttgaagtgagtagtcgaattctgtctggacagaatttaggtttagcattgtttgacatttctaaatgtcgaaatttgttctgattgtaatacaaaagtcat

SEQ ID NO: 125596 - DNA, 308 bp, Zea mays
  Clone ID: MRT4577_46013C.1
ggggccagaaacctgggttttataacgggtttagcttgcccccttgattggaagaacacaaaaagggattgggctaaatactgggggcccctacgggggcaaaaaggggcccaaccccaacctggtttctaaaggttgggagccaaaaaggtgtctcaacaaaaaacctgggggggcagccaaaccccaaaatcccccccgattaaaatagcactggactgaccttgcgcccgcttgggaacaacccaattacccccagggccaggtccaggtgttaacaacaaccaagagaagggaattcgggtgaa

SEQ ID NO: 125597 - DNA, 1312 bp, Zea mays
  Clone ID: MRT4577_46014C.1
ggtcccaccattccgtgcaatcattttgaaacgctttaacagtgcgcattgttaccttgcaaaacacatctacgaaggaaaatgaaaccctgatggccattggaactgcttatgttcaaggggaggatgttgctgctagaggacgggtgcttctgttctctttcagtaaaagtgaaaattctcaaaatctggttaccgaagtctactcaaaagagagcaaaggtgctgtatctgctgttgccgctcttcaaggtcatctactgatagcttctggtcctaagatcacactgaataaatggactggctctgaattgactgccgttgcattctatgatgcaccattgcatgttgtgagcctgaacattgtgaaaaactttgttttatttggtgatattcacaaaagcatatattttcttagttggaaggaacaaggttctcaattgagtctgctggcaaaagattttggttcacttgattgttttgcaactgagttcttaattgatggaagcaccttgagccttgtagtttcagattctgacaagaacgtgcagattttctattatgcccccaaaatggtggagagctggaaggggcaaaagctgctttgcagagcagaatttcattgttggagcccatgtgtcgaagtttcttgggattaccggatgttgcctaccccaaggattagccttttgagaagacaaatcgttttgctcttgtatttggaacgttggatggtggaattggatgcattgcacctgttgatgaattgacatttcgacggctcccagagcttgcaaaggaagctcgtagatgccataccccatgtctgtggattaaatccaagatcgttcaggcatttcaagtcaaatggcaaggcacatcgtcctggaccagataacatcattgactttgagcttctttctcactatgagatgatgtctttagaagagcagctcgagattgcgcagcagattggaactacccgctctcagattctttctaactttagtgacttttcactgggcactagtttcttgtaagtggtaacctgtggctaagtaacaccatgcttctgatgaaagtggtgcttgccattcattagccacgtcaagaattaggcccaattccatcaacatggtcacttccaccagttttattgtaaagatggctgctgtaatttagatattaatggtgtaactggaagttgggcgcttggcaactgattgcaaccatatttgtttcgttggactgaagtagtattggaaactgcactgaaaatgaactatctgaagagtttcaaaaaaaaaaaaaa

SEQ ID NO: 125598 - DNA, 296 bp, Zea mays
  Clone ID: MRT4577_46015C.1
ataaatgttggggattggaagtggggatgaaatggcacttgttgatacaggagcagataggtgaggccgactgctgaagacagctcgccaccctccttgcctccactccaatccaggggctggggccacattctttgccttcatttatcctcagatcaggtgagatcgacaggaggtgttgatggcagtgccagcaattattgctaatccgtttgcatccttatggcgtagatctgaattcagactttgtgaatttccagaggtgtgggtaatataatagaattcagtgagtgggc

SEQ ID NO: 125599 - DNA, 262 bp, Zea mays
  Clone ID: MRT4577_46016C.1
gcaccttcgcctggcacatcctcggcggcgcggtttcctgcttcttcaccggcgtggctgcttgggcacggggtgcatgaccggcttgttcaccgacgtgaccgcctacttcttcgacaacgcggatgcctgcggcggacaaaacgtggcggactaccgggcggtcggatccgcgaacgaacaaatctacggcgccctgtaaatcttcggacgccgcacggcagactaccgggcggacggatccacggacgaacggatctcc

SEQ ID NO: 125600 - DNA, 336 bp, Zea mays
  unsure (1)..(336): unsure at all n locations
  Clone ID: MRT4577_46017C.1
gcacattcacccgncgtcacgcatagtacgaactcccggtccgaaaggcaaaccagggaccgggcccaccaccaccaccctctgtcttctcctccgctgccgattcaaaagcacccgtcctgtcccctcgcaaaaccctagctccagccaccatgaagggcaaggctgacacctccaagaaggaccagggcatgctcctggcgggcggcgccgctccaaagcgcaagaaggccgccgcgagcgggaagaccaaacgcccgcccttcggctttttcgtcttcatgtgtgaattcaagcacgaagtataagcgctgcaccctggcaacaagagcgttt

SEQ ID NO: 125601 - DNA, 382 bp, Zea mays
  Clone ID: MRT4577_46018C.1
aagtatccaatataactagttaaagagagacatgtaatcggagtttgggaagttcaactgccatgttcaaatcatcagttttgttctctaatatcttcggtcggtgcagaggaaagaacgcagcaggactgttacagttcacaacgacacaagctcgaaagacggcaacattttgcaaacttatcaacttatatcaaattgacgccgctaaactgaacttgcatttttgctcaaacatgtttcctgcgagaaatgacactcgatggtctcaaactgcagagaacaatagtgtaacccaagaaaatggggtaaattctaagggattctagcaactgaaatcacccgtcactggttaaagtaagggcaaggacaacacaggtca

SEQ ID NO: 125602 - DNA, 831 bp, Zea mays
  Clone ID: MRT4577_46019C.1
gggacctcgagccggccggaaatcttcttcgtgttcatcgttcacctcatccttcccttcccttctctccccggctccaccagcagccgctcatcgaaaccttcccccactatccaccagcatcaagcagagatttcttccgccttctccagagctcgcatgcttccgtttcgtcctccgcgttcgcttccctagagcagagcaggtaggtagtcagtagccagcaatgatccgcgagttcctggccgtggcggcacgcgcggcgctggagtgggcgctggcgtcgctgctgcttgccaacggcgccgcgttctgcgtcatcgccgccgccgccgcgcgcctccgcctcggcccgccgtgcatcgtctgcgcccgcgtccaccgtctgctctgctcctcctcctcctctgctgccagcgccaccggcgtggcacgcgacgctctccgcctcctcctctgcgacgcccacctcgccgccgtcgctccggatcgctgcgacggggatggtggtgtctcggagacggatgctgcgatggcggacgatgatccgaacacgttttcaggcatggagactcaccgcgacgtctccatcggcagcgagatatgcgagcaggacgaagacggcatcaaacaccacgccggcgaccgcatcgcaagaaccaccagcgccgacgacggttacggcccgctcgtatctctcttcgagctggcgccgatcgtgtcgtcgcgaccacgggaggacgacgattccatagaccagctggcgaggacgatgccacagtcgctgaccctggccgtggactgtgacgagagcctgacactcggtgagct

SEQ ID NO: 125603 - DNA, 1360 bp, Zea mays
  Clone ID: MRT4577_4601C.1
agccggccggggccggcagctagcagccaacgcgaaacttcagcttccgctccgccgtccccctcccggacccaaacaaacaaacaaaccatcgtcacccaatagccaccggccaactgtcaagcactccttcggtgcttccccatctgcgccgcgccccgaaccctccggaccccgcgagcgaggccgtcgccggcgcgcgcgagatttgagctgaggccatggagtcaccgttccgggccgacgtggtcaaggacaaggcggcgctggtcaccggcgggggatccggcatctgctttgagatcgccgcccagctcgcgcgccacggcgcgcaggtcgccatcatgggccgccgccgggaggtcctcgacaaggccgtcgccgcgctccggtcccggggcctccgggaggacgcggccagagtgcttgctgcaacagttgcacattttggcaagctcgacattcttgtcaacggtgcagctggcaacttccttgcttccccggaggatttgacgcccaagggattcagaactgttcttgagatcgacactttgggtacatacacaatgtgctatgaagccttcaagtatctgaaaaagggtgggccaggaaaaggcccgtccactggtggactaatcattaacataagtgcaacactgcattacagtgcttcttggtaccaaatccatgtctctgctgctaaggtacctggttcttctctgaatcactccttaataagagaaaataattggagtaagcagattcgtttgtataggctggggttgatagcatcacaagatcactggctctggagtggggaacagattatgacattagagtcaacgggattgcacctggaccaattcaagacaccccggggctgaggaagcttgcacctgaagaaatgagcaaggggcttcgagaaatgatgccattgttcaaatttggggagaagcgggacatagcaatagctgcgctctaccttgcttctgatgcaggcaaatatgtaaatgggacaacactggtggtcgatggaggtctttggttaagtcaccctcgccatattcccaaggaggaagttagggagctgtcgaaggtggttgagaagaaggtcagggcctctggtgttggtgtaacatccagcaaattgtgatttgcatttgtgtgatctgtagcatcgatcaatatgttattacagaactttattgtctatgtggctcttgttacctaattagcgagttcgtttagttgagtaacttgacatatttacagtgcatttatttcttcaaagttccatttgagacagttttgattgatatgtgatgccagccaagatgtttgtcgccagtgagctggtaga

SEQ ID NO: 125604 - DNA, 110 bp, Zea mays
  Clone ID: MRT4577_46020C.1
catatttgtttttgtgatgacctatcatgcggaggctatcaatcacctaatttaggggcatggtccactacacaacgaaacaatgtacgatatggatcattaacacgccc

SEQ ID NO: 125605 - DNA, 458 bp, Zea mays
  Clone ID: MRT4577_46021C.1
gcggccgtggaggacgccggcggaggctgcagtggcgatggcaacaactaccagtcgctcgtggacttcctgccggggtcggtgcactcctcctcgccggacctggccaacctccttaaactctacactgaatctggccattgcggtgggtgaggagggggaagaggccgtcgctgtcgctgtcaccgtcactgtcacagctgccactgaagaatccatcgggcgtgttgatgctacatccgccgccactgtttctgaatctttacaagaaagctccaatactttccacgccgaaacgacagcaacggaagccgcttaatttgccggtcatcacctcgggtctctcgcccatggtggaaacatgcacgaaaacactgtagtagtagtagaatgctttctcttgtacatcgtcacatcgatttgtttttgttaatattgcaaaatcggtttgtagaatc

SEQ ID NO: 125606 - DNA, 1981 bp, Zea mays
  Clone ID: MRT4577_46022C.1
ttgggaccctcgaggccggccgggagaggctttttcgtgttcctcgttcacctcaatcctttccttcccttcccttccctccccggctccaccagcagccgctcatcgaaaccttcccccactattccaccagcatcaagcagagatttcttccgccttctccagagctcgcatgcttccgtttcgtcctccgcgttcgcttccctagagcagagcaggtaggtagtcagtagccagcaatgatccgcgagttcctggccgtggcggcacgcgcggcgctggagtgggcgctggcgtcgctgctgctcgccaacggcgccgcgttctgcctcatcgccgccgccgccgcgcgcctccgcctcggcccgccgtgcatcgtctgcgcccgcgtccaccgtctgctctgctcctcctcctcctctgctgccagcgccaccggcgtggcacgcgacgctctccgcctcctcctctgcgacgcccacctcgccgccgtcgctccggatcgctgcgacggggatggtggtgtctcggagacggatgctgcgatggcggacgatgatccgaacacgttttcagctaacgaagataagctgatgctgttgcaatcaatcatgtattgcctgagagtggtaactgaaatgcatctatgccaaattggaattctgatgatccttgacaaggggttttccagtgtaattgcagagaaccaagtccaggctcagggccagttgaccattgtcgggttgcttgagataggatacaagcacaatttaattcagaggccggccgtgccaactgaagtcaatggctccatgtttctaagggacagctcaacagggtgtcaaaaaagcatggagactcaccgcgacgtctccatcggcagcgagatatgcgagcaggaggaagacggcatcaaacaccacgccggcgaccgcatcgcaagaaccaccagcgccggcgacggttacggcccgctcgtatctctcttcgagctggcgccgatcgtgtcgtcgcgaccacgggaggacgacgattccatagaccagctggcgaggacgatgccacagtcgctgaccctgaccgtggacggtgacgagagcctgacactcggggagctggtcaccgcgttcagggcacagaggagggaactggacgcgctgcgcgccgagctcgccgccgagcggcggctgaaggcggaggtcgaggagtaccagcgtcagctggaggagcagggcgagctcgaccgggaggctgcgcggctggccatgcagctcgtgtacgagagcgaggcggagaagcacggcctgcagcggcggcagctcgacgcgtgcggggccagggcgcagctgcagctgcagctgcagctctgccagtccgaccccgcggccgtggaggacgccggcggaggctgcagtggcgatggcaacaactaccagtcgctcgtggacttcttgccggggtcggtgcactcctcctcgccggacctggccaacctccttagactctacactgaatctggccatgccggccgtcgtccgggtccggggcacggttacgacgtgccggccattgcggtgggtgaggaggcagaggagggggaagaggccgtcgctgtcaccgtcactgtcacagctgccactgaatccatcgggcgtgttgatgctacatctgccgccactgtttctgaatctttacaagaaagctccaatactttccacgtcgaaacgacagcaacggaagccgcttaatttgccggtcatcacctcgggtctgtcgcccatggtggaaacatgcacgaaaacacggtggtagtagtagtagaatgctttctcttgtacatcgatttgtttttgtgaatattgcaaaatcggtttgtagaatccaatgtcatgttgaggcggccgttgatgcgccagagccctgctttggagctccgacgagaccctattgtacttgtacccatgatgaccttcttccccct

SEQ ID NO: 125607 - DNA, 193 bp, Zea mays
  Clone ID: MRT4577_46023C.1
cccacacgttcggctaaaggctatagtttttttcaaaggtccaatactaattcctggactatagactgaagtatggctggagatcttccaagatctgtccagtacaaaggaagcgattaccggagcttacaccacagctgcctaagccattccagagtacagatggttttactatgatcctatataagatggc

SEQ ID NO: 125608 - DNA, 430 bp, Zea mays
  Clone ID: MRT4577_46024C.1
ccggccgggatcgtaatctagcccctaggtgcaagtgtaacataggagttcctctcttcctcggcaggccaagcgctgattggtgttgatatagaataatgaaggaaggaaggagtagatgagaagcatgatctgatgtcgaactcgctgttggaaatggccgtttgagacgaatgcgaactcaagttcctggaactcagcgagataaggagtttccgattcatcgcgttaaacatcaacgagaacgcgcagcaactggtggtggacaggtttcaggtaccaggcgaaagctacgatgcgcctaatgcttgcgtttgctgcaacgattgccggtatccgacatttcaatatgactttgtcactgatgagtactgccagcacagcgagatcttgtttatattttgcgacgtagatgcagtgatggggtgat

SEQ ID NO: 125609 - DNA, 513 bp, Zea mays
  unsure (1)..(513): unsure at all n locations
  Clone ID: MRT4577_46025C.1
aaaaaaaagacaagacacagccggggagnnnggggtccacaacaaagaaaaagggagaagggggacagctcccccattggggggttccttaaaaaaaaaaagggccccaaaacccccgnctcgagaactgatgtaaagacgcgtaggctcacggaaggggcggccggacacaaaccgcgcaagtaccaaaaccaatggtgaagcctgacacggggccgccttgcggtttggatgacaccaaaccccatggccctggggtcccgccaggcagagagtgggcctctggaacaacgattcccttcagaagtcctgccgggccgggggggggcttccccactcaaaaactttaaattcggggggggggggggaaagcaataaggggggggggggggggttccccccccccaaaagagaaagggaaaagggcgcccccgcaatcccaaaaaaagtaagggcccgcctgccccaatagggaaaaacgggaattgtgggggaaaaaaaaaagggggcccg

SEQ ID NO: 125610 - DNA, 447 bp, Zea mays
  Clone ID: MRT4577_46027C.1
gcgggcgccctcgccttttttttttttttttttttactgggacgacggggttgggggaaattttgggctggaaagtgtaccctacaggatgggacacaacttgccacaaaaaccagaatggttgagatagggaaacattaggattggatacaaaaaagggggcaacagagatggaaacatagtctaaatgcatagagggggatacgagtttttggggccaaagctgataacaatagggttgacggaacacatatggaaagacaccaacaggggacagaaccgagccgacgaggcacttgtggttacgctccaccccagggaacttgacctggctagcaccgaaaaatgaaagggccaccaaggaggccccttgtttgatggggctgtagaggggcacaatgatgccaagaatattcattgcggtaagagttgtcaacagcaagaaaa

SEQ ID NO: 125611 - DNA, 332 bp, Zea mays
  unsure (1)..(332): unsure at all n locations
  Clone ID: MRT4577_46028C.1
acaacaccgaccacaaggacagcaacactaaggaggttcagccggcggacagcaccagcgagccggcgggccagaacacgggcgacaacaccccccaccccagagggaacgacccgacaagccagaccgaggaggaccaaagagcagaaggccagcaacccgcggaacaagacccacaaaccggacgcggcgaaagngacaaagccggagcagaccgcagagacagagcgccncaaggcgaagaaacaggacgggccggggaagccgcaagggaccaagcaagggaggaaggggcagaacgccaacgacacccacaacaacgaggagacacc

SEQ ID NO: 125612 - DNA, 355 bp, Zea mays
  unsure (1)..(355): unsure at all n locations
  Clone ID: MRT4577_46029C.1
ctggacacgtccttacaaaaccngcacataatttactgaccaggaaaagaccnngccaacncggggggcttaatcaaaaagtccgtgatcccacaccccaatcaggtcccagatacctggggcaaataatagttaaagactatgttattgacactatagatgacatgtccccatacataaactctggcgactatgaaagtaatgaatggtggtcataccaatttgaatcaccagatgctatacttgaacccccaaggtcatcgccacataaaaccctacattcacctaacattttctcatatgaaaggcaaaatttggcaacgataccacaaaacaacaaaataccaacccacat

SEQ ID NO: 125613 - DNA, 439 bp, Zea mays
  Clone ID: MRT4577_4602C.1
gggccccctaaagcaaaattggccttaaaaaagggccttagctttaaaaccggggggggcgcgggggggggcatattagggggggaaccaaagggccccaggggggcaaattttttttttttatttggaagccggacgaaaactttatccaaacctagtcgtttagtcggaaacaattaaagctggtgcttggcactgatgggaacaaagctgacaaaaaatggggggatttccattggccccagttaaacgacgaggtttgaaggatccaaagggcccccccgaaccacctttttgtccgccgaaaaaccttgggccttccatttaaaaagctttttttccatgggtgggcgtttttgggttgccgaaaagcttgttttgatgaccttgccaatttttttttccgggaacacttttttgagggggatactcgctaaaa

SEQ ID NO: 125614 - DNA, 261 bp, Zea mays
  Clone ID: MRT4577_46030C.1
agtctgctgacgcgtacgtgatctgagagtgcggctcaagcagattgatgatatcggcgtgaggtgcgagaaagcagccagtggcaccgctgtgacgtagcaagagtggaaggacagagcgcagaatctgtacgagtagtgtgtgcgcagaaaggccaggcgagtttccagggacgcaaggataacgtgttggatggctgggtacgagttactcaatgttatcatgatgaattcaagcatctggttgactcactcattgat

SEQ ID NO: 125615 - DNA, 615 bp, Zea mays
  unsure (1)..(615): unsure at all n locations
  Clone ID: MRT4577_46031C.1
caccgggggagcagccacaacaagccgcancagagaccccacaacgccaaccggcggcggggccggagcgagccgcccgagggagcaaggacagcaaaggcaaacagacagggggaaaggggaggccagacaaaccnaagaaaagccgcagaacacgagcggcngggaacagcgacggccaggacggaaaccacacaaccaagaagcgccgggagaacaagaggagcgcccgcgacaaacnggaccacggcgcaaaagggaagaacccgcggcccgggagcccaccaccaaaccgcaagcaagagaaaggngaccgcggaagggccgaccgacggaaccgcccgccggcacagagaacacggaaaccaaaacgcaccnaccggcccagacacaggncaacaanccagccgggaaaccnggcgaagngaccaagaacaacanncacggaacacaaggacaccaggaggccngcaggaanagcggccagaacaagaggcacagccaagncagcaccggagaggccnaaggggagaccgaccaggacgcagnngncggcaaccaagaagcagcacaggggcgnccaacaaacccaaangcagccaccaaagcgggagc

SEQ ID NO: 125616 - DNA, 3054 bp, Zea mays
  Clone ID: MRT4577_46032C.1
gcattataccaaaatgcagacatttatcttcttgatgaccctttcagcgctgttgatgcccacacagcaactagtctttttaacgaatatgtcatgggagctctgtcagataagactgtccttttggtgacccatcaagtcgattcgggggattttccctctactttggagagtccctttgcatatgcacactcgctcactctcttgtatatctctgcctttgggcctggtaatagaagttggttggactcattatagcaatcctattatctctttatgtctttcgactttctttctgatgatcgaacattattttgttaaaaatcatattgttctactaaatcaaaaggtcatccattgtccatcatcaattgatagtttcagaatcaaagaaagacttaaggaaaaaagtgctatgcaaagatattactccctccatgtttatatgtattttagttatcatatattttttgtggttgatgtcatctaagaataagtgtttctgggcagttaatgtcagatggtcaaattattcgttctgcatcttatcatgatctattggcatattgtcaagaatttcagaacctcgtaaatgcccataaagacactattggtgtttcagatcttaacagggtgcctccccatagagaaaatgaaatattgatcaaggagacaattgatgttcatggaagcagatacaaagagtctttgaagccatcaccaacagatcaactgattaagacagaagaaagagaaatgggtgacactggtctcaagccttatatcctttacttgcgccagaataaaggcttcttcaatggctctatgggtattctttgccatgtgattttcgtatgtggccaaatagcacagaattcatggatggctgctaatgtccagaatcctgatgttagtacacttaagttgatttctgtgtacattgcaattggattcatcacagtgttcttcttgctgtttagatcgatagcacttgttgttcttggggtccaaacatcaagatctttattttcccagttactcaactcattgttccgtgcgccaatgtccttttttgattctacccctcttggaaggatacttagccgggtatcttcagatttgagcattgttgatcttgatgttccatttggattgatgcttgctattggtgctggcataaatgcatatagcaatctgggggtgttggctgttgttacatggcaagttctgttcgtctctgtgccgatgattgttttggcactcaggttgcagaagtactatttagcctcatctaaggaattgatgaggatcaatggcactaccaaatctgctctggctaatcacttgggcgagtcggttgcagggtctataacaataagggcttttgaggaagaagatcgtttctttgagaaaaattcggaacttgttgacaagaatgctgcttcatatttctataattttgcagcgactgaatggctgattcaacgcctggaaacaatgagtgctgcagttctttctttttctgccttcatcatggctctcctccctgcaggaacttttagctctggctttataggaatggcgttgtcttatggtctgtccctgaataattcctttgttttctctatccaaaaccaatgccagctatcaaatcagataatctctgtggaaagggtgaaccagtacatggacataccaagtgaagcagcagaggtcattgaagaaaatcgaccatcaccaaactggccccaagttggcagggtggagcttagagatctgaagatcagatacagggaagatgctccccttgtactgcatggaatcacatgcactttcgaaggcggagataagattggtatagtcggccggacaggaagtggaaagacgactttaatcggtgcattgtttcgtcttgttgagccaactggggggaaaataattattgactctgtagatatcaccacaattggcttacatgaccttcgttcacgtttgggtatcattccgcaagatccgacactctttcagggaaccataagatataatctagatcctcttgagcaattttcggatcaacagatatgggaggttcttgacaaatgtcagcttcttgaagctgtccaggagaaggaacagggattggactcacttgttgtggaggatggctcgaactggagcatgggtcagaggcagctcttctgtttgggacgtgcactgctaagaagatgccgtgtcttagtcctcgacgaggccacggcatctatagacaatgctaccgatgcgatccttcagaaaacaatcaggacagagttcagagactgcactgtcatcactgtcgctcaccgtatacccactgtcatggactgcagtatggtacttgcactgagcgacgggaaactggtggagtatgacaagcctacgaagctcatggaaaccgaagggtctctcttccgtgacctcgtcaaagagtactggtcgtacgcatcgaatgggaatatctagaagccacctccaaactacgaccgtttgcatgtttccactcgctgcatcctcttgaaaggagatacaagaacctgggcttgcacatccgaagaactattgtatctgaaatcttgagaaaaggcgtcaggcattgtcatgaaatgcttgttgtcaagttttcaccactcgtttttcagcaactttttggtagtttctgttttgggtcattgcttcccttccaggcgctgaataaaagaaaacatgtctccatcccccccccccccttcttctcccctccaaaaaaaagtagaggaaatcctcaacatttctttgctcacagtgatactttatgctcataacaaaaattcttaggcttggtgctcaacactattccattcagaatttgtggtgtatgcttacattcgtacaaagctgtagtagggtatatgatgtctgtttttttggggtgcaatcaggctttcagccccgctcttgctcacgtttaatgtattatcagtgtaaattcatccgtgattggatttaaggcaaccaatttgttggtaaaggaaaaaa

SEQ ID NO: 125617 - DNA, 682 bp, Zea mays
  unsure (1)..(682): unsure at all n locations
  Clone ID: MRT4577_46033C.1
caacaaatcagatacagggnaagatgctccccttgtactgcatggnaatcacatgcacttttgaaggcggagataagattggtatagtcggccggacaggaagtggaaagacgactttaatcggtgcattgtttcgtcttgttgagccaactgggggngaaaataattattgactctgtagatatcaccacaattggcttacatgaccttcgttcacgtttgggtatcattccacaagatccgacactctttcagggaaccataagatataatctagatcctcttgagcaattttcggatcaacagatatgggaggtgcggtgtcttacaacatacacaactattcatgttgtttctggccctgttgtactagtttaccagctcaaacttcaaagcaatcacttaaagttattactttctgttcttgtgcaggttcttgacaaatgtcagcttcttgaagctgtccaggagaaggaacagggattggactcacttgttgtggaggatggctcgaactggagcatgggtcagaggcagctcttctgtttgggacgtgcactgctaagaagatgccgtgtcttagtcctcgacgaggccactgcatctatagacaatgctaccgatgcgatccttcagaaaacaatcagacagagttcagagactgcactgtcatcactgtcgc

SEQ ID NO: 125618 - DNA, 378 bp, Zea mays
  Clone ID: MRT4577_46034C.1
cggacgcgtgggcattataccaaaatgcagacatttatcttcttgatgacgcctttcagcgctgttgatgcccacacagcaactagtctttttaacgaatatgtcatgggagctctgtcagataagactgtccttttggtgacccatcaagtcgattttttgcctgtatttgattctgttctgttaatgtcagatggtgaaattattcgtgctgcaccttatcaagatttattggcacattgtcaagaatttcagaacctcgtaaatgcccataaagacactattggtgtttcagatcttaacagagtcagatcccacaaaacaaatgaaaacaagggatcgattgatattcatggaagcttatacaaagagtctttg

SEQ ID NO: 125619 - DNA, 197 bp, Zea mays
  Clone ID: MRT4577_46035C.1
gcggggccttactcaaatacatatctgtcatccaatttaagacgatcagaggcctagtgccaatccatacagcgactactggtagacggtaattcttcgacatgccatgacatatggctcgcacctattcatgtgctattaccgaccgacgtcccatcaacgagtacaactgcttgagcagcgaggcacagacgggc

SEQ ID NO: 125620 - DNA, 288 bp, Zea mays
  Clone ID: MRT4577_46036C.1
ctttgttggcaaacagttctgggggtcgtccgatcctgcagagagcgtccaggctggacttgaactccttactcggctgaagtgatcctcctgcctcagcgtcctgaataggaagtggagccagaatccacagatgtcattatccatctgcacactttgtttactacccagaaggcaagaatattgcattttaaaagtgcccggacttttgttctttcttatcagaaatgacttgggaagctccgaccactcatgtttaccccgagtgaaagtcccattcaaagcctt

SEQ ID NO: 125621 - DNA, 394 bp, Zea mays
  Clone ID: MRT4577_46037C.1
cgaaacacagtcccgtctatctcaggtagctgcactgcactaccctgccactgcgcatcatatcatacgtgagcccggccgatcgagagcgagtggcagaggcatggctcgtcttaccaaaacctcgtgacgctggcgctggccgtgctcatggcggagatcgaggagcgttcccccagctcgagcgagcacggatatgtcttggtgcaccgggaccagcacgctatgtgccgctcctaggcaaagttcagatagtctatgccaacccgcccctatcgtgatgcggctggataaataaactgatgcgatacactaatagctagctaatactaaggatatcttcaggaacattctataacattttattaccctaaaagaatatagcttgtcatac

SEQ ID NO: 125622 - DNA, 373 bp, Zea mays
  Clone ID: MRT4577_46038C.1
aacgatcaacaattattttcatttttttctgccgaaacgattacaagtttgtagacgtgaatttgtcattcctacacagctaaaatatataaatgaattgtctagatcaatcatgttaagaaaaagtgatttgttgcttgaaaagcgataaaatagaccaactgcattgctgattgtagcagcaatgtgccaatatgtataagatagttaagatgaaatagcactagtacactaccctcctctcttcgttggtcttttgaaagctagcattttcttttatttccaagaaataaaccaccgaggtaatggaattaccaaatgtccagtaaaaaacacaagtggattttttttggttaaataccagacacaaaaa

SEQ ID NO: 125623 - DNA, 598 bp, Zea mays
  Clone ID: MRT4577_46039C.1
ggccgcttttttttttttttttttgattttatctcggaatcaggcagtaagacaaacctatcttgacacttgtgtcaattgtgaacctaacctcaattcaagccaagtgttgtacatgacttgtagagtgtactaggggaagaaatcttacacatggattttgatacacccagcccaggtggggttggccgaggcccaacaaattagggttgcccgaagcccaacagttcattaagcacatacaactcaaggaaaggcccaatcaccccaaaagactagtcctttttttttttcctttttttttttttttttttttttttttttttttttttttttttttttttttttcttctttttttttcttttttgttttttttttcttttttccttttttttttctcccttcggggaaaggggctttttttttttgggggggcgcccccccttttcccaaatttttttttttgtttttccccccattttggtcctttaaaaaggggcccccccccaaatttttttttcgtgtaaaaagcctcttgtttttttacaaaaagggtggtgaaaagggcgaccaggggttggttttttaaaaaggggg

SEQ ID NO: 125624 - DNA, 434 bp, Zea mays
  unsure (1)..(434): unsure at all n locations
  Clone ID: MRT4577_4603C.1
gacttcgttcacatcaatccaccattgaccaattcctcccacacactgaagccaccaccaccaccacagcctttctagcaagcacacactcgccacaatgcgcatcgccagcgtggggaagatggaggagctcctgggctcgtacctctcgctcaactcgccgcgccaccacccggccatcctcgctgccttcgaggacgtctgggaggccgtcttcggcgaggagtgagtgactgggagcgtcaagcgtgatctctttcagagtactgtttcaaaacttctacgtacatgccaatgtataaattggcaacattttgccacgccgagatgctgtggtgctcatcgtatgtaacgagcttcatatacatggtgataattcagcgcctgagtggctgagttctacgaaaaaaaaaaaaaaaaaggcccctagggnc

SEQ ID NO: 125625 - DNA, 146 bp, Zea mays
  Clone ID: MRT4577_46040C.1
gccgcgacgcggtaggggaaagggtaagggtagggcaaaaccaagagcgaagcccaccgagcccgatcccgagttcgatcccgaactatacaaatccgtcaagtccgaaatcgtggcgggggacgcggaggctttggaggattttt

SEQ ID NO: 125626 - DNA, 162 bp, Zea mays
  Clone ID: MRT4577_46041C.1
caggactgcacgagacggcgacttcgcatagctttcctctcgctggcagactatcagtgtacgctcagctgcaacacatcttgtgagcgaagcattatgcataccgcgatttatccagctatctagtctccagcctgcgcatgagctatagtctctctcata

SEQ ID NO: 125627 - DNA, 428 bp, Zea mays
  Clone ID: MRT4577_46042C.1
cccacgcgttcgccacgcgtccggctcgagctgggcggcaagtctcccgtcatcgtcttcgacgacgccgacctcgacatggccggtaacctcgtcaacttcgccacctacaccaacaagggcgagatctgtgtgggcggcacgcgcatttacctgcaagaagggatctaccaccagttcggggagaaaggcccccagcttgccagcaagttcgtggtccgagacccgttcaacccgagtgtgaaccaaaggccccaagttgacaaggaccaataccagaaggtgctcaagtgcattgacatctggaagcgcgaaagcgccacgcttgtcaccggagggaagaccttcggcgacaagggcttcttcattgagcccaccatctttacggacgtctaggacgacatgacgatcgcacaggatgaaatctt

SEQ ID NO: 125628 - DNA, 215 bp, Zea mays
  Clone ID: MRT4577_46043C.1
ctggcgcgtatgagaaaaaaagggcgaatacgaggccaccaactgaccgccgggtcggaagcagtgccaaccaaccaatcgccgtcctgggccagcggcgtatgctcgccccatgtcgatggcctggctctgcgtgctgggctggggaggccgtgccgacggatacctaaagatctccacccttgaccggggctgtctgaccctgctgcaggatc

SEQ ID NO: 125629 - DNA, 371 bp, Zea mays
  Clone ID: MRT4577_46044C.1
aaaacataaatacgggcatctggtgcttcatcagtcctcctacccaatcaagttacacatgcgtgtaacttctgtacaaacccacgcagctagaacgaaaattactcctcagcaaaatcttacagacccagtaacacacacggcacactacaaatctcataacgcatagcagagcagctctgagatttttcacaaggagcagagaggacaccgcaccagcccgttctcgttgcactcggggcaccgcctgaatgtgcccgcctcctcgacgaacaccttgcagctaccggagcactcctcgcagggcacgaaccgcacgccgccgcagccggagcacgcctccagagcaacgcccttgccgcccgggcagc

SEQ ID NO: 125630 - DNA, 433 bp, Zea mays
  Clone ID: MRT4577_46045C.1
agtcgccccacgcgtacggccactcgtaccggagctcctatgcattcaacaatcttttctggatcgttcgagctcggcaacacacgcgggacttttataatgcatcaggcgttctcgtctaatcctaaatcacacaacgcattacagcacggtgaccaacgtggaggcagtcctcactgttggaacactggtcgtcgcatactcggcacctgctaggttcacatgtgctcctatgactgtctgaaggatacacgccgtggcccatgggttagcacggcttggacggcaactgctagctgctcaaccgaagacagctataggaatgtgttgccaactggtgagaccgacaaatacaaccaacctgactccgtgactgtgtacaaggatgccagatatcacggaatcgaagactacactgaagatcacattcaca

SEQ ID NO: 125631 - DNA, 2065 bp, Zea mays
  Clone ID: MRT4577_46046C.1
aaataaggtggatccaagactagcagttgaacagaatggacaaaatgctgatgcatcaacaaatggtgcttctgcaacaacacttgaagctacacagcctgttagtccatggggtgatgttgatcatctccttgatggatatgatgaccagcaaaaggctctgatacagaaggaaagggcaagacgaataacagaacaacacaaaatgttctcagcacggaagctatgcttggtgcttgatttggatcacacccttcttaattctgcaaagtttatagaagtggaaccaattcatgaagagatgttacggaagaaagaggagcaagacaggactttgcctgaacgtcatctctaccgttttcatcatatgaatatgtggacgaagctgaggccaggaatatggaactttcttcagaaggctagtaacctgtttgagttgcatttatacactatgggaaacaaactgtatgctactgagatggccaaggttcttgatcctactgggaccttgttcgctggacgagtcatatcaagaggtgatgatggtgatccttttgacagtgatgaacgagtgccaaaaagtaaagatctggatggggtactgggtatggaatctgcagttgtgatcatagatgattctgtaagagtctggcctcataacaggcacaatttgatagttgtagagagatacacctatttcccctgcagcaggcgtcaatttggccttcctggaccatcacttctagagattgacagagatgagaggcctgaggatggtacccttgcttcttcacttgcggtcattgagagaatccaccacaattttttttcacatcctaacctcaatgaggctgacgtgcggagcatactagcatctgagcagcgaaggatacttactggttgccgtattgtctttagccgggttttcccggttggagacgccagccctcacttgcatcctctgtggcagactgcagaacagtttggtgcagtctgcacaaacctggttgatgatcgggtcactcatattgttgccaactcccctgggacagacaaggtgaattgggcattatccaaaggcaaattcgtagtgcatccaggatgggtagaagcttcagctctgttgtaccggcgcgccaacgaacatgactttgcagtcaaataacaccctccctgagcccaaattcataaaaaaaaaaaaaaaaaaaaaaaaaaatcagggatggaatgtgttcatggtaacctaacatgattaaaaaaaccataacaacatatctaaaatgggaccatggtaagaaggaaaaccaccacccaaagaatttcaggccttaaaatgaaatggtaacgaagaaaacgctttatgatagcctggaagaggagactgggtctgtggtggatgtcattacctaggtggtgagtggtcaagatgcctttttagaaagccagcaaagatgcgcgaaaaagtgatgatgagcagatgctcaccgcctcatcctttgtaacatgtagtagtaaaagtggtgcagttttggtaagggtcctaggttcagaaatgttgcttctggccaagggaacttggggggttttgccgttttggtagctgccgctggtcgcctgtcgaaaagtgtggcctcagctgaactgcatcatgaatctttggtgcagcgcatttaataggatggggtttgctatgtcagtgtttgtgtgttaggagtagcttgagtacaaagctggttcaaaggcacgggacacctggcgctctgcctgctgctgctctaaacgtactcgtcccccttccgaaactttaaggcagaaaaacgttttgttcagttgggtcaggtaaaggggttgagttgatggcatcagagtcagagaagaaccagctgattcaggttaacgggttgaagatttcatgccgtcagtgaacgcgttggttgctatatggaaggttggtattccaaaaaagaaacgcgtgacaaggtgagtgtcagcgaatctggggcctcgtcatgaaaaccgactgcgtcatcttctaactgcaaaggaaaaaaacccgctccaattt

SEQ ID NO: 125632 - DNA, 232 bp, Zea mays
  Clone ID: MRT4577_46047C.1
gcaaggagaactatcatcatttatgatagcatgagcctccgagcactgcattgcatgatgagttgggactaccgtgcactacccaaaagggtaaatgtctagcgtacactaacttaacagctccacatcataactggagcatgggcacgacacgacatatacgtgtatgacagttactatgagtcttaggtgggcgtcaccaagcagtcgatctaaggagctcacagcgacc

SEQ ID NO: 125633 - DNA, 614 bp, Zea mays
  unsure (1)..(614): unsure at all n locations
  Clone ID: MRT4577_46048C.1
cgatcgataatactgcagttattattaaatagaaaatgaagatgatttcaaaaacaaaacaaaacaagcactacaacatcctattgtacaagtctacttcccagtcagcccagagtctacacgacggagcataaaccagagtactacgaaaccacacatacgttaccaaaggaacaaaggcaccggccagccttcactctctccggcccggttgctattacggctattttgctaccactggccctggggcccgacccgacggatacaacgcggcagctccatgcagctcagctgccgcgaccccacctctgctgcgctcgtgcatgcgagcccgtggggaactgggagcaggctcactgcgctcggaacaggtggtaggggaagaagccgttcttgtccgtgagaggctccaccatcttggcgatccccgtcatcagcctccatacctcctccttgaactccttctcccccctcttccacgctggaccctcattgccagccttggcgttgctgggacgaggcgggaactgcggctgtccagcgaggagtggcaggttgtcaccggagcgaggcgagtaccccagctgctgtccaccggngaaaagccgtggggc

SEQ ID NO: 125634 - DNA, 318 bp, Zea mays
  Clone ID: MRT4577_46049C.1
cttagtctagatgcctttgggggcgggagtatccgggtccgtttatttatttaatataaaaggaggggcgcactcccgaataccggtcgatgctcaatcacctaaatgcaccccttggaggcaagagaggtgcattcatcgttcgcattcacggcagcactggcattggtttaagcatcagcccacgctctgttggcctaatgaagggggagagcggatttttaagttcccctgaggggggtctactctcaccttaactgcaatgattactagggttcatggcagctaaaatgacagtacggcatcataatttaaaga

SEQ ID NO: 125635 - DNA, 181 bp, Zea mays
  Clone ID: MRT4577_4604C.1
gaatcccggggcggaccacacgcgtccgccacacccgtccgggatcgatatcaattaatttttaagcggtggtttcctgtttggaactcggccgatctgtcaatgtttacatgttttcgctttaaaacaacaacttttgttacgactccgtttttttgcatgctactagctgatggatttt

SEQ ID NO: 125636 - DNA, 141 bp, Zea mays
  Clone ID: MRT4577_46050C.1
ccttccggctcctctcccactaaccaccggcgcacgggagatcgcctgaaacaaccgggatcaaacagccaaaggcggccaggcgccgttccacagccgcgggggtgaccgcccgccagacgctccgcccccctggccagc

SEQ ID NO: 125637 - DNA, 528 bp, Zea mays
  unsure (1)..(528): unsure at all n locations
  Clone ID: MRT4577_46051C.1
tcctctagaagnncggccgcccgtttactcttttctttttagtgatggcggcctggtacacgaacgtgccataagtcaaagcaggggggagggcaccagatggggtataatgtgaggctcccaatggtacatacaccacgatacatataaactaatgcacctatacctactacaaggcactaccacagttcgaaacaggagacagcaatgcgcagacatgaaatgacaaactgacgctacacattctgctcagggcaataatatgcagtcggctggaatgcctgattgggattgtgactactgataccaatttcagctaactatgggcgaagcgatataccacagagctatcttcacgtttcgatcatacacactacagggggggaaaccaagactgggtgtctttgaactgtcacactatgcaagcctaaatgcataaggtagaccttacgactgtccaactggtctctcacatgttaagttaccatatgatagacactatctactgtgggaagatcaaccttaaac

SEQ ID NO: 125638 - DNA, 277 bp, Zea mays
  unsure (1)..(277): unsure at all n locations
  Clone ID: MRT4577_46052C.1
cacagccaaggggaaaccaaaaaacaaancacgggccaggagggccacaaaccaccggacngggaaaaccccggcgggacccaacngaagcgcaccgcaacacacaccagcagcgccagccggcggaagaacgaagaggcgcgcaccgagcaccacccccaacaggngcgcagccagaagggcgaacgggacgcgccccgaagcggcgcaaaaagcgcggcgggngnggngcgcacgcgcagcgngaccgcaacaccggccagcgcccaagcgcccg

SEQ ID NO: 125639 - DNA, 221 bp, Zea mays
  Clone ID: MRT4577_46053C.1
accctcgcgctcgacgccgccggtcttttgctagagctcctcgtcgtggggcgaggcgtgggagccgccaacacacaccatgcaacgtggggatcaagaacccgactaccgcttgccagaagaagctgaaaatcgatgacgaccagaaactacataccttttattaccaagagatctcccattattttaatgacaatactctaacttaggggggggggggg

SEQ ID NO: 125640 - DNA, 415 bp, Zea mays
  Clone ID: MRT4577_46054C.1
gcgacgactgagacttctgggctgacgtcatacccgtcgacttaaatcgtttcatctcgggatttgtgtatcttttctatttttgtatattatcttgtttttttaattatgcgtaatcaatttttattggtgtgagtttggtttgagactttctctctctcttttgttttctgagttttgagctctgtctgaagtttgaacaattctaatttgttataatttttattactaaaaaaaacaaaaaaagaaaaaaaacaataaaaaaaaaagaaaaaaacaacaagacaaaaccaaaaatgaagatataaaaaaacaaaccaaaaaaaaatggggggcggcccttttaaaggatccaagtttacgtccccttgcatgcaacgtaatagtttttttttggggtccccaaaattaaatt

SEQ ID NO: 125641 - DNA, 493 bp, Zea mays
  Clone ID: MRT4577_46055C.1
acaatcttacccagcttatctcgtgtattctatattatacacactagattccatgtcaatcaaaaatgtttcacacatactcgccctgtatgatccttaaagtgcactacaccacaaggtatatcacaggcagctggatgcatgtcttgctgattaaaggcaaaatcgcgcagaaggcttgatttgatggcacccctcggagacatgatagtggccttacattacctaaggattgcctctgaaggataccctatttgaagggtgcctctatcagcaccttccaggggatcgaataagttatcgccatcgagctcttggcggctgtacttgacaatgccggacggtttgttcccacactttctaccatataacctgattgctctgctccagtcttattcgaagaccttatttgcttcacaaaacatggggtattttctctaaacgtctgtcatcagatcaaccatctgaggcttgcttgaatatcttatgatct

SEQ ID NO: 125642 - DNA, 353 bp, Zea mays
  Clone ID: MRT4577_46056C.1
ctttcccagttgctgccgagagttatcttcagttgttgtggtgtgtccgcataaactttatttgggggtggatgaaacttatgaaatgccacataacatgacctcctaaaaatcggtcggaacaatgaaatcgaaactgcccccaaaccttaaaaaaggcggaattaacaaaaaacggcaggcgtaaaaacaaactgctggctcgcattttgctaaaacaactcccgaaaagaagaaaacctcaacctttaaggagtgccgaggcccttctcactttaaaccgtaccacaatttctaggctcaaaaaaataacccccccctaatgtccaccgctccactccaaaagtttaaac

SEQ ID NO: 125643 - DNA, 229 bp, Zea mays
  Clone ID: MRT4577_46057C.1
tggaagggaaggtctcctgcccctagctcaggtggctggggagaactaaaacaccttcactggtggttgggggtaaggagcggggcacgggggaggaggaggtagggggcagtaaaaaacttactctcttttttcctctctgtaattggttatcaggaagaatttgcttaatgactaacaccctaagcatcagacctggaatttggagttgcagagtgactatcttccc

SEQ ID NO: 125644 - DNA, 530 bp, Zea mays
  Clone ID: MRT4577_46058C.1
tttcttctagatccattcaggaactactggggattcccaattcaacaagcaagtacagagaggacaagagggtgaactggcactcgactccctttactatcaggctggatagagctctgaagaaaacttcggcatgaatgaattgtatcttcattcagcatggccttgcaatacacgacagtggatagtgcctatttctatctgttaggctatgtttggtttctagggactaatttttagtccctacattttattccactttagttacaaaattatcaaatatagaaattaaaactctattttagtttctatatttgtcaatttatatactaaaatggaacaaaatgaagagactaaacattagtccctagaaaccaaacacccccttagtctagtagtttacatgtgctaattcgactgcattacacgggggttgatatgtatgttaaatgtccatgctgttggcgctgcaaagctgtggcttgtttgcgtctatcctgggcgtttgtttgctatccacaacttgtgac

SEQ ID NO: 125645 - DNA, 251 bp, Zea mays
  Clone ID: MRT4577_46059C.1
acgtgtaggcgaggatatgaatggtggagacgacacatgtatctgggcgtttgtctgccttcccagctggttgatagcactgtagtattagtatatataataaggggttatggtggatttttacatcactataccttagtatgaggtcgtttctcctctgggagtggtcaggcattgtagtggtaccgggagttcgtgtgccgttttaatgcaaggactgcacgaggcgcaccagaaaaaaaagaaagtgg

SEQ ID NO: 125646 - DNA, 139 bp, Zea mays
  Clone ID: MRT4577_4605C.1
gaacaactcaggtgacagcaaatgctggcgacgatgtggagattagagggctcgcactaggcgcaaaccgggccacaaagtacttgatgtacggctctggaatatcccacgtctacttctacgtcgctgcaatctatga

SEQ ID NO: 125647 - DNA, 424 bp, Zea mays
  Clone ID: MRT4577_46060C.1
agcgtccgctgacgcaggctcacatttccccatgcgctgtagtgaaaccctagccgccacgccaaaatcaaatacggactagccctttaatttaaggcggtgtacttgccgggaatcaattgatttggagcgattccactcctttgtgatctatcggaggggtagagcgcggacaacagtcggccatgtggaggtgcttcccctacccgccaccgagtacgtagctgtaccaattgatcgtggacaagaccgagtacaccgctaaggcttggagaaccttagaatttacacacgcacgtgccaaatagccagttaaatttgtaagtatttcgcggatctatgggtagcgcgtgcacaatgtgattaatgtcagtgccttgaaagataacctgactatagaagtgtatagatgttagttagttgt

SEQ ID NO: 125648 - DNA, 1252 bp, Zea mays
  Clone ID: MRT4577_46061C.1
aatgctgacaagacgcccatgaagatcaccgtggcgagcgggtcgctgcagccgttcaccacggaccagtgggcgatgcaccagcaggataccatccggaagaggaggaagcgcgtggcgaccatccacgtggccgacccgcagggcgcccgcgtggtgggcgcgtccgtgtcggtgcagcagacggccaaggacttcccgatcggttcggcgatcgcgtccaccatccttgggaaccaggcgtaccagcagtggttcgtggaccggttcaacgcggcggtgttcgaggacgagctcaagtggtactcgacggagcccatgtcggggcagctggcgcttcgacgtgccggaccagatgctggcgttcgtgcggtcgcaccgcgtgatggtgcgcggccacaacatcttctgggagaaccaggacgcgacgcccggtgtacaacgtcatcgagacctgcgacgaccccttcttccaccgtcgacacgtacgtgtccaagctcaaggacctccgctccgccggcgccatcctggaagggatcggcctggagggacacttctccaagcccaacatcccgctcatgagggccatactcgacaagctcgccaccctggggctgcccatctggttcaccgagatcgacatcagcaacaagttcgacgcgcagacgcaggccgcctacctggagcaggtgctgcgggaggcatactcgcacccggccgtcagcggagtcatgctgtggacggcgctgcaccccagcgggtgctaccagatgtgcctcacggactggaacctcagcaacctgcccacgggggacgtggtcgaccgcctgctcaacgagtggcggacgctgcaggcggccggccagaccgacgcgcacggcgcctacagcttcaccggctacctgggggagtacgtcctcactgtcagctacaacaacaggacgacgcaatccaccttctcgctgtcgccgggagacgagaccaggcacatcaacgttcagatgtgacgcgccaacattatatttagggctcctctcctgacggtccgatccatacctggatcggagtacttattactagctgatgtacgtagtggcggtaagtgattgttgtcgaagaagattgctcagtcaatctatgtttcttacttgtcctgtgtcaaatttagtgtaagaactggcgtccttgacagctggtatgtaaaatagtatggccatcactattactatatataacaagggacttcactcc

SEQ ID NO: 125649 - DNA, 559 bp, Zea mays
  Clone ID: MRT4577_46062C.1
tcgaggccggccgggccgggatgaagcgtgacgttaatccctctcctccctctcctcccctctgctccccatcaactcttcacctcgcccaacgatccccaattcctccttcggatttcacattcaatgcaactcaagtggtaaagaaagcagacatagaggaatggggctcgcgtttgggaagctcttcagccggctcttcgtcgataaggatatgcagatccttatggtcggcatcgataccactggtcaaggaacacattggacaaggttttggacactgttgcagaaggaggaggacagatctcaagtaagatggggatgtcgtgtgcttgagacgacaaggatggagatcttttcaagtaatggctagtctttttatcatagattgagtgcttgaatttgtgaaatctttgtcgaacctgatattttcgttccaaagtggaaccaccatgtttgtgaatttgaatagccacatgtatcaaccgataccgaagctggaatattaataatattcccttttctaataaaaaaaaaaaaaaaaaagggccctaggggc

SEQ ID NO: 125650 - DNA, 347 bp, Zea mays
  Clone ID: MRT4577_46063C.1
cccacgcgtccgcttcgctctgcgtggcctggggtttctcgtgctgtggatgctgcattgcggaagcgagctcgccgcggcggtgcctccagaggccagccggagccggcgctgtacaacggaggcattctcaagttcggcagcagcagcagcggctgcggcgatccggacgggtaccgcacgacggagaccggcgtcttctccccggcgttcgtggtgtacaacctcaacaagaccaccatgtacaccttctcatgctgggtgaagctggaaggccacgctcttcatgaacgagtacaacgtcatcgagacctgcgacgacccctttttcaccgtcgacacgtacg

SEQ ID NO: 125651 - DNA, 898 bp, Zea mays
  Clone ID: MRT4577_46064C.1
cggagttcttcagcgtcgcgcaggacgccgacccgctggccacgctcttcatgaacgagtacaacgtcatcgagacctgcgacgaccccttctccaccgtcgacacgtacgtgtccaagctcaaggacctccgctccgccggcgccatcctcgaagggatcggcctggagggacacttctccaagcccaacatcccgctcatgagggccatactcgacaagctcgccaccctgggcctgcccatctggttcaccgagatcgacatcagcaacaagttcgacgcgcagacgcaggccgcctacctggaacaggtgctgcgggaggcatactcgcacccggccgtcagcggcgtcatgctgtggacggcgctgcaccccagcggctgctaccagatgtgcctcaccgactggaacctcagcaacctgcccacgggggacgtggtcgaccgcctgctcaacgagtggcggacgctgcaggcggccggccagaccgacgcgcacggcgcctacagcttcaccgggtacttgaaaagatctccatccttgtcgtctcaagcacacgacatccccatcttacttgagatctgtatcctccttctgcaacagtgtccaaaaccttgtccaatgtgttcctctaaaggtgaccatgacgatctcgccaagcttgagcttgtagaggatggtggttttaccagtggtatcgatgccgaccataaggatctgcatatccttatcgacgaagagccggctgaagagcttcctaaacacgagccccattcctctatgtctgctttctttaccacttgagttgcattgaatgtgaaatccgaaggaggaattggggatcgttgggcgaggtgaagagttgatggggagcagaggggaggagagggattaac

SEQ ID NO: 125652 - DNA, 1486 bp, Zea mays
  Clone ID: MRT4577_46065C.1
ctcaacttaaacgatctcatgcaaccaatcaaatgtactgaattatatgtacacaaccagactagatcatgtggacaaccaatcaaaccccaaatatcttgttaaaactgaaactctcccgcctacgattagacactcgtaaattgaagatgaaaaaaaaaacggtcctccatctatcaatgatgatatctaggctatccagacataaatcccggcaaagaggaaagctgctcgacatggacctctctctccgttcggcctccatgatttcaacatgatcatagacaaggagtgaccaatccctaaacccaaattaatataaaaaagaacccattcccggccgaccacacactacacagctcagcccagcctccctttcccttgaagcctctccaccaacccagagtcagagagagaggaccaaggcacaaggcaggcagccgtcagcgagccaggcagccagccatgggcaaggactgcggcaaccacggggacgatgacttccggcagtcatgccggcgcctgctggccatcctgctgaccatggcgctgctggtgggcgtcgtggcgctgatcgtgtacctggtgctccgccccacgcacccgcgcttctacctgcaggacgcggcgctgcggcagctggacctgagcaacggctcggccccgctgctgtccacggcggcgcaggtcaccgtggcgtcccgcaaccccaacggccgcgtcggcgtctactacgaccgcctcgacgtctacgccacgtacaagtaccagcaggtgacgctggcgtccaggctgcccacggtgtaccagggccacggcgacgtcgacgtctggtcgcccgtgctggccggccccgccgtccccttcgcgcccttcctcgccgacgcgctcgccaaggacctcgccgcggggtacctcgtcctgcagctcaggatcgacgggagggtccgctggaaggtcggcagctgggtgtcgggccactaccacatgttcgtcacctgcccggcttacttcatcagctccggcgccggctccggctaccgcggcgctgtcggcgcgcacgggctcaggttccagaccaccacgtactgccgcgtcgaggtctagactctagcgagcgagaggtcgatcaccgccgagaccgcccgacctccacgtgctctgctccggccgcgccgccgaggtaggccacaccttgtcatgtcgcatactgcaaagcggaaacaaatgaagtgatacagaggttggaaaaaaagaaaaagaacaagtgtgaggtgatttagtgagggttaaccagtgtatcggtgtgattacatatatgttttttgttttgttttgtgtcgcgatctttgttcagttcagcgttcagttgttcataatataaattctaaaaagttcattcagttcaggtgagacgcaaaaaaaagaaaaaaaaaaaaaaccttcgttcccccggatgtcgaagtggtgcttttatgttaggctt

SEQ ID NO: 125653 - DNA, 325 bp, Zea mays
  Clone ID: MRT4577_46066C.1
cttatacatccagccggcacggtatggttcatgatttgccacacagcagcaggcttcttgtttcctgtttagggagcagagaagctctctgccaagctgctaccatggagccagccttccatgcgcagagctcattactccagccaccgatgccgcacgagctctcgttcacggagcggacgacctccgtactcggttgcttgcagccgaactcggcgccctcgctgcaggcgagcaacaagctccctgctccacacccccccccagccatggcgtcctgctgtcctccatggcgcaggagatgccccaacgagctcccttccct

SEQ ID NO: 125654 - DNA, 345 bp, Zea mays
  Clone ID: MRT4577_46067C.1
attccccttacgggtcgcgccgagtacgcgggaacctattttggaccacaagcacatagaaaagggatccagtgcacaatgagcacaatggggaccaagaatttttcctccttatgctccctgctctttttacacggggtggtacgcgacaatttttcttatgctcacaactcctataggctccctttttttcccctacccttcctataatatagagttcaaatgtgagaaaacccctcttttacactatataggttttacacaggaacgcgcggagcgaaacacccctttatcgcccttggtgtttaaacaatcgccagccctatttttggtgcagacattgat

SEQ ID NO: 125655 - DNA, 965 bp, Zea mays
  unsure (1)..(965): unsure at all n locations
  Clone ID: MRT4577_46068C.1
ccggccgggttatattgtgtactaaagagggctgaagagtttttgacagattggactggtagcttccccagggtcagaaaaaagaatgtgactcactgactgtaggggaatgccatggaagtgtagatgtgatgtttcttctcaattgtatatgccattggattgatgtttggaaattttacgtgtagtatgtctaagataagtccttttatgtactggttccgtgaacctataaaaatgcttcagctagttcttgaccaaaaaaaaaaaaaaaaaacccgcggccagcaaggttaaaaaaaaacagggttttatattttttcgaggaagttcagataaaaaggctttatttttataacaaatattatatccttaagtgggaatcaaaaaaaaaaaaaaaaacctgggggggggcccgggccccaattcccccttttgtggaaggttttacccgttcccgacggcacgtccaccgatgcgnntcttcccttttttccagttttatcacccccctcaatgcctcctctccttgttcttttcccccaccccgaccccctcctctcccgaaaaatcccgcctatttccacccgccccccgttattcccccctatctctacgcaccggtttaccccccctaatcgccccgaatttcgatctatcctcccccccccccttacctcctgtcccgccccttcccccgtcctcccccccccctcactgtcctatcctcttctccccccccccaaccgcctccccccacctctccccccccttgtttttatacgcccttccgccccgcccccccttcccagttcccgtcttgatttcccccccctgttttccccgtccagcactcatcctccacccttccctcttttttcccgcctatttttttcgcccgtagtcgcggccttctccttcagtattgcgctcggcgtttgtcttccgcctcaccaccatactca

SEQ ID NO: 125656 - DNA, 916 bp, Zea mays
  Clone ID: MRT4577_46069C.1
ggccctaggaggcctattgaagaaacatatatttattagaaaagggaatattattaatattccagcttcggtatcggttgatacatgtggctattcaaattcacaaacatggtggttccactttggaacgaaaatatcaggttcgacaaagatttcacaaattcaagcactcaatctatgataaaaagactagccattacttgaaaagatctccatccttgtcgtctcaagcacacgacatccccatcttacttgagatctgtcctcctccttctgcaacagtgtccaaaaccttgtccaatgtgttccttgaccatggcgatctcgccaagcttgagcttgtagaggatggtggttttaccagtggtatcgatgccgaccataaggatctgcatatccttatcgacgaagagccggctgaagagcttcccaaacgcgagccccattcctctatgtctgctttctttaccacttgagttgcattgaatgtgaaatccgaaggaggaattggggatcgttgggcgaggtgaagagttgatggggagcagaggggaggagagggaggagagggattaacgtcacgcttcatcccgcgaggtcggcccggccggcctcgaggtactgccaatgtgttcctctaaaggtgaccatgacgatctcgtcaagcttgagcttgtagaggatggtggttttaccagtggtatcgatgctgaccataaggatatgcatatccttatcgacgaagagatggctgaagagcttcataaacacgagccccattcgtatatgtctgctttctttgctgtcttgagttgcattgaatgtgaaatctgaaggaggaattggggatcgttgggacaggtccagagttgatggggagcagagggtcatatagaaattaaggcggacgtgtccg

SEQ ID NO: 125657 - DNA, 219 bp, Zea mays
  Clone ID: MRT4577_4606C.1
aatataaaaataaataaagtgtttggggatttttttatttttgtggaaggcaaagccgggttaagtccaattttaactgaacaaacaccactttaggccatgtttggagggccatgtactggacggggaatttggtaaaatttcacacaaataacccccaatacggaaaaatggggggaaatacaaaagctggcaaacaattttccttgcgataaaaag

SEQ ID NO: 125658 - DNA, 669 bp, Zea mays
  Clone ID: MRT4577_46070C.1
tactctctaaactcccatcagatagacgacaaagctcaccagaccgccacctccccatcttatgctacttgaaccttgcccagcgcgcgaatcatgcggctgcctgaaactgagcggatccatgccaggggggcagagcgagacatgaatccgaatattgctgaattgtacaacctcaaggagagagagccccgaacggaccgtacctgcccgggcgggcggccgggcaggcacgtcctcactgtcagctacaacaacaggaccacgcagtccaccttctcgctgtcgccgggagacgagaccaggcacatcaacgttcagatgtgacgcgccaacattatatttagggctcctctcctcacggtccgatccatacctggatcggactacttattactagctaatgtagtgactgttgtggaagaagattgcacagtcaatctatgtttcttacttgtcctgtgtcagatttagtgtaagaactggcgtccttgacagctggtatgtaaaatagtatggccaccactattactatatatataacaagagacttcactccaaaaaaaaaaaaaaaaaaaaaaaaaaaaaaaaaaaaaaaaaaaaaaaaaaaaaaaaaaaaaaaaaaaaaaaaaaaaaactctgcgttgttaccactcctaatgaggaata

SEQ ID NO: 125659 - DNA, 2192 bp, Zea mays
  Clone ID: MRT4577_46071C.1
cggccgctcgaggccggcggcggccgggtcacgacccgcgcgtgtaggtgtatcactctccatcctcattgctaggcagctgctcgattctcctacataccctcctcgtgccgtcttctctagcctgtacacgcacagccgacactgcagtgaggaacttgaacagaggaagaagcccggctgaccgctctctcgtctagctagctgcgctgcggcgatgaagatgcatcgcttcgctctgcgtggcctggggtttctcgtgctgtggatgctgctgcattgcggaagcgagctcgccgcggcggtccctccagatggctggtacgattactccgcctacaccgactgcagaggccagccggagccggcgctgtacaacggaggcattctcaagttcggcagcagcagcagcggcggcggcgatccggacgggtaccgcacgacggagaccggcgtcttctccccggcgttcgtggtgtacaacctcaacaagaccaccatgtacaccttctcatgctgggtgaagctggaaggcgcgtactcggctctgatcaccgcgaggcctggcgccggacaacaccggcgccaggtgcatcgccacggtcgttgccaggagcgactgctgggccttcgtcaagggcggattcgtcctggactggccgacgcagacctcggtcatcttctttcagaatgctgacaagacgcccatgaagatcaccgtggcgagcgggtcgctgcagccgttcaccacggaccagtgggcgatgcaccagcaggataccatccggaagaggaggaagcgcgtggcgaccatccacgtggccgacccgcagggcgcccgcgtggtgggcgcgtccgtgtcggtgcagcagacggccaaggacttcccgatcggttcggcgatcgcgtccaccatcctgaggcacccgccgtaccagcagtcgtccgcgtactgcttcaaccgggggttcacccaagcggatgtcaccaggtacgcgtcagagactggaaccggacagatccgccccgacgtgacgtgccagacggcggcgttaatgcgtgcggaccgcggcaggtggtccgcggccacaacatcttctgggagaaccaggacgcgacgccccggtgggagaagaacctgacggcggacgacctccgcgccaccgtcaacacgcgcatctagatcctcatgacccgctaccgcggcgagttcgcgcactgggacgtgaacaacgagatgctgcactacaacttctacgagcagcggctggggcccaacgcgtccgcggagttcctcagcgtggggcaagacgcctacccgctggccacgctcttcatgaacgagtacaacgtcatcgaaacctgcgacgaccccttatccaccgtcgacacgtacgtgtccaagctaaggggctttgtctccgccggctcgatcctggaagggctcggcctggtgggacacttctccaagcccaacatcccgctcatgagggccatacttgacaagctcgccaccctggggcgggtccttcggcttaatcacacgggtctctgaaacaaccaggacgcgcaggcgcaagccgcctacaaggagcaggtgctgcgggaggcatactcgcacccggacttcagcggagtcatgctgtggacggcgctgcaccccagcgggtgctaccagatgtgcctcacggactggaacctcagcaacctgcccacgggggacgtggtcgaccgcctgctcaacgagtggcggacgctgcaggcggccggccagaccgacgcgcacggcgcctacagcttcaccggctacctgggggagtacgtcctcactgtcagctacaacaacaggacgacgcaatccaccttctcgctgtcgccgggagacgagaccaggcacatcaacgttcagatgtgatgcgccaacattatatttagggctcctcggatcggactacttattactagctgatgtagtgattgttgtggaagaagattgcacagtcaatctatgtttcttacttgtcctgtgtcaaatttagtgtaagaactggcgtccttgacagctggtatgtaaaatagtatgaccaccactattactatatataacaagagacttcactccaaaaaaaaaaaaaaaaaagaaaacaaaaaaaaaaaaaaaaaatttaatacaattaaaatgtaccactggt

SEQ ID NO: 125660 - DNA, 908 bp, Zea mays
  Clone ID: MRT4577_46072C.1
ccggccggggctcaggcgggcagcatcttatggcaagatggagcgatgggcagaatctgtgaaggattatgagattctcagaaaagaacttccaagtgacacggaggttgctgaggcctatttccacgcacagattgctctcaagtcatctcgtggtgaggaggtatccaacatgaagtttggaggagaggttgaagcaattattggaatggaacaattccagttggctacatctttgtcaggtgtttcggtcatccatttcatggcagcttcaaatcagcagtgctgcaagatttctccatttgttaacacgctctgtaccagatacccatccgttaacttcctcaaggtcgatgtgaacgagagccctgctgttgcacgcgccgaaaacgtgaggacagttccaacattcaaaatctacaaaaacggcattagagtcaaagagatgatctgccccagccaacagctgctggaatattcagtgaggcattacgggatttaggccacgaagccgatgacttgatgttaccttccgcctccagcttctctggagcgagcacaggctttagccggagcagaaccagtcaagttcatcttgatgaggggtaagcatgagaatggaaaagcgaagagcaactcttccccagcattttcaaccccacagcccacccccattctccatttgttgattacatacctactcgatttattcatttaatctatctcgtccgtacatcattgttgcaaaatttctgtagaacccccaaaaaacatctcctgattcatgtgaagaatgactgtaaatttttacttccatgtttaccagacaactgaggaaaaaaggtatagattgcattttttttgtactatcaaaaaaaaaaaagaaaaaaaaaaaaaaaaaagcggcc

SEQ ID NO: 125661 - DNA, 206 bp, Zea mays
  Clone ID: MRT4577_46073C.1
atttgttgtgcgatttaccaacaaggacatcacagcacaaatcatctctgctagtatagcaggtgatatggttcttgcttctgcttactcgcatgagttgccagatatggtcttaagttggtctgaccaactatgagtgctactgcactggcttctgttgctcgcggtgtcagccgtgttaatagatatagcattgagcatgtaga

SEQ ID NO: 125662 - DNA, 470 bp, Zea mays
  Clone ID: MRT4577_46074C.1
tattcggcacgagggttcagcggaatcgccatctccaaattctcgatccgccgcgtgcgctgcctgcggatatctccctgcccgagtcccgctcccgccttgcttgctgctccaccaccgcactgtattgtgctgcctgcctgcctcctcctgaattattcttattcgttcgctattaattattaaccaccgttgtattcttcccttcctcgtcttcctcctcagactcacacaggtccgtccatctcgatccgcgccaagactgagcggacgactccgaaacttacttgccagagagccgccgtttatgtgagcggccatccttccgtggttgcctctcggttctgcctgcctgctgctgcttcttcttctactggccgagccgagtcgagagcgtgtccgccggaatgtctctttctcaagccgcctgtaccctaccgcggtcctttctactgggattgtgcgctact

SEQ ID NO: 125663 - DNA, 149 bp, Zea mays
  unsure (1)..(149): unsure at all n locations
  Clone ID: MRT4577_46075C.1
gagccggccgggacgcctctctacacacacagagccgcagcagactcgcangngaaaagagatggatcgtctgncngagtcganctggagcatgagngagtacgcgtcggaggccggcgggcttcgcgcggcgcggcagggcccccacg

SEQ ID NO: 125664 - DNA, 2360 bp, Zea mays
  Clone ID: MRT4577_46076C.1
agcgtcaagtaccacctgggtaccgggtatgatcgcccaactcgaggcggcaacaggatccatttgtccttggtcgccaatcccagccatctggaagccgttgatcctgttgtcattggcaagacgcgtgctaagcagttctactccaatgatgctgacaggacaaagaacatgggtattctgatccacggagatggcagctttgctggccagggtgtggtctatgagacactccatctaagtgccctcccaaactacactactggtggaaccattcatattgttgtcaataaccaagttgcctttacgactgatccaagagctggcaggtcctcccagtactgcacagatgttgctaaagccctgaatgctcctatattccatgtaaatggcgacgatttagaggctgttgtttgtgtttgtgagcttgcagcggagtggcgccagacttttcactccgatgtggtggttgatctgatttgctaccgccgtttcgggcataacgaaattgatgaaccttccttcacacagccaaaaatgtatcaggtcattaagaaccatcccagctcattgaagctttatgagcagaaactgctaggaacgggtgaagtcatgaaagaagatgtccagaggatccatgacaaggtgaaccgaatcttgaacgaagagtttgctaagagcaaagactacgttcccaacaagagggattggctctcagcttactggactggctttaagtcaccagagcaaatatcacgtgttcgcaacactggggtgaagcctgaaatactgaaacgtgtaggtcaggcaattactacactgcctgaaaacttcaaaccacacagagcagtgaagaagatttttgagctgcgtgcagctatgatagagagtggtcaaggaattgattgggctgttgccgaagccctggcctttgcaacacttatagtggaaggcaatcatgttaggctaagtggacaggatgtggaaagaggaactttcagccatcggcatgcagttctgcatgatcaggaaactggagcaaagtactgtccacttgaccatgttgcaatggatcaaaatgaggagctatttactgttagcaacagttcactttcagagtttgctgttcttgggtttgaattgggttactccatggagaaccctaattcattggtactttgggaagcacaatttggcgattttgccaatggtgcacaagtgatgttcgaccaatttttgagcagcggcgaggcaaaatggttgcggcaaaccggccttgttgttctgttgcctcatggttatgatggccaaggtcctgagcattctagtgcccgcttggagcgcttccttcagatgagtgatgataatccttttgtcatacctgagatggaaccaacacttcgcaagcagatacaagagtgtaactggcaagttgtgaatgtgacaactcctgcaaattattttcatctgttgcgtcggcagatacatagggagttccggaagccgctgattgtaacagctcctaagaacctgcttaggcacaaggattgcaagtcaaatctttcagagtttgatgatgttgaaggccatctaggattcgataagcagggaacacgtttcaagcgactgataaaggaccgtaatgatcacaagcaagtcgaggagggtgtcaaccgtcttatcttatgttctgggaaagtttactatgaacttgacgaagagcgtaagaagtcggagcgtggcgatgttgcaatttgcagagttgagcaactttgcccgttcccctatgaccttatccaaagagagctgaagagatacccaaatgcggagattgtgtggtgccaggaggagcccatgaacatgggtgcatacagctatatctctcctcgtctgtttactgcgatgaaggctcttgggcggggttcgtttgaagacatcaagtatgttggcagagcaccttcagctgctacagcaacaggcttcctgtcggttcatgcgcaggagcagtcagagctagtgaagaaggcactgcaggcagagccgatcaaattcctctgatgtatgcaccgtatctacagcaacaacctgcctgcatggttgcaggaacatgccagggattttcttttccccggccagttttgaggcttttcagcgttggaactaatgacgacttccttccttgaagacatcatattttttttttctcgaacgcgcaggaggactgcacgtcattatattaagaaaggaaaaggtccaagacatcatattaattgccctaatcagctatctagtagttaattataaactacgtgcgaacagaccctggtttagctggccagttcaatttgagacctgggttc

SEQ ID NO: 125665 - DNA, 453 bp, Zea mays
  unsure (1)..(453): unsure at all n locations
  Clone ID: MRT4577_46077C.1
gctgangtccccctaataaaaataacatttttaactattttagtacactgcgatgcgtttccttggaggggattgttctctcctctcctttgaatcggaggttcctcattcttctcctctcgctctctcagaagaaggtctgacgatccagaaagaagacataagtgccggaagggggatctgaacgtgtccttacccacctccagatcgtgaagcactacattggagagtccctctctgctccaccccaatgaagttggcgccgacgtcaccaggaaccaaaaacctggtgaaggaaatgcatgcacctcttccagaacattgtcgaggagaataatgacatacgtgaagctgagaacttagaaggtgcaagatgatgatgccagaagatggcctgaggacttctcaagcagagattgaaatgaccccatggggtgtaattgccatccgcgc

SEQ ID NO: 125666 - DNA, 266 bp, Zea mays
  Clone ID: MRT4577_46078C.1
cccatatatacgaccacgcgtgcgtccacgcgtccgttgaggtggaggccgccctcgtggcgaacgatgagggcccgacccccgtggccaaccggatcgaggacagcccgccgttcccgctgtacctcttcgtgcgcaatgagctcggctgcgtgatcctgaccgcggagaggctaaagtcccccgtcttaggagtgcagcaaggggttcggtggcatcaggcacttcttgctcgtggaccccatgctggagtctgtcaaggagaa

SEQ ID NO: 125667 - DNA, 311 bp, Zea mays
  Clone ID: MRT4577_46079C.1
tctccctctgtccttcgcctggcacacagggctctcgcgacgcagatcggctcatgtgcagcggggtgtgcgggttcttgaccggcgcgccctcctccttcttcaccggctgtggcgggcgacttctgcgaccacggcgagacctgctgtggtcacgactccactgggtccccccccaccagacccaaaccctagctgttgacgagatccagctgtagccggagaagccggctaccgccactgccttcgtgctgcacggactgctcagctgatctccggagttacggcttgctttttcacgcgctcctcgt

SEQ ID NO: 125668 - DNA, 355 bp, Zea mays
  Clone ID: MRT4577_4607C.1
cgcgattctgatgaagaaaatcacccgactggggagccgccagctgtctatgaaaatactcctacaaatgatgacagttctcctttaatgactgatgctgccggatctcggatatactgaaaggcaccaccaggatcctcgtgatgctacaagtgcccttggtttattgcggcgcaacactgatgaatccgaaataaatggctgtcaaatgctctattacccacagccagagcacgggtttcagttcaaggtgactgatcctgactatgagcgatccttgtgtcgctacacataattgctttactatcgcaccagaagactactctcttaggtatgatggtgcaatagaggaccc

SEQ ID NO: 125669 - DNA, 413 bp, Zea mays
  Clone ID: MRT4577_46080C.1
gcgggggcagggagatctcacatgtgaaaggaaccgggggcattacttacaatgagcaaaccgaatatctcttgtaatgggaacacggttgaagtatatcataacgaagcaaatcatggttcactactgacacaaagctccagaagaaccttctcgggggcagacgggttaacactggaacggctagcgtcaaacattctggctggcgaacgggcggccatcctctttgagctccgggaggttagcgaccgtacgttgtgtttatgccacctaggcaatgacctatgactctcccggcgacccgtcctacatgaaggtgcccaagacctagtcgttcttaacccattacgagccgaaatcagacttgcaggaggtggggtcacttgtctcctaacatgatggtctttcccact

SEQ ID NO: 125670 - DNA, 202 bp, Zea mays
  Clone ID: MRT4577_46081C.1
aaacaatatcgtcatcatcgtcaccgttcatggcatcaggtaaacataggggggggggggtagttctgtgatacagtggaggatcttcagcagtaaactttggtcggttgttcctagatgattagtatatgttggattgtggtgccggtcttgacagtattgatcgtttatgtatagtattcgtttcgcccgagttcttgtt

SEQ ID NO: 125671 - DNA, 332 bp, Zea mays
  Clone ID: MRT4577_46082C.1
atattttttttttaaaattcctttcttttttggtttttgggaattttaatatttttttgaggaccccaaaaaaaaatgggccccataaaaatcttacattagtttttgggctttaatgcaagtgctcttacaatacatgaacacactgaacaagtacaacattaggctggtgtttttcaagcccggggattaccatgcccataaactaaccacaaagggttagcaccccgttccagataaacggtttttggtttttacagggtaaaaaacaaattattgggcttccacaaagaccacaaaaacgtatttaacagaatttccaactggggggg

SEQ ID NO: 125672 - DNA, 338 bp, Zea mays
  Clone ID: MRT4577_46083C.1
cacgcgtcagcgtcagcatcggcaaatcctttggctataggatcaacattggtgatgtattatgatgaatcacatcaagcgatgttcatctgcgtgtcaaatgggtgggtaggtttgaaggtcatttgtggaactctcatcacattgtccttcttccgaaaactcttttagagttcgctcagttcgctagctttaagcgctgtgatgcattaagatattcatttgcgctatcttttgcccttgcaatagtttttgtcgatatcgctgatgcaagttccagctgcatccacttctttggaaatgtttagagttccaaactttttcgacaattagatggt

SEQ ID NO: 125673 - DNA, 230 bp, Zea mays
  Clone ID: MRT4577_46084C.1
gcggggaccgcggcggaattccggggaccaccacgcgatttagcgaggcgcacagccggcgagagggggaccaaaacaagaagccgcggcaacccgacacacgaacagaaggagcgcggccgaacagccacgggaacagggagaacggcccagcaaaaaggcaggacacgccaagcccacagggggccaaaagaggagggccacacgagcagcaacgggcccgcacggcc

SEQ ID NO: 125674 - DNA, 414 bp, Zea mays
  Clone ID: MRT4577_46085C.1
aaaaaaaaaaaaaaaaaaaaaaaaaaaaaaattaaaaaaaaaaaaaaaaaaaaaaaaaaaaaaggaaaaaaaaaaaaaaaaaaaaaaaaaaaaaaaaaaaaaaaaaaaaaaaagtaaaaaaaaaaaaaaaaaaaaaaaggggggggcctttttaggggtccaaattttccttcccggggattgcaagttaaaattttttttttggggcccccaaatttaatttcctggcccgctttttaaaaccggtggtctgggaaaacccttgggtttcccaaattaaatggctttgaaaaaaatccccttttccccggtggggttaaaaccaaaagggccccaccaaatgccctttccaaaaatttgcccaccttaatgggaaatgggacccccccttttacgggccttttaagcgggggg

SEQ ID NO: 125675 - DNA, 715 bp, Zea mays
  Clone ID: MRT4577_46086C.1
ggccgcttttttttttttttttttctagtggcgttttttttaaaacggtcactaacaataacaatggcatttgataagtgacaccgtttataaaaattaaattctaccacatgctttgagctattttctattagcgtgagggccgatcgaccatgggcatgtcacgcgtcaatggtggtgacggggcctcggaaccagaagcgcgcgtggagcacccaggcgccgaggctgagcaccagcacgcctccgacggccaccggcgtgtagttgaagttgaccccggcgacggggtacgccaccggcaagcagaagagcacggtgacgagggccacccagaggacggcgacccagccgacgacgaggctgcagcggcgtccgagatgaaacggccccgggacgaaggagttccgcgccgccgtgacgcggaagaagatgggcagggcgtaggcgatgtacatgcccagcgtcgtgatggacaccattgcctggaacgccacctggctccccagcgacgtgagtgccatgacgaatgccaccgagacggagagccagacgacgttgaacggcacctcctgcttgttgacacggtaccacacctgcgacagcggcatggctccatccctggagaaggcgtaccccatcctcgagttgctggtcacggacgcgacgccgcagaggaatatggcgacggccatggccgccaggcacaggacgc

SEQ ID NO: 125676 - DNA, 588 bp, Zea mays
  Clone ID: MRT4577_46087C.1
gacagcggcatctaccacctgggcggcggtggcggtggcggtggggcgggaggaacggcggcgaatgcgggcgaaggctccctgccgcagctccggtccgcgctgtcggccttcttcaactcgccgcacccgctggagatcctcaaggacggcgccgcgtacgggccccggggctccgtgtaccgggaccacgacgtgaactcgtacctccggtccgtgcgcgccgtggtccgcaaggaggcccggcgcgcgcgggaggccgagcgggagcgctggcgcctgctcctctggtggccgttcggcgtgcacggcgtgtcgtcggcgtcggccccggggcggcgcgggggcctcgtggacgccgtcagcgaggctgccaggcgcgcgcatctcttgctggtggtgctgctgcccgcggagctgctcgctctcggcgcgctcctggccgacattaggttcaggtgattagataggctctcacgcgggttcatcaatccgttcgttcgttcgtacgccgccgacacgcgcgactcttttgtaccaaacacacacgtacacacatacacgtctgcaaagcaaaggcgacgttgc

SEQ ID NO: 125677 - DNA, 151 bp, Zea mays
  Clone ID: MRT4577_46088C.1
tcgtggacgcgtatgcctgcccactaaaacccacgccatcttctagcgctgtcggaaggggatgggacgctctatggacattcttcaaagtatctctacctatattagaacggttcgaaaattgtgtatacgagatcgattattcccgttt

SEQ ID NO: 125678 - DNA, 218 bp, Zea mays
  Clone ID: MRT4577_46089C.1
cctcttcccagagcacaacatcatattccctaacaatttatcccaacatactacccccaagcactccgtatcatctcattattcctcaatacctgatctacctgatatatcatatgttcttataaacgatcttaatttctcaaccaaaaactcatgtttattatgttccaacaagagtgaccaatcctgctttggcttgcctgactggactacctgct

SEQ ID NO: 125679 - DNA, 371 bp, Zea mays
  Clone ID: MRT4577_4608C.1
gggcaaaaaacccaaagaggccggcttcccttccaaattttattggctccgggggagcatttgcccggaaggattttttttgggggggggacgggacccaccgccatttttttgcccttttttgcattaacattagccccgaaaggggcgggaaccaaccctggggctgcccgggggtttctgaccaaacccgggggaaatctcgcaggccccgaacattggccccgacatttccaaaccccttgggcaggtccttgcccccagttcccccttgggtcccccccatggccgcccccaaagcatttgccatgttctttgggggcaaacgggccgactttttttaccctttcccccctaaacccgatcttttt

SEQ ID NO: 125680 - DNA, 587 bp, Zea mays
  Clone ID: MRT4577_46090C.1
tataaattaagttacagctgtttgagttaggatctctgtatctgtcccaatttggacagcagagcttttctcatgttttctgacctttatatacattaaatcaccttgagatgtttataaatgaattgtagacaattctattagctttctaaaaagtctaggatcacctgatttggatttctgaacctccagttataaatttttgaaataaagaaccgaattctgtccaaatctggacagaattaaagtttagcactgtttgaccttttaaactgtcgaatcaggttgtgatgattatataagagttatagaggactttctaagctttccagaaagtcctagtttactatttttggatgcctattttgtgagttatgaactaaacaaatagttgctgttctgctgtccaaattaagcaagtatttaaatgactattttgtgtgcaagacccacccggcccatcccaggaggtcaggaggtcgtcaaggcctctgccatctgactcctcaagcacaagcgcatgtttgtactctgttcccttcgtcactctcgtgatggatgtctctccccatggctcccttactccg

SEQ ID NO: 125681 - DNA, 660 bp, Zea mays
  Clone ID: MRT4577_46091C.1
acatgcttctctaccgttcgttctacgtgattattacttctaaaatgttgattatttctaagttctaaagtgtcaccacaaacaaatctcactatgtatgtgtgtatatgtgtgtgtgaatatcttaagaaaaattgcacatcaatttgcttctctactgttatatattataatatcccgctgaccaatcaatttgcttcctagattcacaaggaactcaggcaacctaatatatgcaactgtgaaggtatagctaataagttctatagcaatatgttttcgattcccagcaattaagcgcaatgagtttatcaaatttaggatatcaaaaacatcgcaacgatcacatgtgtgtgtcgtttatctgtgtggatgtcattttgcagggcgctgggcatactgcaccggagtacaagcccacggagtgccaaacgatgtttaggaaatgggtttcacgggatcctctctgatattacgtcgtctgagagaattacgtacgtgtcgctcctatgagtgtaggccggacgtacgtggtatgccctactgcaggccggagatcaaaataaaggagattttccattttcatgtagaaaaaatgagtgtccatggtgtctacttgttccctgtattaaaaataaatgcaatttttatactgcatgt

SEQ ID NO: 125682 - DNA, 1854 bp, Zea mays
  Clone ID: MRT4577_46092C.1
attgggtccctcgaggccggccggggcgtcttttagtttccttctcccaccgcggccccggaaaatttcccccttccccgtagcgaaaccctagccgccgcgccaaaaccaaatcccgccacgcccgaaaatttccggtggtttccttgccgcgaatcgatcgattccgagcgattcggttgattggatcgatttcgggtgcttcgcgattgattaggccggcaaagccgccaatccttgtgatctctcgaaggggtagagcgcggtcgaccgtcggtcatgtcgaggtgcttcccctacccgccgccggtgtacttgggaaacccagtggccgtggccgaggcggagtcgaccgctaagcttcagaaagaaagggaaagggctcacaagaagaaagataaaaggagtgacaagaaagctccccaactgggtgagacgtccaaacattcaaagcacaaccataagaagagaaagcttgaagatgtcagcacaggtgatcaggagcccaaaaaagtattcaaagaatcagctgagctattggagaagagtggactctcagaagagcatggagctccttgttttgtacagatgtttcgtgactctcctgagagctcgcaggacagcagcaagagaagaaaggctgtcctgcccagtcccagccaagctaagaatggtaacatcattcgcatcaagctaaaaagtaaccaagatccccaatcagttcttttggagaaaccaagggttctggagcaaccactggtccaacaaatgagttcggtttcatccctgtcgagcaaacaaaattcaatcaatcgtaaggtgaatgtgagatctacagctggccagcagtgggtcaatggtgactcccaagcagtacaaaaatctttggttacagaaaccctgtcaagggcaatgcagagaactgtcccccagcctgcagtgaaggtcacacgtcgggctgatccccagctatctgttaaggcgccggttggaagatctgacctacctccaaagttttcgggaagtgtgggcccttcacctgctagagtgaccggaagattttgtcctgcacctgttaagacgcaacagagaattgagcatccaccttccatggtgtcacagagagttgatcctcaggcgaaggtgtcacagaaggaaatgggatctgctgtttgcctgccacaagctccacatcctcctgttttgcagaaacccaaggacttgcctgttcctaaacagcgggagcctatcaactctttgccaaaagaagagccttgtttctctggaaggactgtggaagcagatcaagggaaggaagctaagctctcccgttcagatcggaagaaaatccacaaaactgagaagaaaaataagaagttcagagatctgtttgttacctggaatccgctattgatggagaatgaaggttcagatttgggtggtcaagactggctgttcagcagtacaagaagctctgatggtagcatggctcaacccacagtacctgatggtttagggccgattcatccgatggtgcagcagcagccttatttgcaacccagggcaacttttttgccggaccttcatatctatcagctgccttatgttgtaccgttttaagtctgttcgtagatgagaagtagatgagatgttgtgaaggagctgtgtggatgtgggatataatggttccctgccgcaattttccagctttgttagcaagattgtaatgtaatgttggttaattattttgctcatttatgtaagcagttgaactgcaaaatcttctttctaggcagttactgtaatacgacacgcaatatttgtttttatccataataatagccttgccacaat

SEQ ID NO: 125683 - DNA, 1607 bp, Zea mays
  Clone ID: MRT4577_46093C.1
aaactgtttgctctttgccagtggctcggcccaccggtcgggggttagcaacgcgcagcgaaagtccctgccgcctaaaaccctagcccccgcctctacctccgctgctcgccttcccctctcagtctctcacacgcagccgcacgccaatacttagccttcagacgcctaaaatgggtcacaacgacggagagcacgagcacgagcacgagggcgacgacctctccgctgacgactcttcgtggagcgacggcgtctggtccgaggacgacgatgaggagacgttgtcgtttgaggatagcgtctccggctccgacggtgagtcccacgaggctgcggtcgcggaagagagcgactcttcggaggatgaggtggcgccaaggaataccgtgggagacgtgcctcttgagtggtacaaggacgaagagcacattgggtatgacatcgatgggaggaagatcaagaaacgtgatagggaggggcgcattgaagcctacctcaggaacgcagatgatgccaagaattggagaaagatctatgatgagtataatgacgaggaggttcagattacaaaggatgaggctaagataattagtagattgttaaagggaaagactccacataccaatgttgatccatatccagattatgttgattggtttgaatatgaggataaaggtcatcctctttctaatgcccctgagccaaagaggcgatttgtaccttcaaagtgggagcagaagaaggttgttaaacttgtaagagccattcgcaatggatggataaagtttgacaagcccaaggaggaacaaaacttgtatttattatggggagatgaaactgatacaacagataataagcggcatggcttgagctacattcctcctccctaaactagtgataacttcatgaagagtcgtatgttcctttctgtcttgcagttatcttaccaatttgtataaatgtaataatctcagatgaggttgttttttctttccaaagtttgtttggatttcctgaatcctgactgtggaagcctgttttttttctttggtcttgctctacttctcaacatggatgagaatatttttgtctctcaaaatctcttttttatgtctacagtgttgatataagctcatctgaaaactttctacaaggtggcggcaagcctctgtctctcagtgtgcagtctgctggtcatgccttgcatgtctttgtcaatggacaacttcaaggtatccactgagaaaaaccacctgtttctgaatattagtgtcatggaacatgctttgtgaatcagaccttttatttcactgccgtaggttctgcttatggtaccagggaagatcgaagaatcaaatataatggcaatgctagccttcgagctggtactatctctattgcactgctgagtgttgcctgtgttttgccggtccgtcccatcatcaattcgaaattatatttactgatcttctaaccgaggatataactgtgcagatattctacctgatatagaatgttggagtgcattatgagacgtataacacttggtttcgctgcacctgttgtgcttcatggcctggatgaagggtcacaagaccttactt

SEQ ID NO: 125684 - DNA, 471 bp, Zea mays
  Clone ID: MRT4577_46094C.1
ttgggtacctcgaggccggccgggaactgcacccactattaccggactacccgagccgaaccaaagttgtctcattcttctccaacctcgcctctcctcttgtgtaggccagggttgcataccgaccccggcgcgcatgcaattggatggagggtggccattctccgggcgcagcagccggatcccgtgaagccgtggcgcacgtgctcaatcgcctggaccaacctcttgcagcaacctgccagtactcacctagtaccgtgtccactgcctcatgcccactgtgccgccgaacttggtcactgctcgctcgccatacgcaatctacgtactgcggtgctacatggagaagcgcttctacatcggcacctaccttcttgggatctagctcctcaacctcctcatcggtttgctctcctccatgtccgactctgatgtcagcttctcctccgccgccagatcttctgctgc

SEQ ID NO: 125685 - DNA, 765 bp, Zea mays
  Clone ID: MRT4577_46095C.1
cgaaactagtcttccctcctgctggcggcgtgcggagggccggaggccgggtcgacaagaggagatgacgttggcggcggggctgggttacgccctgatcgcgctgggccctgccttctccctcttctccggcgtcgtcgtcaggaagcccttcctcgtcctcaccctcctctctaggtctaccccttgcgtcgcccgtttcgtgcttctttagccacgttttgatcagatcgtccgttgccctctaataaaagcgaacattcagttaatcgattggcgtaagaggcaggtggcgtttgtttgaggcgttccagggtgtggtttcgtgaggcaaacgcggattattggtttactcgcagttgtgctagggttcagtagtttcttccggatcgatacggatgctgctagttggattcagttcacatggcgtattggcttgttctgtgtagtttttgagttgtcaatttatctcatctgtttgcaaaatctgtaatctggtttagaatgaatgtgtggatctcagagactcagacctgtagaacttgcactgatatgctactgatactctccttaggtagttggtaaacagaagcttgctgacaatttactctatgtctattgtcttggcaacttactctatgtagctgtgcaccaatgtattgaagttgacttttaattcagtcccacaatggctcttttctttatttttgatttgtacatttatttttatgagtatcaacataagcattgaatgctgtttaatgt

SEQ ID NO: 125686 - DNA, 297 bp, Zea mays
  Clone ID: MRT4577_46096C.1
gcgggcacgcgtgcgtccaccctgcccctaaacttatcaaacacgccgctaagaagcgagcatacaagctgccgacctcaaacgcatggcgagcccgcttatccaatggcaccggcccttgcagcacgaacgccctaacacatataaagatggccggacaggaggggacccgatcaatgctgggaactcgacgtaaacgctttcagacataatccgacacactgtatggctgacaccttgatcatgacctggattctgtgatacatatgcctaatgatggagacacatggtctgaga

SEQ ID NO: 125687 - DNA, 354 bp, Zea mays
  Clone ID: MRT4577_46097C.1
ggttcatcgtgcaggcccgcgtcggcagggagttcccctgcaagtacatgtccacgctgctggcctgcgtctccggcaccgtccaggcgctcgccatcgcggccgtcatccgcgggggcgaccgggactcgtggctcctctcctgggacctgcgcctcctcaccgtcgtctactcgggggtcttcaacaccgccgccaccttctgcctcatctcctgggccatcgccaggcgagggcccatctacccctccatgttcaactccctctcgctcgtcgccaccaccgtgctcgactcgctgctgctcggcaccgacgtgtccgtcggcagcctgctaggcgccctgctcatcgtac

SEQ ID NO: 125688 - DNA, 299 bp, Zea mays
  Clone ID: MRT4577_46098C.1
gtacctgaaaagcgggttttggcttgtgtgcagggactctggtggaagaaagggtgacagcacctggcctgggcatgacacaagttaggacccgtaccaagaggccctggaattgagggtgggggttgctgtggactctttctccctcttaggaaactctattgggtctccatctgtcacagaagcagtaaatgatgtaggggctgccaggtatagggtcctgtggggatgctggaacatgccgaggcaggacgtgccagccaccctctgcccatatgtgcagcagggccacagatgtg

SEQ ID NO: 125689 - DNA, 738 bp, Zea mays
  Clone ID: MRT4577_46099C.1
aattacacaaagcagagagctgcaactgcgaattaaaaacgacaaaaaacaaagctcctactgcgagcatggattcgcttgtgaagcgcagcaatggctatggtgcttacggcagcagcaagccccagatgagctaccaccgccagagcaccgagtctgtgaccaccgtcgtcacggaaattaaccgcatgaccatcaacgacaagccctactacggcggcggcggcggcgtgcataagcaggcctgcaaggtggaggcgttcgatgagcacgacaaagcgtacaaaggcaccctggccgtgaagaagcacgacgagtacgaggaggacgaggaggagtacggccaagtagtcgacgcggagtacggtgcccactacggcgacaccgctgtgaagaagcaagcctacagctaccagcaggaggcgtacggagagactggagctgccgggtacggtggcgcggcaatgaagaagcaaggctacaactacacgaaggagacgtgcggagagagcgacgccgcctacggcgcgcaccacggtggcgccggtgccgccgtgcagacgtacgcctacaaccagcagtcggcctacaagcagaagggcgccgctagtaagactaacggctcccggcagaaggtgtacgggtacgcggcggaagccgtcaaacagcaggcgcggggtacgggctcccaccgcgtcgttggcgccggtgccgcgcagcagcacgctaccaaaagat

SEQ ID NO: 125690 - DNA, 466 bp, Zea mays
  Clone ID: MRT4577_4609C.1
attatttttttttttttttttttttatttttggggggttttttgtcataatttggggtaagcctttccaatcaggggagaggacaagacagactaattcgcgctcatatccggggaagtggtgctagcatcttgatgaaacaaaccaaaccaaacaccaaaagggggggaaccacgacaaaaaaaaaaggctcaaaaaaacaagccaccccgtgccacgaaaacaaggctgaacgaaattcctaaacaagacaaggtacaaaacctttcggggagaaaaagggcaagaaaggtcttccaattaatacgggcagggggtccctctttaccggaagtaaattgacaccagcggaatggtagccacaattgtgttgtcgtcctaaaaggctacaacaacgtccaaaaggccgccgcaggaaggcacctccaactgggccaacctcccgggccacataaaccaccttttt

SEQ ID NO: 125691 - DNA, 621 bp, Zea mays
  unsure (1)..(621): unsure at all n locations
  Clone ID: MRT4577_460C.1
gccggcctcattcnagacagagatacgcccagctatcaagtatgcgcccgcacccatgacctccggagagctcggctgcacctacgacgacctcatcctcagcgacgacgtgatcgccatgaccgtcgagaagatcgccaccatcgtgaaggtggacaacatgaggggcgagtcctagtggccgtggctcttctgtaagctcctggagagatccagcgctgaagacctaatcctctccgatgtatatgccggtgttgctgatccacatgttgctgccgccccagctggaggtgctagcactgctgctgcccctgctgcagaggagaagagcgaaccagcccaacgaggactctgatgacgacatgggcttcatcctggtccactgatgaggccctcactacccagccattagcaaattcccttatgctgtccaagacttatcttacgctatgtctgtagccttttgttattaccagtactcaagatctgagattttgagatgcggctatgactatgtgatgaaaaaccctatgccatcgcattatagtgaaacttgattctatagttccaagtgtcttgaaccactaaaacacatatgaaaaatgcccctagggtactcga

SEQ ID NO: 125692 - DNA, 282 bp, Zea mays
  Clone ID: MRT4577_46100C.1
ctgaacagcgagataagatccattcatcctcgcagagtccacacgtctacagcggtctgctgcctgccagatgctagccaacgacttgagaccatacactggactggcctcgaccggaaacggctctatgaaagctctggaatgccgacaccgcccgcgcgcgtcgtggtgacaatagaccggtgctccagggttatacactggcgccgtgcacgcgcgccttcgccatgacggcccagacccactactcctagacaacagaggacgtggcctgctacttgt

SEQ ID NO: 125693 - DNA, 280 bp, Zea mays
  Clone ID: MRT4577_46101C.1
ggacgcgggggaccccacgcggctcgacccgcccacgccgctcgacgccaacctcacccgaggcgggccgccctccatcgacggccagtccgcctccctcatcccattcatccatgatgccgccacccagtgctgttaccaggaagtcgaggcacacctcactgcctcgaatgcggctacagacgggcggatccgtcagatcgaggccgataccagcgctcgggcaccatgcgttagcgcgttggagtcctatgctgtcgacgcgaatgtgaacactgac

SEQ ID NO: 125694 - DNA, 1587 bp, Zea mays
  Clone ID: MRT4577_46102C.1
tcgaaaaaaataacaaaaaacaaagctcctactgcgagcatggattcgcttgtgaagcgcacaatggctatggtgcttacggcagcagcaagccccagatgagctaccaccgccagagcaccgagtccgtgaccaccgtcgtcacggaaattaaccgcatgaccatcaacgacaagccctactacggcggcggcggcggcgtgcagaagcaggcctgcaaggtggaggcgttcgatgagcacgacaaagcgtacaacggcaccctggccgtgaagaagcacgacgagtacgaggaggaggaggagtacggccaagtagtcgacgcggagtacggtgcccactacggcgacgccggcgccgctgtgaagaagcaaggctacagctaccagcaggaggcgtacggggagactggagctgccgggtacggtggcgcggcaatgaagaagcaaggctacaactacacgaaggaggcgtgcggagagagcgacgccggctacggcgctcaccacggtggcgccggtgccgccgtgcagacgtacgcctacaaccagcaggcgctgtacggtggctccatcggtgccgccgtgcagcagccggcctacaagcagaagggcgccgctagtaagactaacggctcccggcagaaggtgtacgggtacgcgggggaagccgtcaacacagcaggggcggggtacggtgctcaccacggcgtcgttggcgccggggccgggcagcagcacggctaccaccagaaagatgcgtacgggaccgggtacggcgctgtcgcggtcgttggcaaagagaagaacggataccagtaccaggaggcgtacggtggaactgacgcgggagggtatggcggcgctcactacggcggtggtggcgccgtgcagcagcctgggtatggcggcgaaaccgccggtggcaaagcggagcagagcggcgaccagtaccaggaggcggcgtatggcggaaccgacgcgggaggatacggcgctcactacggtggtggcgccgccgccgccattcagaagcacggctacaggaaggacgtgtacgagagcgagactgagagcgaggacgacgagagcgactgcgaggaggcgttcccgccgcgcggcggccgaatgcagggcggcgtccaggtgcagcacggctacggagctgacaacctcggcggtgtgcgccgctacgagtcgtacgagagccgcgaggagcacggcgacggccgccgctatgagtcgtacaagagcaccgtccagtacaacggtggcgggcacgccacgtgctccccgatcaagaaccgccacctccttggctacggcgcgtaggcataatacgcgctggctgatccagtgcacctacgtactgtatattcgtatgctctgtcgtatatagacagacaggcctatatgccgctaccgctacggctacttggtcgatggatctgcttgtggttgctgatgcagctaaaccatcgaaatatctaaaaaaataagatgtaacataatgccaccttgggataataatgtatgatgctgggacactctggtacgcccaaatcaatataaacctcatagatatccc

SEQ ID NO: 125695 - DNA, 598 bp, Zea mays
  unsure (1)..(598): unsure at all n locations
  Clone ID: MRT4577_46103C.1
gaccctcgaggctgncccaccgcccagagagaaacgttaggacagactgactggttgagaattgagaaccaaaagaagagagaggaagacaggaagagagagagagagcgcgcgcttccaggtttttagctgcaggggaggccgatagttctgttctactggaggaggagcagagagcaagatggggtccggatctttcctcaaggtgctggccaagaacttcgatgtccttgccggatatgcttctgttagagcaatagagacaaaaaatcctgtagatgatcagcagtggctcacttactgggtgttgtactcatttgtcactttgtttgagctaacttttgctccaattatcgagtggcttccattttggtcatatgcaaaactgttctttaactgctggttggtcttaccttggttcaatggtgctgcttatgtttacgaccattttgtgcggccaatgtttgtgaaccgccgaatagtgaacatatggtatgttccaagaaatgagaagctaggtaaatctgatgatgtgctgtcagctgcagagagatatattgaacaaaatggacctgaagcatttgagaagctcatcagc

SEQ ID NO: 125696 - DNA, 1612 bp, Zea mays
  Clone ID: MRT4577_46104C.1
ggagagagcgatagttctgttctactgcaggaagagcagggagcaagatggggtccggatctttcctcaaggtgctggccaataacttcgatgtccttgccgggtatgatttttttcccattccttctgttttcgccgacaggcgattcattgattttcttgcatatgtagcgttttcccgcggtgttttttcctagggttcgacgtagattctttacgagcgagcgagcgaggttgatctcggttatttctgcaccaagcggcatggggaaagtgtgcgcgacgggaatctttcttccgttgcgggctgttgggttgctatggatgaacgcgtttaggttccctcttctcggggatctcggtgctgccatgaaactgtccgatgggtagtgtggctaaatacttgattttgtgatgggattttagtgcctcggtcaattgattggcaggcttcaggctgggttttaccgcaaaatcataccaacaaccgtggaaggaaactcactactaaaggtttcctttttcttctgtagatgatatatcagtaaccaatagggatggtaaaactgtttgtatagtggtattggaatccaaacccttcaaaattagttcaaaagttcaaccccaatacaccagatatttcaaggtttcaatgctgggtcttgaacttccatttgtgttactggccactcatatcacttgcttatcctctatatgcttctgttagagctatagagacaaaaaatcctgtagatgatcagcagtggctcacttactgggtgttgtactcatttatcactttgtttgagctaacttttgctccaattatcgagtggcttccattttggtcgtatgcaaagctgttctttaactgctggttggtcttgccttggttcaatggtgctgcctatgtttacgaccattttgtgcggccaatgtttgtgaaccgccaaatagtgaacatatggtatattccaagaaatgagaagctaggtaaatctgatgatgttctgtcagctgcagagagatatattgaacaaaacggaccagaagcatttgagaagctcatcagcaagtctacgaagtcttcgaagtcaaggaacacaaagcggttgaacttggaggatggagaggctgaaaatcgagctaaagccgagagagaatcgtggggcgaaaatcccttctacgacaaaaactacagatactaaaccagttcaaaatccactcagcagtttgaagatgaccttgctcacgagcctcatgcaagctttagttgcgtcggaccgaagacgacattcccatatttctgactctgaatattgtaccttgttacatccactgctactacataatgatgagttctagagcaattgtggactgtgtaaatggaggtagatgctagcgttaatcgtttatgtgctttttggatggtgtccttatcacccgttttactacatctttagcaaggagcgagccttgattttcagtttggctttcgtatttttgtaattgaatgctacttttagataactgaaatatgagggagttcgagcttctaggaagaaacttaaaaaaaaaaaaaaaaaagcggcccacccacgttatcatcgtc

SEQ ID NO: 125697 - DNA, 1094 bp, Zea mays
  Clone ID: MRT4577_46105C.1
ctcgaggccggccggggcaattctcaccctcgcacagtcgtcttctcctactgcactcaacgcatccgggcttttggtccacccccgccactacatacatagccgatagccccaggctcttgccgtgccgtgccactgccagaaacgaggaaccacctctcgatggagtccaacaccaccccgttcgccgcggttggcacggccgccgaggaggcatcgacgcggcgcgtggccaaccgcatcatccgcgccctgcagcaccagctccggctgctgcaccgcgccggcgccgagttcttcgtgctcggcgtcacgggcaacgtgtacacggtgacgctgtccaccacgccggcgtgcacgtgtccggacccagccgtgccctgcaagcacatcctcttcgtgctgctccgcgttcttggcctctccctcgacgaggcctgcgtttggaggcagactctgcacccgtgccaggtcgcgcggctcgtcggcacgcccacgtacccggacgtgctcgctggtgcgcgcgcccgggagaggttccaccagctgtggtcggcccgtccagccaacaatgttgctgacgacaggcaggaggcgtcgtcccacaggccgctcgacggcgcggcatgcccagtgtgcctcgaggagatggcgccggcacaaccgtcacagggcagcggggccaccgcacaggcgatcctgacgtgtaggacgtgccggaatgcggtgcacgccgagtgcttcacgcgctggaagcgaagccgctcgcggcgggccgcgacgtgtgtcgtttgccgctcgcggtggaagaagccaaaccgggagcatgagcatgagcagtacatgaacctcgccgcctatatgaacgacgacggcgacgtcaccatgctgagcgccgacggctggctgtgtgcggggtagttgcaggctttcgattattcaacaggctaattgtcacataactgtgcctgtacagaatatagaaccattgtgatctctgactctcaactctagtttatatatactctttctcttcaaattagaagacatcttaactttttcaatcataaaaaaaacaaaaaagggcggccgtt

SEQ ID NO: 125698 - DNA, 244 bp, Zea mays
  Clone ID: MRT4577_46106C.1
caggatagtgttcgtcctcatggcgccgccgcagccgaattcggacctcttcgtaggcatcgataatgtccatgtcgtcaccactcgcgactgcctctgcgcccgtctcagcgcaaagggaaagcaacgacgagggtgtccatcatcaggggcctgctcagaaaggttgctctgctttactccatatgtaaagcgtatccccaaccttctaaacgttatgcaaggtaaagcatcgctctgcagc

SEQ ID NO: 125699 - DNA, 282 bp, Zea mays
  Clone ID: MRT4577_46107C.1
atgcgtgcacgcttgcaaggctatgatcaaaccctaagcatagagtggctttatcacgggggaaacagaagcgaatcgcaaccatagacaataaaagagggcatataccagagtggtgccaatgccactgacaagcattggaggacctcttatacagcccaactacacacgatggctacatactcatcagccccagaaagagaacaaattcaatgcttcttaatagtgagactatctactggattggaactttaaaaggtcataaaggagctagtcgcagct

SEQ ID NO: 125700 - DNA, 322 bp, Zea mays
  Clone ID: MRT4577_46108C.1
atcaattaaatggttaattgggggttttttgattttttcttttttttttctccaaccacaaacgcagaattttactccttttaaaaagggccccccccaaaggaggggacccctctttcaatacagactacaaacattggcaattgggaattcccaaaagggtcgattactgggcaactcacaaaaatataatgctggttgggggcgccaattccaccaatggtacatttggcattctgacaccaaaaccggtttttaccaatgttctggcttaacccccggaggttcgacctgccaattatacatctacaaaaaaatacta

SEQ ID NO: 125701 - DNA, 1678 bp, Zea mays
  Clone ID: MRT4577_46109C.1
tcgggaagaccccttcacccggacccgcgcccgcgccaagccaacgccacgccatgccgctggctcctctgtcgctggaaccccctcccttccgtctcatccgccccgccaccggcagcggcggacgcgtcctcccggtcccagggcctgcaccgcgcctatgtcgatcgctgagggcggctccggtggcacccgacaccacggaggagccgtttgcggccgcgcggggccggctagagtcgctgagccaggtcacaggagtgctgggcacgcagtggggcgacgaggggaagggaaagctcgtcgatatcctctcccagcgcttcgacgtcgtcgctcgctgccagggtggggctaacgctggacataccatatacaattctgaagggaagaagttttcacttcatcttgttccatcaggcatccttaatgaaaacactcaatgtgtaattggtaatggagcagttgttcatcttcctggattcttcaaggaaatcgatgggctagagtctaatggaatttcttgcgcgggtccgcccacgcgttcggatcgtgcccatcttttgtttgatcttcatcaagttgttgatggtcttagggaggcagagcttgggaattcctttataggaacaacaaagagaggaattggaccatgctattcgaacaaggttacaaggaatggacttagagttggtgacctgcgacatatggatatctttggtgcaaaactcaacaccctattaagagatgcagctctacgcttcaaagattttgaatatgataacaagattctgaaagaggaagttgagaagtataaaaagtttgctgaacgattggaacctttcatcaccgataccgtgcatttcgtgaatcagtcgattttgcagaagaagaaaatattggttgaaggtggtcaagctaccatgttagacatagactttgggacctacccctttgtcacttcctctagtccctcagctggtggaatctgtaccgggcttggtattgctcccagaagtctcggtgatatcattggagtggtaaaagcctacacaactagggttggatccggtcctttcccaacagaactattgggtaatactggcgatttgcttcgtgcttctggaatggaatttggtaccacaacaggtcgccctaggcgttgtggctggcttgatatagttgccctgaaatactgttgccaaatcaatggtttctcgtctttgaatctcacaaagctcgatgtcttaactggactcaaggaaattaagctgggtacctcatactacaccgatgatggtaactctgtccaatcattcccagcagatctctctcttttggagcaagtaaaggtcaaatatgaggccctgcctggatgggaggaagacatttcgtcaatacgagattacagtgatctcccagaaacagctcgtcgctacgtggagaggatagaggaactggtcggcattccagtacactacattggtgtcgggcctggacgcgacgccctcatatacaaataataactcgtctggctctggtttcaaagatctctcgcttagttcaataatgtaattgctttggttactaataaaacaggctgatcgtggaagatgtagaattcagcatcctttgctaagtgagttcaaattagctgcatctctccataaaatgcctt

SEQ ID NO: 125702 - DNA, 547 bp, Zea mays
  Clone ID: MRT4577_4610C.1
ctcgcagtcgtattttgttacagttaagtaaataaaaagtgtacgaggactggccgatagctagcatcatggcgtgcaaggtgctactggagctaacgcttctgctcaccggcaccttcctcgccgtctacgctaactagcaagccatggtgggacaagtaggagaggaaggcggtggagcaagactggcacggggggggtgtttacctggttcacggaggccgcggcggaggccgctaccttcactgacgctggggctgcttgaaccgagaatccatggcggatgcggttgctgcttgcaccctgagcagataccagagccgatgtaccgtgctgagctaggacaggcccacaactaaaatgagtacggatacgtatgcccagaagggaatgaatgcgaagcaagagcacacgcttaagaggctcgtcgtaagggtcaagaaaaggttgcttccgtcaccgacatgaaataaaagtaaggaggctgcacgctttgtgaacgtgcttctaacacgtaactgtatctcaggcgtcgaataaatagctg

SEQ ID NO: 125703 - DNA, 3041 bp, Zea mays
  Clone ID: MRT4577_46110C.1
gccgggctgggagtctccagctccagtcctcccaccgctccagccagtcccaccagctgctccttccctgcctgcagcctgcagcctgcctgctgcctgcagcccctgtttctttggctccttccccgctgccctccgcgccgcacgcccgcacgccacgccatagaacagaatgttcttggatgctctcgcgcccgcaacattcccttcctagtacggcccgccccttcgatccataaacaaaaggcaaggaaggctgcgccgccgtctgcctctctcctctcctcgtccacggcccacggggttcttgcctctccctagtcccttcttcatcaatcatcaccctgaccagtgggtttagcgagcgagcgagcgcaggcgccgtcggttgatttcccgcgtaaagcttggatcttggcgcgtggactgccgtaggtgccggcggcggcgaggccgcgagggtctggaagtgtgaacggatttctctgtcccgagttcaggagcgcttctccgcagatgtgcaacttcgtctggctcttccgcgtgctctggcggatcctcagcgtcgccttctgagccccagcctcccagcccccgcgcgccgtccgctccgccgcgcccgccggcgactcccggactggactgactgagcctctctccgcgcggggaaaagttttcccgtcggtcgggtttcctgtcgagttcgttcggtccaagcgcgtcgcgtgcggttcggcggaaagctgggacgctgctggtgctcgctgggtgctgcctttggtctcattggcgctgcagtgtggcggtgtgccgtctgccggctggccgtctgcgctagcctcgtggctgatgtcttccggaagcaagggcaggagtggtactgcacatctggtcttcccagtgatatatctgtggtagttggggaacagtctttccatcttcacaagtttcctctactatcgaaaagtggcctgttggagaagcgaatcagagagaaaatcgataacagggacgatagctgtgcaattgatctatctgatattcctggtggggcgaaggcttttgaactggctgccaaattttgctatggtgtaaagtttgaaatgactgcctccaacgttgtacaccttcgttgtgctgctgattaccttgagatgacggaagagaatccgaggggaatttgatcgcagagacagagagcttccttacccaaacagtcctcaggagctggaaggattcagtcaaggcgcttcaaacttgtgacaacgtccttgatgttgctgaaagattgcagattgtaaagaggtgtgtagactctattgcgactaaatcatgcagtgaccctgatttatttgggtggccagtagcccgttatggaggccccatgcagagtcctggagggagtctcttgtggaatggtattagcacgggagcaaggcccagaaatagcagcccggattggtggtatgatgatgtctcatgtttaagcctcccgttatacaaaaagctcatctcagccatggagtatcggggcatcagtcagggggttattgttggatcccttaaccattatgcaaaaaggcgtttgcctggtttgaatcggcgtaaaagcatcggtgatgctagcaactgtctttctatgactagtttaacatccatcccttctgaagatgaccagaagtatcttctcgaggagatcgatagactactccctttccaaaggggtgttacatcatgcaagctgctgtttggcctcctgcgcacggcaatcttcctgaaagccagcccctcctgtgtgtcgaacttggagagacggataggtatgcagcttgacaaggccagcttggaagaccttttgataccgaatgtctctgattctgtggaaaccctgtatgatgtggagtgtgtgcagaggattgtagaccatttcttgtcaatggaccaagaaactggtggggcctcccctggcattggtgaagatgggcaaatgttagcatcaccatccttaatgccaataactatggttgctaagttgattgatggctatctggctgaagttgcaccagacatgaacttgaagttgccaaagtttcggtctttggctgctgctataccggattatgctcgtccaatagatgatgggctttatcgtgctattgacatatatctcaaggcgcacccatatctgccagaatcggacaaggaagagctctgccgggtgatggactgccagaagctgtccctggaggcctgcacacacgcggcgcagaacgagcgcctcccgctccgtgtcatcctgcaggtcctcttcttcgagcagctccagctgcggagctccatcgcggaatgcctcatgatctcagagcccctagacggcggcggcggcttctcgcggcagctcggcggcctgcctgtctcgggcgagcacctccgcggcgctggctggcccctggccgccagggagaaccagacgctgcgggaaggtatggacagcatgaagcagcgcgtgtcggagctggagaaggagtgctttgccatgaaggaggacatcgagcggctcggccgcagcaggagcgcgggcaagagcaggttcccgttcgcgctcgccgcaaagccccacgtctgcggcaccaaggacaaggaggctgctccggaatcgtcaaagtcggagacgtcaaagtcgaaggcagcggcggcgaccaggagcgatgacaagttggctgtggtcaagggcggtgccgctgccgccggtgatggcgggccgcagctgaagcacaggaagcacaagacgagcctgtctgcctgttagtttttagatatctacaagcacacagtataggccctgaatgaacaacgactgtgagtgagagacgctatcgatgtgatgctcatttttttttcttggacatttgctcagtgaaaaatgcatagcgttaccagcgtgtcttggacttccagctgtaccatgcttccccgttgtggttgtacatgtccatgaatcggaaaagaatttactagtagaatcctaccgagttcctgtg

SEQ ID NO: 125704 - DNA, 1070 bp, Zea mays
  Clone ID: MRT4577_46111C.1
accggccgggctgcggctcgcccgcaagaggataaagaacaccgaaatgccactcctgctgctcccaccaccggcgtgcaccacggcagcgacgtcgctcgctttctcgcggccccggccttcgcgggcgcgttgggccaacctctcttacgcgttcccccgcctgaggaaatacgggcgtcgccaccgcgagcccgtggccggccccagcctcgatgatgacggcggcgaggaggatgagacggaggcagaggactgggagtccgacgatggcgaggaagagatggagatagacgaggaggagtttctggcgatgcggcccaaaccggcgggatttggcgaggggaaaacatattccactgacattgaggagcagcttctccgggagatgggctttggcgggggcgcggcgcggcgaggagaggcggccccggccaatcgccgcgccggggatagttccaccaaagtagctgccgcagatgtcagtgatgatggtgttcaagttcgtgtttggaacctcccaaaaaagaaaaacatacacaaggacctgaagcaagcttttaaagggtttcatggccttttatccattgatccagcagtttccgcaaataagaaaacccgtgatcctatttgtaagggttttgcatatctcaaactagagtctgctgaagctgcaacaaggttcgtggagatatactctcatcaaactgtgtcatttggcaagattcagaagccaatcagttgctgtatcatcgataaacgcagctctgttgagcattcaaataagcatccactagtcaggcaatccctcaattaatgtccaagcaccaaaacttggtagcggcaagttgagtaacacatatctgccatctagcacaagtaatcacgcacttctaggggtctcaagttttatgaaaaagctttgataaacagatagattagacagttctctgtattccaaataactgtttgtatcaagcaatttggtcttgtttttttaggggaagcaatttggtcttgttacccaaaaataaattaggagagaatgaaaatggtaactatcctattct

SEQ ID NO: 125705 - DNA, 225 bp, Zea mays
  Clone ID: MRT4577_46112C.1
gtgaagtcatcgaacactgcgcctcatctttagaatttttttgcgcgtgacttatttttctgctatgataattaaggagacataattgggggcaagccataataatggggtgaaaatgggcatactacgtgcgcgcgtgctcacatatgcatatatgaaaggagggtgctcgtctttacatataattccacaggaaagtggctcagtttttcactgggaggggtg

SEQ ID NO: 125706 - DNA, 788 bp, Zea mays
  unsure (1)..(788): unsure at all n locations
  Clone ID: MRT4577_46113C.1
ggaccctcgggccttccgggtcggacagacacgaacctttcaggtcggcccgtgaaataccccaccaacagtcctggatctagatggagacacctttttttttcttgtcatcgttgtaatgctgctccctgtttgtgcagacggccatgcagggtttcactgagaaaattgtgggaatgatgaagagcgaaaacctctttgcatcccaaggtggcccaattatcctctctcaggcaagtataatcttttccttagatttggtacaaaggttatgatgatcgagttactgcatatggggataatcagttgcccctagtggctaatacatcatgttaatagcttaaatcacttcaagttttttttaactattggtgtagcaaatttacacgctcttgctagtttgtgtcgttacaccttgaaaaaaaactcgacctgcaggataaaaccgtccccacgacattataataataagaagaccttctcacgtaggtcgagaaaaccccgaacctgccccacccatacacagcggcaccatagcctatgtgaccaacttagctaagatgctctttcgctgntacaccttggatccttgatacaagtctgaaactggagtagcatctggtggatagtatatctagtgcatgctattcactactggtggcatgcaaattaatttacatcttaaacgatatttttgttgcacggattgagaatgagtatgggccagaaggcagggagttttgtgncgcaagtcaggcatatatcaactgggcagcaagatggcagtc

SEQ ID NO: 125707 - DNA, 380 bp, Zea mays
  Clone ID: MRT4577_46114C.1
aattgtctgaaacaaacagcttactgatcttttcagttaatcaagtacaacaactagagttctcaccatgctaaagactgtaaataaaatgtgtgggcataacagatcctgtgcatgcgatagatagatgtcctgggtcaaattaaacctcaatttgagtgcaccagactaggatacgttttccatgtgcatcaaggaatcgctgtgaatccactatcgaacacaaatccacgatacacaccatcatcataaccaggaacaccatccacccagtcccacttgccactgctccccgtctcatcttcctcccacattgcaagctttccgcgcactcgcttaccagcgaaccacacctttccatcgcctccgaaaaccttgac

SEQ ID NO: 125708 - DNA, 296 bp, Zea mays
  Clone ID: MRT4577_46115C.1
acgcctctctctctccttctctgagctcctcgaaaccctaggtgcgtgccgaccggcggcggcggctaggtgatggcgatggacccggacgcggtggcgaatgccttcgtggagcactactaccggacgttcgacaccaaccgcgcggcgctggtggggctgtatcaggagacctccatgctcaccttcgaggggcagaagttccagggcccctccgccattggcgggaagctccgatctcttccccttcagggctggcgagcccagattgtcacccccccctgcccgccgtcggg

SEQ ID NO: 125709 - DNA, 571 bp, Zea mays
  Clone ID: MRT4577_46116C.1
aaacacgaaacgtagttgcggcggtcgagactgagtgcagagtatgctgcagctcccggctgtctgatgcggcagtggccatcgccggcgctcgatcccggggtgcacgctgctgcccgtgccgggcagcctaacaggaggacaaggttctcctctacatggcccgaaggcgaactaaaggataagactgaacagagatgccgaaagaccaacagccacctgggtattatcgggaagaccaaggacgacaccaaggaggagctacaacactgtaggtggaagacgaatatgcaaacaacgtacaggagccggacggggacgacttaaaacaggagaccggatgacccatgtggactcccctgaagcttcgatcggcggacttgagcgcggttatccccgctgagcagactgtatttctcaattcttgaggtggtccttgtatctagatacgctgctaccctattgtgctgatgtctgttctcaggatctgaacatgtacttgtcgggtggaccttgttgttgaaacaagtacatgattaaacggtccaagttaaatgctatattagattcg

SEQ ID NO: 125710 - DNA, 653 bp, Zea mays
  unsure (1)..(653): unsure at all n locations
  Clone ID: MRT4577_46117C.1
cccaccccttctcctcttctctgatattccgcttcagtcgctcaaggtctcggtcgtagccgtccgtctcaccctgcagctgctggtcgagccagtcgctcgtcaccttgagctacgacagccgagccacgatccttcccgccgccaactctcacgcacaccttgagagtgagtgggggtagacgacagctctgcaactcggcaaccaacggatccatccttccagttccagcttctttatctctcacgcacgccgttctcttcgcctcctctgggccaaccgcactcgtctccccccagtcctccctcttccatctgcatctcctctctccctgtccctctcctatcaaaaactgctttgcgccccatatataccagggcgcccacccacacacagagagacaagagcccgagagccctcagtcgtctctctcgcaacaggttcttcttcgtggcggtggagggggcaagactgcaagagcctgatttccactgctacgtacaagcaacctccaaaatggatgattggatgcttccctcacccagcccaagaacactgatgccaagcttcttcagtgaaagagttcatctccactccgntctccaacatcttcgctgacgatagaggcagcanaccccaggatgaaaacgag

SEQ ID NO: 125711 - DNA, 363 bp, Zea mays
  Clone ID: MRT4577_46118C.1
cgatccaaatgatgtaaaatgttaggaccggttcgcttcccgcgcagtttccaccgacttcgcgcgtcaaaagtgctcagctacgtactgctctggcggcggccaccctctccacaaccgatggatccagccatccagggagtggccgactagcgattcactgacaccaccttcagctgcgacgtcgcctccaaatcggactccggcgccacatgagtttgatgtaaatcattcaaatctttgttgcagtagagaaatcgttgcgtagcttgttcttgggccatctggggctgagaaaggggacgttgaatgctctggtctatttgcccaatggttcctgtagcgtttcctgccgtttgtgtt

SEQ ID NO: 125712 - DNA, 469 bp, Zea mays
  Clone ID: MRT4577_46119C.1
gggggcaagttggggttaatccccatgcaagcccagggcaaccaagacacaacaatatgagaggtttgcaaacaaggggggaggggcgtttggggtaccccccagcggcccaatcaaaaaagggaaaagctcttgaggagggggggggggcggggaggagggggggcacgggggggacaagggcggcgaagggggacaaaaaaaagccccagggggcccccggggaacccccccaaaagggggcaaacccttggcaacccgaaaggagagaaaccaaaaacgcccccaatgcccccatcaaggagagctcccacaggggccggatctccgcagaaaatggggggaaagcggggaaaaccccgggagaaaaaggcccccaaaagggccccaaccggcaaaaagcccccaaaagggcggggggtaacagggggaaaaacccccggggcgcatgggaaaaaaaggggcccaa

SEQ ID NO: 125713 - DNA, 1165 bp, Zea mays
  Clone ID: MRT4577_4611C.1
ccacgccgtccgcacactacagtttctccaagcagctcgtatcgttaatcccgattattaaactgtcgcacaccgcaccttgccatgccaccgcgattatataaaattaatgatgcacgcggcagcatgtgcggcgtacatacaaaaccctggatcagccagcgttccattccaacgagagcacagcaccgcagagcaagagcgcaccagcacgacacagccaagctccactccaccgacacgctgcgctcgagcccgcccgagccgcccgctagatccatggcgcggctgctaccgacggccgcggcagcggccatcgtggccgccgtcctggtggcgggcctgccgggcgcccgggcggcgtctgcctcgccggcggcggacgacgcgccgccgtacaggaaccacaccgttggcggcggcgatgggtggttcttcgacgccaacaccaacgcctcgtccgggaactactccgactgggccgccggcgagaccttctacctcggtgactacctcattttcaagacgaacgacaactcgtcggtggtgcagaccaccaacgccacgacattcgggctctgcgacgccagcgacgacctggcggagacgacgtccatctacggcggcggcggcggcgggggcggcggcctcgagcagaacagcaccatcgcggtggcgctcaccgccgagggcgccaactacttcttctccgaggccgacgggggcgcgcagtgccagcaggggatgcggttcgagatcaaggtcgagcacggccggggcctgccgccgtcgctcctgcaccagccgccggcgcccaagggccgcgtcctcgcgccgccgccggcgggcacggcgttctcgggcaccggcggggtcgagcccggcgacggcgccggggacaacggcggcgctggcaggagcggcgcgtgcagggcggcggcggcggccagcgcccggttattgggggtggtggctgctgctgctgcggctctggccgttttggttctttgagtagcgatggtttaaaggcattcgtcatttggaaccactgttctgcttatgtatgtgtctgtatttaaattcatcatttaatggagatttgtgttcgatgcttagaacctgccaccctaaatttctactctaaaaggaatatttcatcttggtc

SEQ ID NO: 125714 - DNA, 551 bp, Zea mays
  unsure (1)..(551): unsure at all n locations
  Clone ID: MRT4577_46120C.1
cagcacctacgagtggaagagtgaaggaatgttcatttgatgttctctaagatgtatgtcggtatgcactatatataatagcaggactttagagctggtagtgctgagggttatgccagctttaggcatctatttatacagagcggctaggagcagcaggacgcacagtatgatattagcatggaggagggaatggttcgtgatacaaattttctcactggagatgactaaggaggagcagtgtccatgnacaacggtggtatgcgccacaactaagggatgggtggaaggatcgacatcacttacatgtcgtacatgggaggaaaacaggatatagctaggagcgagaattcttggagctgctatggggaggagaggcaacgtgtgttgtcatacgcaggccctagggcagggaccatccttaatttggcgctctaatgggtaatgataccggattcagtatcgaaaattccttgctaaataaaacgtagtcaaatgccatttttgagcccaaatgaaagaagagatagaaaagaaaaaaagaaaaataa

SEQ ID NO: 125715 - DNA, 830 bp, Zea mays
  Clone ID: MRT4577_46121C.1
cgtagtagagcgagattrgggcatagcagatgtacaaagcggtaarggagtcsaasasttgtgcaagctcgactgcagagtatttcttgaagtttgcaacctacgaccaaagaattaatggggckatgcctcgcgggatggacgtcgctgsagagaggaaccataaaarctgggggtcaagcggcagggctcattgtcctgckcggccsactgcskrtatttgctsackgggagargaacttgcagakcgccctgkcrsagacstcagtgaagargtggccgcsgaggagaccttcgcgctgccaggagagcgcgaagcggcctggsggcascrttggaacsagacgaagtgcgtkcttggaggccggcgtgcgggactccataaggaggasgtagggactttgaaakaagcgcatagagctksttcagagagktagctgcgtaggggasatcagaaatcaagatsacatcatagccactatctgcctggtcggtctcackaggtctctcccatgcacggctacsagaaagcttsctagatstcctggggcagtagtcatggccaactagactgstkccakcatggctastggrgscatccataaaakcaksstcagagrrgstgagggktgtkggtgctgsrggtggctgcacrrstgagagaattgttgggagtcatcccactctccagcatagamatgkacattaggagcaagagctgcckagatggtgtgagagggctctctgakggtstgttctgtcggtcctgagcstgctcaagawttgsaagaasaktggggattgttctgcaccgkatcgtttgctgcatt

SEQ ID NO: 125716 - DNA, 378 bp, Zea mays
  unsure (1)..(378): unsure at all n locations
  Clone ID: MRT4577_46122C.1
gggggggggggggggcaaaaaacaactcgggctggtggcgctacactctcactaccaggacattaacgttgtccaggccatagcgcagcagctacacctccagcagtttggcgatctctacattgaccttaatctgnctcaagcgcgggggggggggggttttttttttttttctacatatcntatctaccctangtactatagtgcaccgggtactccccccacccttggcggtgtcttgtactgaattttcacactattgtagttcgggggtgaaaatataagctcaggtatcatcgtatgtgacatgtgagacttaaggtgatctaaatagaattctaattatctttccatatttaagttaccagcaggaacaag

SEQ ID NO: 125717 - DNA, 256 bp, Zea mays
  unsure (1)..(256): unsure at all n locations
  Clone ID: MRT4577_46123C.1
actcacttgcactctctctgacgattcttcagcttgtggtggcctccgaaaccgacgactcgtggtggttgctgtgttacatgttcttcgattccctgaccaccgtgtgctgccggctccgccaccaccgagcgaggaaaaaggaggccggccggccgcacacaaagcacagcgtcactgaaagtgttttgagcatgttggcgctactgtcngatacagtatcagtaaatcggtctacntcaaggcagtgtactgt

SEQ ID NO: 125718 - DNA, 502 bp, Zea mays
  Clone ID: MRT4577_46124C.1
gtacaagctttttttttttttttttttttttttattttttttttttttttttttttttttttttttttttttttttttttttttttttttttttttttgggttttttttttatttttgtttttttttttttttggtttttttttgggggggggggtttcctgtgtcaaggtgttttttttttactgttttaaatttttttttggtcgcaattttaaaaagttaaacacctgcggaaacaaaaaagggaaagaacggagattaaaaggggtgggctaactaaaattttttgagtcgggaaaactgtccttttagctggatgaaaaaattggcccccgcgtgggttaaggaatagggcaaatcgcgaaaaaaggcggttgggggataagggacttttttcctttgggaattactgttttcctagcgtttttaattcactcgaaggggggggtacggggttcctcagaatcgggggttccctcctccactaaatcgggagctaac

SEQ ID NO: 125719 - DNA, 106 bp, Zea mays
  Clone ID: MRT4577_46125C.1
tgaacagcagtagttctagcagttctgtgatctttcgtgcgatcttaaggtgcatcagtttggggatccatgtagaaccttgtcttacctttccaacgagtattta

SEQ ID NO: 125720 - DNA, 418 bp, Zea mays
  Clone ID: MRT4577_46126C.1
ctcgaggccggccgggatctctgttccctagcagcccccgtccgatccttcgttgccattggctctgacagctgtatccccgactacgatccccaccggctacccacgggcggacacctcccaatctctattcggtatttgcaagtgcgacatctataactcttggcgacggaggacctcacgtctgaccagctgccggctggtatgcacaaagacaagcgcatcctggtcttggttggcatgcctcatctccaccatgacaagactactctgggcgccctcggtgcggcccctgctggagttgttgcccaggagattgctctatgcatgatcgcatgattgaggctctggtcgactgaactcagactggactcacgctcgaatcttctgctatctctcatgtccatgagaggactga

SEQ ID NO: 125721 - DNA, 271 bp, Zea mays
  Clone ID: MRT4577_46127C.1
gcggccgcccttttttttttttttttttttttttttttttttttttttttttttttttgagcggggacaaatacttggtccaaatgttaacgtcaagccataaacaaatgccatgcaaataagggtgaaccttgaaaacaaatgttaaaacaaaccagactgggccacaacttgaacagggaccgggcaattttttttcgaggcaattttttgacaaaacttcactttagggccgaggaattacaaaaaaatcacttcagggcccaagggg

SEQ ID NO: 125722 - DNA, 667 bp, Zea mays
  unsure (1)..(667): unsure at all n locations
  Clone ID: MRT4577_46129C.1
tcgagtttttttttttttttttttttttttttttttttttttttttttttttttttttttttttttttttttttttttttttaacaaaaaaggggggggggggaaaccccccgttttttaaatttaaaggatggccctttaaaaggaaaataaaattgataatgcagaagtttaggggaaaacctggagaaccccaagagctccattttttttgaaaaccttggagggggaaaacccccccttggaaaaaaggggggcccagtttttttccccgggctgccggccttggggggggaccataaggagcatgtccataagggggggggccttgaaaaaaaccggccccttgggggggcccaggagtatttaaaggagaacccccttcccttttttttggggggaggggggggccttcctgcaaagttcaagaattttgacccaatcgtggtccttccaaaaggggaggaagagtttgaaaataaaaccctgcccagggggaagggggagggttttgggcccccntttcctcaacaaccttgggaagggggaccccggggcccttgatgttgggaaaggccttaacaatgggggccggtttgggtttcccctgcctgccgaaaaatagggggagcaagcgggggcccttaaaaaattgggcccccccctc

SEQ ID NO: 125723 - DNA, 361 bp, Zea mays
  Clone ID: MRT4577_4612C.1
catcgtgacagggtttaaaaaaaaaccctgaaaagcaaattccaaaaaaaaataaggaaaaccacagacgagagaacgatcaaaaaaaacctgataaacgttggtattaataactaacaagcacccacttataccgcaataagggcccgaaaaaaatgaactattggataaaaaaccccaacaatgggaagaacaaaagtattaataccaatattaggaataatcctgccccttcccctacccgtgaaaaaacctgaactcctgctggggggggtcggagagggccccctactcttagccgtcctcgaggaacacctaatccgctgaacccaaaaccgacaacctttgcacaccggcctta

SEQ ID NO: 125724 - DNA, 237 bp, Zea mays
  Clone ID: MRT4577_46130C.1
gggacccaggaggaacaaagtttttgggcgccaaaaggaacgttttgggcccattttatacattcactggtataaatgggactgcccttttcttagggacccgtttgatcatgagtgtcagctacaaagcttattgccggttccaggtggctacaaaatttcctggagctgcctatcaaccgtttattccacccaattttcacacacccccttaaatgtacccaggaatttctcaac

SEQ ID NO: 125725 - DNA, 500 bp, Zea mays
  Clone ID: MRT4577_46131C.1
gtcaggagaacatgtgatgttcggtttgttactgcaaaaccctaaaaaataaaatatcattctcggacgaagggagccgcccgaagttcccccaacgaaccgtatctgcttgctcctgccttcatgggccttaaaagcgtgaaggcggctcctttcgcgttgtgggccgtgcaggctgttctggatgctgccaattgcatttttaaaattcaaccatttaaatcagtgttacggataattgacatggccccggccgcgtcgtctccacgctatcaattggcgccggccggacggaggcaggcgtcgtgttgggtgccgatcgtgacggggagtgtcctggtgggagtacactgctggtggtggtgcaggacggtgacgcgcactgagaccccgactgcacctcttgcctatcttgtccgtctggccactgcagcagcgtactgtaccgctactctgctcgtggtagcgacgttctcggtcggtcgccgggacgtactact

SEQ ID NO: 125726 - DNA, 562 bp, Zea mays
  Clone ID: MRT4577_46132C.1
aaacagcaaaagttcaaacattttttaattttggtttgggcccacatccaaatttttacaagttacaatatccataaaagggttaaaaacctttttttttttttgtttgggggctcacccccctggttaaagcctttgaaatcatttggggtctaagcagggttttgttttttaagccctttacgaccaccatgcccaaacttggaatcccttgccctcccgttttttcctcttttacctcgtttagcaagacccccagacctgtcaccaggagaaacaccggccctttttttttttgattgttaaaacccttcttctccttaaaaattaagggctggcacataatcttttcccttggagaaccccccttgggggctttgttttctccattttttgactgactaaatctgctcctttttttgcttagccctctccttttttttttaagcctgaacctcctttgtttttttcctggactccctagccttcctccgctcctaagtttcctaaatcctttttttctttgacaacaacctccccttgatcttgggcatgggggcat

SEQ ID NO: 125727 - DNA, 869 bp, Zea mays
  Clone ID: MRT4577_46133C.1
gtcaccttttttttttttttttttatagtttggatcacaaattgattacgaaacctttttacatgacaatataatacacatttgaacataggttatcgtgtattatatattcccgttgtaacgcatggacatttaactagtttacgaagaagaaatgaaatgcttgtgaggcgcaccgaagttacaacgtcgcgacataaagagtaaaagcaagaagaataaatacatgcttcatctgccgctcaagctcaagcagcagccgtcggtagccgtagtgtggcggcggcaggcgcaccggcgccgttgctgccggtagtgacggcgatggggccaggcccgccgcccgcgagtatggacctgtagatctccaccagcaccttatcttcgtactccttgagctgcgccggccgcgcgaaggccgccgtgccgcagtagggctggccggcgccgtacccgacggcgggggaggacgccagccgcagcatggcggacacgtacgcgtcgcggagccgcatgagccaccggcgcggcgacagcgcgcggagcagccgccgccgcagctggccgcggcgcacgcgccacccgcggcatcggcgccgccccgaggcaccctccagcgtcggcgccggcggctgggcctgggcgacacccacgccacctccgagctccgcggtggggagcggcggccggcgctgcgcagcggcggcgtcgatgcggtagtagccccggcgcttccagtacgccttgatgccgcccttgtagtaggtgcggtccataacttccttccttctttgatgcagagctggacgaagcttgtcgccttggcctgtatagaaacggtgtttgtacgatagcacaatgtgagccca

SEQ ID NO: 125728 - DNA, 1012 bp, Zea mays
  Clone ID: MRT4577_46134C.1
ttccgttttttttcttttttcacaagccagaccgccaggcgccagtagccattgagtccttgacccgaagtcccacagccgccgccaaaagggttcctcaccatcttgaacgctcgccggaccaatcccaagcagtcctcgcagcagatggcagttcccggcggccgcaacggactcagggacgaggacgacgacatggcccagcacgccgaggccttcggcggcgtctctgacgacgaggacgtgcccccccaccttcgcgccctcgccaacgccgcccagtccggcgacgtcaccgcccttgtggctgccctcgataatcatgatggcagtattgatgttccagttgaagatggtgatactttgctccatctggcatgcttatatggtcatcttccttgtgtgcagctattgctggaacgtggagctagcttggaatgccaagacgaagaaggtgctattcctcttcacgatgcttgtgctggaggcttcactgagctggtccaatatattctcaactttgctgccaacaaggatggttgcgtagtgagaatgctcaacactattgattctgaaggcgatacgccgctccatcatgctgctagaggagaacatttggatgttgtcaagcttcttctccaggctggggcgtcccccaagaaggagaacacttacgggcagacacccgctgatatggctgaccaagacaccgaagttcgaaccctgttgactgccaagcaaattgaggcaagcacacacatgagtgatgattaagcggcattggaatccttagttgcaactggtaatgttgagaaatagccgtaacatcttatctgccatccaaacttcatttgaactgaagtaatattgtaatcagactagtatggaggggttagcttagctacatgatcatgctccttttccttatcgctgcattatactaaagatgaagtggaacacccatcggtctttcttgttctttcgcggaaaatctgatgcttgatcaccgaac

SEQ ID NO: 125729 - DNA, 218 bp, Zea mays
  Clone ID: MRT4577_46135C.1
cagagcaagaatcatgaatgtacattcaccatgaacaaaacgtgtgacagaatcacacacctcgcaacggggaatgaaaaatgaacggcattgaattcgaccaccctccttttgccatgggcgggggtaaccggaaaagaagggacttatccatccgtccgtccgaaaggctaaattaaggccagggctcccgaccggtccatggacgtgacggaaag

SEQ ID NO: 125730 - DNA, 742 bp, Zea mays
  unsure (1)..(742): unsure at all n locations
  Clone ID: MRT4577_46136C.1
agtagtgaaattccatatattattgtaccacaaagccatgagaggcatacacaagatatatataatataaatttatatcgccgctgttgacactggaaacctgcaaccagcagctgctaagcaactaaccacttcactaataaacaccattactagtagcgaaacagggggggggggcactggtactactagcaagcactggtacagacgaaacacaaacaattcctttgataaatacttaggacaacaaagcaaacgcccttattcatggagcccacggcaagcttcttttgcaagtaaaaaaaggtttgcaaacagagggacgagagagagagagaggctcttgctgcgtctgctggtagcccaccaaagcaagcaaaagccactcgtggatggatggggaaacgacaggttgttttcctatcatctccatgagcggtaaatccctaatccaacatttttttttcaaatctcaacattcttgcatcagctaacacctctctctcaatcgaaccccttattattactgttnnnnnngaaccaccaaactggatttctaagcttctcctccatctccaccaaagaaccaatatatcaccggatccaaaatgaacagacctaccactgatgctaacgctactactgtcttcctaactctgctgctaacacactacctaacaaaaggtactcnnnnnnnnnnnnnnnnnnnnnnnnnnnnnnnngctggagcgcgaccactcga

SEQ ID NO: 125731 - DNA, 495 bp, Zea mays
  Clone ID: MRT4577_46137C.1
gggtctccaaacccttaaccaggagctctaggccttattccatgttctctgatgccgctcctggcatcgctacgaaccttatcacccataccctgtctcgttgtgccaacacctactaagccgctgaccgctaacgctgtccataagagaaggcctgagaccgctgaagcaaataagccccaccacgctcggcccgggctcgcacgggctcagcgtgatccgctttacgacaaaaagcacggagctgccgctactcaaggtgccggaccagcccctgatgcggcagatcgggcaggacgtcaagaccgacctacacttccacagttctgctgtctcaaggcttgaggagccggctgaggcctaccttgtcgtgctcttggaggacaccaacctatgcgccatccacgccaagcgcgccaccatcctgcccaaggacatccagcttgcccggcgtattcgcggagatgaggggctaagcgtgacattgcactgtgc

SEQ ID NO: 125732 - DNA, 394 bp, Zea mays
  Clone ID: MRT4577_46138C.1
tccgctcgtttggcgtctctagccatcaaacagcagcccaagcccaaggccggggcctccgcctccgcctccgcctccgcgcgccgtcgtctcttccttccttccccgctcgccgtcgccgtcgccgcagcgatcgtcgacgacaatgtggggctggggcaaacaggaaaaggctcgtgacacccgatcgtcgtcgacaatgtggggctggggtgaagaggaagaggaagaggaagaggctcatgacgagcatgccacccggtcgtcgccgacgatgtgggatgaagacgaggagactgatgacgagcatgacacccgatcgccgccgacatcgtgggacgaaaatactgatgacgaggacgttccttccgagagttccgaggacgttccttct

SEQ ID NO: 125733 - DNA, 367 bp, Zea mays
  Clone ID: MRT4577_46139C.1
attcttattctttttagctttacgtggacccttttgagttttttagcgcattattagcaatcaggcttccatggacgcgagcgcattctgagccgccccgaaggcgaaaaagggcacgggcggacacaaggacggcgggcctacgaagaagtcggtgacctggtccctcaaggccaagatgcaatttcccatcggccgcatcggtctgtacctgaagaagggcctttacgcgcagcgcgtaagcacgggcgccctcgtctacctggtcggcgaccttgagtacctggcacgacgaagttgctggatctgtggcggcaacccctcccaagggccacatgagagacccgcatcatcccttgccacgtgc

SEQ ID NO: 125734 - DNA, 449 bp, Zea mays
  Clone ID: MRT4577_4613C.1
ttgtttttttttttttttttttttttttttttttttttttttttttttttttttttcaaaaaaccccaagggattaaaaaagcccctccaacccaaggggtcctttggggccccccccattttttttttggggggggttgcccccccctggacccaaagggccctgtccaggcggttaagtggtattccccaaccaaaaaagaaaggccctggccccccccctttggggggaacccatttggaaaacttttttacttccccaggggacccccgtttccccgggggaaggggcttcctttattttgggggggaaaaaacccaaatgggtcgttttcgccccccgaggccccccccggggaaaaaaacccccccaaggaggacctaacaaccgtgggttattagggaccccagggccatcctttgttgggggacccttcccaaaaaggcct

SEQ ID NO: 125735 - DNA, 1481 bp, Zea mays
  Clone ID: MRT4577_46140C.1
gcggtgatcctgctctccccttcgttacacgcaacgcatacgcatggcatatgctcccacagattcgcttctcccgggccttccctcctgttctgctgctgctcgaatgctccaactaacacccacctgcctccctatattaagctgcccgtcgctaatgattcagcctcctcttattctcattcgattacacacacacacacggagagatcaaattgatacactgcgatctcgatcaaacaaatcaaaaaaaaaaaaaaatcttgcgagacattactgaccgatgaagttcggcaagcgcctcaagaagcagatcgaggagagcctgccggagtggcggagccagttcctcaactacaaggagctgaagcggcgcgtgaatgccgtgtcctcccgcgggtcggcggcggatccgtcgtcgtccagcgccgcggaggccgacttcctgacgctcctggacgccgagatcgacaagttcaacgccttcttcctggagcgggaggaggagttcgtgatccggcagagggagctccaggagcgcatcgggcgtgcgggcgggcccgaggccacgctggcgcgcgtccggcgcgaggtggtggacttgcacggcgagatggtgctgctgctcaactacagcagcgtcaactacacgggcctcgccaagatcctcaagaagttcgacaagcgcaccggcggcgtgctccgcctccccgtcatcgcgcgggtgctgcggcagcccttcttcaccaccgacctcatctccgagctggtcagggactgcgaggccgcgatggaggccgtcttcccgcccgccgccagcagggacctccacgggcgccaggcgctggccgtcgccgggcagggcatcttccgcaacaccgtcgccgcgctgctcaccatgcaggaggtgcgcagcgggagctccaccgtcggccatttctcgctgccgcccatgcagccgctgccggagtccgactggctcgtccagtccgttgacagcacgccgacggcgtcgcccctcatccccacccagtgactgacgacaccatggtccacttacagttccatgatccattgcactacagtgctacaccacagcggggcgtattatatagtatgcaatatatatatatatatatgagaaggcacaataatctacatactgtagtggtgctctgtatgcggctgatgtgtacagtagtagtatttttttctctccttttgttgatgagacttgagaggtgtcctttttgctctctttcttattttaccattaataataataataattagtacaataataataataataataataataattagtaatactaggactagtaggagtaataattgttataataatggagaccaataggctttgttcttgcagtgtaaatttattagcgggctaattgagtccacgagctgtgggcagacgtcctctgcttccaattctatatattctgatcgtttgctaa

SEQ ID NO: 125736 - DNA, 1183 bp, Zea mays
  Clone ID: MRT4577_46141C.1
cacacacacacggagagatcaaattgatacactgcgatctcgatcaaacaaatcaaaaaaaaaaaaaaatcttgcgagacacaactacacgggcctcgccaagatcctcaagaagttcgacaagcgcaccggcggcgtgaatgccgtgtcctcccgcgggtcggcggcggatccgtcgtcgtccagcgccgcggaggccgacttcctgacgctcctggacgccgagatcgacaagttcaacgccttcttcctggagcgggaggaggagttcgtgatccggcagagggagctccaggagcgcatcgggcgtgcgggcgggcccgaggccacgctggcgcgcgtccggcgcgaggtggtggacttgcacggcgagatggtgctgctgctcaactacagcagcgtcaactacacgggcctcgccaagatcctcaagaagcagatcgaggagagcctgccggagtggcggagccagttcctcaactacaaggagctgaagcggcgcgtgaatgccgtgtcctccccgtcatcgcgcgggtgctgcggcagcccttcttcaccaccgacctcatctccgagctggtcagggactgcgaggccgcgatggaggccgtcttcccgcccgccgccagcagggacctccacgggcgccaggcgctggccgtcgccgggcagggcatcttccgcaacaccgtcgccgctctgctcaccatgcaggaggtgcgcagcgggagctccaccgtcggccatttctcgctgccgcccatgcagccgctgccggagtcggactggctcgtccagtccgttgacagcacgccgacggcgtcgcccctcatccccacccagtgactgacgacaccatggtccacttccagttccatggcactacagtgctacaccacagcggcgtattatatagtatgcaatatatataatctacatactgtagtagtggtgctcggtatgcggctgatgtgtacagtagtagtatttttttctctccttttgttgatgagacttgagaggtgtcctttttgctctctttcttattttaccatcaaaaataataataatcatcataataattagtacaactaggactagtaggagtaaacaatgttgtaacaaggaagaccaataggctttgttcttgcagtgtaattttatttacgggcaaattgagacc

SEQ ID NO: 125737 - DNA, 736 bp, Zea mays
  unsure (1)..(736): unsure at all n locations
  Clone ID: MRT4577_46142C.1
tggtagaggtgaagttaacaaagcagagatttcagtaaattagggatgatggttgggattctctattagaggatgtgttatccttttgtgaaaaacatggtattccgaagttggacatggatcatgagtacattaatcgccacaagcctaggcaaagaaccaaccgaactaactatcaacactatagatatgattgcttgaaccctgttattgacttacagcttatagagttcaatgatcgtttcaatgaggtgaattctgaattgcttacccacatggctgcttttagtcccaataattcttttggtgcctttaaacatgagagtttgatggaattggctaaggcataccctgatgatttcagcccagtggaactagatgatctcagtagtgaacttcattgttacattgataatgtgagagctgatgcaagatttgctcaattgggtactatttctgagcacggtaaactaatggtggatacaaaaaaacatcttgctttttcattggtctatcggcttctcaaacttgtgctagttctccctattgcaactgcatcagtaggggagatcatntntcagcaatgaaaattgtgaagacggtcctacaaaccgggatcggntgatgactntatgaatggaattgtgtcattagcttcatggaacaagaacttcttgatacaatttcaataaatgatgttgatagtttcgattccagaagatggatggacacaatc

SEQ ID NO: 125738 - DNA, 1116 bp, Zea mays
  unsure (1)..(1116): unsure at all n locations
  Clone ID: MRT4577_46143C.1
agcttcgtgggctacgacagcccctccagcgccgacgcctgggcgcgctggtcccgcggctggaccgccgaggagaaccgccacggcgacctgctgaaccgctacctctacctgtgcggcngcgtcgacgtccggcgcgtggagcagaccatccaccacctcatcaacgccgggatgcgcctcgcctccgacaagtgcccctacaggggcttcatctacacggcgttccaggagcgcgccaccgccgtctcgcacggcaacacggcgcggcgcgccatggcgctgggcgacgccagcctggccaggatctgcggcgccatcgcgagcgacgagaagcggcacgaggcggcctacacccgggtggtggaccagctgttcgcgctcacgcccgacgccgccgtgcgcgcgctcgagtacatgatgagggagaggatcctcatgccggcctactacatgttcgacggccgggacccggacctgttccgccactacgccgccgtcgcgcagaggctcggcgtctacaccaccgccgactacgccgacctcgtccagttcttcgtcgacaggtggggcgtggcggacctaggccccggcctcaccggcgaggggaggcaggcgcaggactacgtctgccggttgcctgagagggtgcgcaggatggaccagctggacgcgcgacgaaggctgcagccccagactcgtcaggtccccttctcttggctgttcgacaggcacgtggagctgctgacctgacttgattgatcggcagtctgcagcccagctagcggtccttttgccccctttggcagagcccagagctatcaattctgttactgcgtctccttctcctctacttctacttcttcctcgttggccactccgtagttccgtatgtgtctaccgtcaagtgactgactggaaccatgtactgtgtgtcagtcatcattcaatccatttggtgccgcagcgtgtcaaaaaaaaaaaaagcaagcagcccaatgtcagcgagtactgtggctccaacgatatcccaaacttttacctcaattcctagtgtacctaagcagatcaacctgtgtctggtggtacaaactgaaaaatgcagctttacttttc

SEQ ID NO: 125739 - DNA, 198 bp, Zea mays
  Clone ID: MRT4577_46144C.1
aacagttcatagtcggagccaccaacccgggcctcaagagccagagtcctggcggcacgtctgtatgtcagatttgctgatggctgaaaagaataagagctattacacaatcgagagactccatcatttggttcgactagtaaccatctttcggaggccaaatagttataggactatatgaaagatctggagagcatt

SEQ ID NO: 125740 - DNA, 322 bp, Zea mays
  unsure (1)..(322): unsure at all n locations
  Clone ID: MRT4577_46145C.1
tcacttgcntcgtgaggtaagcactcgtacgtttcgctgctctcatgtcgagaacaaatccaagctcagaaccattctcagaaccatactcgcctaaactagggctctgcattgatggctctgtgcaaccgcgtcagatcgggaatctctctcttcaccaaatccacgttccttacttccgagcgatccagtctccatcgatccctcgttgcccctttcatttccctcgcctccagaaattacgccaacgttgccgggctaaaggaatccaaagctaaggtccctcttgcgttagtttggaggctcaggatactatgcctct

SEQ ID NO: 125741 - DNA, 402 bp, Zea mays
  Clone ID: MRT4577_46146C.1
atgaagggtgttagtcgatttggggttaaaggaaagttggcaccccgatatattggtctgttccctattctggagcgatgtgggcaagttgcatacagacttcaatttccagaatcactgtttgcgctgcatagtgtgttccatgcatctcagttaaagaagtgtctatggattcctgatcaaactatggatgtggctgatgttaatttggaaccatacttaacctactcagaacatcccattcgagttctggatcagaatgacagaattactcgaaagaggactctcaagttttataagcctaaagattctaggtccagctcgcgagtttgtggcatgatctctactttggcaatgggcgtgcggaaggtgcacctattgagtgttgctcctaaactttga

SEQ ID NO: 125742 - DNA, 221 bp, Zea mays
  Clone ID: MRT4577_46147C.1
cggacgcgtgggtttttttttttttttttttttttttcttccttatttatctaatttagtggcgcttgcgccataagggccggacacattgatacagacttccaattcaaaacgcctaaattgtccgcctctaatgcttctttattaacgatttaaaacaaaattcttttcagacgatattaaaacgcgacaactttttctaatacgcatagtggcctatt

SEQ ID NO: 125743 - DNA, 200 bp, Zea mays
  Clone ID: MRT4577_46148C.1
cttttcgaggtcctgttccggacagcccagcctagctcattgtctcagtgctggtgcagttgacatttgacagtgtgcgaggcctcgtaccagccaggatcccaagcgtcccgtcccttggaaagttcagccagaatcttcgtcctgcccccgacagcccagcctagcccacttgtcatccataaagcaagctcaacctt

SEQ ID NO: 125744 - DNA, 588 bp, Zea mays
  Clone ID: MRT4577_46149C.1
cctcgaggccggccggggtgctcatcactcatattccgcatccgccgctctctccgtatcactggtcctcccactgctactccgtacggacgagactatgatggccatgtggaacacgaagggaatgcagttgctgtcgaagaaccaccccaagatgaggcaaaacaccacccgaagctgattgggatcgtgcatgataacgactacatggttgtcgaaaacactcctctgatgagtgtgagtacatgtctaccatgtcacattgtaaatcatgcgtcatggcttaggcatagcgttcaagacatcgatcatagtaaaccgtgcacttcactagaacatactagtcgccttcttctaactatatgccaatatttctctgaggtagaaccgatctgacaatcagctgtagttgacactactatagaaggagctttatttgcctgctataatccacatgacctatcatatagatgctctgagactcccaactgatgagaatcttgcctcccacatcaaggtatggtcccattatggaaaggaaattgctgggactgcgcaatcatgtatataggaggatcctatctgaaa

SEQ ID NO: 125745 - DNA, 395 bp, Zea mays
  Clone ID: MRT4577_4614C.1
ttccaccaatataatatcctctctattttttatttatcacattttattttaaaacactacaacatattawaraactcawactattatatattcataccaataaaacctwctaaacccaaaatyaccacaacaacatcatcatcwaaacaaccttttttacctttaaytttacccctcaattacaraattaaacaaacaaaataaaactaataatrcacctcttttacaatccaackktcawcatyyacatcctctctyttaaaccactattcwcctatytwtctttttttttaacccgccttatcctcactaataactaacttcttactaccytttttataaaaactccctccaatgactttaaaattttatcaaaacctcgatttttccaaatc

SEQ ID NO: 125746 - DNA, 223 bp, Zea mays
  Clone ID: MRT4577_46150C.1
tcgaaaaaaatgtaaaaattaaggaagaatggaatgttatatgattttaaagaaaaatagaaggtgatatggggggaattattaaagtgggtggattaagattcgtatgaaattgattggaagattttgtttgttaaatgatgtggattagcgaatgaaaaaatgggttttttttagtaaattgttgaggtttaatttgttgtgatctatttaagttatttgg

SEQ ID NO: 125747 - DNA, 156 bp, Zea mays
  Clone ID: MRT4577_46151C.1
tggtgcctgcggtcgactcagagaccccctgcctccagtaggctggattttatcgtgcttacgcccggtgcgttcctgcggcgactcgttaggacgccgtcgtcctaccgttcagccatctctgtaatgagaatggcgccttgtcatacttgcgct

SEQ ID NO: 125748 - DNA, 241 bp, Zea mays
  Clone ID: MRT4577_46152C.1
cccacgcgtccgcccacgcgtccgtttaaaattaaagaaaaaaacaacaaatagagaaaaagtgaatgttcatatttattcaaaacaccaaccttgccaacgcgtccatccaaacctttgccttcaaatcatgtgaacacaaagctatgctacgggcgtttaacttcaattacccagaatgaaaaaacccttccttatccaaatttattgatgccaatttataatgccattcaccaactgg

SEQ ID NO: 125749 - DNA, 417 bp, Zea mays
  Clone ID: MRT4577_46153C.1
cggtcgcgtgggcgcatgtgctgtcgctcagtccagaaaacttctggtgacatctcgagtgctacacatctctgttcagattttgaccctgacatctgttgtaaaattagagaaataagtgacatgcttccatcaaaaaaaaaaaaaaaaaaaaaaaaaaaaaaaaaaaaaaaaaaaaaaaaaaaaaaaaaaaaaaaaaaaaaaaaaaaaaaaaaagcacacgacataaatatacaaatagagccaacccaaatatactgacactatacgtctttttacatcgtcccaactggaaaaaccttggacgttgcctaacttaggtcgacttgtgggtaaaacccccttttcgccacatcttaaaatactcgaataggcccccactttatcgccctttgcaatatttgcgcatactgccat

SEQ ID NO: 125750 - DNA, 135 bp, Zea mays
  Clone ID: MRT4577_46154C.1
agaagcctccgctccttaatgtgaaactacatgaagttttaaacttcatgcaatatgaaattccatataagtatttatctgcaagttacagcttgtgtggtttgtctttggaaataaaaatccaggttctcacag

SEQ ID NO: 125751 - DNA, 326 bp, Zea mays
  Clone ID: MRT4577_46155C.1
aaataaaaaaaaatttttttttttttttttttttgttttttttttttccccagaaaagaaaaatatatatattattccatgtccaaataatggcactcgttaagctcgagaggaacatgtttttttcagggttaaaaactaaacttggttcaacggtacaaagaaaaattcggaatgcttcctcctttttaaaaaacacaaactgttcagtttgaaaaccaaaagcacatttgcccccaacttccatgaaataaaacaggaacagggcaattgaaccaccctccgcacgggtctatgttgaaaatgcagcagtcagccagcacaaa

SEQ ID NO: 125752 - DNA, 286 bp, Zea mays
  Clone ID: MRT4577_46156C.1
aaagcatcgatcacgacaagatggcgtgcacaaacaatgcgatgagagccttgttcctcctggtcctcgtctgcatcgtgcatggtgagaaggaagagtcaaagggcatcgatgctaaagcgtccgggcctggtgggtacttcgacatcaccaagtagggcgcctgcggcactctcatgacatacaacttctttgctatgaacatgtcccggtccacgggcatgctgttcaatgacgtgacctttactgttctttgcgacagtcccatcacggttggtttcacatg

SEQ ID NO: 125753 - DNA, 327 bp, Zea mays
  Clone ID: MRT4577_46157C.1
tttttccggaccttctctgggctgtcattccagtcattggcattgagatactgacttctaactactgaactctccattcattaactactgaaaacttactacgtaggcacatgcaaaaccactgaaagaaccagcagagcatctacccgaccctgaccgttcccgccaagaagctagacctaaaggaaggcttattgaagacgctgacgcaagcctacttggagcggcgagcaccaagtctcattggatggcgatcggaaacaggcgctcgaacgaccccagccagtcggcgtccggctggttgagccgcagccgcgacaggctttc

SEQ ID NO: 125754 - DNA, 1232 bp, Zea mays
  Clone ID: MRT4577_46158C.1
aagacggagggcgattggagccgtccaggccggccgggacccggactgcttgttagcacaaacagatcgatcgattacagcaatggcggccaaggtgttcctcctcctccgactcagcatggtcgccgtcgtcctggctgccatcgccacagtagcgctcgcggaggaagccgatccgcgggcactgccggcacagtggaccaccgcgaagaagtacaaggccacgatggacgccaagacgcggcaggctttcgacggcgtggtggccgccgctacggcagagaagcggtcccaggcggtggaggccgtgctgcagcagcagctgaacatggacgtgtccctgtccaaggcgacgtcttccggggacgagaacaactacgtgagcgtggccgccgcctacgagaaggccgcgggcgccgtcatcgcggcgacgccggacaacaagctccgcgctatggcgttcgcgttcgacggcgcggtggcgccggacccgggccggtgccccgccgtcgacaagcccttctgcgagacctacgccaagacggagaaggccttcagcggaaccatcgcctccggggacacgcccaagagcaagctggggatcacggacgccgtgctcaagctgaggctcgccaccgacgccaacatcaacaaggcctacgcggagggggacaaggacaagatcgcaaaaatccttgctgcatacggccaggcggccgacgcggtcgctgcggccccgcctcccgagaagctcaaagtcatggagaagaccttctcggcggtcgccgccgccgctcatcaggaggcggcggcggctgctgctgctgctgcagtgattaaggtttaagggagagctcctgcatgaaattaaccacacgtccacacgtatacactacggaacaagtgtttccatcagacgaccatcagtgaaaaaaaaccatccttctctgtgtgtgtgccgtgtttttgtcatttcttctttccattgctagagaaacgggttatctttttttttcccacatttataagcggcaatacatgcgtgcacctgtagtagtgtgaccatatgtactgtgctctcggtttgtatatcgatagtagcatataaagctactactcccgatttgtaactatagatctcggtattaaagccattttatttttatttttaaaaaaaaaaaaaaaaaaaaaaaaaaaaaaaaaaaaaaaaaaaagaaaaaaaaaaaagagga

SEQ ID NO: 125755 - DNA, 662 bp, Zea mays
  Clone ID: MRT4577_46159C.1
tcttccctccgttcgttccatcgtcgctccctcctccggggcgccctccctcggtttcttcctcgtctcgagctctcgtctagtcgtcgctgtcctcgcaccgctcccttctccggcatccgagccgtagccctgccctccgcatccacaatttgatgcggagggctcggccgccatgtcgtggggcctcggctggaaacgcagcaccgagatcttccacctcacgctcgactatggggactacgacgacaacgacgaccatcagccctcgtccccgtcccctccggcgtcctcttccccttccgcctcggcatcgtcgaccccggtatcctcctcctcgcccaccgccacccgcaacggcgacctcggcttccgcatcgagctcgaatggtcggcgggggacgacgaggatcaggtcgcgctccgcctccagtcccagctcatggtcgcgctgcccccgccccacgacgccgtctccgtcgacctgatcccgagagacgacggggaggaggaagtggtgcagatcgagatgcgtgtggtcaggaggcgggaggcactgcggtccgtgcgcgtgtcgcgggctcccggatccgcgctgggcagcggcgatggcgcgggggtgctcgcgcgcctcatcagatccaacctcgcgcccgcgcctg

SEQ ID NO: 125756 - DNA, 535 bp, Zea mays
  unsure (1)..(535): unsure at all n locations
  Clone ID: MRT4577_4615C.1
ctcnacgaaacaggcggcggttagttagggtttgcccatctgccatccgtccatccgcctgactcctttccaccatctccgaccatcctttcctccatctctggccgacgacttcgtccatctctggcggcttcttctccggccggcggctggacgcaggtgctagaccagacggtggccagatcttgctgccacacgacgttgttcttgctgcctagaacaagacctctgttgctgcttccacacaacgtcgttcccactgcaagaagacattgttcatgctgaaagatattgttcctgctgcatgaacaagatcgcctcttcggctgttcctgctgccaaacaacacctggttcaggactatttagcgaggcgaaaggtatattccagaagatgcaggactgcagtcacgccctgacttgttctcctacctcacgctgatcagagcatacatagaggctaagctgcacactgaggtgtatatgctggaggccaaagctcgcagtcgatcgcgacgtagtggagcacgctttga

SEQ ID NO: 125757 - DNA, 1150 bp, Zea mays
  Clone ID: MRT4577_46160C.1
cgaggccggcccgggccggccgggccggactgcttgttagcacaaacagatcgatcgattacagcaatggcggccaaggtgttcctcctcctccgactcagcatggtcgccgtcgtcctggctgccatcgccacagtagcgctcgcggaggaagccgatccgcgggcactgccggcacagtggaccaccgcgaagaagtacaaggccacgatggacgccaagacgcggcaggctttcgacggcgtggtggccgccgctacggcagagaagcggtcccaggcggtggaggccgtgctgcagcagcagctgaacatggacgtgtccctgtccaaggcgacgtcttccggggacgagaacaactacgtgagcgtggccgccgcctacgagaaggccgcgggcgccgtcatcgcggcgacgccggacaacaagctccgcgctatggcgttcgcgttcgacggcgcggtggcgccggacccgggccggtgccccgccgtcgacaagcccttctgcgagacctacgccaagacggagaaggccttcagcggaaccatcgcctccggggacacgcccaagagcaagctggggatcacggacgccgtgctcaagctgaggctcgccaccgacgccaacatcaacaaggcctacgcggagggggacaaggacaagatcgcaaaaatccttgctgcatacggccaggcggccgacgcggtcgctgcggccccgcctcccgagaagctcaaagtcatggagaagaccttctcggcggtcgccgccgccgctcatcaggaggcggctgctgctgctgctgcagtgattaaggtttaagggagagctcctgcatgaaattaaccacacgtccacacgtatacactacggaacaagtgtttccatcagacgaccatcagtgaaaaaaaaccatccttctctgtgtgtgtgccgtgtttttgtcatttcttctttccattgctagagaaacgggttatcttttttttcccacatttataagcggcaatacatgcgtgcacctgtagtagtgtgaccatatgtactgtgctctcggtttgtatatcgatagtagcatataaagctactactcccgatttgtaactatagatctcggtattaaagccattttatttttatttttaaa

SEQ ID NO: 125758 - DNA, 646 bp, Zea mays
  Clone ID: MRT4577_46161C.1
taaccctttttttctctcttggtttattgaaaccaatacataatttataacgcctggaggaaatgataaaaaaagtgggttttattgagcgatcgatagcatcttaatttacttagccttgtccaccttggccagagctagagcctgatgcacctccgtatccaccggcatacccaccgtcacgcccaccgccttcaccgccaccgcttcccccgccattggcagaacttccaccgtttggaccagcaacgtagctagaagagatccctcttccagaaccagagccggaaccactcccgttttgtggacctcctccacggccaccaccaccaccactgccttgtgcatctgagtaccctccaccatagaagccaacagtgtagctacgacttgccgaagacccggaaccagctccagacccaccattatcgccgccgccgctcccgccaccgtctacactagccatggagctaccggtcccatatggcccaccaggagtgttggtagctccagcggatccgtagccggagccagatcctgaaccatagccattcatggaacctccaccttcccctcctccccctccctgaccagcagcgtcggtcattgggtgctcccaagggaactccctagctttggatacacc

SEQ ID NO: 125759 - DNA, 272 bp, Zea mays
  Clone ID: MRT4577_46162C.1
cctaagggtgcggccacgcgtgcgattgcagtccgacattcaagatcagttgtggggagccggcaatggcgacgaatctaaccgaactagccaccatgcgtggagtccgtacgcaagatacgctaacaagaccctgagtcacgggactgataagtacctccttcgtatgacccgtcaattccacacgaacacgaaagtgctgatagaggagtggcttctgccatatgagcgactgcatatcaaggatggcaggtataccacacatatgatgc

SEQ ID NO: 125760 - DNA, 166 bp, Zea mays
  Clone ID: MRT4577_46163C.1
gtacgtagtattgcggagatcaatgcaatgcaaactcatcaccaccagattgcattgcattgtacgtagtattgcggagatcaatcgaatcgtttggctcgtcgtcattctatcgatgtacatacattatatatgatgaaagacatatataatcgtttctttcagg

SEQ ID NO: 125761 - DNA, 781 bp, Zea mays
  Clone ID: MRT4577_46164C.1
actcgcgtgggttgtgcttctgctatcgccatggacgacgacggctcctcctccccctcgccgctacgcgtggtgatctgcccgtggctcgccttcggccacctgctgccgtgcctcgacatcgccgagcgcctcgcatcgcgcggccaccacgtgtcctttgtctccacgccgcgcaacatcgcgcgcctcccaccggtccggcccaccgtggcaccgctcgtcaacttcgtggcgctgccgctcccgcgcgtcgacggcctccccgagggcgccgagtcgaccaacgatgtcccgcacgaccagttcgagctcctccggaaggccttcgacggcctcgccgcgcccttctccgagttcctgagcgccgcgtgcgccgagggagctggcaagaggcccgactggctcatcgtcgacactttccaccactgggccgccgcgtccgcactcgaaaataaggttctcttccctctgttgcttcaattccatgtacgtacaagtacagctcgatcgaaaaataaggttcgaagaagcttccttcaattccatatgcaactcaattgataaaaaacgcttcaattcctagaagaagcttgcttcaattccatatgcggacgatatatatcgaacgtgtactggttcactttgactgtggtttcttttataaaatcggaggtaaaccccctcttttgataaaataataatatcaacgtgtaccattgtgatttgctatatataagttccatgtgtgatgcttctactgggagccgcaaccgtgatc

SEQ ID NO: 125762 - DNA, 241 bp, Zea mays
  Clone ID: MRT4577_46165C.1
aaacgaccaaccccctggtgcggctgaaaacttccctcctttcgcgcatccaaccaaactactacgggggggggggggagggacacaagaaaactttgacaagggcccagggcccgggggttttttaaaaggatccaagggcaagaaaagaaaacccacaggccaccggatccattaattataactaaaaagggggttaatttgattaccagttaaacactccctaataaatttttttttt

SEQ ID NO: 125763 - DNA, 350 bp, Zea mays
  Clone ID: MRT4577_46166C.1
cgggcagactcgccgccgccgcaggccgaggacacgacctttgcttgcagcaccgccacgacagagacgggggagggcgcgaagaggccgagaagcgaccaccacccgaccgagggcggcagcggcaccgcgcaggagcacgcagacgagccggcgaacgacccgcacgggctgctgcagaagccctactcggggggggacgacgacgactcactggacggcctcttcgccgcagatgaggccgcgcagcaggacgagggcaacggcatggacggcgtccgcctgtggagctacgacgaggtccccgccgtcgaccgatccgctttctgacgggggcggacgacggacta

SEQ ID NO: 125764 - DNA, 555 bp, Zea mays
  Clone ID: MRT4577_46167C.1
tgggaccctcgaggccggccgggccgggagcatcttgtgagctcaccgacatcactaaccaaccatccttcggtagaccgtcatctacatctctgctacactacctatgacttatcatcagggccatggatgtcgaacttggagctacatgctgctagcctcgactgcatccatcgggtcgactcacgggaacgacaccctgccacacatagcttccggttcacgagatccacccattcatcatgcccctgtctgctacgcctgatgcatgggctcgcagccgacataatcgtgatcgtcgtccaccgctctccggacaactgcactgttgaggtcatctatgaactcacaccggcgactgggtcttggatgtggactctacagcacgtatcgcttcatgttacatggggttacaccaaacctacgctgctgctaaccgtggcctacgtacatgaatacagaacaaagaggtcacaaccgaccctgagttacatgacgtatgcgctcactggctgggacctgaatgaccacaagccatcttgcggctagctcttc

SEQ ID NO: 125765 - DNA, 435 bp, Zea mays
  Clone ID: MRT4577_46168C.1
ttcggttggaggaacggttgccggcccatttttcacaaccccaaccaggcgagcgtggtgaaggtgactaccgacgaggcgttcggcatgaccaacgcgatgacctcaagagcactgcgctccaggtcagggctggactacgatttgctgccccaacggtaaggactggaagaccatccatgcctgtgcggcgcgctttcagcccatcaccagggggttcactcattctacgccttgaacgactactaccagctcacgtaccggcacatcataaccctctacttcgcgctcggccgctacgatatcaacaacatcactcaaaggatggcgcaagtagccacgctcccatccgacggacttgaactctaagcagtgatatgggaggaccgtaacaccagcgtccatatcgttgaacaaaacaatcgatggcatgct

SEQ ID NO: 125766 - DNA, 421 bp, Zea mays
  Clone ID: MRT4577_46169C.1
actaaaaggagcataactccttattggaacgtccaaataatgaaccgtttgatgggctgaaaaaagacttgaagacacttccattcacttatagaacaccatttaactccttgtattctgtctgtagggatgcttggaattcgtaccacgtgtcagtcatttagcttttggttgcattcccatgctaaggggatgaaccaccattttattcatgcacaccataggctttttggttcaaatgtccagaggcttgaatccattttgatcccatgctggttcatacactccattcctgaggacattgaaacaagaactcaaaagcataggctcattcaacatagactgattattaaatataaggttagcgttcacctgagaatgaatttccttctgcaattggttagctctactccttggaatt

SEQ ID NO: 125767 - DNA, 365 bp, Zea mays
  Clone ID: MRT4577_4616C.1
catgaacaagatcgcctcttcggctggtcctgctgccaaacaacacgtggttcaggactatttagcgaggcgaaaggtatattccagaagatgcaggactgcagtcacgccctgacttgttctcctacctcacgctgatcagagcatacatagaggctaagctgcacactgaggtagaagaacccatctggacaatgctgaggagcgacacgacaggaagccacctgattcctgcggttttgaaggtgtatatgctggaggccaaagctcgcagtcgatcgcgacgtagtggagcacgctttgatggcggtccgggccacatcgagctggtgccgcatggcgttccggaaggacgagcatggcgt

SEQ ID NO: 125768 - DNA, 276 bp, Zea mays
  Clone ID: MRT4577_46170C.1
ctcaatggaaaccacaaatggcttgaagctagacagggcgattcctataatggttgtacagctgaaaaaggtgtaacctattttatataaggagagattgctatataacaagtacgcgtattgggagattgagatgaatacttacttgagaagcagagatttccaacaaacgcaattagagcctgttgatcttttacgacatattatgtcgcccgggcaaaaaataaaatggctacaattgatatcaacggagatattgaacgctacattgatatt

SEQ ID NO: 125769 - DNA, 341 bp, Zea mays
  unsure (1)..(341): unsure at all n locations
  Clone ID: MRT4577_46171C.1
actagatcgagctctggcggcgacgaggatgcctgttatgcccacggacacacgcaatccaatgttactttatacaggggagcgtgttcaacgggcacctgcatctggacccgagcgggcaatacgtcacggcgtaaaaccaaccatatttcgtatatacgtgtgctggtccagcggcaaccatctggacgtcgagtgcctccgtccaccgatattaggacggtcgcggccgaacctgacgacgtcgtatggagggtgctacgacgtcaatctaggacgacnttggctgcggagagctactacgcacgaggagaaaattgaccatgctgaaattcggaaga

SEQ ID NO: 125770 - DNA, 460 bp, Zea mays
  Clone ID: MRT4577_46172C.1
cccaccccccccggggccccgggggtgacccggggaattcgggccgggccccggaggggagccaactttccctataagggggggcattaaagcctgggggaaacaagggcaaaacgggttcccgggggaaaaaggtattccgtcaaaaatccccacaaaaaaaagcccggagcctaaaagggaaaacccggggggcccaaagagggggccaacccacattaaatggggtgggcccaccggccccttttcaagggggaaaaccggggggcccagtggattaaaaaaaaggccaaacccccgggggaggggggttgggtatttggcccccaggggggttttttttttacccaggggaacgggaaaaactgattggcccttaccccccgggccctgaaaaaagtgcaacaaaggggccccccctggttgcccccacaggggaaaaaaccggttggaggggggt

SEQ ID NO: 125771 - DNA, 590 bp, Zea mays
  Clone ID: MRT4577_46173C.1
gacagacgaattttaagggggattgaaaccaaaatatcatttttgtacatatatcccgaccaccaaaataggagtttttactcggtcggttcagggacaaaagaaatcagaccacggacgtaacacattcgtaagggtttcattttcacaaaatactagtagcatttttttaatcgatgacaattcacgacaccgtttttatgtgacaaacgacaacactcgcattgcaaaaaaacaggcctggtactggtacccaccgtgttttttggtctagtccgaccgggccattttaaaaaacctcaccaaaaaaagcaggaggggaccagatcaaagttcgaataatcggtaggggaaacctgaacgttagcaaagttttagcaatgaatgacgaagtcctgactgattagccacaaacgaccctttcgttaaactactccaagtccaagccagcccatgcgcgctggttttttagccgccgccgccgccgccacaaataagaaacatttccgttggtttcccaccattcgttctcgtttttcctggcaaatagcatagcaccaggtcaaatacggcacattgtgtcattaggc

SEQ ID NO: 125772 - DNA, 705 bp, Zea mays
  Clone ID: MRT4577_46174C.1
gccggccgggcttgcacatagaggtcgccgacctcttgcgccgtttgtcctgctcgcggcatccaagccaattacccactgatctagctatcacccatgcattcgcccaccactggggagggtcgttcgagatcgcctatggcgcagcgaaggactaccacagccgcgacatggacctggaccggggcgcgatctcgctgcgccaggaccacgagatggaggagacccaccagagctgcgtgctgggcacgccggagtgccaacaacaacgacaagcacgtggacctcggctgcatcgtcgtcgaccgcaacatgctctgcggcgacttgtggtgcgacgtcgcccctttcgtcctcatcggcctccccatcatcctcgactggatcatcccggacgagaacacatacccgccgccgacagatcactacacagatgccctgcacaaggcgctcctcttcttcaatgtccagaaatacgtgctcattcataataacaatggcatcaagtggagcgggaactctggcctgtcacacgcgtccgacgccaaggacgtcaaggatgctgctcatcagcgactactaccacgctggctactaaatcaagttccacttcacgatggacttccaccatgacgctgctgaactggtcggtgaatccagtacagggccaagcacaaggccatggggggagtatgaccatgttca

SEQ ID NO: 125773 - DNA, 784 bp, Zea mays
  unsure (1)..(784): unsure at all n locations
  Clone ID: MRT4577_46175C.1
gccggccgggcctggaaaaaaaagtaggcgctcatcgatcggtccgggttcatctggctctgggtggttttttgatttggttagggttttgtttgtactgatatggagaggaactgagaccaactgcggtctgcggcactgcgctcgccgccagcctccctagggtttccttccccgtcgaccatcagcgcctccccagatttggacctaagccctcgcggacgtgcgcgccgctgccaacgtcgatctgctactgacgcaccgcaagggagcatttagctgtagtgagatggatatcctttatcagtgtaaggaggttttgaagatccagaagtttcggcgtatggtgtcatatgctggattctactgcttcacttccctcattacttatgcttacacaagcaatacgacaagggctgggatttcaagggctgaccagtattattcctcctaccctgctggtactgaactactaactgacactgcaaagctttacaaggctgcattgggcaattgttttgaagtagatgaatggggcccaatagagttctccatcatggcaaaacattttgaccggcaagggaaaccaccatatgcctaccatgctcaatatctggcacaccttctctcccatgggcagctcgatggaagcggttaaatgcaggatgtattgttgataactgcatncacgcaactagaatttcactatatcttgtataaaatgttgcctttgctagaacaatgagtcagactgcaccagtttagaagctacagaactggcatc

SEQ ID NO: 125774 - DNA, 702 bp, Zea mays
  Clone ID: MRT4577_46176C.1
cgctcgccgccagcctccctagggtttccttccccgtcgaccatcagcgcctccccagatttggacctaagccctcgcggacgtgcgcgccggccgcctggttgccggtcgaatccgccctccagccgctgccaacgtcgatctgctactgacgcaccgcaagggaggacaagggctgggatttcaagggctgaccagtattattcctcctaccctgctggtactgaactactaactgacactgcaaagctttacaaggctgcattgggcaattgttttgaagtagatgaatggggcccaatagagttctccatcatggcaaaacattttgaccggcaagggaaaccaccatatgcctaccatgctcaatatctggcacaccttctctcccatgggcagctcgatggaagcggttaaatgcaggatgtattgttgataactgcatcaacgcaactagaatttcactatatcttgtataaaaatgttgcctttgctagaacaatgagttcagactgcaccagtttagaagttacagaactggcatcagaaacaagttctgaatttttttggtcattggctggtacgatatcagtgttgaatttgtgcgatcgctcgctgaacaatttctgaaaaaaaaacatgaccttgtcttgttggaacatttacactgtccttttattgttgaataaaccactgaatgtt

SEQ ID NO: 125775 - DNA, 905 bp, Zea mays
  Clone ID: MRT4577_46177C.1
ccggccaggaatccttctgcctcttcctctccccagtgtaggcgctcatcgatcggtccgggttcactgggctctgggtggttttttgatttggttagggttttgtttgtactgatatatggagaggaactgagaccaactgcggtctgcggcactgcgctcgccgccagcctccctagggtttccttccccgtcgaccatcagcgcctccccagatttggacctaagccctcgcggacgtgcgcgccggccgcctggttgccggtcgaatccgccctccagccgctgccaacgtcgatctgctactgacgcaccgcaagggagctccataacttcattacttgttcagttatcctcacttgccggtactcttcgcttgagcttctcataggacaagggctgggatgtcaagggctgaccagtattattcctcctaccctgctggtactgaactactaactgacactgcaaagctttacaaggctgcattgggcaattgttttgaagtagatgaatggggcccaatagagttctccatcatggcaaaacattttgaccggcaagggaaaccaccatatggcctaccatgctcaatatctggcacaccttctctcccatgggcagctcgatggaagcggttaaatgcaggatgtattgttgataactgcatcaacgcaactagaatttcactatatcttgtataaaaatgttgcctttgctagaacaatgagttcagactgcaccagtttagaagttacagaactggcatcagaaacaagttctgaatttttttggtcattggctggtacgatatcagtgttgaatttgtgcgatcgctcgctgaacaatttctgaaaaaaaaacatgaccttgtcttgttggaaaaaaaaaaaaaaaaagcggcc

SEQ ID NO: 125776 - DNA, 1041 bp, Zea mays
  Clone ID: MRT4577_46178C.1
gccggacgctgcttgtcctctgcactttttccctttgccggaagccagagccgtatccttcggcctcttcctctccccagtgtaggcgctcatcgatcggtccgggttcatctggctctgggtggttttttgatttggttagggttttgtttgtactgatatatggagaggaactgagaccaactgcggtctgcggcactgcgctcgccgccagcctccctagggtttccttccccgtcgaccatcagcgcctccccagatttggacctaagccctcgcggacgtgcgcgccggccgcctggttgccggtcgaatccgccctccagccgctgccaacgtcgatctgctactgacgcaccgcaagggagcatttagctgtagtgagatggatatcctttatcagtgtaaggaggttttgaagatccagaagtttcggcgtatggtgtcatatgctggattctactgcttcacttccctcattacttatgcttacacaagcaatacgacaagggctgggatgtcaagggctgaccagtattattcctcctaccctgctggtactgaactactaactgacactgcaaagctttacaaggctgcattgggcaattgttttgaagtagatgaatggggcccaatagagttctccatcatggcaaaacattttgaccggcaagggaaaccaccatatgcctaccatgctcaatatctggcacaccttctctcccatgggcagctcgatggaagcggttaaatgcaggatgtattgttggtaactgcatcaacgcaactagaatttcactatatcttgtataaaaatgttgcctttgctagaacaatgagttcagactgcaccagtttagaagttacagaactggcatcagaaacaagttctgaatttttttggtcattggctggtacgatatcagtgttgaatttgtgcgatcgccgaacaatttctgaaaaaaaaacatgaccttgtcttgttggaacaattacactgtccttttattgttgaataaaccactgaatgttaatgca

SEQ ID NO: 125777 - DNA, 219 bp, Zea mays
  Clone ID: MRT4577_46179C.1
tggggggggtcctcgcaccagggcctgaacgcgcgcagcgcggcggacgcccgaatgcttcccacgcttaccctgctgaagaataacctgacattcctggcgtgcgtgctgacagacccatagcagtccgtggacccgcgaccggtgatgtcaccactccttcgaggcgccacctgatggtgcttctggtggaaggcaacgagacagagatgtgtgcgc

SEQ ID NO: 125778 - DNA, 547 bp, Zea mays
  unsure (1)..(547): unsure at all n locations
  Clone ID: MRT4577_4617C.1
tgggatcaagctctccactcacgaaaataggcggcggttagttagggtttgcccatctgccatccgtccatccgcctgaatcctttccaccatctccgaccaacctttcctccatctctagccgacgacttcgacaatctccggcggcttcttcttctctgaccggcggctggacgcaggtgctagaccaggtgacggccagttcttgctgccacacgacgttgttcttgctgcctagaacaagacctcagttgttgcttccacacaacgtcgttcccactacaagaagacatcattcgtgctgaaagatgttgttcctgcgcatgaacaagaccgcctctttggctgttcctgctgccaaacaacacccagttcagagcatacatagaggctaaactgcacactgaggcagaagaacccatccggaaatgctgaggagcgacacaacaagaagccacctgattctcgcggntctgaaggtgtatatgctggaggccaagcccgcagtcaatcgtgacgtagtgaagcacgctttggtggtggtcct

SEQ ID NO: 125779 - DNA, 214 bp, Zea mays
  Clone ID: MRT4577_46180C.1
agggacccaagattggttgcttttacaacgtgacaacatatttttattatttatgcttggacagggacaatgtctttctagcagtaccagtaacaaggggggtttgcagcagggactataaacaacagagtaccatccgggttgatagattttttattactgtaaaattgaaccccgcagtactaccggtacggacgcgtgggcggacgcatgg

SEQ ID NO: 125780 - DNA, 317 bp, Zea mays
  Clone ID: MRT4577_46181C.1
aaaacaacttgcaaccaatttttgttaaaacaatttgacattgttcaaccaacaaccaattttcaaaacagaaacgtcctgcaattgttcactgttgggggcttaggaactttatggccctggattgggctgatcctgattgaagcttatcagcttgtggggggcatgttttttttatggggtcttttttaaatcctttatttcctcaaaatgttttaccaaagtttttgattccattttcatgttatccaacttttgtggaagttttgccgtttattggttttcattctcaagggaatttaaagattttggacctg

SEQ ID NO: 125781 - DNA, 285 bp, Zea mays
  Clone ID: MRT4577_46182C.1
cacaggaaacacacgagggagttactgaagatggcattgaagatgcctttgaggttcttggtgagattcaggaaattgtgcaaacagggctttgggtaggcgattgcttcatttacacgagttctgtgaacagattacattattatgttggaggagaaatagtcaccattgcccacttggacaggacgatgtatctcctaggctacattcctaaagacaacaggctttatctgggggataaagaattgaacatcattagctattccctgctggtttcagtcctgg

SEQ ID NO: 125782 - DNA, 516 bp, Zea mays
  Clone ID: MRT4577_46183C.1
ggcgggccggaagcgaaaacaatccagggaggaccggaacaggggcccaaaaaatccgggaacaaaactgggggcaggaggggaacaaaaaaggggcccccagttggggggttttaaaaaaggggaggttgaataccccgaaaccccccggggtacctgggggggcaccaccctagggggaaattccaacccacggggggccggttctaggggagccgaactcggaacccagctgggggtaaacagggcaaaagaggcttccggggaaaaagtgtaacccggggaccattccgaacaaaataccacccggaaactgaaaggggcaaaccgggggggcccaaggggggaacccacccacattaatggggttggggaaacggccccctttccaggagaaaaacctggcgggccaggggcattaaagaattgcccaccccccggggagagggggttggggaatggggggcttttccggtttctggttaactaaaggggggggctcgggtgtccgcgggg

SEQ ID NO: 125783 - DNA, 325 bp, Zea mays
  Clone ID: MRT4577_46184C.1
gatagagtaattaccgactgtgttggccagacttttacctaaatatactttcctagagagaggagggcatcagatgagctggaattgactaagggggatacagattagcacacgcctattcttagtacaagctgacgctggtgaggggcaaatggtactcccgtgtttttggacaattgcacaaatctgcaaaaggtgcttataaaaaaaggcgtgtacagtttaccgcggatggacggccttctatggagcctgaaaagggtgaaactctggacataaggcttagagcttcccaaggtgtgtatgtataggcctttgaccatca

SEQ ID NO: 125784 - DNA, 210 bp, Zea mays
  Clone ID: MRT4577_46185C.1
cggtcgacgggatgtgttctgccaaggtggcaggcagaacaactccttactttgccaactcctccggcagggagggcgacaaggagcaccacaccaacgccgccaacaacctgcgaaacatacagtcctccaaaaactgacgcttggcgaacagacaaaactgtaaagatccacccacgtacaaagactcgcgtgagagcctctctacta

SEQ ID NO: 125785 - DNA, 423 bp, Zea mays
  Clone ID: MRT4577_46186C.1
gggcggaccacacccttccgagtacccttggccgtcacccttggccggacttttttcccccctggggcttaaaatcaccccgagggagaaaatattaagggtggccgccaaaagcctaaaaagccgaggccacatttcctgattcctgatggttggcaggttggttagggcttgtattgcgtaaggccgtccgtattggaccttgttaagtggctagggtggttggtgtaactagtagtattattgttgtcaccagacaacgacgccaaacctgaaaaggaaaactgtgctattaactcgtttttaagtctttaataacgaagtttaaggtcccgaacttgcctgaccttggccccttaattggctcttcttcttttttggcctgtactttgcatagcaactttttacaaattttttgggggt

SEQ ID NO: 125786 - DNA, 370 bp, Zea mays
  Clone ID: MRT4577_46187C.1
atgtcgtcacccatccacaatccgtcgcgccctctcctgactgtatatggctcaactgcggggtgggcgtgcagaacctgaagactcggatgaccggttaccgctacgtccagctgtacaaacttatggaggactcagctaccgcggatataatgcctgtccagaactgtcagagatgacgccttcgatcgcatcaggacgcccgtgacctggaggagcgctcaaccccagatctactctctcgcgacgtcgaagaagagatggcgaaggtcaaagattaagtccgcccccacaggtttccaaaaggggccgtcccggtggcggacaagatcttcaaacggcaatgcaccgtacccgagcaggacgactt

SEQ ID NO: 125787 - DNA, 346 bp, Zea mays
  Clone ID: MRT4577_46188C.1
ctgggtcttgggttttttattttttattcatttaataatccacaaaagacccgaacatgcttccaaacaatctcagactacaaaaccttgggtccaccaaagggaacccaacaactttcctacagttcaaagactatgaccaagggaacttggcgctacaccccaacaccttacgccttgagcttaccaaaaaacctcctattcaaaaaggaagcaaaaaaacgaccatacccaaatggggaccatgtggacaacaacataaatcttaatttcctaaccgccaccccgaaacttctattcaagaaagacaggaggacggccaccccccctcttttttggacccccc

SEQ ID NO: 125788 - DNA, 2326 bp, Zea mays
  Clone ID: MRT4577_46189C.1
gggtacctcgaggccggccggtttttttttccctctttccgttgcccttttcccgttccctgccccttcttctccgtctttctccggtcggctttggagaaagaggtgatgtgaggttcccatcactcacgcctggctgggtagctagatgcttcccggtcgtctttattacggctgtcgccgggctgggctgcggtcggcggcggaggggagtcttctggcggagatatgagaggattgttttagtgaggtctatgagctggtaccagaactgctcataatattcagggggaaaaaaaaggcaacatggcggaatcgaaggtcgcaagtctggatgcccgaacgacgaagatcagaaacgtccccatcgcagtgaccccagaagggttctggtgctgcccgtcgcaagccgtgctccagaagacggcgaagagccaaaacccgcaggcgaagacgaagcccagagggggtgcctcgcctctcgcaccaaaggcggcaccaccaatccagagggcgcccacaatctcgtccgagagaaggacgcactcgactccgaccagggcgaaaaccaactcagaggagcagaggtgcttgccgccggcagaggacgctgcggctaataataatgccactaatccgccgaaggcagtgaacgagaggccacagaagcagcacaaggtatctgttgggttcggccagctcgagacgagtgacttgaaggtggtgctgtatggcaaggacggcgttgcggtgaagatgagcgtccacaagaacaccctagctggaaacagtaccttctttgctgacaagctctccgggcagtctccggcgtcgagtatagaagtgactgactgtgaggatgtggagatttatgtcgagacagttgggttgatgtactgcagtgatgtcaagcagaggcttatcaagcaaaccgttcctcgtgttcttcgagtcttgaaggttgcagagctgctgggtttcccagcatgtgtcatgtcatgcttagactacttggaagcggtcccttgggtcggggaagaagaggagaatgtggtctcgtctgtccggaacctgcagagcgagagctatggcgtcagtcctgtgctgaagagggtagcaccatctgatcgaacaaccccaccaaacgatacgttttcacatatcatcgaactggtcttgagaagcagcgaggacagggggcggcgcgagatgaaatctctggtgcagaagcttctgaaggagagtagcactggctgcatgagtgggtcttccgacctgtgttctgcggtcctctacagatcatgccggaactgcctggattccttactaatcctgtttcagcaagcaaccgacagtgatttcgctgagcaggctcttaataccaaagaaccagttttccgacaagttgctctagaagcagataacctgctctggttagctgagatcttggctgacaggaatgccgctgacgagttcgcggtcatatgggctagccaacgtgagctggctgggctgcactctaggttgccagtcaagtcgcgccaccttgtcagctgtgtcacggcgaggctgttcgtgggcatcgggaaaggggagatgcttccttcgaaggacacgaggcggcttctcttggacgtctggttgcagcctctcatggatgactacaactggttgcagcacggctgcaggtcgttcgaccggaaagtggtggaggaaggtgttgggcggaccatcctgacgctccctttggaggatcagcagacgatcctgctctcgtggcttgggagcttcctgaaggttggggacagctgccccaatctccagaaggcctttgaggtttggtggaggagaactttcgtaaggccctatgctgagcagcaaggtaatcgatcgcaatcaggtcggagttgagatgtcaattggttgcagaagaagatagtcttgtttcctagtgtagtatatttgatgagaagttagggtggcggtttcttcttgcgtggtagcccgcgtgggagatccccagtatgtggaggaaatgcggttagtactcttgacctgcgtgaggcttgaggaagttcgcgttgtgcttgtgatgcttcgtatgtatgtcaagatctctgaattctgggtgcagaatttgtatcgtcaggcatctgttttgatgctctgttctgcttctcacaacgttgcacgatgttaattaaggatctgttatgtaaaagaactcgacgccttcaatgcaactgtaaagattttgcagaagtaaagattttaaaaaaaaaaaaaaaaaaaaagtggagacatatcagtttctatttgtgttgta

SEQ ID NO: 125789 - DNA, 566 bp, Zea mays
  unsure (1)..(566): unsure at all n locations
  Clone ID: MRT4577_4618C.1
tcgaggncggccggggcccccgcctcctctcctccgtgtgcatgccccctccaaccgtccgcgaaagctgcacccgcctccgcctaatccgcccacaaaaacaaccccgcgccgagaaagccatcgacacgagcgtgcaccaatcctgccattagcatgcacccgtcttccacctctccatccacggtcgcatcatccacttcattgattaggcggaggacgcaatgtggaaccaccctcaggtcctcaacgcccccacagcccgcagaaccactcctcaaagccaagcagccgccgttcttctcccagcagtggcccagatcccccgccccacgcctcctcgaatcagcctcgatctgccgccatggatgacgacgacgtgttgctcgacgtctccccatcactggctcacctaggcgtccatcctcgaatctctaccccccccccacacctccccgctcgcggaccatcccccactctgacaccctgtacactccacgtcccgccccccccaccccccccacgtcgctctcccacccacctccccccgccacccgccccccccc

SEQ ID NO: 125790 - DNA, 248 bp, Zea mays
  Clone ID: MRT4577_46190C.1
gaaagaatggaaactaacttatttctttgttgttcataacattacaaaactggggggacacccctatccacatagtcccagctgtttgtttatattgggaattaaaggaacaaaagggtgcgcatgagtgatatacattgccccctcgcgcttacttagctgggaataacggcacctgcctataaaaaactcacaggcatttggggaaagggggacatccaggggatttttgtgcacgtacaaacctt

SEQ ID NO: 125791 - DNA, 549 bp, Zea mays
  Clone ID: MRT4577_46191C.1
gggaacaaggccaacctggggtaaaaaatttccgaacgggagaggtgccaccccaacaatacaaacttgttattggcaattccacaaaatttaaacgtcaccccctttaaaacccgggggttgtccccttaggaaaattcgtaaaaaaaaacagttttaaccaaagtccaaaatttgctgctggaaatacattttttcggaaaattacaacgccacatttaccccgggcccctaattttgaaaacccccaaacaacagcttgggttttgttttttcccatagaaaaaaatcggaaagggaatgggtggttacacaaccctgccgcccaattctttaagggtgggtccccgactgggactttgattgtttcctttgccgaacttgttccattaaaagtttcatgtggccatcggcaagcttttgatcaggggcaagtttttccaccctgccctgaatggtgttatttttaccatgggcctgagcaccatttttaaggacagggcggaaaatattctttggggattcatgctggtaaatgctttgaccagc

SEQ ID NO: 125792 - DNA, 333 bp, Zea mays
  Clone ID: MRT4577_46192C.1
agcgggggctggagcactcagcactggggagggatcgcagcgccgcggcgagatattgagcagcagcctgtcctccgggatctctggctcacgggctgcaggggccagcaccgctctggacccccatgacgcagcgccgcagcagctgacgagggtgaaggcggcggcgcggggacggctgctgcacgccggccgccggcgttcgagtgtccggaggatgccgggcggcggcgccgtggtggtgagggccgggcctgggccactgtcgcggatcgagccgggcctggaggacgacgccatcgacgtgtaccgcatcaacggcatcaacccgga

SEQ ID NO: 125793 - DNA, 269 bp, Zea mays
  Clone ID: MRT4577_46193C.1
tcgctcacgcgtacgtgagagggtgcggagagaatatgcgcgcgacaatcccaaccctggcgctgctggtgactccgaggctccccgggctcgccgtgccgctggctggaggccgcctccgcgtgggcggtcgtcctcggacccgcctccgcgtggcggcgccgacgtccgtcccaggggaagcggcggatcacgcagagccaagcacgtctgcgcccgagtacggcgagaagttctcgcggagggatcactggtacccggtctccctc

SEQ ID NO: 125794 - DNA, 500 bp, Zea mays
  Clone ID: MRT4577_46194C.1
cagatgacggggaggacaaggaagccgacgatggcgaggagcggccccgctgcgcccacgctgtcctcgatgccgaacgggcccgccggagacctcgtagaagatgaggaaaacgagcgggactatggacaccttgcggagcgcggccggcaccgtccccgcgtcctcgccattggcgtcgggcaggcccctgtactccgtgctgcattcgcccattggaggggtaacgtctgccggtgcggcgtgcttctcttgttgtccggtgccggagccagcgtcggcgggcagccatggcgtcgctgtcgagtcctggcggtcctggagcacggccagcggcacctccgaccgcgcgtcgcccatgtcctcaactccggaggacgatgcttcttgctctcgcgagagcaacgccgtgcggtgcggccggacgtgatgtccaagtactggagcagagagattgggagccgaagaggccccggcccggccaaacctcggagggtacc

SEQ ID NO: 125795 - DNA, 411 bp, Zea mays
  Clone ID: MRT4577_46195C.1
attcccaacaccaaattttggtttcaggggaacagaaaacgggtttatgacccaacaagcatcgcatttgcgggggtgttaactggttacaagctaaagggctggatcgataatcggacagggggggggccgctcgccgctggggcctactttttggcacccgccttattgttgggggccggggggggcccggggcccccggccggtgcctggtgcgcctttttcgccgccttttcctccagggcttttttggccctttaacggggctgttccggggggagcccgtcctggggccccttggcgggggggttccgggccggcgggcgctcaaaaaagggggcaccccgggtgccccgaggaatgtcccctggcaaactcaccctgacccgggttaccgggcgcgcccccccc

SEQ ID NO: 125796 - DNA, 2257 bp, Zea mays
  Clone ID: MRT4577_46196C.1
gtttttaaatccctgttaatcaagctgaacacataacacagcaggtatccgtcctgccttgttgcagtacaactcaaggtcgcagtcatccggagacagtcacctgaacaccatcctaacctttttccttttttccagtttgcgtcgcgaatgccaaatctgtgtcggcttctacggtgtcactggctcctccgccgaggcggatgactggcccacgccgatgtccggcaggtccgtattgacggcgaaccggagcaaccccttcgtctcaacaaacctcagggccggctgcagcacgagcccgatggccactgcgccgaggctcaccagcgccaccttgagcgtcgacagcgccagtaccacgacgatcagcgccgtgggcggcaccagcatcgccacgcacccggcggtcccgagcgggacacggtacggccgcggcgcgtcgggccggcgcacgcgcagcagcacgaaggcaatgaactcgagcagcatgccgaagcagtagaggaagttctcggcggccacgatctcctcgaagctcagcgaggagagcagaaggacgcccgacgccgagaagaggatgcccaccagcggcgtcccgtgccgcgaccgccgcgcgaagaaggccggcagcatgccccgctccgccatgcccagcagctggtacgagtcgctgctcatctccgccacgaacatgcccatgtttgacagcgccgccgccgcctgcacccaccacatgagccaggccccgccgaggagcttcgcgaggtccgagaagtagccgtcgctccactggcccctgtccagcggcaccgcgccggtcccggccaggagagggtacaggtaccccaccaccacgaagatgaccgcgtagaagagcgccttgggcagcgtcttgccggggttgtccacctcgccggacagcgtgctgatggagtcccagtagttgaggttccagaacagcgtgttgaggtacaggttccagtcgacgttgtggaggtcgaccaccagccacctggccggccgcagcctgggcagcgagatgagccccatgacgaagaaaggaaggatggagaacaccccgaggcatatggcgacccagccgacgacggtgagccccctgtagttgagcagcgtcaggaccgccgtgagtccgagcaccgcgaacgccctcggcgggccgccgcccagggcaggcacggcggacttgaggtagtccaggaagaggacggggtacagggcattgtcgatgacgccactgagccacttcacccacccttgctggaatccccagtaggggccgagcgccgaggcgacccacatgacgtacccgccgttctccgggaacatggtgcccagctccgcggtaatcagcgcctccgggatgctccagatgacggggaggacaaggaagccgacgatggcgaggagcggccccgctgcgcccacgctgtcctcgatgccgaacggcccgccggagacctcgtagaagatgaggaaaacgagcgggactatggacaccttgcggagcgcggccggcaccgtccccgcgtcctcgccattggcgtcgggcaggcccctgtactccgtgctgcattcgcccattggaggggtaacgtctgccggtgcggcgtgcttctattcgaagtgtagtatacttggatgacttcatggtctgttggagctgttttttattagttgagccctcttgttgtccggtgccggagccagcgtcggcgggcagccatggcgtcgctgtcgagtcctggcggtcctggagcacggccagcggcacctccgaccgcgcgtcgcccatgtcctcaactccggaggacgatgcttcttgctctcgcgagagcaacgccgtgcggtgcggccggacgtgatgtccaagtactggagcagagagattgggagccgaagaggcaacaggtcactttcctcgcgatccccgcgtcaagcgcggcccaaaacctgagggcagccttgcacgtcttgatcttttcccctcattttgcaaaacacgcaagcggtacgctgctcatcgcgtctgccgattgaagagaaaacaaaatgctcagtacacggcggtggcgacaaagcagctatggcgcactctgctagacgcggcagcaatcggggaaaatgatcttctttcccgggagcaatcggacatgcggctcacgtggccagtgaaattttctgtattttgcctgtcactgcttcggcggtatcctatttatatatattattttat

SEQ ID NO: 125797 - DNA, 408 bp, Zea mays
  Clone ID: MRT4577_46197C.1
gtagaagtggccatcgcatggcatgacacacaactttgtccatcccttttactctggcatccagcctctgtgacctggacgagctaccggcgcgtggagcccagaaagaacggagtgtcattctcttacgccactgtgaccgccctcaaccccccccaaagccaatgaaaggcggtttagtcgcttcctacctcacttggtgatcgttctctctttccggttgatggttggcgctgtttatttttagcattaaaaaacatggataaatcggttggactaccagactaggctaaaccttgccttagtttaatggattgctggggatgttagttaatgtgaccgatttatgggacggattcgaacctagactgcacactgcagtgcagtccaggctgacccatttatctt

SEQ ID NO: 125798 - DNA, 318 bp, Zea mays
  Clone ID: MRT4577_46198C.1
gtgggggttgagcttgggacggagggcggtgagaaacaaaaagcagcgtacgcttgtcgtagtgggtgaccccgaaccgatcgatcatgcatgctaccggacctagctagtaatccctgcggcgggaaaatatataggacgaacccctttttaaataaaacggccgggacgggaaaaaactggccgggggcaaagagctttgggatattctttcttagatcgttaaacggggacgggggggagaacacaaaggggagggtccctattagggtcacagggcccttttattaatattatatccttacgcggttttttttt

SEQ ID NO: 125799 - DNA, 315 bp, Zea mays
  Clone ID: MRT4577_46199C.1
ggtgaggtaatcctttgttagtattgatctctttttgctcaaacccaaaaaacagcaaccagaaagaccgcgggcctaacaaagcccaacggaaaaacgacaggaggggaaaacaaacacagtaaaacagaaaccaggaacgctagaacacggaccaaaagcacccggagggagaggtcggggaagccagacgaacgaccgccggaaacgagcgccgacagataccggaacccgtccagaggcgcaccaaccatggggggcccaaggaagaagggcccaaggaagagggccgccccataaggggggcacccgaca

SEQ ID NO: 125800 - DNA, 630 bp, Zea mays
  Clone ID: MRT4577_4619C.1
atggccttctgctggaggggcttggcctccagccactacccgtggagtcctgcttcatcttttaggcgaccatcatcgcctacctcagcgggatgtccgtggaggcgacgctccttaccgcttcttcctccagcattcggggggaaggatgatcaccagcctcgtgaaggtgggcagcaggctgagccacgactccatccctcgcacccccaactctttggagtgggaagcgagccgtgctgcggctccatctctttggctttgatggctttggtgccgcctccgacgctgccacccaccgccaagcggggcgtggctgtccgtccaccgcacgagcgatggtcgcgccgtgcgcaggtccgccacatccgtggcgtcccctacgctgccggcctcactgctccgacgcggcctgaggggtcgtacaagacgtcgtacgccgtgggggtggcgggcgcgttcttggatggtcttgtcctcacccccgtaggaggacgggggcgaggacctcttcgcacgcgctgtggtggtcgccgttgccggcaagccaccggtgcaaaggtgtccgccgtcactggcgagccattggtgaagaggtggccgcttccgcaggcgagccgctcggagtag

SEQ ID NO: 125801 - DNA, 339 bp, Zea mays
  unsure (1)..(339): unsure at all n locations
  Clone ID: MRT4577_461C.1
ccgggttcgacccaacgcgtccgctgtgttaccattgtacatgntcgagttttgtataaattataaatattgctttctaaaaaaaaaaaaaaaaaaaaaaaaaaaaaaaaaaaaaaaaaaaaaaaaaaaaaaaaaaaaaaaaaaaaaaaaaaaaaaaaaaaaaaaaaaaaagaaaaaaaatattaaaaacgtcaaacctaaaaccaattggcgggagcgtcgtttaaccacgtcttcgactggctaacccctggtgtgccccgtcttaccctccttgccctctcctccccctttccccgtttggccttttcgcgttgagcccttttccgctttgccctt

SEQ ID NO: 125802 - DNA, 658 bp, Zea mays
  Clone ID: MRT4577_46200C.1
gggatctctcgcccacgtgtcccttgcccctgtccagctgtcccctccggagcctgcaaagaactccccacccagctatcaactatcatttccggcgctgaaaaggagagtgacactcaacactgcagaaatcagattcggagcttcgggggaaaaaggcaggcacagtatcgtcgaacatgctgccaggtcgccacccggcgcgccgggccgacaccaccgggacggggccgctcctgccggacgccactcgcgcggtggtggcggagttcgtcgccacagccatgttcgtgttcgccgccgaaggctccgtctacggcctctgtacgcgcgcgcgaaaacctgagcacacatccaaacaaaacaccttcaggattcacatgcacgcagcgcatgcattcggtgctgttctgaactgcggtgcttgaagatcttttcgttcgtctgattaattttgcagggaagctgtacaaggacacggcaacgccgggcggcctgctcgcggtggccatcgcgcacacgctggcgctggtggccgcggtggcggtagcgagcaacgcgtcgggtgggcacgtcaaccctgcggtcacgttcggccctgctcgtgggacgccgcatctccttcgggcgtgccgcggtatactggctcgcgcaaatg

SEQ ID NO: 125803 - DNA, 1438 bp, Zea mays
  Clone ID: MRT4577_46201C.1
acggatcatttccggcgcagaaaaggagggacactcaacactgcagaaatcagattcggagcttcggggggaaaaggcaggcacagtatcgtcgaccatgctgccaggtcgccacccggcgcgccgggccgacgccaccgggacggggccgctcctgccggacgccactcgcgcggtggtggcggagttcgtcgccacagccatgttcgtgttcgccgccgaaggctccgtctacggcctctggaagctgtacaaggacacggcaacgccgggcggcctgctcgcggtggccatcgcgcacacgctggcgctggtggccgcggtggcggtagcgagcaacgcgtcgggtgggcacgtcaaccctgcggtcacgttcggcctgctcgtgggccgtcgcatctctttcggccgtgccgcggtatactggctcgcgcagatgctcggcgccgtggtcgcgtcgttgctgctaacgctcgtctccggcggcacgcgtcccgtgggcttcgggctcgtccgcggcgtccacgagcggcacgcgctcctgctagaggccgtcatgacgttcgggctcatgtacgccgtgtacgccaccgcggtggatcaccggagccggggcggcgcggtcgcgatcgcgcccctcgccatcggcttcgtcctgggcgcgaacatcctcgccggcggcccgttcgacggcgccgcgatgaacccggcgcgggcgttcgggcccgcgctcgtcggctggagctggcgccaccactgggtctactgggtcgggccactgatcggcgccgggctggctggcggcttgtacgagtttgtcatggttgagcaggagcccgaggcgccgctagctgcagttcctcggatgccagtggcctctgaggactactgatgtaggtgtacatgtattgtatccctaccgtttgtattttcactgtgtatcgtatgggtgtaccgtgtatctaggagacaaggaccgagcttggcatctgctttagaggcacgtcatagactttttggatattcccaagaacccttactactagatcaaaataaacacagacatgaatcgatttctgcgcatccacaactgaggcacacacacctgagcaccgccatggccacctcaggagtgtgaagatccgtggtttcagctctgcgaaaagcttaacatgttatattcttaagaatgcagtgtcactggaatttcttacactggacacctcttaggttatgttttgatattctagtatttacaccaggactggggtgtatattacacatgtgtattggagtgaatactagaatatgtttattggggtgaatactagagtatctaaacaagcacttataagaatcagtttagtcaaagtttgtacaaggtgtttccccagagctttggaaaggagtcgaagcctacgatgttttcaagatacag

SEQ ID NO: 125804 - DNA, 1145 bp, Zea mays
  Clone ID: MRT4577_46202C.1
gataatcaaaagatgcatatactttatgaaataaccaaaatacctggccagctaattgaagttgcatgcaacatgcatgggacacgtgtggtgcaaaaggtgatagaatctattagtacctcagatgaagtgtccatggttgtatctgctctgagccacggtgccattacactgatgatggattccaatggctgccatgttgcagaacgttgcttgctgaagctgtcacctgagggcaaagcattccttgtcaacgcggccacgaaatactgcgttgagctagcaaaggatcggcaaggctgctgtatcatccagaaatgcatcgctcatgcgagcaaggagcagaggaacaggttactgtacagcatcacaactcgggctctcgagctcgcagaagatgagtacgggaactacgtgatacagttcgtgctcgggctcggggttgcctgggcaacgaatgaggtactggacaagcttgagggcagctatgggtacctgtcgacgcagaagtgcagcagcaacgtggtcgagaagtgcctgagagaagcgccggagcgagaacgcgcgaggatcatccttgagctcatccacgaccccaggctgcttaacgtcctggttgataagtatgggaattatgtgatccagactgcactccgggagtctgagggtactgcggtggaggctgcattggtccgagccatcaagccacacgccggcgctcttcggaacaacatgtatgggaagagggtcctgtcgaaagcctgcctgaagagcaggaagccctgatcccaacaatcccatggccgtcctgatcgcgctcaagtgtagtacaaatcctgtaataaggtagtgttatctaggaatggggagggggaggaggaggaggagagtaggtctggggtctggttggaggaggaatccacattttgggccagtgtagaacgatcccatgcgtgttgtagctgtagagttcttgggagagttcgttgcaaataagtaagcgttgtgtcgttgctacgattagtaatacgtccgtcagacgatgctctgtatcttctttacattttctttacagcagtaaaatttccattttctggtaaaaaaaaaaaaaaaaaaaaaaaaaaaaaaaaaaaaaaaaaaacaca

SEQ ID NO: 125805 - DNA, 1043 bp, Zea mays
  Clone ID: MRT4577_46203C.1
cctcgaggccggccgggaccgctcgtctcccttgtcctccggtcccggacctctgcgccgcaccgcgcacggcgacagcatcgacctcgccccggtcccgtgtcgcttcgtagttcgtccccttccccgcgcccccagcagcagcggattcccctcgagagatccggcccttggcgcggtcgccggagagagcggcatggggctctgggactcgctcctcaactggctccggagcttgtttttcaagcaagaaatggagctctccctcgttgggttgcagaatgctgggaagacgtcgctggtcaatgctgttgctacaggtggctacagtgaggacatgattccaacggtaggcttcaatatgcggaaagtcaccaagggaaatgtcacgattaagctttgggatcttggtgggcagcggagattccgcactatgtgggagcgctattgccgtggagtttctgctattctgtatgttgtggacgctgctgaccgagatagtgtcccaatcgcgaaaagtgagttgcatgatctgctgacgaaacagtctttggctgggattcccttgcttgtccttggcaacaaaattgacaagtcagaagcgctttcgaagcaggccttggttgatcaacttggactggaattgataaaggaccgggaggtttgttgctacatgatctcgtgtaaggattctgtgaacatagacgtcgtcatcgactggcttatcaagcactctagaacagcgaagtaggctttctgtgtgtttgtatcgcttgatgcacggtgttttatcttttgtgaatctgcgcttcccagaagcctggttccttggtccccatgttaaaagcggccaccttgtaatttatggtttctttggtgtcacagacgaactgcatggtatctagactagaaacatgtattccctttgtaaatcctttgaacctttgattattcttactgtgaatcccgtccagtgttttatactgctttaaaaaaaaaaaaaaaaaaaaagccaaaaaaaaaaaaaaaaaaaaaactcgtgc

SEQ ID NO: 125806 - DNA, 385 bp, Zea mays
  unsure (1)..(385): unsure at all n locations
  Clone ID: MRT4577_46204C.1
cagagacgaccgggcgcgccccaccngggcgccggccaagggcggcaacgagcaggggggcancccgcanccnncggcccccncccagaagnnncnccncccgcgaccccgccgcgccacaccggccggggggcaagaaaagacggncaacagacccaagaagagnnacagaagaggaancccagggaggaacccgaggaacgngagcgcaagcacnacnccnccaagganaagncccangccgaagaaagagaccggcggaaaagccccagccanccacccnnagaaggggcaaagagagagacagagganaagaaaggnccacgagaaaacgaggccgangacaccgaggnggagcccaaaagcgangacgagagcgangaag

SEQ ID NO: 125807 - DNA, 203 bp, Zea mays
  Clone ID: MRT4577_46205C.1
aatggggcgggccgcttttgagaacaaaaaaacttccaaaacttacatgtataggacggatgggcggggccaacaaggggaacaacgggggggccaacccccaatacaaaggtggaacggacccttacacggcgtcaaaagcgaccggtaacccggacctttagtttgataaaatccccaacccgaagccaagatgggcccac

SEQ ID NO: 125808 - DNA, 296 bp, Zea mays
  Clone ID: MRT4577_46206C.1
ccctatttatttcttcttgcatcccccaaaaggtgctgttcctcactttttagtgccaacaactaacactttcaacaattgaaggacccgatcaccaactctccccttaaccaacccttttccccacaaaaattttcacataatttcaaacccaaacacctctttactttttcccttacccccttccaaacaaattcactttttctatttataaaatcccacctaaatttcccctaaaaaaaaacatatatcccttttacccctttaatttttaaaaaaaaaaaaaaatttcccct

SEQ ID NO: 125809 - DNA, 424 bp, Zea mays
  Clone ID: MRT4577_46207C.1
aagctggcacgcctgcaggcaccgctgccgtgaattccggtgatcgacaccacgcgtgttcccatcatgttatcacacccgtgggaagaggattatttacattgcagaggtcgctcgttgctcttaacacacaccttgctttaaacacacacgtggcggagcatgcggcctctgtagcctgcatcgttatgacatgcaacctataccatggtatggaccggatgtcgaccatgaccttcacggctgacttccctcatgtctagaggtatttgcggaccatggtttaccagactaacttcaaaaaggtgattgttgaggtgaaccacggagacgccgcaccttatatttcgaaagaggctgcttcttctaaggagccaaaggcaaaagccgtgctgaacgacgcctcaaaggaggcccccaagcc

SEQ ID NO: 125810 - DNA, 633 bp, Zea mays
  Clone ID: MRT4577_46208C.1
ccggccgggaattacatcttttccttctctcttgattatacggatttcctcccccccaaacatgcgtctctcatacgtgcccgatcccccgaatttcacgtcggaagaggataaagcggtggagcagcgggtgagggagaggcggggtgagaaggggttgatagcgttggatcggacgttgctgcattctccgccagtggctgatggatggaactcattcctgggctccatccgcacaaagaccagtctccccactgcgatccgtgaaacggctatctgccgggtcgcggttctgaaccgagcatggtatgagtgggaatcgcactctcctattctctcatctgcatcagacgttaccccacaacaagtggaggcagtcctgaaatctccacctcgttcacccttggtagatgtcttgggcacttctctctctacactactagcttacacagacgccatgacgctggatgtccaagttcctgatgctatattcgcggaactcaaaaaatcattcagtgagcgcgaggtcgttgagataacagccacaatctcagcgtacaactgcgggagccgttttctcgttgcgctagatgttggagagaggaacgcgcacacaggacccaaggaaggcgg

SEQ ID NO: 125811 - DNA, 494 bp, Zea mays
  Clone ID: MRT4577_46209C.1
ggagagacgaagcagggagaatcttcgccttcgttgctgcattacttttaaaactcgaattggttgtaatcagtcgtgccaccagatgcacgacacgaccatacaaaagaagaaaaagagcaagatccgtcgatactccctttctctccctagccttttcttaattcttcctattctttcttctggaggccggtgccggccggtcgtcttcaacctttgttgcacatatgtggtgcacgctcagccagctgctctgagaagaggtcgactgatctgtgctgaaacacatcttaactgtctaagtaatgcaagctgcctgacttgtcacctggcagtctaccttaagcaactcgtgctcaatctcctgcggtgctgcctaaaacaactatctgcagtgctccgtctgcttgagatcgtctcatcattctgcctcgcaaaaaaaatcgcagctgaatcaacgacgaggacggcgggcgggcggctggctagctctc

SEQ ID NO: 125812 - DNA, 555 bp, Zea mays
  unsure (1)..(555): unsure at all n locations
  Clone ID: MRT4577_4620C.1
ngaaaccatgtaaaatatagtatattttaaataaaaataaagctcgacgtcgtcgtcacctctctcgccgtccacgagtcacggcgagcggcgtcgacggcgggcgggggtcctggccgttcaccaccatgcctgatcccaccaccaaacccccttcgccgcgcccccggcggaaccgcatagtctgcagcgctctgactcgcgaccgccctcctcgcgctacgcgtagacaggctcgtcgacgaatgcggcacgcttccaggaaccgcttccgcatgagcgctattagtccacaattttgaagataagtgactcgtcggcaggaggcaaggtgttcctaccggccaaagacgtatcacggtgtgtggctctcatgaccgtgatgcgcgtgtccacatacctctgatacttcaccagcagaacggtgacgatacacagagtgcttcaagaagatgatccatcttgggacatataagaatgggtgagatagctgagactcagcttgagagaacgatgaacaacggtgcgaggacagaccgtggctagttcatgact

SEQ ID NO: 125813 - DNA, 184 bp, Zea mays
  Clone ID: MRT4577_46210C.1
tggccgtctattcaactcgtcgacctagaagatgactcgctactgtggcctctggtcgtaccacttctgcttctagtgcgtcatcttctagcttggcgtcatcatgattatacctgacacgtgtgagcagttgagatccgctcactattctatactacatacgagcataccatctaaggggtac

SEQ ID NO: 125814 - DNA, 608 bp, Zea mays
  unsure (1)..(608): unsure at all n locations
  Clone ID: MRT4577_46211C.1
gggatcccctggttatgtggttttaaccacggcaagtgaaccattaactattatgctgtactatatccaaagcaggaaagacgtattagcttttctctataaaagcagcttgttctttatctttccctttaacacctattggccagagaagtacccaggaaaacttcttaaaatgagaattaaatccattattctttacccacttgcattcaccaaataagccaaaaggaaaaatgcatctggaatacataatttctcttactctcaaagtgctaaaacttcaatgtgaccaagaaccaaaggacaaaatgttggggggggggggnngggggactatgaattcaaattagagtccatcctgcaagtacaaaaggtaatgatattgctcttttcttcactggctgattgaagcttggccttggccgccatcatgaatgatacagtaactactgggaccagaaagttcataaccaatggactacttcagctgaaacaaaatggtcactgatgttcttcatcccagaaaggcaagagtaccttagacagaaatttggtaaacactagccaaaatgtacaagaccacaacagaggtcattttgcatttgaat

SEQ ID NO: 125815 - DNA, 1757 bp, Zea mays
  Clone ID: MRT4577_46212C.1
gcaatgtgtaaaatgtactctgttacccccaactgtattggttgtccaatttgtgattggggacctcgaggccggccggggcaaaaaccttgttgttgttgttcttctatttcttagtatcatagcacagtatttcgtgctctcgcttcgctcccttaatttatcaccattcctaatttattctatttcttagtatcatagcacagtatttcgctcgccccgatttcccgactcttcccgtgcctcagacagcatcggattgcttgatctcgattgtcagaataagattcagcgcaggtttggattcaccgaatccaccgattgcttgcgccccgcggtcgcgcgcggcggaatttcggccgccgccaattcgggcctctccggaagggtgtccccggtgtggttcgcctaatatccgctgccctcgtgcgggactcctcgtgattttcggctgtgcgcttggcttttccagtcccgtgttgtggttccagcctttcaggggatggggcgccgcgggttgctcaaggctgcgcttctgctgtgcttccttgctgcttgctccgggagagaacttacgatcaaacagaacccttccactaccatatacaactcgactcttgccaagatactcgtggaatatgcttctgcaatctatactgccgatttgacgcaattgtttacttggacatgtgccagatgcggtgacttgatcgaggggttcgagatgatagagatcattgtggatgtcgagaactgcttgcaggcatattttggttttgccagtgacataaacgcagtcgttgttgtttttagaggaactcaagagaacagcatccagaattggatagaggacttgttatggaaacaacttgatcttgactaccctggcatgcctgaagcaatggttcaccgagggttttattctgcatatcacaacacgacactacgtgatggagtagtcagtggtattcagagaactaggaaagcttacggagacattccaatcatgatcacgggtcattcaatgggtggagctatggcttcattctgtgcgctcgatcttgttgttaactacggactggatggcgtaaacctgatgacgtttgggcagcctcgtattggcaatgctgcatttgcttcttatttcaagacatacttgcctcaagcgatccgagttactcatgcccacgatatcgtgcctcacctgccaccatacttctcattcttcccacagaagacctaccatcacttcccaagagaggtatggatccataatattggactaggaaccctagtgtaccccgtagaaaagatctgtgacgattctggtgaagaccctacatgctgcagatcagtaagtggaagtagcgtgcgagaccatatatactatcttggcgtcagcatgcatgcagaagactggagcagctgcagaatcgtcatggactacagcaaattgcagtatcagatggacctcaacggtaatctcgtattgtcgaagcagcccggtttgtcaaacgccagaggattcagtgctcagtgaaccagtctatgatttgtacagtataatagcttcacgaatcagtaatgttcaattgttaatggatcaaaggagaagggttggaaccagcatgccgattcggagatgcttattgtacatgtgattacgtaatgtattgttcagtttgcaaatatatattcacacacgccgatatttgacaaaaaaaaaaaaaaaaaggcggccgctcgcgatcaagaac

SEQ ID NO: 125816 - DNA, 1209 bp, Zea mays
  Clone ID: MRT4577_46213C.1
aggccggccgggccaggaggcaagctgagcggaaccttgttgttgttgttcttcctcctccgcctacataaacatcaccactgatcgcggtttcgtgctctcgcttcgctcccttaatttatcaccattcctaatttattctatttcttagtatcatagcacagtatttcgctcgccctgatttcccgacccttcccgtgcctcagacagcatcggattgcttggtctcgattgtcagaataagattcagcgcaggtttggattcaccgaatccactgattgcttgcgccacgcggtcgcgcgcggcgggatttcggccgccgccaattcgggtgtggttcgcctaatctccgctgccctcgtgcgggactcctcgtgattttcggctgtgcgcttggctttccacttttccagtcccgtgttgtggttccagcctttcaggggatggggcgccgcgggttgctcaaggctgcgcttctgctgtgcttccttgctgcttgctccgggagagaacttacgatcaaacagaacccttccactaccatatacaactcgactcttgccaagatactcgtggaatatgcttctgcaatctatactgccgatttgacacaattgtttacttggacatgtgccagatgcggtgacttgatcgaggggttcgagatgatagagatcattgtggatgtggagaactgcttgcaggcatattttggttttgccagtgacataaacgcagtcgtcgttgtttttagaggaactcaagagaacagcatccagaattggatagaggacttgttatggaaacaacttgatctcgactaccctggcatgcctgaagccatggttcaccgtggtttttattctgcatatcacaacacgacactacgtgatggagtagtcagtggtattcagagaactaggaaagcttacggagacattccaatcatgatcacgggtcattcaatgggtggagctatggcttcattctgtgcgctcgatcttgttgttaactacggactggatggcgtaaacctgatgacgtttgggcagcctcgtattggcaatgctgcatttgcttcttatttcaagacatacttgcctcaagcgatccgagttactcatgcccacgatatcgtgcctcacctgccaccatacttctcattcttcccacagaagacctaccatcacttcccaagagaggtatgg

SEQ ID NO: 125817 - DNA, 284 bp, Zea mays
  Clone ID: MRT4577_46214C.1
gtggtgtgttgtttttttttttttttttttttttttttttttttttttttttttttggcagaactttgatcatcgccgggtaaaatttccgggtggttcgttttacctttccactggcaaatttttacccaatggggccctgaaaaatgggggggggggggggaggtttttttttgggaaaaacaagggcctggtttttgggtggtcaaagcttggtcgaatcccacggggattttgctttgcttggggtggggtttcttttccgtttcatgtgtttgcttggt

SEQ ID NO: 125818 - DNA, 273 bp, Zea mays
  Clone ID: MRT4577_46215C.1
tttagaggtttttatcagttatgggtttattttacagtgagcatagggcgtgggagacagaaatgtagtgaacacggtggaacaacgcccaccgacaacgaacacgagcctatttgcatatctcacggaccggtggcctacataagtactatgggctagcactgaccaccggagggatgggatcatactcatgccttccaacatgggttctcgacggtcctaaatgggatgtacacccacgatacgtacatgacctttggggccttaacttat

SEQ ID NO: 125819 - DNA, 386 bp, Zea mays
  Clone ID: MRT4577_46216C.1
gcttctcaccttcttctcgatctagatagctacattcctctacatagctagttaccttctttctggaatatcgacatcgacgcttgtctcaccgggttgaccacgcgccatatggatttgatgatagtgccaaaagtgccgtagctgcttcgctgatcgtgcatgctgactatctgcagctgacttgcttcccgaagcgaccggttagaattctcatacgacattaccagagagatgccgattgtcgctgaacgcgagcaccaagcctgccggtagaggaaaagtggctgactacgctacactacacttgggtgatgctgatgccaccagctgcggctgccggagcactctggactgcccgtgcgcgacgagttgaacttgttagt

SEQ ID NO: 125820 - DNA, 2361 bp, Zea mays
  Clone ID: MRT4577_46217C.1
atgcgggcgttgtccggccgccgcgctgggacgctgccgtcgccgccgcgcagtggggaagaccggatcaccggaagaggcggaggaatcgcgcagtgggtagaagaggcagaggaatcgcgcagaggaatcgcgtggtggggaagaggaagaggaatcgcgcagtggggaagactggaagaggaagagcgcagtggggaagagaaatcgcgcagtggaggaggtcgcgccgtcgcggtgcagtggaggagtcgcgcactcgcgctcgcagtggaggagtcgcgcattcgcgctcgcagtggaggagatccgtcggtccgtccaaggtcgcaggaagctgagggcagtacagcaccacaacccaactcaaacctcaacgtagacatggttttcggttcttcaagcaaaagaaagcgtgcggatgaaaaagaagatgatgatgtgcaagtcgtccatgaggtgcctgtagatatccaagatggtggtgcagacgcagacagtggtgacgaagatggagctgcggctactggtacgaaacatccacttctagatgaaattaatattattggtgttccgagtggaaaaaatgttggtggaacaaaggagtggcagtgtaaacattgcaagaaatcgtacaaaggaagtttaactagagttcgtgttcatttgcttggtccattacctggtaaaaaagcacaaattgcacgttgtatgtcattgcaaaacgatcccaacaagagcaaagctttgcgggaaaaggtgaaagaagctgatagtaaaggatttcatatgagatcaacatcagggacgaccactccgaatccgttgacaaaatcgtttggagtagcccaaagggagtctgtcgatatggaaattaccaaatttttatgtgccaacggtattccattcaatgtgttgaggagccctcaattttcacaaatgataatggcaataaaaaatggtccaaaagattataaaggtccgtcgagtgaaaaggcaaggacaactctcctagatgcatgcaagagaagtgtggagaccgacttagcaccacttaaaagtacatgtcgaggttcatgtttcttatatgcagaagatttctctggagttgaaaaaaccggtgaagctattgcacaatatctcttgaaggctattgatgaaattggaccaggaaatgtccttcaagtggtaacggacaatgctgctaattgcaaagcagctggaaaagaaattgaaaaagtgcataagcacattttttgggccccatgcgttgttcacacgctaaaccttatattcaaggattttgctgtgaaatttccatggatgcttgacacatataagactggaaaagcaattgtcaagttttttcagaatcattgccattgtttggcaatgtttagaaccaactctcgtttggacctacttaaggtgaaaaaaactcgatttgcttcacattacatattgcttcaaagactcataacatgtagagaagcacttgccaccacagtagtcacaaggcagtggaaagattgggtaaatacttgcactaatgatgtgaagcaccaagcaagggtcattgtcctaacaataaatgatgacagcttttggatggaggctgaaaatataattgctatcacagagccaatatactccgtattaaggtttagtgatggagaaggtccaaagatgggagaaatctacgagagaatggattgcatggttggtgaaataaaagatataatgacaaaagatgataacccgcataaagatgattttgttgaggttgaaagtatcgttatgcgccgttgggagaagatgaatcttccccttcattgcttagcatatgccttatgcccaaaattttatcatcaacaatacctcaacaccccagctcctggtggcaccataaggcaagctcctaatacagataaggaggttatgactaatgtgcttgaagcttttagtaaaattgcagattctccaagggaacaacaagttttgagggagcaatttaatgcttttattatgaagaagggaatgtttgcgctgccacccgttcaattggatgcatttaccatggagccgattgaatggtgggtaagttatggttctgagactccagatttagctgaggttgcaaaaaaagttttatctcaacccatcagcagttcatcggccgagagaatttggagcacattcagccatatccataacaccaagcgcaataggatgaacactaccactgcagataaattagtcttcattcactccaatttgcgacttttgtcaagatcaacagatggctacaaacatggcgcacatgctaaatgggacattgatccagaagactcttctatctaa

SEQ ID NO: 125821 - DNA, 146 bp, Zea mays
  Clone ID: MRT4577_46218C.1
acccggttcggcgaacggtcagttcatcgggaggatcgcccaactaattcgaagtaatcgcctggataagctagaactgcagtcattgtcaccaccggagccaccaactatgcgaataacggggactatgggcgcaaggctcgctg

SEQ ID NO: 125822 - DNA, 596 bp, Zea mays
  unsure (1)..(596): unsure at all n locations
  Clone ID: MRT4577_46219C.1
gacaaacgttgtcgagaactggttggacactatcaaaccgctatacaagaagtggctgtttgcataatcaagaaaggggtgttgaactggaagccttgcaagaaacataaggtggtggacgccattagcgcacaaggttcatcgccaacatgctatccatggattcaacagttgctgaaataatatcggccgctggatatacagaccttcccaaagttgacgagaccttgctatatgagagatgcgccaaagagtgtgggagttactctgctccagccatcataacacgtcatgatcctcgatcactttactggaactaacagaggaattcccagactccctanctatctgcaaggcaatacaacttgattgtcattacatccagactcgcgagctactctacattgatagggagcggcttacaacagtgagagaactggatggacaatcataatcctacatgacaacactcagtgcatggctgaagctcaatctcatcccagttgacagcaacataaaggagatggtctatctcccctcctaggctacttggatccacccatcaagcacctgctgcatgcctgacctgaccagct

SEQ ID NO: 125823 - DNA, 538 bp, Zea mays
  unsure (1)..(538): unsure at all n locations
  Clone ID: MRT4577_4621C.1
cagcgtccgccactcgtctcggcatcaacctatctccctgtnccctgtcttcgtccgccatgggaaaccaggcaatcttacgcgggaccgctccggttggcatggcgaccgcatacgactacggtggtcctatcccttgccttgctacccttcccctgggcggcgtcgacgacgtccgatgcggcaggcaacctcccggctgcaggaagtacctacggatcaacacggctcacccggaaccagattactcctcgggcgtggactatctatataaacaggccgtcggagatgtactcgaggcactcacgcttgtagctcatcgcaccagaagcccgctgctgttggtgcgggggcccggtctgtgatcgatgatcccctccatacttgtgaactcccaactgacgtggtgccggtctgatccaatcaagtgtgaccacccgctgctttttctgcgcctttggtgaacactccggtctaatactacgcgactacgtttcctgacatgcacatggttcattgatgcggatcactgatacac

SEQ ID NO: 125824 - DNA, 461 bp, Zea mays
  Clone ID: MRT4577_46220C.1
ctatgtgttatttatttttactaatttaatatgtccaagcttctcaggtataccttcctaactactctcaaccacagcattgttttccattcacacaactgtttacactgaacactgctgttcattcgcggcaacaacttttaccatttacccaggtagctactgcctactccaagcagcaaccacttctgccatttaaccaattgcacccactgaaccccggtgctcctttgcagtagcaaatactactaccatttagccagctagctgcagcacaccgtgcttacttcttgacacagcatcagatggcgcctttctaccagcagtttgcggctaaccccgcctccctcttacaactacaacaattgatgccctttgaccaacttgctctgacagactccaacgaactactaccagcaacacataagtaggtggggcgcgtcttttagatcgcttattag

SEQ ID NO: 125825 - DNA, 233 bp, Zea mays
  Clone ID: MRT4577_46221C.1
ggctgcggctgcagaagtaccgcctgcggagtaactgcaaagatgctgtccgtgcgcgttgctgcggccgtagtccgcgctcttcctcggcgggccggactggtctccagaaatgctttgggttcatctttcattgctgcaaggaacttccatgcctctaacactcatcttcaaaagactgggactgctgagatgtcctctattcttgaagagcgtattcttggagctgatac

SEQ ID NO: 125826 - DNA, 201 bp, Zea mays
  Clone ID: MRT4577_46222C.1
ctcatggttttgctaggtagatagctgacagcgaattactaagatgctggacaagctgtgggacgacgtggtggccgggcctcgcccggagacgggccttgataatgctgcaacaagccaccaccgcccgctcggtcgtcatgaacaaagactcgtactgtaggcagtatacaactcgggcgacaagggatgcgcatttac

SEQ ID NO: 125827 - DNA, 346 bp, Zea mays
  Clone ID: MRT4577_46223C.1
attttaattccaagaatatattaagtaaaggaggttttggcattgtgtataatggttgtttgagaaatggcttgtgtttcatatccttgatattatgaatttacataatacaatctaatctgaaagatagttttttcaggctcaagcgatagcgtgcgtgcatgagacttagatggcggcttcggaggcggcaacgacaatgttaaaaatagtttttctcacaaaattaaaataactatcttgcttttcaagcattgccagaaatagctcaaaagattacacggttggagaatgagataccttgcttgattcttctggcgagaaaatcatttatgagatgatgaga

SEQ ID NO: 125828 - DNA, 679 bp, Zea mays
  Clone ID: MRT4577_46224C.1
cgggaactcatcaagccctcacggacccctagaataactatcccctcaatactgtacccacctagccactgcacaacggatctcagatcgtggatctacaacaacttggtcactagctgggccctctgcttactgccaaaggtggcgagccggccaccatactatactccccgactcgacgcatcggccctaccactaaacaccagagacgactgtatttctcatacctcggcctccatgcggcccccgcttgtgcgctttctccgtcaccgccgatgcttgcttggccgctgcatcaccctacagtcctgcgatacagaaacatgtagcgccagaacatgaaaaccgccgtgccgccgtatcttggaaatgggacagctgcatcagacgacgatgtcaacgataatgttaccgaccgacaaattccactgactgcctcatactcgatctggtcgaagctgttgctgctcacgctgaccaccacgatcttggagaggttgcacacgagctcatcaagagcaccgcacacgctggcgttcgtgttgcttgagatatcatcggactccagggatgaactgaaaccaatggccgctgtacttctctggctgcatgtgagtgcctcttccactcaacagctatgctagaataacgtccctagacatcgcgaaataataataat

SEQ ID NO: 125829 - DNA, 721 bp, Zea mays
  Clone ID: MRT4577_46225C.1
ctcgaggccggccgagtcgccatccatttttcatatcctcactcgccgccgccgccgccgctcgtccctcgccccatcacgatgggtaagcacctcaactcctcctcgcatgttctctctcgatctgacctttctcttttcggttcgcagcacggatcaaggtgcacgagctgcgagggaagagcaaggcggatctgcaagcgcagcttaaggaatttaagtcggagctctccctgctacgcgtagccaaggtcaccggcggggctcccaacaagctctccaagatcaaggttgtgcgcacctccatcgcgcgcgtgctgaccgtcatctcgcagaagcagaagtcagcgctgcgtgaggcgtacaagaagaagaagctgctcccgctcgacctccgccccaagaagacccgcgccatccgcaggcgcctcaccaagcaccagctctccttgaagaccgagagggaaaagaagcgtgagaagtatttccccatgaggaagtacgctatcaaggcctagattagtgaaagaacatttatcctgtcaagttttgcccagaagttacttgaatttgagacaaatctatctacatccaagtactatgtagctgatcaactgcatgatgaaaaacgagtactttttgcttgtttaaatgtactttacatttttagtttccacttatcaccattggaatgaatagtagtgatcgattccctgttgtt

SEQ ID NO: 125830 - DNA, 208 bp, Zea mays
  unsure (1)..(208): unsure at all n locations
  Clone ID: MRT4577_46226C.1
ttcgtccacgcgttncgcacgcccacctggggaacgcggntgcgcaaggagcacacacggnatcgtactttgacgagggaaggagggnagagagcagatgtggcttgtagcttcttcagatgttgtacaaaaaacactggtttctttctgtaaccctaaaaggggagaatagtatgttttgtaaggcgtgtatataaagaatcttagg

SEQ ID NO: 125831 - DNA, 1011 bp, Zea mays
  Clone ID: MRT4577_46227C.1
cactccatagggcgattgggatcctcgaggccggccgggccgggaatcttcgccatccatttttcatatcctcactcgccgccgccgccgctcgtccctcgccccatcgcgatggcccggatcaaggtgcacgagctgcgggggaagagcaaggcggatctgcaagcgcagcttaaggagtttaagtcggagctctccctgctacgcgtagccaaggtcaccggcggggctcccaacaagctctccaagatcaaggttgtgcgcacctccatcgcgcgcgtgctgaccgtcatctcgcagaagcagaagtcggcgctgcgtgaggcgtacaagaagaagaagctgctcccgctcgacctccgccccaagaagacccgcgccatccgcaggcgcctcaccaagcaccagctctccttgaagaccgagagggaaaagaagcgtgagaagtatttccccatgaggaagtacgctatcaaggcctagatcagtgaaagaacatttatcctgtcaagttttgctcagaagttacttgaatttgagacaaatctatctccatccaagtactatgtagctgatcaactgcatgatgaaaaacgagtactttttgcttgtttaaacgtgctttccaaaaaaaaaaaaaaaaaaaaaaaaaaaaaaaaaaaaaaaaagtctgtacattccccatctgccagacatcctgatagctgatggtctgtgcaggaccaaagtggatgccggaaatggagtccggcctccaacctgtgtataatataggtcatgtagtggtccaaatcgtagaacaggtccattctttgaaaacatctggttgtgtatattaattctcttagcaccttcagtgcatgttttcatgtctcattagagggaataggtatttcaatgtcattgcattgtcagtgagtcatgtacattattatactgaaaatgtaaactatatatgtcatctgtgtcaactgacaactgtaatcaaataatgacatccctatcttggga

SEQ ID NO: 125832 - DNA, 279 bp, Zea mays
  Clone ID: MRT4577_46228C.1
ctgaggtttttttttttttttttttttttaaccacagaacccacagcaggtcaaaacattcgatgaatttcgggacaagttacacatgttataaaacctcacaaaacttttgctagcttatttgacaagtttgactcgtacaatcgcgtattgtgggcaaggggcaagtgggcaacaaagtttagcagactcccacttggggttcattctaacgggaacagccaaacccaggattggcaggggaacccaaaactgggggatcttgatgacaaactcggg

SEQ ID NO: 125833 - DNA, 552 bp, Zea mays
  Clone ID: MRT4577_46229C.1
ccagatggagtaggcttcccaaagagtaaggaatgcccaccaatttgactagctttgacatagtctacagatgttcaatttagaatgtgcattcctataacaaaacaagaatcatgctgctgcagatcgcttattgtcggggtcttctatgttcagggcctgcagtaacttcggccatgattcgggtatcccaccaggcagattgaactccagcagtttcccacgtgctctgtagaactcctccactggttcagtctgcaaagatgaaaacccacttggtaaggtatatgatgacaccacagcaaccatgctacaatcaaacgtgcaaccaatcaaaacatgctacactattttttttagcatgttacattatttcgtttatacgaaaatcatatagaaattagtccagcttgcctatattacgacaaactcatttactacagcagcacaagaattcaggttatataaacagatatatatataaaaaagggcaaccacaccctaccaaatcatggtacacacgcagccgctcttttaccacttcttcagtat

SEQ ID NO: 125834 - DNA, 324 bp, Zea mays
  Clone ID: MRT4577_4622C.1
ggggcccaaacaaacccactttaattaagaaccaatcaagggaaccaagaaaacaaagggggacaatcggaacccaattacccaaaaaaccctgggattcccacactacgggaaaaaaaaggtttgggggctaaaaaaaaaccgaaacggggaacacaaggggaagaaaaactggggaaaccgttaaaaacaaggcaaatggttttcaaccaaaaaggaaaagggaaacgggcaacccttagggggccaagggctcaaaaccaaaacctgccttggggggaaacaagtccccgtggaccggaattgggtttaaaaaaacccccc

SEQ ID NO: 125835 - DNA, 602 bp, Zea mays
  Clone ID: MRT4577_46230C.1
tgctatgccaggaagaccagctctgagttcagagtgaaggtcagagtggaggggattccggtcactgatggggagaagatgtggctgctagggctttgggcaggagctgtgctattcactatgtctaggagcgctcaaggcgcagggagcgcacgaggtcctttgatctttgggcttggtgctcggacccttgtgatattcccaaggaggcctgtttaaccgtcacagagcctgatagagagctccctcctcctagtgcccctctgcctctggttggggctcagtatgacttaccaactgatctgaaggcaggccatgtgtacaccatccgtaaccacattgaggtggttgaagacctctcattcgtccgtgggagggatgttagagggagccccacttgccgcagacctcacagagaatttgtgtggagctacggagtgccagactctgttggagaaaaaagagagagatcagaggatcgcagaggcagggattttagtcgtcgtgactgggaccatgatgatgatgaggactttcagcagaatagacgtcatggcacccgtaggcaccgccgtctatctggctgggcgcgttcttcgcgg

SEQ ID NO: 125836 - DNA, 554 bp, Zea mays
  Clone ID: MRT4577_46231C.1
gaattaattgcctacagaagcgatccgatcctatccggaactgcggctgccagacatggggactagggttttgctgaccgccctcctcctcgccttcctcctcgatgtctcccctttctgcgaacgatgtggtagagatgattcggaggaacatggtgctgcactgtgacgttagttgaaaggactgatctatgaagtgcgggtgatgatacacacgcttccagagaagcagctataaccccaggtcctggtgtatagacaggagttgcattcaccaaatatgctggataaatcggactaagacgtgaaaaaactgaattattacgtggactgctattgatggcgaatcgactctgaatgcagctgctgttcattcaactctccatattgcttttgagcataatatgtatggccagaaccttactgttcacaatgtcttcaatgcatcagactactgctgtctgcgtaagcaatcttctcttataaattcgtcagtgagccatgctctgctcatctgtagctgatgatctgcttgcctacatactgtatgagat

SEQ ID NO: 125837 - DNA, 184 bp, Zea mays
  Clone ID: MRT4577_46232C.1
ccacacccttccgaaaccgggaggttgttgatccttgtaaatggccagccttatggaactcggttgtaaattttagggtggataaaaggattccatgcctttaatgcaaagattaaattaaacatgaaactgttgaactgggtaaggggggaaacaacttttgaccacaggagtccggggtttc

SEQ ID NO: 125838 - DNA, 923 bp, Zea mays
  unsure (1)..(923): unsure at all n locations
  Clone ID: MRT4577_46233C.1
aaaagttgcttcctagatccagccctttggttggctttgggctnttagggggcaaaagccaaagccaaaagccaaaccanaacacaccctaaaccatccaaacctctcggagctagacggctactgctcggggaacgggcagtgcttgctgccggatgggtgcagcaaactactgtcttgtcttggaataaccgtgtgaagattgctctagggtcggcgagggcgttagagtcagtcaggcagactcatcatgtttgttttccttggtggtgggggtgtggggctggcaaacaataagccaggaggggccttagacttagtactgttgaaacatgaatgagcagacttcccttacacgttgacaccttcaggaatcagatgacagccccggatacagagttccggaggtggaaatgtccggccagtactctcaaaagagcgagctcctgactggccggaaagcgttcgacaggtgagcaagtacagcgctgcgacacttgaccctgcaacaaacaaagacgatgactgttgcagctctcaagcaaggtcccagctatcgttggtccagtgggcgtcgccccagctgcacgacatcgaccagatgacgctggaggggctgtgccacgcgaagtcctctgcgtccaggtaagctgttgacgggtttagttgctgttcccgtctccagccattttgtgcggtgttgcagattggtcggtttccggttgcgcaacctgagccagaattcaggccgcccatgtcggaggtcgtccagtcactggtccgtcttgtgcagcgagcgagcatggggacgacgacagcgctgagtggggaccacgcgccctaggggaaaatgaggctaaaatccccttcttatttctcccacatacatatacttaacctcaaaaatacaactttttttctca

SEQ ID NO: 125839 - DNA, 493 bp, Zea mays
  Clone ID: MRT4577_46234C.1
tatctagatcgggggcggccgctcgcgatctaaaacggcggacggcgccgcggccaccatgcgcaacttcacggccctcctggaggcggcgaagacggcgggcggcggcgtggcctcgctgccccccgacgtcgcgcggggcgtcgacgacgtcgcgcgccgggtggacgcggccgtcgacgccaccgacgtgcgcgcggccagcaactcccgcaggatccggacgtcgctggacgccgtaaggaaggtcctgatcggcgtcgcggccgtgatgctggccctcgtcctcgatggcttcccgttctcggtgacggggaagaagtcccttgtgtccacagcggagtttcttgcatggatcataattacggcgaccctaatactgtccggaactttccttctcctgcacaacgtgataggagacacctgcgtggcgatggacgagtggctggcccaatcggaagggcaggggcagagccacaccgggctggacgac

SEQ ID NO: 125840 - DNA, 451 bp, Zea mays
  Clone ID: MRT4577_46235C.1
aaacggggaaccgggctaaagctttcattcaatcttacctccctttggttttcaggttaaccccttcccaggggggggggacccaccggtttggttctttctcccttttcatcagccactttggccctccttttgattcaaatgaaagggccggccccaaaattttaagttattcccgcaagggagagagagggagagagagggagagagagagagagagagagaggggcctctatttcaaacaactcctttggggggtccaaaataattttcatggcctttttttaaggccccttttttttcctggggctctgccaaggccctaacataattacccaagcccccaagcaaactgcctttagggccccatagagctgagtcccatttatgcccccactttttgggatcgggaaacaaccgttacctcggggggtcaattggtggccccctt

SEQ ID NO: 125841 - DNA, 992 bp, Zea mays
  Clone ID: MRT4577_46236C.1
atctctagtggatgctgcttaccgaaaaggcaaatcatttgaaggcagccagcaaacgggcccctggtgcaaggaaaggaaagaaagagaagaatgaaaggcaacattctgagaaggctccgaacaggcatgaagagatgcgtgacctgttccaaaatgatatgagtgaatggaaacagggacgctcctcaaagaaaaataacaaatttgcgcccaaaaaatcaaggaactcttttaagagcaaagcaaggtacaagcggaagtagaagactcggccatctccgggtttatattacattcccttgtctcaattttgactgactgatcctgaagaaatatctgggatccagatgtttgcagttaattcaagtttgctttaaacatattctcatatcatgtattgaaactcaccgttttctggggtctcttatgatctcgcgaactgtgttgccgttttgtagttcgtaccatcttaaattttagggttatttggtttctttagacttagcttttaggacccgtttagtttgtgctactaaagagtagtcccttcgttttagtcccatttagcatataaattgccaaatgatatgactaaaatagcgactaaactgctttagactctggtctcattaagggtgactaaaagagactaaaggaaataattaggttttagcgatttagagactaaagtggagtaaaatagatggactaaaaaatagttactagaaaccaaacaccttatttgcctgccagacgcagttgtgtggaaattgttatgaaagataagcagttgctgactgctttccaaccggcgtcctccaagagatgtgcccctgcatgatccccatgtatggacgtggcttttggtctactccttttggtgtctcctctgcttgtataaatatcaaaagtaataaagaatgtagtgcccctttttcatttttcgcacaacagtttctatttctcacatgttatcaacacttgctttt

SEQ ID NO: 125842 - DNA, 2125 bp, Zea mays
  Clone ID: MRT4577_46238C.1
cccacgcgtccgaagtaatcgtcacagtggtagatttgcgctgttacacatcactgcactgcacaggcacagatccacatgggctccatcgttgccgacgccgatcgccggccacacgccgtgtgcgtgccgttcccagcgcagggccacgtgacgccgatgctgaagctagccaaggttctccacagccgaggcttccacatcaccttcgtcaactcggagttcaaccaccgccgcttgctccgctcccgcggcgccagcgcgcttgacggcctcccggacttccgcttcgccgccatcccggagggtctgcccccgtccgacgccgacgccacccaggacgtgccgtcgctctgccgcgccaccatggagaactgcctcccgcatttcaggagcctcctcgccgagctcaactcctccccggacgtgccgccggtcacttgcgtcgtcggagacgacgtcatgagcttcaccctggaagcagccagagaggtcggcgtgccgtgtgcgctgttctggacggccagcgcctgcggctacctgggctaccgctattaccgcgacctcatggagaagggcatcttcccgctcaaagacgccgagcagctgacgaacgggttcttggacacgccgacggactgggcgctggggatgagcaagcacacgcggctcaaggacttcccaagtttcgtgcgctcgacggaccccgacgagttcatgttccacttcgccctgaaggtgacagagcagatagtcggcgcggacgccgtcatcctcaacactttcgacgagctcgagcaggaggcgctggacgccatgcgcgccatgatcccgtcgtccgcgtccatccacaccatcgggccgctcgcgttcctcgccgaggagatagtgccccgcggaggcccgaccgacgcgctaggctccaacctctggaaggaggacgtgtcctgcttcgagtggctccacggcagggcgcccaggtcggtggtgtacgtgaactacaacggcagcatcacggtgatgacgaacgaggagctggtggaattcgcgtggggcctaggaaacagcggccacgacgtggtgtaaatcatccgtcctaacctggtcaacgtcgactccgacatgctgccgccggagttcctggaagccatcaggggccgcggccacctggcgagctggtgcccgcaagaggtggtgctgaggcacgaggcggtgggcgtgttcctgacgcactgcgggtggaactccaccatggagagcctgtgcggcggggtgccgatgctgtgctggcccttcttcgcggagcagcagaccaactgccggtacacgtgcgtggagtggggcgtggccatggagatcggccaggacgttcggcgggaggcggtggaggagaagatccgagaggcgatgggcggggagaagggaatggagatgcagcgccgcgcgggggagtggcagcagactggtctccgcgcgacgcggcccggagggcgctcatacgccaacctcgacaagctggtcgccgacgtgctcctctcgggtactagcggcaagagttcttaaaatctcaggagggtttcacttcgcacaccgccaccgtccaatgattcggactgaacatggatggtatgtgtagtacaccaaaagagaagtttgtgtgaatgtcgaggcaaacccgtaaatcatggagcatgtgatggaataacatggaatggaaggaccgaaggagccagtagcggaagaagttacttctcgtggcaggcaaaaattggaatatgaaaacctggaagccaagagggttaatccctaattactatattttctatctgctagctgtattcgttgcaaatgcacacggtctgctgtttgtacgagtgtctggtaggcacctctacgcttaattaggttttgtccaatttttatttagtaattacattaaaaaatcgaagatcgaagttaatactaggtgtaatttataggggtcttaatatgatctaaccgatggtttgataagggttaggtacaaaaaaaagaaaacaatgatactatagtgtttggttggtctattttactatgtaaaccgttaacagtatccaataacggtagtttatgtttgtttttgttc

SEQ ID NO: 125843 - DNA, 396 bp, Zea mays
  Clone ID: MRT4577_46239C.1
tcagcgttcgtcgtcttaggcccttcgtctccactagcaatcgtaattcgacggcgcttgagcatgttgggttatcaggatctcttatctggcgattagctgctgaaggcttcattcacctactatgagctggatatcggcgtcctgcgtgaggtggacggaaagtgggtcacccatagtcctgtacgtgtggacattggtgctccttcatacctcgagggtaggtgaaggagagaagcgtttatgacacacatgcttgggatgggggtattccagacacacttcgtccttagtggcctcctcctttagacatgaaaggatcttcgtcttgctaagaaaaacttggttgcaccctctacaccgtttgtgaactcatacggtttctctggctacaac

SEQ ID NO: 125844 - DNA, 835 bp, Zea mays
  Clone ID: MRT4577_4623C.1
aaaaaaaaatttagtgggcctattcctcctagataggcagttgcaagtctctccctggctggaccttacaaataattatttcacgtcagagttgcctcgagaaattggtaatttgtcaaaactcgttgtcttcaatatctcatctaatagactaggaggaaacataccactagagattttcaattgtacagtgttgcaacgccttgatctcagccagaatagctttgaaggttcgttgccaaatgaagttggtaggctgccacaactggagctgctatcttttgctgacaataggctaaccggccagataccacccattcttggtgaactatcacatttaacagcactacagattggtggcaatcagttatctggtgaaataccaaaggagctgggtctgctgtcgagcttgcagatcgccctgaatttgagctacaacaacctctctggcgatattccatcagagcttggtaaccttgcactgttggaaagtttgtttcttaataacaacaagctgatgggtgaaatcccaaccacatttgctaatctgtccagtttgcttgagctcaacgtctcctacaattatctctctggtgccctcccaccaataccgctttttgataatatgtctgtgacctgttttattggaaataaaggattatgtggtggacaacttggtagatgtggattccggccatcctctagttctcagtcatccaattcagtcagtccaccattgggcaagatcatagcaattgttgctgctgtcattggagggatttcacttattcttattgcaataatggtgcaccatatcagaaaaccaatggagaca

SEQ ID NO: 125845 - DNA, 880 bp, Zea mays
  Clone ID: MRT4577_46240C.1
ccgcagcagcagccccccaccgggtccacgggcgggcaggggggcgtgcccacggagaccgcccagcacgttcggcggcagccggtggaggagaagatccgagagatgatgggtggggagaagggaatgcagatgcagcgcctcgcgggagagtggcagcagactagtctccgcacgacgcggctcggacggcgctcatacgccaacctcgacaagctggtcgccgacgtgctcctctcgggtggcggcaagagttctcaggagggtttcacttcgcacaccgacaccatccaatgattcagactgaacatggatggtagtacaccaaaagagatttgtgtgaatgtcgaggcaaacccgtaaatcatggagcatgtgatggaatggaaggaccgaaggagccagtagcggaagaagttacttctcgtagcaggcaaaaattggaatatgaaaacctggaagccaagagggttaatccctaattactatattttattccattagttcgtagaagttttggtccctgtattcaatgtaataacgacttacattattttagcctcacaatttcctttaatagtctagctttgtaattgataacataatttttttggttgaactgttagaagataaagaagtaagttactaaagttttggactgtattctttcattttcatcccccttatcctatttctttcaggaatcataaaagcatatggaggaactatgtataggctccaaaaaagcataaaaagcttttttataccaaaaacaaagtgttctcatcattttgttttttccaattgtgttttatgttaaaagtccagcatgtccatatattgccatgatttagggcagggcatctgtcattctttgttt

SEQ ID NO: 125846 - DNA, 301 bp, Zea mays
  Clone ID: MRT4577_46241C.1
caaattccaaattattccaaaaccacttcaaactgcccattcatttttctttaaaatttcttttctaacatttttattccattagctttttccttttttttttcaattacatacttcaacttctacttctcctatacttctttacctaaatataagcttctttccctcctattattttaacattacttttattgcattccggtcgtttttctctttactatttctaatttttccttcttcttctttcatattcatatctttttttattctttcatcttaattacattcatcttcacttttt

SEQ ID NO: 125847 - DNA, 369 bp, Zea mays
  Clone ID: MRT4577_46242C.1
tgagaatttggtctctcgatatgatgagttagaggaggaaaatggtgagcctatgaatggcgagtatgatgagcagatctcaggctatccaagggacaattctgagttcagccccatacagatgatgggtgatgtgagccacgatgaggatgctgaaagggatgagggcgaggaggatggagaggactatgaaactgacgatcctgctggtgatgaggatgatgacgttgagatggattgggatgatgacattcgggacaacgatgatggtaatggagcagccaacgcagatgaggatgaatgtggtacatcatcatattcttcacagtatcgtgagtgatgagagtggattgaagatgcgcaggtttg

SEQ ID NO: 125848 - DNA, 517 bp, Zea mays
  Clone ID: MRT4577_46243C.1
gacttttgccctgggcgagtctctctctgttgtaacacattgccatgggactttggcactaatcaatcgtcagtgactacacgggcaagagccaatcgttctcttaactgaccttgaacagaataggagtctaaaaggatgcatataaatagagcgcactttttctcttggacgaaatgatattagagaaaccgacacacatgtactaaaacctcctataccataacacaccgatataataaccatcggccacatgtagattatgaggatcatcctcatcatcattttagcatttctcaacaaatattatactgataggctattactcagtggttcttctcttgtgcgtacagaagaacttcacattttgaatgctcgggctcaggaatcactctataccttacttgattggataaaagctgattgtattgttcgaattactgaatttcttggctagacctgactctacccgagggtggcaactactaccatagtgcatctacaacaatcttggatg

SEQ ID NO: 125849 - DNA, 869 bp, Zea mays
  unsure (1)..(869): unsure at all n locations
  Clone ID: MRT4577_46244C.1
taccggtccgnattccgggctcttgctcggcaaaaaaatgaaaatcgccgtgnaaaacagggtccaacgaggccggctgcgtcgtcacttctccatcgtgctcggcatcacctccccgtcgctcgccatatttcccgagctgttgtgactcgccatctcccacgagcacctcctgctcccgcgcaatgatgctctcgctcccgcgcacttgcccttgagttttgagaactcgcctccgtgacctagcaattccgccgcattctttgctagccctcggtcatccatgtataggccgccgcatccccgtacaacggaggctggggatattgggtcgctgattggatctgcagagaggcttcttccttcccagtttgtgccaggacgcctggaacaagagccaggtagaggtaggacggaggtcgactggatgccagacgatgtgtccaattctactccattccacggtgagtctcactgctaagatggtggtgcaattaattaattttatccttggcgcttattttgcacgaacagaggatacgtttgtgaattgtatgatgtttacaaacgagaaaggacatgttagtttataaggtcaagtagttcctggaaaagatatctttcggtatttaggatcaacactacaaagagatgaagatattgttgaagatgttagccatagaatcaaaatagtgtggatgaagtgacgtcaagcatctatcgttctatgtgaaaagaagggtaccacaaaagttaaaaggcaagttttatacgacgttgattacacttgtttgtgttgtatgatgtaaaatgttggcctacaaaaagacgccatgctcagcaaataagtgtgcaaaaaaaaaaaaaaa

SEQ ID NO: 125850 - DNA, 343 bp, Zea mays
  unsure (1)..(343): unsure at all n locations
  Clone ID: MRT4577_46245C.1
cagaagatccagaagctgatggatgtgggtctgatcgcaattcggtgataacttgcttttcccgtctccacttcgccgatgaggaaaggcgagctgtgacggtggcaatcagtactgggcagaggggggttaagaaaggcttatctgtatatttatacatgcctacaaggaagacagactcatccagtgccagctcgggccctcccagcacacgcatagttctnttcacgtgtgcccccaattccgaatatccttcgctgcacattcccagcgtccccgtcattgtctcagctgcttccctatagttattgtgtatgtgacgcagtaggtgcatacggggagg

SEQ ID NO: 125851 - DNA, 558 bp, Zea mays
  Clone ID: MRT4577_46246C.1
atagctgccgataacagagatcccgcgctcaaccaccaatcctgaagagcgaactccctcgcgtgctccttgatcccttcctccttccattggagcccaacatctcagatcattcctgaacgctcccttccttccctccattggtcgccgttgagagtgaagaaccctctcttcctcttccccttcgatggtcatcaaatacggcaagcgaagaaccctgttttcctccttccgcccgtaggtctccactcactaggagcacagatgttctatgcgaccatgaagcgtcatccgcgtctgatcgtgccacagatcctgtgactgcagtggctctactacttgacgctgagcgtagccatggcgctggtcctggacactcgagacccacgactcaccctcctctacctctaactacttatccacgctcacgccgcgcaccaccacaagttgaagcgccgtcgcatctttcctacatcacagcgtgactggacctgaatacatgctttatgtgatagaacgagccagataccgtctgaacttttgagacacactctacat

SEQ ID NO: 125852 - DNA, 301 bp, Zea mays
  Clone ID: MRT4577_46247C.1
aacactcatttgggccacaaggccttttcccaataaaaactgcaggtacctaatgcgagtggttacactgtcaacgaacacaaaccaaactttgactctgttcttgcgaccccactagataaatcactctctgattccatccacagcacaccatttgaaaaaaccgtctataactctatcccaggcacttcagtgcacatatccttgtccgaatactctgtccctagcacaccgatgcataactaagcttttgactattctgtcacaaccactccgatgcataacacactctttgactctg

SEQ ID NO: 125853 - DNA, 134 bp, Zea mays
  Clone ID: MRT4577_46248C.1
acacatggcagcaccccgctacgacatggaccgctttggcgtggtcttccgcgccagcacgcgccagttcgacgtcatgatcgtagccggcacactcaccaacaatatggccccagctcttcgcaaggtctacg

SEQ ID NO: 125854 - DNA, 300 bp, Zea mays
  Clone ID: MRT4577_46249C.1
tatttaacagtttcatcaggagcgggggatttttttttggtacacggcaaccgcctttgacgaggaaccggggcgcaacacaactaaaaagcaacttcggggggggatccaaaaaagatctagggaacaactgctacccaccgaccaaggtctttgatggtgcagaggaactccactacccgaatacaactttgacggagggatcgacgctaaacccagtatcctttgcggaacactcaccaaaatatactttatcgagcgaaactggcggcgtcccaaaaaaaaggcggttgccgtgtt

SEQ ID NO: 125855 - DNA, 689 bp, Zea mays
  Clone ID: MRT4577_4624C.1
gccgggaccgcatatctatacacaagcacaagctacaagcactctagcaatggcttctgaggctgtccgccctagcgacgctcgatctactgcaggcacaaggcgacatatggcggctcagcctctcctacctcacgcccctgacactgaagtgcgccgtggcgcttggcatccctaaggcgatctaccgccatggaggggctgcctcacccgctgagctgatcacggctctgtctctcccctccgctaagctaccgttcctccgccgcctgctgcgactcctacccgcgtcccgcgagttcaccggccacagggaaagcacggaggaggagaggtaccgcatacaccccgtctcctacctcctggtggaaggcatccctcacgaggaccacatgaaccacacctctttcgtgctcacctgcacctcatcacgctacatcgagccgtgaatatggctggtcgatctgactcaggaaggacacggccacgtcaccgtgcgaggagctgcacggtgcgactctgtaccacgacagcatgtcctagactcgacacacatgttccacgacatgtccagcgactccttgtacacccactacaacttcttcttcgagatggcactgcggcagatcaacgacttgttcgaggagatccagctcatgacctactgctgcctatactttgcagatgac

SEQ ID NO: 125856 - DNA, 210 bp, Zea mays
  unsure (1)..(210): unsure at all n locations
  Clone ID: MRT4577_46250C.1
cacacnannccnagagagcagggtttaactccgaatactcatccgacacccccgggggctccattcaccagccctggggcaagaacaccagagcgcgaggcccaaagggggagcgggcacacacgccgcccgcaaagccaatgcccgagcgggcgacccacggcacccaaaacggcggccgcatggagacaccgcggcccgtgccaccac

SEQ ID NO: 125857 - DNA, 2523 bp, Zea mays
  Clone ID: MRT4577_46251C.1
gtttgccctttcgagcggccgcccgggcaggtacctgctctacaatctcagtggttaatgatgcatgtcagtatgatgttactaagctatgcaactcttttgtgtggatccttattatccgccgctcttctaatcattagatttcgaaagaatttcgatttcttttcactaaagaaaaatgtttttcttaaaacatttttctttagtgagattgaatatttatatgcaaaaagaagtgctttaaaaaacacctcttttcccgtatttccaaattattacaaatatcaattaactgagcgtttggattcttggagttatcgtgtcattagtctagggtttactcttttaaccgtgggtattctttgtggagcagtatgggctaatgaggcatggggatcctattggaattgggatcctaaggaaacttgggcatttattacctggaccatatttgcaatatatttacatagtagaaaaaatccaaattggaagggtacctgggcgggagccagctggccactcttgggaccgtcgaggccgggaggatattcgccgctcaccacacccatctgccctcccggtttccctttcccccctcctcctcctcagcgtcatgatgtcctcgacgccgctgtcgcagccggccaccgccggcgacgacgacgatatggagtccctcccccttgccgccgcctccgactacgcctcagtcgcctccacctttgaccccctcttctcctccacctccgccaccgccaccgccacctcgccccgctcccctcccacgcgcgccgccgctttcaccctctccccgaccttttcctcctccttcgttgacccgccctcctacgccgacgccaccggcgccggcgccggcgccgtctcctcctccccgtgctccgcctcctcgccctcctccgcgtcgccgagatccgcgcgcgtggcggcctccgagtactccttcctcgccgtctccgacccggagactgaagcagagcctgccgccacctcgctcgtccccggatccgcgcccacctacgtctcctacctcgtcaccagcgtccgccggggggaccccgaccagcgccgccattcagtgcgccgccgcttccgcgacttcgtcacgcttgcagaccgcctcgccgacgccttccggggccatttcgtgccgccgcgcccggacaagaacaccgtcgagagccaggtcatgcagcgggacgagttcgtggctcagcgccgtgctgcgctcgagcggtatctctggcgactcgccgagcacccggccatcggccccagcgacgagctgcgcgtctttctgcaggccgagggcaagatgccactgcctggcaccactgatatggcatcgcggatgctggatggtgcggcaaggctgccgcggcagctcattgctggggaagacaccgtcaccgcaccacaggaagtcgtgcagcctgccaagggcggcagggacctgctgaggatattcaaggagctcaagcagtcggtggtaactgactgggctggtgtcaagccacccttggtagaggaggatagggagttcctggagaagaaagagaagctgcaggagtgggagcagcagctcaccagtgcgtcacaacaggcagaagcacttgtcaaggctcaacaagatatggttgaaacaatgggagcgcttgggttggcattcgttagactaacaaagtttgaaaccgaggaggcaatgtatgactctcagaggatgagagcagctgacagcaggcgtgtagccactgcagctgttaaagctagcagggcatgtcgagatttgaatgcgcaaactgttaaatatctggatacgctgcatgaacatttaagcataatgttgtctgtccgcactgcattttctgatcgggcaagtgcattattgactgtgcaaacacttatgtcggatttggcatcattagagtccaggatcgagaaactcgaggctgcatccttgaagatatttggtggtgataaagctaggactcgcaaagttgaagagctaagggaaacaattagggctactgaagatgctaagttctgtgctttaagagagtacgagagaattaaggaaaataacaggagcgaactccagcgactagacagcgaaaggaaagaagaattcatgaggatgctaaaaggatttgttgcaagtcaggcggcctacgcggacaaaatcgtggatggatgggagacggtagcggaggagacgagcggttatgttggtgtgcgtggatctgatagcatgacttcgtagcttcgtttggttggatgtcaagtgtttgtacaatgtaatctaggttatggatttgggaatagaagaaaggtgcgccaggttcgatttgtttgtataatcaaataaaggtactgccatggagccacgatttcacgtcctggatgtcaagtatacgttgttcttctgtggatatcacaaatacatcattgctccggttcgttccagagcaggataaaaaaaaaaaaatcaaaaaaaaaagggcggcc

SEQ ID NO: 125858 - DNA, 164 bp, Zea mays
  unsure (1)..(164): unsure at all n locations
  Clone ID: MRT4577_46252C.1
gggctcgcaccgcttatcaacaacctgacagttagctacctgcgctgcgcagcgccgcncgcgcatggccacgatgacgaaccaccgcattgggcccctcctgctggtcgcggncacactggtcgcgcaggnngggggnngnngnggggggggggggggggggg

SEQ ID NO: 125859 - DNA, 650 bp, Zea mays
  Clone ID: MRT4577_46253C.1
gtgatcataagccgaatagcgggaaggaagaccctacaaagggagcagctaagagagctaagtgcaagtctgggacttaagctcgagcttccttctctctttaagtagctgcatgccatagttccctcatagttttgttcctcgctttggttgataaggaacaggcagtgcttagagctaggttatttaggttaggtcaatcttgtgttcaagtcgtcgagtgagatccctcttccacctccggtgatcagtagaaacccaagtcctagctagttcctgtccagtaaagtctcacctagcacatcagtcattagggtttagtacgctcctgataattagggctaaggttagcgccaccgatttgttttacggtggtaaagatatggaggagatcaggagtgatgacatggagaagcaagatgaagttatgttacctggcttcaggtttcatccaactgatgaagaactcgttcggttctacctcaagaggaaaatccagcagaagtctcttccgattgagcttattaggcagctggacatctacaagtttgatccatgggatctcccaaaactagcaagcactggagagaaggagtggtatttctactgcccaagggataggaagtaccggaacagcacaaggcctaaca

SEQ ID NO: 125860 - DNA, 214 bp, Zea mays
  Clone ID: MRT4577_46254C.1
gatgtttttccctcgaatggttgatctgctgcttgctgtttttgttctaaataaagtatggcatcacatttgttaatgcatctgcttactggcccttctgagtatcacaaacattttgacaaatatgtcatctttattaacatattggagctccttcaactcacatgaccaatatttctgcagatggttgtcagcatcattggccttcttttat

SEQ ID NO: 125861 - DNA, 285 bp, Zea mays
  Clone ID: MRT4577_46255C.1
ttttttttttttttttttttttgtttgggttttttttttatttgggacgggaaaaatcatcctttaaaacagaggcacaagatatcaaccccggaccaaagggacacgcaaaggtcctaagcccaacaaataaacaataaaagaatccatgcaacaggggaacaaaacccccaaaaaccaaaaaaagcaacgggaaccaccaaacacaggaaaataagcagggcacaacaagacaaggggtcacataaaggccaaaaccataaaagaaacagcccatacacccac

SEQ ID NO: 125862 - DNA, 708 bp, Zea mays
  Clone ID: MRT4577_46256C.1
aactctcggcctattcgaagacaccgagcctattcgcgcgttagcggacgcgaagggcgccttcgcctctgccatccccccacggcgcctctagcatagtcctaccgtgctccagcgcctgaccaccgggcctggagcagccgcttccgccgcacgaagacgggtgtgggcggcacctacaccaatgcgggccgcggccttgaccaaggcgaacggcgtgctgattgagctcatcagggccgcagatggtgcgtatcaaggccttcatgctcatcctgatggccttgcgctccatgctgatggacatgcgcatgaggatccgggtcctaggcgtgaggatgacggtgcaaagctacgccatgcagcaggccgtctacaaggtgctcgaggcctactaccaggagctcgtcgactacgtccacaagaacgaggtcaaggacatcttgaccgaggacgaccgcatccttatcggggacgaccgcacgctcttcgagcccaacaagatgcgctgtcaggcggccagggccagggttcagagggcctaccgcagagcgctcaggtgctagctcttgccggtcagttgcctgttttggcccaacttgccacatcgatgcctgaactcgcgagttagttgtctagtatcggagctacttatgttgttatatgaccagatgctgtggtaccttcaactggtgctggtgtaccttc

SEQ ID NO: 125863 - DNA, 510 bp, Zea mays
  Clone ID: MRT4577_46257C.1
aacgtaatggcaggagctctgccttttcattaagaagaagattagaattgacccagttttaaggaaaaccgggcccaaaacctacacagggagcccaaacaacacaagcagcggcaaccccacacatccagagtcatcgttgccgagctcaacgcaaggtacgagtagctccgacttcgccagacgggccgcacacggctaaaagaacatgacgacgcctacaccttaaacctgacacagaaggaggaccgtgatgcgccatcgttgccaagcctcaacacactcacactctaggcagctccgattcttcaccagcgatcatgatccaacactcaccttcggtttttgcgtgacctccaaaacaatccagaccacaggaagggggttcgcctcatgtcatcgttgccgagccacttctcctaacgtggcagcttcgaccttacgttgcaaaccccaccttcactcacaatccagatgttgggatgcgaaagcatcaaccgaaggcaacgc

SEQ ID NO: 125864 - DNA, 737 bp, Zea mays
  Clone ID: MRT4577_46258C.1
gggcaccccatattagtaaaagaaatggacaaaatccgtgtaatacatcctccacagacttggcatcaaccttgccactttatctccctcgtcgtagctagtcatctttggctatccgtccggactcgccatctcttggttgcgaggtctcctgctccattctgcacccaacgacttatgtttcccgcgccctcgtgctctagttgccgcgcctgcgccatcacgatccggtagccgcgccggagccgttgagacctccccgccctgtacagctcgaggcctcacacacctgtgccatcctgtttgggttttcggctttccgcgccaacacccttcgacctcaccgacatgtgcagcccacgcgcgctgcattcttgctttgccttgattcggccatgtacaggctgccacgtgcccatccatatatcatagagcgatatatgaagaagtacatcctactcgcccccaaattaagagattaattcgaggaagaggccttggtggacaactagatcttgcccccgagaggggtaagatcctagggtcgtcatgggatcggcaggccacccaagacggatctagacgacgtagagtcaaatatgagtgaatgtggatatgcagaagactacaactagaactatgctacatctactcctagggcaggaaaagtaaataaggtaattggtttgattggaatgtgttcgggggttctcaatcggccgtacccctttattgaa

SEQ ID NO: 125865 - DNA, 1112 bp, Zea mays
  Clone ID: MRT4577_46259C.1
caatgttctttgaccaccgagcaaaccccagcctccgttactctccttcctcttggctcgcttcggctcccgtcgtccccttccttgagatctctaggatacgagcgcattcgcatcgcttcgcctccgccgcggcctggggagatggcgggtttgggaaaggcgatgtacgcggtgggattctggatccgggagaccggtcaggccctcgatcgcctcggctgccgcctgcagggcaagtacttcttccacgagcagatttcaaggcatcgcaccatcatgaatatctttgacaaatcccttattggtgatgttcaagtcgggcaaggagcttccatttggtatgggtgcgtcttaagaggggacgcaaacaacatacaaattggatctgggaccaatatacaagacaattctcttgtgcatgtggctaaatctaatctaagtgggaaagtctttccaacaatcattggtaataacgtcacaataggtcacagtgctgtgttacaaggatgcacggttgaggatgaggcttttgttggcatgggggcaaccctattagatggtgtcgttgttgaaaagcatgggatggtagctgcaggatcccttgtaagacagaatactaggatcccttgtggagaggtatggggagggaaccctgccaaatttctgaggaagctcacagatgacgagatcgcatttatcacggaatcagcttccaactattccaatctgtccaaggtgcatgctgccgagaatgccaagcctcttgaaaagattgagtttgagaaggtgttacgcaagaagtttgctcaccaggatgaggagtatgattcctccatcggcatcactcgaggggccccaccggagctgacatccccaaatccagcccaataaacctctgtttttgtttctgttttctctttgacgccttaatcattttgtattggacagcgctggattttgaccgggccatagttccatgacttaggtggcttatgtttacttttcctccccaataatcttgggtcgagcgatgttataaagctggccatgcacttcttccagattctgtattcgttgtgtttaagatgtgctccctggagagttccacc

SEQ ID NO: 125866 - DNA, 467 bp, Zea mays
  Clone ID: MRT4577_4625C.1
ttgtttcgcgcgcacgcctccgcctgcggccccgcgacttcgtcgagcacctgcacttgcacctccacgggcgcgcccatggcaaccggatccgccgcgggagaggagtcatcagcggcggcgcgccgcctcacgtcgcctctccctgcacctgctgcagcccgccccggccccggccgaccgccaccagcagccgctggccctcgcggcgtgcgcgcgccgcgtagagggcggcgcggacgtggcggcggcgctcgcggcgtacctccacggccggcaccgcgccgtgcagatgcggctgttggacttcttccgggcgcgccccgacctgcagacgcccgtcgagctgtccacggacgtgcaccgcgagctctgttaccgtcagctgagcgcgctcgagctcgaggccggtgtgcgcccgctcacgctcatggccaccgaccccgacgagtacttggacgtcatgg

SEQ ID NO: 125867 - DNA, 573 bp, Zea mays
  Clone ID: MRT4577_46260C.1
tcggccgggaactacacacataccttctgaacaactaacatacttgtgccttctcatatctactcaacaatatcccattcatcatgtcagacaaactcacggacactgaagttggcggcgagcaaacccaatacgaaggcatccacacctatgtcgaaccacacgacaagaagtacggccaattaagcaactcttcagaaggcacatcagtccacgcaaagaccgcggatcctggcgccccaaacacgcatggtatcacgcctgcagataagatccgctacggccaaagcattcaggagggtggcatgggcggcaagacgacatcgtcaagcgggcatgcaaaggcagacacgggatttggaggtacgaaagcgctagccgatgatgagggcgcagcgaagcagaggcgggagcagggatatgggggaagtaaagatatggatcggaccattggtgcataggtttagctaaagtacaactgggatacgtatatgtacttgtacaataatgatgtaaaacgtgtctagtctaagatgtatttccttctcgaaaaaaaaaaaaaaaaaagcggcc

SEQ ID NO: 125868 - DNA, 1670 bp, Zea mays
  Clone ID: MRT4577_46261C.1
gcactactgatgctttctagcttagtagttaactcattattgtgtatgctcataatttccattttctctagcaaatttttgatagtattctgagagctagctaaattagctttaagtttttcattctttttaacaagactgtcatcgataattgaggatacagctttagaatctaattgcttaattttagttgttatctcacaattcaaatttggaaaagtttcaaattttaacaagacttttacaaattaagcttaaaatgacctattttgaagagtgccatcttagagtgacccattttatcaaatttgtctaccttttgacattaaacctttctaaatttactctcaattagggctagtttgaaaacctaattatttcagataatttttatttccaaaaaaatagttattttatcttggaaaaataaaaatcacttgataaaaagaggctatcaaactagcccctcaaatggggcaaaaaggcaatgttctttgaccaccgagcaaaccccagcctccgttactctccttcctcttggctcgcttcggctcccgtcgtccccttccttgagatctctaggatacgagcgcattcgcatcgcttcgcctccgccgcggcctggggagatggcgggtttgggaaaggcgatgtacgcggtgggattctggatccgggagaccggtcaggccctcgatcgcctcggctgccgcctgcagggcaagtacttcttccacgagcagatttcaaggcatcgcaccatcatgaatatctttgacaaatccccacatgttcatagggatgcatttgttgctccaagtgcatcccttattggtgatgttcaagtcgggcaaggagcttccatttggtatgggtgcgtcttaagaggggacgcaaacaacatacaaattggatctgggaccaatatacaagacaattctcttgtgcatgtggctaaatctaatctaagtgggaaagtctttccaacaatcattggtaataacgtcacaataggtcacagtgctgtgttacaaggatgcacggttgaggatgaagcttttgttggcatgggggcaaccctattagatggtgtcgttgttgaaaagcatgggatggtagctgcaggatcccttgtaagacagaatactaggatcccttgtggagaggtatggggagggaaccctgccaaatttctgaggaagctcacagatgacgagatcgcatttatcacggaatcagcttccaactattccaatctgtccaaggtgcatgctgccgagaatgccaagcctcttgaaaagattgagtttgagaaggtgttgcgcaagaagtttgctcaccaggatgaggagtatgattcctccatcggcatcactcgagggtccccaccggagctgacatccccaaatccagcccaataaacctctgtttttgtttctgttttctctttgacgccttaattattttgtattggacagcgctggattttgaccgggccatagttccatgacttaggtggtttatgtttacttttcctccccaataatcttgggtcgagcgatgttataaagctggtcatgcacttcttccagattctgtattcggtatgtttaagatgtgctccctggagagttccaccaaataaactgaaatgcattgttttgacaggt

SEQ ID NO: 125869 - DNA, 250 bp, Zea mays
  Clone ID: MRT4577_46262C.1
ggactacttcaagaggttgttcatctttttgaaggataaggatggctattggagggggtttgctgtcaacctggcctctggtggtgctgctggtgctttctctttattatttgtgtactacctatactacgcgagaacatggttatctaatgactcgatatgctgtcaagggaggaggtgaaactcattactatgtgcacggttatctatgccttatgacactgaagttttatagtatcgttggtctata

SEQ ID NO: 125870 - DNA, 1869 bp, Zea mays
  Clone ID: MRT4577_46263C.1
ctcgaggccggccgggacgactctcggcaacggatattctcggctctcgcatcgatgaagaacgtagcaaaatgcgatacctggtgtgaattgcagaatcccgcgaaccatcgagtttttgaacgcaagttgcgcccgaagccttctggcggagggcacgtctgcctgggcgtcacgcacaccaggtccagtgcccagcctccgtccctctccttcccttacctcgcctcgtctcctctccttgagatctccagggtacgagcgcattcgcgattttggccgcctccgccgccgtccggggagatggcgggtctgggaaaggcgatgtacgcggtggggttctggatccgggagactggccaggccctcgaccgcctgggctgccgcctgcagggcaagtacttcttccacgagcagatttcaaggcatcgcaccatcatgaatatctttgacaaaacccctcatgtgcataaagacgcatttgttgctccaagtgcatcccttattggtgatgttcaagtcgggtcaggagcttccatttggtatgggtgcgtcttaagaggggatgcaaacatcatacaaattggatctgggaccaatatacaagacaattctcttatacatgtggctaaatctaatctaagtgggaaggtctttccaacaaccattggtaataacgtcacagtaggtcatagtgctgtgttacaaggatgcacggttgaggatgaggcttttgttggcattggggcaaccctattagatggtgttgttgttgaaaagcacggaatggtggctgctggagccctcgtacgacagaatactaggatcccttgtggagaggttgagcacacttcctcaactgtcctttgctttgggttcttaattaagccgtctcaagcacctttaccttttttatttcatcgactagtttcaccaagacagggttttcttgtgatgatggaaccccaatgacacagactgcatcgagcactaaattattgttcttcggtgtctaatacatttccatgtggcatacatatttacaggccttgtgcagtggtgactggtgagagagatgtctcactgggtcgcaggttcgaagcagtctctccccatttacggggagaagacttgcctccgtttatgccttcattggatcccactcatgtgggaacttcgggcactgggtctgccctttatacatatttatagtgtccatgagtggaagtggaacgataatatgctctagaggccttgttttgtatcttatttctgcatgatttcatgactatgctttgttggatttaggtatggggagggaaccctgccaaatttctgaggaagctcacagatgacgagatcagtttcattgcggaatcagctgccaactattccaatctgtccaaggtccatgctgctgagaatgccaaacctcttgaaaagattgagtttgagaaggtgttgggcaagaagtttgctcaccaggatgagtatgattcctcgattggcgtcactgaaggggcaccaccagagctcacgtccccaaatccagcccaatgaacctctgtttctgttttctctttggcgccttaatcattttctgttggacagtgctggatcgttgatcggggtactgttccatgacactggtggtttatgtttacttttcctccccaataatcttggatcgagcgatgttataaagctggccatgcacttcttccagattctgtattcggtatgtttaagatgtgctccctttcataacctctgaagagtagttttagcaccgtccatattcgtcatgagttctgtactatgctttctggcccggcgtgtatgaaccatctttataaaaatctcttaagc

SEQ ID NO: 125871 - DNA, 312 bp, Zea mays
  Clone ID: MRT4577_46264C.1
tcgactcaagccacgcgtcatttggtggcacgaaacataggatcacatcatctacagcaacttgtactagtaggcctggctgcctactctcagcacctacttcaaccttacatcacaaccaactgtctacatagaactctgcagccaattctcagcttcacctaccatttactcagctagcggctgattacctgactgaatctgcaacatataaccaactgtcaccagagcactctgctgctctattgacaacaacgtgagttatcaccattcacacagctagcatatatgatacctgttgacttattgaca

SEQ ID NO: 125872 - DNA, 302 bp, Zea mays
  Clone ID: MRT4577_46265C.1
cgaaaaaaaagctatgagcggcaagggtcccatttctcaattcatcctccaccattatcgccactttaacgctgccgctctagtggatgctgccaaggggtatgaagcacacctcgcaggtggaggtaaaatgttggttgctttggctggcgctatgagcacagccgaacttggaatctcgctggctgaaatgattcgtcaagataaagttcacctcatttcttgcaccggagccaatctcgaggaggatgttatgaacctcgttgcccactcgcattacaagagagtcaccaactatcgcg

SEQ ID NO: 125873 - DNA, 1982 bp, Zea mays
  Clone ID: MRT4577_46266C.1
gtttttcattctttttaacaagactgtcatcgataattgaggatacagctttagaatctaattgcttaattttagttgttatctcgcaattcaaatttgaaaaagtttcaaattttaacaagacttttgcaaattaagcttaaaatgacctattttgaagagtgccatcttagagtgacccattttatcaaatttgtctaccttttgacattaaacctttctaaatttactctcaattagggctagtttgaaaacctaattatttcagatagtttttatttccaaaaaaatagttattttatcttggaaaaataaaaatcacttgataaaaagaggctatctaactagcccctcaaatggggcaaaaaggcaatgttcctcgagccgcgcgggaaccggctaccaccgagcgaaccccagcacaccggtccagtgcccagcctccgtccctctccttcccttacctcgcctcgtctcctctccttgagatctccagggtacgagcgcattcgcgattttggccgcctccgccgccgtccggggagatggcgggtctgggaaaggcgatgtacgcggtggggttctggatccgggagactggccaggccctcgaccgcctgggctgccgcctgcagggcaagtacttcttccacgagcagatttcaaggcatcgcaccatcatgaatatctttgacaaaacccctcatgtgcataaagacgcatttgttgctccaagtgcatcccttattggtgatgttcaagtcgggtcaggagcttccatttggtatgggtgcgtcttaagaggggatgcaaacatcatacaaattggatctgggaccaatatacaagacaattctcttatacatgtggctaaatctaatctaagtgggaaggtctttccaacaaccattggtaataacgtcacagtaggtcatagtgctgtgttacaaggatgcacggttgaggatgaggcttttgttggcattggggcaaccctattagatggtgttgttgttgaaaagcacggaatggtggctgctggagccctcgtacgacagaatactaggatcccttgtggagaggtatggggagggaaccctgccaaatttctgaggaagctcacagatgacgagatcagtttcattgcggaatcagctgccaactattccaatctgtccaaggtccatgctgctgagaatgccaaacctcttgaaaagatcgagtttgagaaggtgttgggcaagaagtttgctcaccaggatgagtatgattcctcgattggcgtcactgaaggggcaccaccagagctcacgtccccaaatccagcccaatgaacctctgtttctgttttctctttggcgccttaatcattttctgttggacagtgctggatcgttgatcggggcactgttccatgacactggtggtttatgtttacttttcctccccaataatcttgggtcgagcgatgttataaagctggccatgcacttcttccagattctgtattcggcatgtttaagatgtgctccctttcataacctctgaagagtagttttagcaccgtccatattcgtcatgagttctgtactatgctttctggcccggcgtgtatgaaccatctttataaaaatctcttaagcacacattactcctatgaaatgattgatactggattgacacagaaaaaaaaaaaaaaaaaatccctgctcttgtggacatccttaaatagtatgagaggaaacatttcgtttgtctcttaaaaaacttaattattttgtattggacagcgctggattttgaccgggccatagttccatgacttaggtggtttatgtttacttttcctccccaataatcttgggtcgagcgatgttataaagctggtcatgcacttcttccagattctgtattcggtatgtttaagatgtgctccctggagagttccaccaaataaactgaaatgcattgttttgacaggt

SEQ ID NO: 125874 - DNA, 307 bp, Zea mays
  Clone ID: MRT4577_46267C.1
atccacacatccacagaatccattattttttcttctatataatatatacaaacaacaggtatcacttctcctatctaagcattaacatcttaacatgaatacctccataccataaccacaaaaaagcccaataacgctccaaacgctaagactaactatgactgtacacatacttacatacatgacgctgctactatcattacacatgcctatatatcagcacgctcaacgctatacaccaaatctaatacagctacgcttgtacatgtttatcatcatatagcattttacgaacctaacaaacatt

SEQ ID NO: 125875 - DNA, 585 bp, Zea mays
  Clone ID: MRT4577_46268C.1
gcacatattattgagaacaacaagcaacatagaaagcgcaatccagtaccaacaacggagcaacaaaggcgaccactacttatgcccttcgtacgctccttgcgcgctgtgactgtgaccataacgcgacaatgctccctcgctgctatcaagctcctatagctcccgtacctcccacaaaccgttgcatcaatgatagcgaaaacacagtgaaaacacacctacttgatccatataggattcaccaagcaaatgcaacatgcatcatacctgtatcaccctcgatgattaaacatatgacatccctatctttggggcaatcaatggtacaaaccaataaggcacaaaaaacgacaaaaccttggctaactgaaaccaaccaactacttttagcaaaactagctccctacattcaaccacatcaatgtattgcattcaacatacttatctacactgacccctgctactaattagccagatcaacttatgaccattcacacagatagctactgtctactcacatgaacaacaacgaactttcattgaacaaatacagccgcactgaacaccactatttattcagat

SEQ ID NO: 125876 - DNA, 184 bp, Zea mays
  Clone ID: MRT4577_46269C.1
cgcagacttttctgtttctacgtattctgtggttgacaatacattgttgcggtttaagggcgcatccgattggtggacttgcacatgccgttcgacaaaaaataaagacaaagccagatgctaccgtcaagaaggacagaacctcaagcgcaaaaataaacatactcaaggaagggggtgcccc

SEQ ID NO: 125877 - DNA, 2192 bp, Zea mays
  Clone ID: MRT4577_4626C.1
gtttttcagagaaatgggtgttgataagaaaacaacaggaaaaattctgtgtcgttcgcctgaaatatttgcttcaaacgtggataacaccctcaagaagaaaatcgattttcttaccaactttggtgtttctaaacatcatcttcctcgcatcattcggaagtatccagaacttttattgttggacataaattgtacattgctccctaggatgaactacttattggagatgggtttgtctaagaaagatctgtgctcaatgatctttagattttccccacttctaggttacagtattgaacttgttatgaaaccaaagcttgagtttctgctaagaaccatgaagaagccacttaaagcagttgtagaatacccaaggtacttcagttattcactcgaggggaagatcaaaccgcggttctgggtattgcagagtagaaacatagactgcactctgacagagatgttagcaaagaacgatgaactctttgctgaagagtacttgggacttggaggattgctcgagaaacctctacaatcaagcataggcagttaatttctggacttataagattgaaccatgcagtgcactatgccgaagctgtacagctttatgcttggattggtgaggctgtttttcagatgggaggtcacttttttttgaaaacggaggagatgtgtcgctggctgttcttgctatggtacccgcaaaaataattaaaacaaggactgtggctgacgcactctcaaacaacagttgggtttcagatattaaaggaggactgtccatgattggtctgttcgaaattttcagctatgggacaccacacatggagtttctttaaccactgacaatgatcgccatatctggagattctctggttggggtgaattctcgtcgaaatcggcctacagagtcttcttccatggtttggtctcctttgatccttggaagcgtatttggaaaacttggactccacctaattgcaagattttcttttggatacctgtccgaaatcgctgttggactgcggaccgattggctcggagaggactggcacacctagtccattgaattctttgcgaccaggaagaggagaatattaatcacaatttgttttcctatgttttcttgagggaattctggtttagagttttctcctggctggtgtatgttgaccgtgtgccggggtcccaggagcaatcgcttgcagattggtggtgaaaggcttgcaaacatctcccaaaagaaaaaaagggaagggcatgaattcgatgattatgttgggagcttggatcctatggaagcatcgcaatgcctgcgtcttcgaaggtttgcagctgagtatgtggaatgttctgcatgctctcgaagatgaacagcatctctggtgtctcgccggagtgcaaggactgcagagtttaggcctgggctccctgagcggttaggtggcatttcctggtctggtctcaccatttctatttgctgtaagagttttgttcttgtaagcacagcccctcacggctcgggctcggtccggaatgaggggtaaaacttgtacgggaggccacttttctggtgcttagtattaaaaaggtaatacttgttctcatgaaagtgacctaacaaaagttataggtacaaatatagactggagtgatgttgttaactcaataccaaaacagcaatgcattgggttttgagaatacttcattcaaggtttaagaagaaattgcaaagatgcggtttcaaactaggaaacggagtgaaggatgccccacacctttgagtggatgcgcgcaggaaccaatgcaagctgtagtaaggccttgaagtataaggcaacccaagtctgccatcatctctttctcgttgaactgaagcctgtccatgcctccatggcccagtccagcatcatcgccaatcagagctgagggcagccgcagagccagcggtagctagtcggctagtccattgactggccggtgcaggggtcacggactcacggttctgcatttcatattttcgtttaggtgtcgtttggatccgtttattttggaggaattagaatttatttaatagagtaggctatttagcttggaatttgacattccaccactttacaatgttaaaaaataagttatctcaaatttatagaatggaattgactttatgtaattccaaaaccccc

SEQ ID NO: 125878 - DNA, 336 bp, Zea mays
  Clone ID: MRT4577_46270C.1
aaggggccttggtattttttggccttattagcattattataattgggacacgtacagccacatacagttgatttgtacactgatgacacattccgggggtgcaaacccgtaagaaaacgaaaatttaccccacatttgggttacacacattatacatttggggggatgggccattgagcggccgatgtggcaacaaaactccttgtttgacgcccagggaagcaacacttgttgtgggcgctggacttgaaggggatggccctgaggaccacctgggggtacaccgccgaaagggccgcttcggggaacgggcccacccaaaatattcagggggcg

SEQ ID NO: 125879 - DNA, 712 bp, Zea mays
  Clone ID: MRT4577_46271C.1
tttttttttttttttttttcctgaaaaaaagatcccattctaagtccgtgctatgcttttttttttcgagactgttactggtttccagatcaccccctgtttatacctccaaacctttcttgattacgaattgcataacccatcaaacgcccctgctccttactgccaagaagatcctccatacggtgttgttccgtaagctgtcatgccacctccgtacgccgtctggccgccaccaccaccgtaaggcgtagtgtaccctccatcctgccaaggtgtggtaccgccgtccatgttcatatcgggacttcgaggaccatcaaactcagcttcgtcaccgccatacttccgagggtctaggcccttgagaagaccaccgatcttttgttgcaaaactctaataccgttttgcacgatttggtcaggttccatgctccctgacgtttcaacctcgaagtagaacctgtttggaactgcatcgtagtcgaaaggttcgccttcttgaggaggctcttcccactcagcatatttgctcttgggccattcaacagcagggtctgtgtcgttttcgaaccaccagtcaatgtggtggagcttgttatgaggatcatactcaaagccgactgcagatgtaggcatccacttggcgtgctcctttgcgattcccttcttggcaatgcagctaatcttcaactcttggcccttgcgcagc

SEQ ID NO: 125880 - DNA, 202 bp, Zea mays
  Clone ID: MRT4577_46272C.1
ggaaaaaagttcctgcgaccttgaccaggggggggaatcttttttctaaaactaaagcatgtttccaaaactttttgggggcggaccccaaccgatctttcccaaagctgggggatccccggttttgtccagcccctgaataaacttggggaaaaaattttggcctaatttatttccataaacccagggccggggccccaaa

SEQ ID NO: 125881 - DNA, 293 bp, Zea mays
  Clone ID: MRT4577_46273C.1
caggcatagccctggggtcacacgaaaatgcttggggaatctcgtgtttcttcttaagacttttgggacatggtttgactctcgaacatcaccgacgtgtctcctgtttttctgggtggcctcgggacacctgccctgcccctacgacggtcatgactgtgactctttatttggtcaggcaggtgctctggacatttgccttgctggatggggactgccgatgtggtatggagcagacaggaggaatcatttcaggcctgtgtgtgaaaggaagctccagtgtcacctgcatc

SEQ ID NO: 125882 - DNA, 272 bp, Zea mays
  Clone ID: MRT4577_46274C.1
aaggacaatgatgaggagctacacacacacaatgtcgagcatggctgccatgcgctcgaaggcaataagatgcgactacaaaccagcccctaaatctgcaaaggctaaaatcgatcaggtgcacgaccacgctggaaagggtgcaagtgccgggctaaatgaccatcctgatagaaaccttttttgcgcaatgggaactaaaggtattgcaactgtcccgcatgcgtgatttgatactaagtctggtgacttaggcaaatatcactacatac

SEQ ID NO: 125883 - DNA, 430 bp, Zea mays
  Clone ID: MRT4577_46275C.1
attcggctcgagctacgatccaccagtttgtgccccggccactgggccacacgctgcaatggcggcacgcgcctgactcgcatgctcacaccgactcgcgaccgccagctccgcgtcttgtctagtgctggcaccgatgtcttaggagggctcaggtcgcacaccatgctcggtatcggctgggtgcccatgcccgaatgtgaccgctgggtcgcacactgcggtcaaccggacaatctgtctcaggtaggccaaaaagaaggcgaccagagcccgcatatcgatgatgcctattggtactacaggtgtgccttaccgatcacctggtgaaggaacctgacactggctcgacatatggaacgctctgtaccgtgagcggattatctacattggggacaatctagatgcagaattcagccaccaagtgttg

SEQ ID NO: 125884 - DNA, 301 bp, Zea mays
  Clone ID: MRT4577_46276C.1
gtcctgctcacggaccagttcggcaccggatccaagcccgacctcctgcacctcatcacgtacgttggcaacatattcgaggtgcacatcatagaccacgggatccatgacttctactttacgctcaacgaggccctgacttacaactacacgctccacaccatcgccgcactaaagtacccgctctgcatacgctttattgcgacgattcacggttacccgctcttcgactacaataacttcgcctatcataagggtggcaccacctataatacctcacatggcttgttaataaccattc

SEQ ID NO: 125885 - DNA, 446 bp, Zea mays
  Clone ID: MRT4577_46277C.1
gaagataatcaaaaaaaaggtccctcctgcttcgccttcccctcatgccgtccacttcctccccgagatctccccatgcctgctctcccgcctcctgctagctaatctagcctacccacttgcgtgaggacgtgcatgaccactccctgcatgcgatatcaccaacgcttccgtgctcgaatgtctccacaaaaacatgcatcaaaaaataatagtggatctaaggcttatagcacaacctagctatcttctgggagctgaggttataaccaaacgtgcttacgatattgccattgcacaacacgccaacaaggatctggccgacgcactcatagatcattccgaatggctccacgttatgctactcccgcgccactagtcttaatactgactcgccgcctatacagccatcagctgcagtaatgctgccacactcttgtctatcg

SEQ ID NO: 125886 - DNA, 341 bp, Zea mays
  Clone ID: MRT4577_46278C.1
aatattgtaatctaaaatttagtaattaaatacaggtcgtgaattaataaattctaatttattacttttaacaacgcagatgtctgtgatggactgacaatcaattattctgtaacaaactaatcaaactagatttgtgcagatcatatcaatgttgggaataaattcgggcttagttccacaatcaactaataccagttgagagtcgtgcaccaccaccagctactgtgagctgagctaatgttaactcctggtagtaacaagacaattggaagctgtgtgtggctatattctgaaacgctgaactttgtctggacaaaaatgcaaccggttttttgcat

SEQ ID NO: 125887 - DNA, 176 bp, Zea mays
  Clone ID: MRT4577_46279C.1
caactaagggcataataggatacaactcataacaacagtgacaacgggtgcggaattatcacatgaagatgaagccattgtttgatcacaaaatgcatctcataacacaactcttcattttgataacccatttcatacaagtaccaggaacaacaggggcaactaactaagggctt

SEQ ID NO: 125888 - DNA, 309 bp, Zea mays
  Clone ID: MRT4577_4627C.1
aaaaaacataacagcacaatggaaaggctccttataatgatcacaatatgaaaaaacataaagggggacatgaatgctagcttctggagccaaaagtcaaggcaataatcagaaagattgtacatcctatactgaaacactaaagggctgcccattttacatacccaagatgaccctcccctgacgtgaaagatgcatttctgtctttagtggccctaaaattaaattagctggcctagattttaacagtattattccgggaaaaccccagggtttactaagctaatggcctttatagaaaatcccttt

SEQ ID NO: 125889 - DNA, 864 bp, Zea mays
  unsure (1)..(864): unsure at all n locations
  Clone ID: MRT4577_46280C.1
tcgaggggccggccgggcccgggaaaaaaaaaaaaaaaaaaaaaaaagggaagcaagcatattctagctagagctggtacctagtagtagttcttgggcggcatggatcagcttgatgagcagtcgttcctggacgagcttatgtcgctgcgccgggaggaggcgccggtgccggctccggctccgtggcaggcgtacccgggcagcggcatgatgacgacgagcgacctcctactctacggcggcgacggcaccaccgaggcgagcagcggaatggactttgccgggccgattcagcagcccatggcgccaccgccgggcacgtctccccacgggccgcacgaggagttcaacttcgactgcctcagcgaagtgtgcaatccttataggagctgcgtcggcgtcgtccctcggcatggggtcgcccacggggccggccaggcgctgtctcagtttcccctccacgacgccatggcggaggacggccccagcggcggcaacctgcatcgcggtggtgggtcgtcgtcgtcaccggtgccgatcgtgttcggagcaggaggcgccggggagagcccggangatgataaggggcgtcctcaccggcgcccacgctagaggcaagctcaacggcggcactacgtccaagaacctcatggcggaaaggcggcgccggaagcgtctgaacgaccgcctctccatgctccgctccatcatgcccaagattaccaaagatggataggacctcngatccttggggacaccatagactacgtgaatgaactaaccgagcggatcaaaccttccgaggaggagatcggcgccacgccggaggagctgaacctgctggacactaggaagaatttc

SEQ ID NO: 125890 - DNA, 770 bp, Zea mays
  Clone ID: MRT4577_46281C.1
cattgggtacctcgaggccggccgggctctctctcctctacctccttttcctctaacctttagctttcctccctccctctcctctctcccccctcctctaacaagaactactcccagccattcagatcctaagttgctgaccttgctgctgcttagttggagatagatttgttggttctaagttcgaagtaccatgagtccaccgagtgtgatggggcagtttggggacacaacctacaccaaggtttttgttgggggactcgcgtgggaaacccagaaggagacgatgaggaagtacttcgagcagtttggggagatcctggaggctgttgtcatcactgacaagaacactggcagatccaagggctacggatttgtactctccatataccccagactatggttatccaacaaacttctacaatatatatggaggagctcagtacccgttttatggaggagcaacagctggcatggtgacaggaacaagtcccttttatccatatttccaatttgggcagtcaggaaacactactaccaactatacaagtggacaaggctacaacttgcaacaatacccacaaatgttccacttctcaactgtatcttctacagctgcagctgtgaccggctttgctcagcaatatggaggaccattgtcactagcagcaagccctcaagccccagcagtgtgtatccccattaaacaggcatgactatggcactcacagcttccacccctgcccactcaacacaggctgctcatcctt

SEQ ID NO: 125891 - DNA, 724 bp, Zea mays
  unsure (1)..(724): unsure at all n locations
  Clone ID: MRT4577_46282C.1
gccggccgggctcgcggaccccttttcctctaacctttagctttcctccctccctcctctctttctctcctctaacaagaacttagtcccggcagttcagatcctaagttgctgaccttgctgctgcttgttggagatagatttgctgcttctaagttggaaataccatgagtccaccgagtgtgatggggcagtttggggacacgacctacaccaaggtttttgttgggggactcgcgtgggaaacccagaaggagactatgaggaagtatttcgagcagtttggagagatcctggaggctgttgtcatcactgacaagaacactggcagatccaagggctacggatttgttaccttccgggactcggatgcggcaatgagagcttgcgttgatcctgcaccggtgattgatgggaggagggctaactgtaatcttgcttcccttggggttcaaagatctaggcctcctactccccagcatggtactctccatataccctagactacggttatccaacaaacttttataatatatatggaggacctcagtacccattttatggaggaggagctggcatggtgacaggaacaagtcccttttatccatatctccagtttgggcaatcaggaaacactactaccaactatacaagtggacaaggctacnacttgcaatacccacaaatgttccaccttctcaactgtatcatctacagctgcagc

SEQ ID NO: 125892 - DNA, 964 bp, Zea mays
  Clone ID: MRT4577_46283C.1
gcggcgctcgagccggccgggccggggtggcgggtgcattatagcaaactctagtatatattgctgtttcggtaccctaccccctctctctctctcctctacctccttttcctctaacctttagctttcctccctccctccctctcctctctcctctctccccctcctctaacaagaactactcccagccattcagatcctaagttgctgaccttgctgctgcttgttggagatagatttgttggttctaagttcgaagtaccatgagtccaccgagtgtgatggggcagtttggggacacaacctacaccaaggtttttgttgggggactcgcgtgggaaacccagaaggagacgatgaggaagtacttcgagcagtttggggagatcctggaggctgttgtcatcactgacaagaacactggcagatccaagggctacggatttgttaccttccgggatccggacgcggcgatgagagcttgcgttgatcccgcaccggtgattgatgggaggagggctaactgtaatcttgcttcccttggggttcaaagatctaggcctcctactccccagcatggaggagctagaaactttagagtaatgaaatccttcagccagcaggcaggaatccaaggtggactcggcgcagcttttccttctcatgccaccttccctcattatgccatcccacaaggccttcccttccatgtctatgggtactctccatataccccagactatggttatccaacaaacttctacaatatatatggaggagctcagtacccattttatggaggagcaacagctggcatggtgacaggaacaagtcccttttatccatatttccaatttgggcagtcaggaaacactactaccaactatacaagtggacaaggctacaacttgcaacaatacccacaaatgttccacttctcaactgtatcttctacagctgcagc

SEQ ID NO: 125893 - DNA, 259 bp, Zea mays
  unsure (1)..(259): unsure at all n locations
  Clone ID: MRT4577_46284C.1
ctcgagccggccgggactcagtccagtgctcgctgccaccacgccctgacctagcccggacaccagccagaacaggccatgtccatgggctccccggtgcagctcaggcggctgaagcctctgtaccagttcgtggtgaacaacatcctggccatcgtggccgtgccgctcgccaccgtgtnnttgntctntgtcgtttttctctccccccttcccttctttctgtctcttgccgcgtcgcgctgcccttctccgtcgc

SEQ ID NO: 125894 - DNA, 1273 bp, Zea mays
  unsure (1)..(1273): unsure at all n locations
  Clone ID: MRT4577_46285C.1
gggccggccaaaaaaaaaaaaaaaaacacgactctcggcaacggatatctcggctctcgcatcgatgaagaacgtagcaaaatgcgatacctggtgtgaattgcagaatcccgcgaaccatcgagtttttgaacgcaagttgcgcccgaagccttctggcggagggcacgtctgcctgggcgtcgcgccgccgcggcctctctcctctaccccttttcctctaacctttagctttcctccctccctcctctctttctctcctctaacaagaacttagtcccggcagttcagatcctaagttgctgaccttgctgctgcttgttggagatagatttgctgcttctaagttggaaataccatgagtccaccgagtgtgatggggcagtttggggacacgacctacaccaaggtttttgttgggggactcgcgtgggaaacccagaaggagactatgaggaagtatttcgagcagtttggagagatcctggaggctgttgtcatcactgacaagaacactggcagatccaagggctacggatttgttaccttccgggactcggatgcggcaatgagagcttgcgttgatcctgcaccggtgattgatgggaggagggctaactgtaatcttgcttcccttggggttcaaagatctaggcctcctactccccagcatggaggggctaggaactttaaagtgatgaaatctttcagccagcaggcaggaatccaaggtggactgggcgcagcttttccttctcatgccaccttccctcattatgccatcccacaaggcctcccctaccatatctatgggtactctccatataccctagactacggttatccaacaaacttttataatatatatggaggagctcagtacccattttatggaggaggagctggcatggtgacaggaacaagtcccttttatccatatttccaatttgggcaatcaggaaacactactaccaactatacaagtggacaaggctacaacttgcaacaatacccacaaatgttccacttctcaactgtatcttctacagctgcagctgtgaccggctttgctcagcaatatggaggaccattgtcactagcagcaagccctcaagcccaagcagtgtgtatccccattaaacaggcatgactatggcactcacagctccaaccatgcaactccaacacaaggtgctcatccttacggttgaatccctcccaatttggcaatttctgctggtccaaaacaaccntgggctaaccattgtctccc

SEQ ID NO: 125895 - DNA, 221 bp, Zea mays
  Clone ID: MRT4577_46286C.1
atccatgcgagccttagcaccgcttaagccgtcttggaaagcattcctgtacacgagaggagaccttctatggattcagacggaaacggggggaagctgtttcgccgtgctgtgcataggccaggactaggggggcagttccattttgcctattaaggctcgggaaaaaaaaaaaaagaggcaaaaccaaaaaaaaaagcggcggatgctgtaaccgggtg

SEQ ID NO: 125896 - DNA, 372 bp, Zea mays
  unsure (1)..(372): unsure at all n locations
  Clone ID: MRT4577_46287C.1
ccaccgccgccgcnacccccaanncgacaacaccaagagggagngcaacngcgaaccacaacggccaggccggaanccagggcggaaacgcgggcagggagcagnaccgccncgagcaagggagggggggggagggncagaagcccggngacaagaccannggcggaggagaagaagcnancaacaccnacaccagagagaccggcgcagggaagcacgaaccccgngcagggagaagggaccccgagcccacngacaaagaagaggggaggaccgacaccgagggacaagcaaaacaaccggagcagcccacaagaggcaaggaggaagcagccaacaacaacgcacgaggacacaacaccagagagaagg

SEQ ID NO: 125897 - DNA, 433 bp, Zea mays
  Clone ID: MRT4577_46288C.1
gccggccggtccgggatacatccctactgagatcagagcagctagatagatactagactaatggcagctgacttcctccgcaagccaaacatgcaagcaatcgaagcgatggagccgggcacccctgcgacggctgcgggaaggacaagcggccgacggtcatgagggaccagctcaagctgcagatcgccaggaccctgctcgagagcctccaggagccgctcaaccagaaccggcaccgtgacttcttcacatacgccgtccgtgtcgcgtcagcatgagtagacgaccacctagctgacgtagatgcaccacagccagcgcgggtgcactgtgcacctctgtgcgaactgatcgagcttgtgctcttcctcctcttcttcttcttttaaaaaagagcgtgctgcggccaaatgacacaaaaagaaaatgt

SEQ ID NO: 125898 - DNA, 578 bp, Zea mays
  Clone ID: MRT4577_46289C.1
gctttgtttggacctgccttaagattatccctgatatggacagggttacatgctgctctactcttaaaagtctttcgctccaaatctcgggatgagattcttttcaggggggagggttgtaacacccctggtctttatattctgctcgacaacaagtatggatttaagcacgtcatatcagtggataaaccgaatgctaaattttaatcatcttcgtctatcgtgatttttatatcgcatctgttttgtctgtcgtaagtttgacatcgtttttattttatccgggctcttcctaaatttttgggatgttcgaaacctagttgttctgaaaatcggtgcgtccagtgattacttaaaattcatcgctcgcgttaatacaaattcggaagctcaacctactcttacgattttattctaggcaaattaaattgaacaaggcgacaaaagtgttaatacaaaattaaatcggactacacccggaatccaagaaaaaccaggcgtagaattataaatgtgacagaacctcccaagtcattaagcccacctacagttgtccttgtctagcggacctcaagccg

SEQ ID NO: 125899 - DNA, 2852 bp, Zea mays
  Clone ID: MRT4577_4628C.1
ctcgtccgcatctaactgttcaagttcaatacattacatgctacaacttacatcatatagtgacaaattggaacgagaactgtttacaggtaatttatatcaggggtaaacacccaaaaccaactgacaggatggctggagtgttggccttttgacttcttcttctttttttccatcaagatgtgaattgtcaactcaatgaagttgttgtagcatatgttttatttgcccattcagtcatcagctgacaggagggtctggactgcatgttccatagtcggtcttttgcttctgtcttcctccaagcaggagaccgccaatttgatcagtgttcttgcttgcacatagttgactggacgattcagttttgaatccagatacccatcaatccacgattgttcctccccttcaagtttggcagaaagcatcctgacaagctttctaagcatactatgcacctcatctgtgcctcccaccaactctgaaactctggtgcctgtcaatagctccagtagcacaaccccataactgtatacatcgacttttgctgtgatcgggaggctggaaacccactcaggtgcaatgtaacctagcgttcctctgacatgggatacgttctgggtggaccctcctctgttcagcaacttcaccaacccaaagtcagtgatcttgggctcaaaagcttggtctaacagtatgttctcaggtttcacatcacagtggatgacccactctaagcactcatggtggagataggctaacccttttgcaacacctaacgcaatgttgaaccttccctcccagtccaataagatgttgcctccttcactgaacaaaatgttagccagtgatccattctcaacatattcggagaccaacaacctatgagatccctctgaacagaagccccatatcctcacaaggttcatgtggttgatcctcccaattacacttagctcagcctgaaacacttccttgccttgccttacattctccagcttcttcacagccacatgcctatcatcttctaggacacctttgtacacagtgcctgattctcccctccctagctcaaccttgaattttctggtcgccttcacaagttccctgtagctgtaccttctaaaattactagtcattgctttgtaacctttctcagacgcccatagttcagatggcctgagttctctcttcaaaacaaagaaccacgcaaacgaaatgaaggaaacttcaacgacaaaaaatgcagctatgaacccatagaagtaaaaccatttcgattctcctccgccggtcttgtgcacatctggaaacggttctctgatgcttttgttcatccgatcgcagtcgagacgacggggcacggaatcgaacacgtcggaacgtggaataagggcatttgaaacactgacccctgttggaagcttgagatatatcgttcgcacgtcagatgttgggtaggttcttccactgaaaagataagcttttggatagcatgatcctgtgccttcctgatactgaaagcctttacaggtgcagtcactgatgcagatatccctacaagttcgaagagaaaccgacagaagatgttgctgatccgacccccaaaaatccgtattgggaagtcgcacaaatctcatagacctcttgtcatagcggtcacaggttgtgttgacaatagccatacagccttcagtccagttacccgggttcctcgtcgcataacctggtgggcacgaacatgtaggtgtgggtgagtagtggcagatgccattaggaccacacaaaccgtgaatattgcaaggctgggtcattgctaccattgaaactgaccatgacccatctgaatcgttcatgctgtacagacggagattgccatcagggtcaagagttagccttctcttgacgcccggccctacgtcggaggccacaagcgcctgaccatcagcgaagtcgctcgaggcaagcaccccgctatcagtaagcattcctaacctcgtactgttatactggttccggccatcctggtagaggttctggtcagggtctggccagtatatgtctgagacttgaggcacgtggtatataagcgacagcactgagaggtcgctgaagcggaagatgtagttaccaggactacgcgattgggttgtggggactaatctggtcgcagcagtgatgagctgcgtcggcaggaaagtgtccgttggggaatcgaaactctgccatacagtgttacctcctgagtcctcgatgacgaggttcccggtgtccaggagccgagcacgctggacgccggtgaagttgttgccatcagctcgccacacggctgcgccgtcgtagtcggtgagcaccatgttgccgtccttttgcagggttagagccgacctcctggcatggacagggcggtcagggtttgcgctccacacgatggtcttgttgttggccgccgccgcctccgtctttgagtaccatactgagaatgtgaaggcatgggtgtagacttcgtagaagccagaggagaatgtcccgtctgatgattgtaaggtgctggattcgtaggactcgacttcgagagaggagcccagtggtaggatgtctcgggatgatgcagctcttggaaacagagcgatgaagaaggagaggatgcaagcggtagagaggagagctgcaagaggacgaggcatcgttgctagatggggttttggtcgatgaacgcgcagggccagctacttgtatccgtggtatgccgagtttctgtcttagtcctgatagcgaaacgccattacctggtcaaattcagagtgccatggagttcaagttgtttaagtttaaaaaaaaaaaaaaaaaaa

SEQ ID NO: 125900 - DNA, 697 bp, Zea mays
  Clone ID: MRT4577_46290C.1
gtcaaataatataccaaatttaagagttcacggtggtcttttgaaattagcaccagggttgattatatcgaattaaaccggtaaagtgaaccacacccaaaatagtaataatcctacacgaagagatcttttctactgcaactacagaatttattagacccacgatcaatgattgtttttatattagtatagtacatgaaagacatccacaagtgcatttatatgatcaatgcttctgacgtcatcctgtgactgaaacattctttggtattagtattagctatttatcacacttgaagcagtgttgtctcacactatcactgaaggtatcctatgccagggaacaggagtaacatgtcttaattgaaaactccattactaaagcttcccgcagaatatgcagcatttcacctgtttttcttaatcagattggttgaagcttctctctagcataaccaatacattgactcggacaagtgagctggtcctgtttgaacagttctggaggcaattcaatggagcaccaccttctgtgccctaagagcttcatcatagctcccctctagtgccactacgtagtacgtacagcaagatttaaaatcaaatgtccattcctagcttgtctaggtatgcagttcaagggttgtagaaataaaactcgaccaacctaggactaggaggaactaggttgcaatgt

SEQ ID NO: 125901 - DNA, 357 bp, Zea mays
  Clone ID: MRT4577_46291C.1
aaacgcgatggtggtcgacggatcgtgcgggcgccacgtgcagcgcaccactcgcggcgtctcgtcctcccgccgagcattccggctgtgtgtctcgctctcgcctcagcagggtctatgacgggccatcacagcatgcacatggaagggagatcttgttgccgcgacgagtgctgctaccacagctgccaggcaccctggtgcaggcgctgcgagcaagagcctccaccgatgcacagggcaccgggcgagcaggcgaagtgccccggctgcgtgcagaaacgactgcctgcccgtactaagcggcgctcggtccagtggctgctccagctgcgcggccgctggttcagctgcccg

SEQ ID NO: 125902 - DNA, 1143 bp, Zea mays
  Clone ID: MRT4577_46292C.1
aattcggcacgaggggagagcgaccccagcagacaagagacagacgagagagagcgagcaagccgagcatcgtgacctctctctgtttctctctctcttcccttctcgtcttctgcaagaagccagtgaccgtctctgtttctctcattccctttcatcactctgctggtctccctcttccacctctggtcttggccatggcctccagcgcctcccggttcatcaagtgcgtcacagtgggggacggcgccgtgggaaagacctgcatgctcatctgctacaccagcaacaagttccccactgattacatacccactgtcttcgataacttcagtgcaaacgtggtagtcgacggtaccacggtgaatttgggcctttgggatactgcagggcaggaagattacaacagactgaggccactgagctaccgcggagcagatgtgttcgtgctcgccttctcgcttgtcagccgagctagctacgagaatgttatgaagaagtggctaccggagcttcagcattatgcaccgggtgtccccatagtgttggccggaactaaattggatcttcgtgaagacaggcactacttagttgaccatcctggtgcggtacctgttactacagcacagggggaggaactgcgcaagcacattggcgcaacttgctacatcgaatgcagctcaaaaactcagcagaatgtgaaagctgtgtttgatgctgccatcaaggtagtaatcaggcctccgacgaagcagcgagaaaggaagaaaaagaaagaacggcgaggatgctcaatattctgcagccgtatcatgcacgcaagaagactaggatgcttcaagtgatagaaggccttcttcgacgataacgtaggcttctaagatgaatcgagatcgtgtatagtttgtctccatgttccaaagtgctcgttgcgcttgtgcacttgggctggtaatgtgtatatttagtctttgccaattgatatttaggagaaatattaagcacttcgtttatgtaccattggctcataatgagctgggaagtccaatacatactaagaagtaacaatattttcttccgatgattttattatggtttctcgtaaaaaaaaaaaaaaaaaaaaaaaaaaaactcgagagaggg

SEQ ID NO: 125903 - DNA, 271 bp, Zea mays
  unsure (1)..(271): unsure at all n locations
  Clone ID: MRT4577_46293C.1
gaagcaacaacgtaaacagccataattattctaaataacccggtggcaatgcggggggaattaaaaactcttacaacatggggggggggaaaccacacaattctttaaaacagacccacataacacgattgcaggggcaactcacgggaaatcacgggatagggggaggaaactgggctgatgctnggtcatnaggaaacttttttagnacttggaaccctcggggccatcctngcccttatcgaactaagcgccgacctcccgggcccgg

SEQ ID NO: 125904 - DNA, 693 bp, Zea mays
  Clone ID: MRT4577_46294C.1
ccacgcgtccgaatctgtcaggagaatcggtattgaggccaatgaagaactgaggtccatattcaagagagatgtccatctaatcctccaagttagagttgcgaagaagagaagtgcttgaacagattgtgagtacgtttcacattgcattcatcacactgttacagtactctatcttgccatcatgttacagtccatctaattctccaaagtccgcatcattatttttgttcagtcttctgatctgatccgtctctgagccatatagttgatttgtctgaaggaacattatattgttttctgcagtttttagtgcctgtatagaccgctagtgatctgagaactgcagttcagtgttggcacaatgtattcaggagaatggttagtaagtggtgcttgggtgcatcagttccggggactgagttgatagaactttggattgaggatctaatggaggcactgagctgtacgggtgtgtggagccaagatttctgaagaaaggatatattggcggcaattcacatgccagtagtgacaaggaaacggcttgcggcatggtgagctgccgcacctcctggcgaatcttgggttttgtgatacttgataatatagatacgtctatgctagaccactgacacccttttttacctactttctgattcgaaaagtagcccttctctttccaggtctcag

SEQ ID NO: 125905 - DNA, 356 bp, Zea mays
  unsure (1)..(356): unsure at all n locations
  Clone ID: MRT4577_46295C.1
agtagggtgggaggcgggaggtgaggctgcggagatgtcggctgcgaggcgcggagggacctgcctgcagggacgcgggcaagctgggatgcgtggaaggaagttgcaagaagcccaagggagggacgaggtgcgagagccaggagagcctgctgtgcttgctgcggcagggtggcacgatggaaggctgggttgngacgagggggtggctggacggatggccgcaggatgcaggcagcgaggcagctgtgcagtggtggcaagggctcgggctgcgagcaagatgcggtcctggggtagatagggaaggatccacgagggagggcttgcatttggtgtgtgtgtcccgctggttg

SEQ ID NO: 125906 - DNA, 255 bp, Zea mays
  Clone ID: MRT4577_46296C.1
gacgaactctctctatactctcccatcaatccttaaattatcacgcattatgcgaactgttgcagtactcgctctctttgcccaactggcgacgtgcgccatattcaacatcacaggatcgtgcgccgacagcgaaaacggccctgtttgcgtcattacgaagagtgtagttaacccagctacagtttgcaacgggaaggctgaggcgtatgcaggagacgggaatcaatggcatgacgggctgtactggaattg

SEQ ID NO: 125907 - DNA, 281 bp, Zea mays
  Clone ID: MRT4577_46297C.1
gtcaggccagggccatggccacactggcccacacattcctttctacagagcatttctatgaagcccactcacttgccattccagggccaaaggaccggaggtttgcatatccgccccttgtttttgatttgcttccttttggtttcttgtttttgtttttgcttgattttgtcttttctctacagtttagttttgtcacaattacacatatagttttcaaaatcatgcactttctaatatggtgtcatcctgaaaaacgaacccagtgtttgcacacacac

SEQ ID NO: 125908 - DNA, 2236 bp, Zea mays
  Clone ID: MRT4577_46298C.1
atggcggcggcgggcgtttctccggcatttctccttcgtttgctctcccgatgttcagatctgagcgggttttgtgtcgggcggctcaagttccagccgcggtgtcgggtacctcggcaaggtcgaagtgatcgcagtcacttcgccctttcactgaccgacctgataggaaaacagcgccgctcgcgctgctccgactgctgtgccacccaccggggtaagactgacaacagccgagttcagcctcgggggcaacaggaagctgcgcctcgcccgaccttaggcctcggcctcgggaggaggtctccgcctcgcccgaccccaggaagctccgcctcgcccgaccttaggcctcggcctcgaaaggaggtctccgcctcgcccgaccccaaggctcggactcagcttcggcctcgggaggaatcgcgtcctcgcccgaccccggcctcggcctcaggagaagtctccgcctcgcccgaccttgggctcggaccgaccgcgccacaggggatacatcattaccctaccctagctaactcaggctacgagggaacaagatcggcgtcccatctggctcgccccggcgtcgcagcaccggcccgagtactccgttgtcccgttgtccgctcccactccactccggcccagctgcgtgctgctcccgtgctccggcaccggcaggcggataagcccagcaggcaagcatgcaggagactaggagaggaggagagctcagctgcagcactgcacgcgcgctcccctccccttgctggccaaatcgatcggtccccttcaggctccaggctccggagcttgctttacttcagatttgcgcgattccccttccaaaaagaaccaatcggtttgctactagatcggtgcgcgaggctagactttttctgggaattcaaccggcgaatgggcagggacggcggccgcgtgcgcatgagccgcgtattggcaactggggatgagcgcggcatgggcgaggtagcaggcgtggagcgcgccgcctgcaagcgcccgcgcggcgcgctcgacggcggcgggtcggcgtcggcggccgcgtggccggcgtgccgggtggcgcgcgccgcggccggcggcaaggaccgccacagtaaggtggtgacggcgcgggggctccgggaccgccgcgtccgcctctcggtgcccacggccatccagttctacgacatccaggaccgcctcggcgtcgaccagcccagcaaggccatcgagtggctcatccgcgccgccgccgccgccatcgacggcctcccgtcgctcgactgctccttcgtcttcccccacgccgccgcctctccgccgggcggcgctgccgacgacgccgagctcagcacctccgagaccagcaagagctccgttctctcgcttgccaacgccccggttgacaacaccgccgccaccgccgctcactctcagcaagccaatcacgcctacaacaacaacgccgccgccggtggtggcgcgttcgccgagctgatcctgcactgctccgccaacaacagcagcaagccaatgcagcagcacccgacgctcgcttactacgccacccagcccccgaacgctcactccgcgtcggccatgtccttcgagacgatgctgccccacttctccttccttcaggagcagtctcaccacgcaatcgccttcgaccggggcacacttcagtccaatgccgccgttgctgcgccgctgtggccgacgtctcagcatgcgtgcctgctgcagaggttcgccgcttctccagctgatgccaccggactgccgtcgttctttcttggaagcggtgctgctggtgcttctccggtggtgccggccaatgcagagccgaggcttcagctctgggacttcaagcaggaacggaagacctgatgcattccagaagcaaattcattccatcataaggctgcaacaccatctagtggagggtgttctggacaaagaaagcttgtaccttaaaacaggagcattcaagaagctggagtggttgtatgaagagcttttgaactgcttaagcattagtgtagctttggtgctttgtgactgatcagatatggaacagctagagtgatatagatgtagggtttttgaacaatagttggagtgatatgaaacattagtgatctagttgtgaatgatattataattgtaatacttttgtgaacatataattgtggtgcttttgtgtttaaaaaaaaaggaaagaaaa

SEQ ID NO: 125909 - DNA, 451 bp, Zea mays
  Clone ID: MRT4577_46299C.1
cacgtcaaccacggcaagtttaaggcggagccgtggacggacgggcacgcgacgtactacggcgggcgcgacgggttaactgacaccacggacggcggctcgtgcggctacaagggcgagctgtacaccaacggcaccgggtgcggcgcgtgctatgagctcaagggccccaagggcaccgtggtggtgacggccaccaacgaggccccgccgccggtgagcgggcagaagggcgagcacttcgacctcaccataccggcgttcctcaagatcgccgaggagaaggccggcatcgtgcccatcacctaccgcaaggtggcgtgcgagaggaaaggcggcatccggtacacgatcacggtgaaccagcactacagcgaggtgaaggtgaccaacgtgggctgcgccggtgacgtggtggcgctgtgggtgaagggcaacaagcgcgttaagt

SEQ ID NO: 125910 - DNA, 286 bp, Zea mays
  Clone ID: MRT4577_4629C.1
tcgtgaccgatctaccctacgccgccaccatgtcgctgatctccggggaggacttgcagcatatcctgcgtttgctgaacaccaacgtggatgggaagcagaagatcatgtgcgccatgacctcaatcaagggtgtcgggcgccgcttatccaacatcgactgtaagagggccgacatcgacatgaacatgagggccggccagctgactcctgatgagctggagcgcctgatgacggacgcggtcaaccttaagcaggtgaaggagccggactggttcctctacag

SEQ ID NO: 125911 - DNA, 1089 bp, Zea mays
  Clone ID: MRT4577_46300C.1
cactcctatgggcgattggggacctcgaggccggccgggataccaagggacaaatcaaaccatagcatcaatcatggtctggggtcgttccgtgtggacaataatggcgcctctcctggcgtcgatgctgctcgtcgggctcgccgcgggctccgaggaggaggaggacggcggcggcaaaaagaagccccacgtcaaccacggcaagtttaaggcggagccgtggacggacgggcacgcgacgtactacggcgggcgcgacgggttaactgacaccacggacggcggcgcgtgcggctacaagggcgagctggggaaagactacggcaccctgacggcggccgtgggcccgtcgctgtacaccaacggcaccgggtgcggcgcgtgctatgagctcaagggccccaagggcaccgtggtggtgacggccaccaacgaggccccgccgccggtgagcgggcagaagggcgagcactttgacctcaccataccggcgttcctcaagatcgccgaggagaaggccggcatcgtgcccatcacctaccgcaaggtggcgtgcgagaggaaaggcggcatccggtacacgatcacggggaaccagcactacagcgaggtgaaggtgaccaacgtgggcggcgccggggacgtggtggcgctgtgggtgaagggcaacaagcgcgtcaagtggacgccgatgaagcgcagctggggccagctctggaccacggaggtcgacctcaccggcgagtcgctgacgttccgcgtcatgaccgccgaccaccgcaaggctacctcctggcacgtcacgccccgcgactggcagttcggcaaaacgtaccaggccaccaagaacttctagggtcggatcgggccggggagctgagccgcgcccttctttatatgtatatatatgcatgcagcggattatattggactgttgtactgtgtactaccttgtttattccatgattaacatattgttatattgactgggttgtttgtactgaaaaaaaaacacgaacgaaacctccgtcgtcgctggatcggagtcaataaggccttgttcgtttctgtcggattaagaataat

SEQ ID NO: 125912 - DNA, 368 bp, Zea mays
  unsure (1)..(368): unsure at all n locations
  Clone ID: MRT4577_46301C.1
gccccgcgaacagaaccggcgggcggcggcccgacaggagcacccagcagccaggcgccgacaagggcagcggcanggcggagacggcgaccacgacggngccggccaaggnggcggagccgccggcgggggggggggccgcgctgttttttttttgcgacgacgngcgccaccnccgggacaagcgcgaggggcgccacaccnacacccgcgacgccgaccgccgccgccgccgccgcgacgacgaggacgccgccgaccgggggcgccagacccgcgacggcgcccgcgaggccgaggacccgccggaccgacaccaccaccgagcagggcggaggaaggacgcgcagggccccccgagcgcgccc

SEQ ID NO: 125913 - DNA, 1514 bp, Zea mays
  Clone ID: MRT4577_46302C.1
ccgggtaaattctcaattataactagcattcaccgtcacccctggtattatctggttctgctcttccagtctaaacataattcaaaagaggtttccttttgttgtactgctgcacgtggtgtgttcttcacctttcctttgtttgtgcttgtgtgttgctttcacaatgtatttttttcaatgctactgaagctgttcatgccgagcattacatcctttgcagggttgagtttgatcgtcttacagacttattgcgtgcaagaaccattgagtctgatccacctaaaccaattgtttctcgtgaggaaaagaatgaagaaagtatcaaagttgatggaattagaggctcagcgttacgtcatatggacctagatgattctcctgctgttaaagtacataatcatggtgctagttctcctgcagaactcgcgaaacaatatatgagctctcgttatttgagggaaccccaatccagtagtctgcggagccgattgtttcttgagaataaaggtgaagcaagcaacactgtcaatgataggaggtctgtaccaccaattgttcagacaccacttgaacttcggaatgaaaaccctgctctcccttgtaaatggctatgtgacttcgggattacgtgggcgttcagcgatatatagaatgtctcgctctccatattttaagggtcagaactattccagtgatttgaacacgtcttcattgtcccaacgatcacaaagcttgcatgttggtggcaggcaggtcttgaaacgaagcggggctgaattagagaatgaacttggatctataggccccattcgtagaattcggcagaaatcaaatatgatgtcttcatttagagattctcgtgcaaatcctaaaggaaaccttcttactagccatataagtagtactgatttcactgaagacggtgcatccattcagtctccgagctcaaaaaaattattggttgggagtagtcaatctctgcgacccttagaatcccaaaagaatgagggagatggtaaatctagtgatagcattccacccataccagctcaatcaaacaagatggctgaaaagatatttgagcagcttaatataatagctccatcgccaaaacaacaacagtctgttactctgaatgctagtaactctatgtcaaagaaacctgtttttcaagatgctgggtcaagcagtatgtataaccaatctagttccctgaagtttcaagatttggatggtgcaaatggaccccatgatacaaacttgaatggttccctgctgaagaaagacaagctaaatataataaaagacggatcgccaaaagctgccttttctgatagacctgcccttttggggaactcggtttctgcttctaaatcatggacgccagcctttaaaatggctgtgatagaggacttaccagagttggatgatgatctggaggtccttattcaatcaagtaagatagaggttgaaacaactgagcagaaaattgattcaaatagaaaagacag

SEQ ID NO: 125914 - DNA, 640 bp, Zea mays
  Clone ID: MRT4577_46303C.1
cacgcctgcatgaaccgggccggctaataccgggctcgacccacgctgttcgtatcgtcttaacagtaacagcatgtaagatggtaaaacgaactcgtcgtgtgcctggctctgtcagcgtgccagcgcctctgcaatgcaatgccctgcccctgcgcggagctgcagggtcttgtacggagctggcgccggactgacgaccatgatgggcgccggcgggctgtacccctacgcggagtacctgcagcacacggagtgcagcccgctggcggcggcgccctactacgccgggtgtgggcagacgagcgccatgtaccagccgctccggcaacagtgctggcagcagaaaaccaggatgatcggcgtgcagtccgtctcgcaactaatgcatatgatgatccagcttgagcgtgccgctgccgccagcagaagcctgtacaagccagctatgatgcagcagaaggagtagctgctgataatccagagtctcaaccccatggccatgatgatggcgcagaacatgccggccatgggtggactctaccagtaccagtaccagctgcccagctagccgaccaacctctggggcgtctacgctgtcattgcgggctactactgcatcatgacatatgagaaatct

SEQ ID NO: 125915 - DNA, 728 bp, Zea mays
  Clone ID: MRT4577_46304C.1
gggaactcgagaccagaaagaagaagggtgaggtgaggtgatgcagatgacccggctggaagacctgacccctgctccatccatggagcattcctcgaggccgaccctggggtttcccctgggaactgctctcctgctcctcgtcatctttgccctgagcggcatgttctcgtgttgctaccactgggacaagctccgcgccctcctccggtctcggcatcccgacatgttcctggaggccgaggagcatacggccgtctccgtggcgtcgtcatcgccgccgagaaaggcggtttctggtcacaagctggagagatcgggggaagagcgcggtgtgcccgttattattatgcctggagacaaggtccccaagttcttggcgatggcgaggcccagcccctcgcggccccgaagcagcagcagagaagaccaccgaatgtcgggatcatcaggaaccctccgtcagtatctgtatacatgatgaaagcacagttagctgttagcatgatttgatcgagtgtatatatgtgcaatttgcttgcttgctaacacatctctctctctctctctctctctctctctctctctctctcgtgtgttaaactagatagagtttgaaaggacaaaaacagtcctagctagctaggtaactggctgttgttgaatgctactgtacccagcctgtaatccaaagagcaaagggggctagtgaagaagaatgttttttt

SEQ ID NO: 125916 - DNA, 660 bp, Zea mays
  Clone ID: MRT4577_46305C.1
aaatctcttctcgcagcgccacatctatctctcccttccctcttctctctcccctcacctctctcctcccttccctcgcctcgctcctctctatcctcaccgagcagcagcgcccgagaagcacgctttcatcagatccggggacacctcagttagggacgcagtggtacaagaaggcgccgtctagtgccttgtctgggtgctcgacccctcctcctcctcgtcgtcgtctaaggtgctgctatgtggccctccgcgccatcgacgtgctgcgcctgtcgccgcccaactctaccgggcgtctcctcgccgcctggttcctcgaccgcgtcctctccctcctccgcaatggcgacaactcgctgctgcggaactgcgcgctgaaggccgcgcacctcctgtgctaggtgtctgaggacgtgacgaaggcgatgatcgacgccgagttcatgcctgagctgatgcgcgtcctcggcgcgtacattaagtccctcgaggcacgggagatgcaggacgactagttgtgcgccctgtagaccgctccccgcaaccgcaacagtgtcgaccataatgaccgcgacgaggcacgaaagctgcagctgctgtaccccgaccaggataaggataagcccgcgccgactaggaacctcctgctttcga

SEQ ID NO: 125917 - DNA, 265 bp, Zea mays
  unsure (1)..(265): unsure at all n locations
  Clone ID: MRT4577_46306C.1
cacncacncacanggcacacagccacacnggaaccgcngcccgcagcggagggagcnggcacgggccaacgcacacanaacacaagcncgncgncgaaggcgcggggggcngcggngcnggcgcnggccgcggccacggccaacgccgnggcgnccgnggcgggcggcgacangagcgcggacaagacggagggcgcggaccaacnggngggccnggcgccgagccngcagnacgngcaggggcaggcccgcgcgccgacgaccg

SEQ ID NO: 125918 - DNA, 393 bp, Zea mays
  Clone ID: MRT4577_46307C.1
gagctcactagtctgttgccgccctttttttttttttttttatggggggtttttttaaaaaaagggggggggatccacaaataaccaactagctggatgcaataagcctcgttactgacccatgaaataacaaatgctaccgggggagaccaaacacagcagcccctaactacagaaggacacccaaacatacaagggaagcctgcaagcgggggcctcccagcctaggacgaggggaacttggggacggccttggccccctcggaaaccgcgtgcttgacaagctcccccgggaggaccaggcccacggaggtctggatctcaccgtaggggatggtgggctttttgttgtaccgcgcgagcttggtggccttggcggcaagcttctcgaaa

SEQ ID NO: 125919 - DNA, 189 bp, Zea mays
  Clone ID: MRT4577_46308C.1
acaaccatctccaaacacaattatcacgaactttcacatcaaatctcccgttttttcaagtgacaactttgctatacaacccagcaagcatcctactacatatcattcggaacgacaccacttttatgagctttaccctgctaattaccacaactttattacacacacgacctgatagctatccaaaat

SEQ ID NO: 125920 - DNA, 359 bp, Zea mays
  Clone ID: MRT4577_46309C.1
cattatgttgatttttgttttttttttataggaatttatgtatttttgtttgttttatttttttggacgccaaaaaccttgacgtcagaaaaatacccccgaaatgggaaaccgccccccccaaaaaaaggcctgcggggctataccaacaaaacagaggggctgggcaaaagttaattcggcgggaacaaaaaggggtggggtggcctaaaccagctcggacaatattgaaccaggaacaaaacttattcgggccaacctgggggttttcccggctaaataaaaaaagggtcggttttattgaacttctgaattaaaccgggcgggttttagccaaagttttccccttgaagaccccg

SEQ ID NO: 125921 - DNA, 156 bp, Zea mays
  Clone ID: MRT4577_4630C.1
acagtttttggcaccattctttcagtagatggatattttgtcacagttttgtttatatgattgggaatcatctgctttcttgattcctggtaaattggtactagatctgaccttggattagaggctggaactgaagcatgatatgttcatcatgtt

SEQ ID NO: 125922 - DNA, 379 bp, Zea mays
  unsure (1)..(379): unsure at all n locations
  Clone ID: MRT4577_46310C.1
aaattaaattnacctgtacctnttnntcttcctcctcnctcttcttaagcagacttttttacaaaatcttgcacccaaancacttctnttgttctcacttctaaacttcttcttatacctttcatatataatgtcttcttcccaaatctcgccttcatatcatgttttctatttgcactgcatcttcttcaacacatttctcacttttaatttcccctttaatatcattctcaacatctttacagtttcttttttacacttctcatatctactttcattgaacctgatatcacttattcactcactcccataacaatatcatcatctccaatataacatcaatttccatttcatcatcttcactttcacgattatcatc

SEQ ID NO: 125923 - DNA, 289 bp, Zea mays
  Clone ID: MRT4577_46311C.1
tctaaaaaaaaaaaaactacaatctaaaaaaataaaaaattaacaactttcttccttccaagataagagcgtcatagaaaaaggaaactgggcgccccttctaatggcccccctttttacaactcacaactctcggaatcctaaactcctttccctatccaatcctttttgcaccacatcctctttttccctaccccctttttcacaaagacgcccttaccaatcccctttcccaacacaaccaaatcccatttctaaaatttccctctccttcaccttacatttaacc

SEQ ID NO: 125924 - DNA, 429 bp, Zea mays
  Clone ID: MRT4577_46312C.1
aaaaaaacccaactcttttgggaggggactcaaaacccacaagcaactttgaaagaaaatgcaaaattaaccggggtcctacaaaaggggcgggggggcaacaaggggggccccggaggggcatttgcaaggccaaggaacgacacttgggttttttcaacgcttgccagcgggggcacccaacttggggcccttggaacccttttggaccccccccttcagatgggccttttgggactgggccacctccgccttctttgtctttttttaacccccggccttgtggaggcgctccttgatcttgcgaagagccgcttttttagcagaatcggggacctggggcttctaatccctcttcttttcggacacctataggggggcgcccacaaggggcccccggtgtggcttcttgaaggggcggcccctctt

SEQ ID NO: 125925 - DNA, 282 bp, Zea mays
  Clone ID: MRT4577_46313C.1
ccgaatcgttcggaagtccagaacattttgttgtcgttcgaaacaagccattcgaaattgaggtacaacggtgatctgcagaggtaccgaggcatgtcgttagggatcgaaggcaccggccgagcgcacggtcggcgggccatggaagaagtcgatgtcgaggtgcttgaaggccgatctacagttccgcgtcggacgcatctggcgctacttgaagaaaggccggtacgcgcagcgtgtcggcaccggcgccctcgtctaccttgacgatgtcctcgaata

SEQ ID NO: 125926 - DNA, 214 bp, Zea mays
  Clone ID: MRT4577_46314C.1
ggcccatggaacacaatggcattaaaaggaaaacagcagctgggaacctcacactgcttaaaaaaacaccctcaggggggggggggggaacataatctcagtgtccccaaacatagtctcaggggggaaaaaaaaaacagtctcaggggacaccaccaatggcaaacatagcctcagggcataaaaaaaaaacatcatctcctgaagggcatga

SEQ ID NO: 125927 - DNA, 321 bp, Zea mays
  Clone ID: MRT4577_46315C.1
atacgaaaacaaacagctggtattaagccaccatacctgctgacaccctgttcacgcacagacctgactggcctacgacccaagttctagcgactgaacggacatacgtttctaacaccgattgtacaggcaaggggcttgtatcgggcacaaatacatacatgctattaaaacgatgcaataaaacttggataaaggttgggttgggcaagctcgaatccgacagagctcgatggctcagtgcttacgtgggcggagattgcctttttagtgagagcgcctgcaaccattacttgttaattatgcctgacagactgtaag

SEQ ID NO: 125928 - DNA, 391 bp, Zea mays
  unsure (1)..(391): unsure at all n locations
  Clone ID: MRT4577_46316C.1
cggcccttcccgggggnctacgggctgttccgcttctgcgtgggcgactcggggggggggtggggcgtcggcncgccgcagtncgacttcgtcgggccctgcctctccacggtgggccgcatgcaccagccgtggctcatcttcgccacgcgccgcgtgctgggctactcctcctcgcctggtgcgccggcgatgggtccttcgaggagcccgggggccgcgagaacctgcagcgcctgtggcagaatgtccgcgtcgacatcggcttcttcggccacgtccacaactccgagcggacctgccccttgtgccagagcctgtgcgtggccggcgtgatgaccctctgctccggggccatgaacggcaccatctctctcggcgccgggggcgg

SEQ ID NO: 125929 - DNA, 578 bp, Zea mays
  Clone ID: MRT4577_46317C.1
caaaatgcgatatacctctgatattaacgaccgaaaaataacgggcttctgcttgcttcttagattagcttagatgtggccttccagactgctactacaggcgagataaccccaaaaaacaacagatatagatacgatcaacaacctaaagcaaagcttcggtccctccgacttggggggggggggctgcatctacatacattttcttgtctccgacttgacctcgcgatactgcatctctacatacattttcttgtcttctatggaaaactggttggttggcattgtcacccgatataccttgaggcgttcactaagggccaagtatagcttataagtggtattggctttattgctgttcgccttgttgtcggtggcaactggctcgtgcgtaacagcaaccgttatataggcgtatacaattgcgaccgcgctaccgcatttggcatacgaattggctgtggtatggccggtgttacactagttcgtagccatggcgtcaatgccatcaccattgccgactcactgttcctgcacccttcgccacattagtgtctactcgtgcccacctatagctt

SEQ ID NO: 125930 - DNA, 699 bp, Zea mays
  Clone ID: MRT4577_46318C.1
agcagtggtaacaacgcagagtactttttttttttttttttttttttttttttggagaactgttggagcaaacggcgtcatacacccctaacaagtttgagtctgcccccaacaatcagattttgaggaaaagtttttagcatccttttggagttgctctaaggcaccgtttggaagcaatgtaatttttaatgaaacattttctatctccagttttctaaaaattggattataaaaaaactatgtgaaggtgtttggagcctgatttataacaaatcagtttctagtttttttaatacacagtgactagtccactcttcctttatccttaaaagtggtagcaatagatgtaaattctacgaaattaataaaaacatgacgcaattaaatggacaaaaattggttttaactaggggaggctagcttcttggtttttaagaaactaggagtccagttcctataaattagaacataaattgatatatttagaaccactttagtttctataaaccagactcctagaaagtgggtgctttcaaataggccctaagactatctgtggatcttctctctattcatctcctagatttgactttatcatcaacctctaaaatatttcatcaaaatcccatctctcacaaccgttccgtctaaatttatcctccccgcgtcctctgcgttgttaccactgcttaagaa

SEQ ID NO: 125931 - DNA, 438 bp, Zea mays
  Clone ID: MRT4577_46319C.1
gttttgagcggcgcccttatttttagtgttctgaccattgaagattatgttgacagaaacagggtatatgttggtagctgatgtgcaacaaactgatacaacctaacaccaaaccatgccaacctcagctaaagggttgtatgccctacattgtatataatttgtattaaatgtggttatttagatagacgctgatcgctctctcgcagtgttgctattggagtcaaagacacttgcttatttgctctcgtattacacaggcaatagagaagacgaggtttaacctcaacacctgagaagaatatcgggacaaaatcatgcagtgtacggaggggctgcacaagctactcatctgagcggaggggctcgaacagtagctgctacttacctgatcggagggactgctatgggacagaccgaccatactgtacatatgac

SEQ ID NO: 125932 - DNA, 648 bp, Zea mays
  Clone ID: MRT4577_4631C.1
cctattaaacctaattagtttatcatttactcatatgatgctacattaaacatttgctaatcattgattaattagacttaataaatttattttcgcgcttagtctttaactatactttataattaaaatatatttaatatttataataatcattcaaatatccaagtccatataccctcgtgtctatatatatatagacagcttaaaagagcccatatgagatttcgcccaggccccgaaatctcaggcacggccttggatgtgcggtctcatggcgtgcttcttcggcttcagtcaatgacggtcagcttattgtactccggccccgcgatggccttctccatgacagtccttggggcgacgatgccgccgccgtcgaggaacaccttgagcaggttcttggagaacccactgacaagcgccacccctttctgcccggcctccaccggcatggccttggagtccctcaggttccagaacaccacctccggcacggccgcaccgtacccggcctccgtgaacttgcgcacgatcgcctcgtagtccgtctcccacgggttctccgtcgcctgggcgaactccatgtcgctgaacacgaacacgcgacgcaccatccgctccggcgccagcctggcgccaacggccacc

SEQ ID NO: 125933 - DNA, 742 bp, Zea mays
  Clone ID: MRT4577_46320C.1
tcgttaatatacactattcggtggagcccaacaggcccaggaacaaacaatcctaatcagcagttgcttttggccagcgcgtcttttgattcaactatcaagctttgggaagtcgagcaaggatgccttctgtacagcttgtctggtcataggcaaccagtgtattctgttgcatttagccccgacggcgaatacttagcgagcgggtccctggatcagtgcctacacatctggtctgtgaaagaaggcaggatcctgaagacgtacagaggtactgggggcatattcgaagtgtgctggaacaaagaaggcagcaagattgctgcctgtttctccaacaacacagtctgcgtgatggatttccggatgtagtccaaccagtagggtggtgcatatcaatcctaacacaaggctagatcataaatccgtcccatgcaaatttgtgaagagcggagttgttagcaaaatgtagatcctaggtggcttcaacttttgtccatgtacatttcgtttttttttggtcatacttaccttagagtagcaatgtagtagtggaaatgccttaacagggtttagtagcatggaaatgttttggtggtaaattaatgaattaatctgagatgtactagtttgtagtttgcacataccgtcgtgtcaatgtcttttatattgaactgctaaaaaaataataaaaaaaaaaaaataataaaagaaaaattaaaaatttaaaaattttaataac

SEQ ID NO: 125934 - DNA, 233 bp, Zea mays
  Clone ID: MRT4577_46321C.1
ggagcacgccactgccggagcctctgcgcctgcgcctgcgcacgcgcgcgcggggcgtccggcgtgaggacggtggcggcgtgcgcacggagtcggaggagcaggagcagagtcagactcagacggcaccgcggacgttctacgaactgctcgggatctcgtcgcaggggagccccgatgatgtccgggcggcctacaggaggatggctctgatgtaccacccggacgtgtcc

SEQ ID NO: 125935 - DNA, 1356 bp, Zea mays
  Clone ID: MRT4577_46322C.1
gtgcgtggagtccactagttctcttctagcttctggatcaggagactcaactgctagaatctggacaattccatatggtccatgtggttccgacatgcaaccatattctcctggtgttcatgttttgaaacattttaaaggtcggaccatatgaaaagagcaaggatgtcaccacgcttgactggaatggtgaaggtacactactcgctacgggctcctacgatggacaggcaagaatatggagtagagatggagacctgaagcagacactgttcaaacataagggacccatattttcattgaaatggaataagaaaggagattttctcctaagtggaagtgttgataaaactgctattgtttgggatacaaagacatgggaatgcaagcagcagtttgaatttcattcagctccaacactagatgttgattggagaaataataactcctttgcaacatgttcaaccgataacatgatctatgtttgcaagattggggaacagcgtccggttaaagcattcagtggccatcagagtgaagttaatgctatcaagtgggatccgactggttctcttttggcttcatgttctgatgattggacagcaaagatatggagtatgaagcaagacaaatgtgtatttgatttcaaggagcataccaaggaaatatacactattcggtggagcccaacaggcccaggaacaaacaatcctaatcagcagttgcttttggccagcgcgtcttttgattcaactatcaagctttgggaagtcgagcaaggatgccttctgtacagcttgtctggtcataggcaaccagtgtattctgttgcatttagccccgacggcgaatacttagcgagcgggtccctggatcagtgcctacacatctggtctgtgaaagaaggcagggtcctgaagacctacagaggtactgggggcatattcgaagtgtgctggaacatagaaggcaccaagattgctgcctgtttctccaacaacaccgtctgcgtcatggatttccggatgtagcccaaccagtaggggtagcgacgtagtgcagatcaagcctaaaacaagtctggatcacaagcccttcccatggaaacgtgtgaagagagcggaattgttagcagaatgcagatcttaggtggtggtttttttttttgcccatgtacagttcttttttcctaggttatactgtagcgatgcgttagtagcatggaaatgttttggtggcaatcctcctaatttctgaatgcaatcttaccatatttaaactcttaagtattccatcgttttatatagtcgagaaatacaaatttccattattgacaaaaaaaaaagagttgtagag

SEQ ID NO: 125936 - DNA, 349 bp, Zea mays
  Clone ID: MRT4577_46323C.1
gctccattataatagtttctataaagaggatttttaatacaattgaggggttacaacataacgccttaacggtgccataccaaacttaactatggaagcagtaccataaaatacagatataaagccggcctgaaacacaaacaacggaggtgcatgtaacaagaaccacgcaacaaacataacggtagcgcctcaccaggtccaaacagtccttcctcacataaacaacatagatctgaggttactcaaaatggggaccgggtgtaagagtcaaagcgaccactttggaagatcatctataactagcaagctggagcatttgacacgctccacacagaaagagggctcc

SEQ ID NO: 125937 - DNA, 822 bp, Zea mays
  Clone ID: MRT4577_46324C.1
atgactaccaaccttgtggtggagagaagtgagccgggctgcggcctcccccctgccctcagcttcaaggatgttcatcatccgtgctttggaggagggcgagccgagttggggtcccgacttccgcatgggctggtggcctgcttcttcctccagcattcagggagaagggcgttcaccagccttgcggaggaggtgaactttgggtacgcgagaccggccaactgcgggtgccgccggccgccgcatgcctggttccccggcttggctggccccggcgccgcctccggcactgcttcctgccgtttggttggggcgtggctgcccgtccatcgtacgggcgacggtcgcgccgtgtgcaggtccgccacatccacggcttctcccgcgccggcggccgcaccgggggcggtacaagatgtcgtacgccgcgggggcggtgtccgcgttcttggatggtcttgtcctcactcccgcagtgaggacggaagcgaggacctcttcgcgcgcactggggcggccgccatttgccggtacagcactggtgcgcaggtggccgctgtcgtcgatgctgaggtggtcgccgccgctggaagacgggggcgaggaccttttcgcaatggcgcacgtgctgaggtgattgccattgctggcgagtcattggtgctgaggtggccgccaccgtcggtgctgagatggtcgcctccactggcgagccgctcggagctagctatcccgcgaccctactggtgtggaggactcgtaggtttcagttcgggtggccaagttgcgcgtccagacccccttgggtcgcggctctag

SEQ ID NO: 125938 - DNA, 436 bp, Zea mays
  Clone ID: MRT4577_46325C.1
gaagcagaacaatctctcactctggtatgtacttggcatgcacaggtttttgggatggactctttatgatacctaatttcgcaagggactgtgcgcataatataatgcctgagctcagctcggtattttgcacaatgccaaaattcttgttggaatccttccgcacaatatcaacctcgatctatacttgtcttgggctggggacttgccactaataactgcagcacggggtgggtctgcaataagctgtcttacgttcagcaagcacttttgctccttgtcacaccatcacttagaatgttgctcatttttcactaaagttctctctagagagaagtcgtgatttcattgcaacgaccgataggaaggcaaatactccttacgatacaaaggcactcaattagagctcgagccgacgagggcgcgcacgcctggc

SEQ ID NO: 125939 - DNA, 1609 bp, Zea mays
  Clone ID: MRT4577_46326C.1
cattgggtacctcgaggccggccgggcggaaaccgtaaaccgtgaatggccatcgaggtccaaaaatccatctggattctggagagaggagaccccaaaatcgcagcgcgcgaaaacgcaggagcaacccgcccactcgccaccaccgcccgcgcgcacggcggcgaccgatggccccgctcgtgccgatgtcgcagccatgggtggagaaataccggccgaggcaggtcaaggatgtggctcaccaggaggaggtgattcgggtgctcaacaacaccctccagaccgccgacctgccgcacatgctgttctacggcccgccggggacgggaaagaccaccaccgcactagccatcgcctaccagctctacggtccagagctgtataagtcaagggttttggagctcaatgctagtgatgatcgtggaattaatgtggtgaggacgaaaatcaagaactttgctgctgttgctgttggtactgcacggaaagctggttatccctgcccaccttacaagattattatacttgacgaagcagattcaatgacagaagatgcccagaatgctttgaggcgtaccacagagacttactccaaagtgaccagattcttttttatatgcaactatatcagcaggataatagaaccacttgcatcaagatgtgcaaagtttaggttcaagcctctttcagaagaagtgatgagtagtcgcattatgcatatatgcaatgaagaaggcctcaatcttaatgctcaggcgatgtccacactgagtgtcatttctcaaggtgatcttcgtcgtgctataacctaccttcagagtgcagctcgcttatttggatcttctatctcttccagtgacctgatcagtgtttcaggggttatccctgaagatgttgtcaagtcactgcttgcagcctgcagatctggtgaatttgacgtggcaaacaaggaagttagcagcattatagcagatgggtatccggtctcacagctgatggcacagtttctagatgtgattgttagcgcggatgatattccagatgatcaaaaggcaaggatatgtaaaaagcttggggaaactgataagtgcttggttgatggggcagatgagtatctacagctgctggatgtcgccagcgagactattcgcgctcttttcaacatgccgcggacgctggtcttctaagagttcataaagaggaatggcggtttcgatccttggcgaaaactttttcctgcctcttagatgccgcccaaggttaatctgcctcccctaccgctctgatgttggtagcttcggatgggttgaaaaagcgatgaactcagacttaaaatcccgctgaactgtgcctgtggatggatgcccaatatgacaatgaacatttctcagcgttcatcttgtgtgttatattccctcttctacttccgcctccagagtgcagcagttgacgttttttttttcgcactatggcattgcagtcagattttgttattgtgacttcttcgtggcacaggtcctataacaaagttacattttttgggtgcagtaaaaaaaaaaaaaaaaaaaaaaaaaaacaaaacaaaaaggatagaagatggggaact

SEQ ID NO: 125940 - DNA, 604 bp, Zea mays
  unsure (1)..(604): unsure at all n locations
  Clone ID: MRT4577_46327C.1
gggacagcactacacgcacccatacacaaagcagagtgtggtgggcatccgaaaaaaggggtgagctggtgcgacatgggcgccgccaccatgggtctcacctcccgcgcgctcgtggggaagccagcgaccagcaccagggacgtcttcggggaggggggcagtaccatgcgcaagagtgcggggaagcgcaagccagcggggtccgggagcgcgtggggcggggccgaccgcgtcctgtacctgggcccgctgtccgggcagcccccaagctacctgaccggggaggtccccggggactacgggtgggacaccgcggggctgtgcggcgacccggagactttcgccaagaaccgcgagcgtggggggagccactgccggtgggctatgcggggcgcgctcgggtgcgtgttcccggagctcctcgcccgcgacggggtcaaggtcggcgaggcgcggtggttcaaggcgcggtcccagatcttcagggagggggggctcgactacctcgggaacccgaggctgatccacgcgcanagcatcctgggcatcggggcgtgccagggggtgctcatgggcgccggcnaggggtaccggatcggcg

SEQ ID NO: 125941 - DNA, 381 bp, Zea mays
  Clone ID: MRT4577_46328C.1
actgcaacaaccagggtactttcacggtagcagccggccagccaacatgacggtgaaataaaatccagtgatattatgccccatcacatgtatgcatgcatgaacgaaccccaaataagacagtaatatagacaacgaaaccaccagcagatgtttcatgagatgaccaaacgaaaaagcaaccaaactaaacccatacagatatttacatacccagatggagtttttgaattcacatacatagagccaccaaacatacttgtgtctgcataaacatcctcagtccttggacaactactccagttctgcccaatggtttgtctttcggcttgagccgattctcaaagcgacacatgatagtatgggtccaggacgcccgat

SEQ ID NO: 125942 - DNA, 586 bp, Zea mays
  Clone ID: MRT4577_46329C.1
acgacaccgagggcaatcgcagcgaaacagaaaggacgaaggagggagaaaagcttccaccaccaccacccaactttgccactaggtcgccctagccctcgaaaatcgtatggtgcgagcagcgtgctcgcgttggtcccgaatccgggtggttgccggagcagccagcctcaggggccctagaatttctcgtcattgcggaactccgcccaaatctatgctccgtcatggactaccgtccctatgtgtcgatcgacggtaagacaactccaattgtttttgccttggtgtcctctgcgtgtaacactgatttttcatggggattttgcgctagtacgggtgatggccatccaccggcggagcaccaccgtaggtcgggttcgcgccgccgctctggaggtcaaagggtagaagcacgcctcggaccattggatcgtgcatcgacgattaatattagatcagtggataccgattcggtggggaatcggggcattgttgtgagatgtggtcgtggcagtcggatcggcgttggacgattaggattaaaacatatccccccattttcgtgggatgcatcctcgtcctc

SEQ ID NO: 125943 - DNA, 295 bp, Zea mays
  Clone ID: MRT4577_4632C.1
gtcgaggtttcgcaagcatttaatttgttgcttggctcttacaaaaaacttgaaactttgccaaataatcgaaatgcattgttaaatatggttacattagcaatttattcaactgattttcgagtgcgcaaaagttttcgcaacaatttgcttgcaaacttctacactcctttggctaaaaccaatttcagtttgtttggacgagaaacaatgaacagtgtaaatcaatggataaactctaagactcatggacgagtaaagcaactgttagcaagtcctttgcagcccgacactc

SEQ ID NO: 125944 - DNA, 259 bp, Zea mays
  Clone ID: MRT4577_46330C.1
aaacaagccaacattcctacttcaccggccaatccaatcccattgaaccaggggtttttacagacccaaagaagctcgattacgggtcggcaaattaaccattttccacatcttcttctattcgaacacaggaggggggccatactttttccacatatccgcgacacctggtcaggtattttcccacacctatatcttacccgcgtagccatatttggtgcggccctggctttttggggccttcaccactttcattggg

SEQ ID NO: 125945 - DNA, 497 bp, Zea mays
  Clone ID: MRT4577_46331C.1
tgccgccggcagctccagcggcaagcagttcgagttccaggaggccaccgtggacgccatccaccagggcttcaggaacggcagcctcacgtcgacggcgctcgcccggttctacctggagcagatcgcccgcctcaacccgcagctccgcgccgtcatcgaggtgaacccggacgcgctcgcgcaggcggcgcgcgccgacgcggagcgcgccgcctcccgcgggcgctgcgccgtcgggctgcacggcgtccccgtcctgctcaaggacaacatcgacacgcgcgaccggctcaacaccacggccggctcgctcgcgctgctcggctccgtcgtcaggcgcgacgccggcgtggtggcgcgcctccgccgcgccggcgccgtcatcctcggcaaggccaacccctccgagtggtctaacttccgccccgtcgcctccggctggagcgcccgcggcggccagacgctgaatccatatgttctctcggtaaccccat

SEQ ID NO: 125946 - DNA, 430 bp, Zea mays
  Clone ID: MRT4577_46332C.1
cgacagatagccgtaacttctgtgctgtgccagccgcatccctgagacaagatggtggaaggtcggagtgaacggattcggccgcatcgggcgcctggtcaccagggctgcttttaattctggcaaagtggacatcgtcgccatcaatgaccccttcattgaccttcactacatggtctacatgttccagtatgattccacccacggcaagttcaacggcacagtcaaggcatagaacgggaagctcgtcatcaatggaaaggccatcaccatcttccaggagcgagatcctgccaacattaagtggggtgatgctggtgctgagtatgtggtggagtccactgggggcttcactaccatggagaaaggctgggctcacttgaagggtggcgccaagagggtcatcatctctgcaccttctgccgatgcc

SEQ ID NO: 125947 - DNA, 1179 bp, Zea mays
  Clone ID: MRT4577_46333C.1
ggggctgcttctactcgtcacactcacactaaactagagagctactcaagaaaataaatgcctcttcttcttgctctcgtcgtcctcgtctccgtcccaatggagttgagcgccgtcacctgtcgcactgccgctgctccagttgcagcctgggcgccatttgggcgtccaagggagcagacgacgaagcgaacaagcagcctcacagacaggcgaggcggccggccggcgagcagctcgcgttgagccctctcgcaccactacatacgctgttgcatgctttgctgcgagctgtgcgcgcgcgcgcgcggagcatggagatgcatggaggcggcagaggttgtgggtgtgagcgcgtacgtggggaattgaggcgtcatggtccgagatatatacatgtctctcttgctaggtaccttagattattcttagattattcttagttctgttgttagtacgtacttcgtccgacgatcctggaatattgtgttttatttcattgctagctctcttgtttctgtttcatatttcctgccttttttccccctctggtattaagatttaagaagctgtaagtgacgcatcctttggtgtggagagctcgttctgtgatgtttgggcatcgttcccaacagtcttctcgagcagtatttctagtatatatctatatatgatatatttatatatgtgtaaaaaaaaaaaaaaaaagcacactagagccgagaaactcgcacgcatcactctcttccccccctcctgcccactctccaaagcggcgcaagcatctagcaaagctgcgcagcgcagccagcaagcttggtctggagagacagatatagccagccagagagcagcagacgaggcatggcgacgtccggccgccttcttctcgcggagccgccgagcccgggcgcgcgctgacgtccgcctgccaaggctgagtaggagacagatccagacaacccgcgggttgaaaacttggatcgacgcgacgacgccatacgtgttctgctcctcttgtttctgttttcccttccctgatgggatattttgggctgtgtgggttagaggttgaggcctgaggtgtctgcgtctgcgagagctagcagcatcgatctgtaaatgtacacggcgtttcaggacgtcgttatgatcgatagtcacgaaattttgatgtcc

SEQ ID NO: 125948 - DNA, 474 bp, Zea mays
  Clone ID: MRT4577_46334C.1
gcctgcaggagccgggacggaattatattggggggacgacgagttttttcgtcggcggccgtcctatgttggttatggtgcttataaagaagacactttattatgacacatactatgacatttcatacgagcaacaacacggactgactatattgtgtgagactattgaggatgacgatatggacaatatcacagcatgaaacagaatgattgatttgacgcactaggacccgactcactaagggttgtaagacaggtatattttttgctgcatctgctcagattgcttacctagagataaactaagacacgttcagaagggtccgcctaggcaatgcgaccgtgatctgctgttatcagggctggggccatcgggcgtattataatatagaccacggcataacctgtgaagagatcatatagaaccatgagctacttgagggtgcatgagatcaatgtaaccacaacgagctg

SEQ ID NO: 125949 - DNA, 318 bp, Zea mays
  unsure (1)..(318): unsure at all n locations
  Clone ID: MRT4577_46335C.1
cccacgcgnccgcccacgcgnccgcggacgcgngggcgcccgccgncgcccncgcccagcgccgggggagcncggagacccggagncnncccccacccccanaacgnccacaacngccgagcccngcgnngccgccggcgggcgccgcaagccgngcgngcccgcgggaaccccganngggagnnaacnaacggaagnnnacaanngancaacaagacnnagnccaacccnacgagacaaaacaccanggnnacccnnnccaacagcngggcaagcgnagaaaggcagacaaaangnngggcgcaaagaaggaaagga

SEQ ID NO: 125950 - DNA, 403 bp, Zea mays
  Clone ID: MRT4577_46336C.1
ttgtgttttttattttttttacttttttttggggggtttttttttttttttttttttttttttttttttttggccccattagaatttggaaatgtaactttttttttctgggggggccctttctttagccaaaaaacctcatttttggggttacagccaaagaggccattctaaaaaatgggccccggccaagattgtgttgttgggaagaaaggcttcttggttttccaaagccaggggggcaaaggggcccaactggggcccttgtaagaggggtgcgggggttgccccaaactggtggggtaaccgaagcaaatggtggtggttcaaaaaagaaaggggggttgttggtccttgctggcccaaggggggagggtttgctgctggggaaaaacccaggggg

SEQ ID NO: 125951 - DNA, 2306 bp, Zea mays
  unsure (1)..(2306): unsure at all n locations
  Clone ID: MRT4577_46337C.1
ttggaggatctctgcaccaggacgtcctctgcacaagtcgggattgccccattttctatcggcgaaggaaggcacagaaggatatgaccgaagctaggctgcagcttgatcggtgggacttctgagcttggaaattctcacatggctgcctgcgtctgcttagtgctggttcagttagctctcaatccatgtggattgaatgagattatatgggtttaaatcccaaacaagtcaaaattctgaatttccttgttataccaaatataaagggtcaagggtctgggcaagatacctttgaaggtgcaactgttttggaggcaagggctggattttatgagaagcccatcgcaactttggactttgcttctttgtatccatccatcatgatggcatataacctttgctactgtactttggtggaatatgaggaggcccgtaaactcaacttacctccagaattcgtcaataaaaccccatctggtgaaatatttgtaaaaccagaactacagaagggtatacttcctgagatccttgaagaactattagcagctcggaaaagggcaaaagcagatttaaaggaagcgaaggacccactcgaaagggctgttcttgatggtcgtcaacttgcactgaaaataagtgcaaactcagtttatggtttcactggagcaactgttggtcagttaccttgcttagagatttcttcaagtgtgaccagctatggacgacagatgattgaacatacaaaaaagcttgttgaagataaattcacaacagtaggaggttatgagcatactgcagaggtaatttatggggacactgattctgtgatggtacagtttggtgtttctacagttgaagatgcaatgaagttaggaagagaagctgcagattatattagtggaacctttaccaagcccatcaaactggagtttgagaaggtctattttccttaccttctaatcagcaagaagagatatgctggtttgtactggacgaatcctgagaaatttgacaaaatggatgcaaaaggtattgaaactgtaagaagggacaactgtttactggtaaagaacctggtaaccgagtgccttcataaaatactggtagaccgtgatgttcctggtgcagtccaatatgtcaagaacaccatatctgatctattaatgaatcgtgtggacttgtctcttcttgttataacaaagggtttgacaaaaacgggagaagattatgcggtaaaagctgctcatgtggagcttgctgagaggatgcgaaagagagatccagctactgcacctactgttggtgaccgtgttccttatgtaataattaaagcagcaaaaggggcaaaggcatatgagaaatcagaagatccgatttatgttttggacaataatatacccattgatcctcaatactaccttgagaaccaaattagcaagccacttttgaggatctttgagccaattctgaagaatgccagcaaagagttgcttcatggaagccacaccagatctgtttcaatctcaactccttccaatagcgggataatgaaatttgcaaagaaacaattaacttgccttgggtgcaaagctgttatcagtggtgccagtcagacactttgctcacattgcaagggaagagaagcagagttgtactgcaaaacagtagcaaatgtttctgacctggagatgctctttgggaggctatggacacaatgccaggagtgccaaggatctctgcaccaggacgttctctgcacaagtcgggattgccccattttctatcggcgaaggaaggcacagaaggatatgaccgaagctaggctgcagcttgatcggtgggacttctgagcttggaaattctcacatggctgcctgcgtctgcttatattgctgtggaagacaggaagctaccgtcgaccgcatcataatgcatgtgaagatgagactggacttctgcgagcatccagtcacacttgcgtccgtgtcacgtagactgacttgccagtacgattcattagcatgttttctgcttaggttttgcgtaatagtttaggtgtgagttggtacttggtagatggtaggtgtcaccttcctgtggctagtgccgagaaaaatgcttggtcctgagatgaggtgctgattatgtacagggcagaagcaatctggagcagttattatgtaacagagtgagacgagacaatttgaatggcacatgagttctctatcaaaaaaaaccccaaaggcccctagggcccnnnnnnnnnnnnnnnnnnnnnnnnnnnnnnnnnnnnnnnnccccgg

SEQ ID NO: 125952 - DNA, 733 bp, Zea mays
  Clone ID: MRT4577_46338C.1
tcgaggccggccgggaccttttatctgcatgtcgtgcaaaacattgcccactcatccataatcccagagcacggaatttcatagcccatgatggtccccaaagcaccttctcgtgaggctttggcccttctcaagaacacaattcgaccagccgcagccatccgatcgcaagcacagcgctgtctcctctcatccccctctcgccctacaacactatcgcaatcacgagctgggcacttgcatcaaggcacgcgcaatgccgctacctttacacattcacaccatgccgaggccgtctccgtcatccccacaaacgtcgacacgagcaatgccgactttaaggagaacaagcgccaaatggacgaagcaactgagaagctcgtcaatcttcacaccaagatcgcgcagggcggcccgcagaaggcgagggacaagcacatacaacgaggcaagatgctggttcgggacagaatatctgccctgatcgaccccggcacgccttttctcgagttgagccaaatggcaggctatgacatgtacggcgaagatgacgtgcctgcaggtggcattgttacgggcattggcagcgtcaacggcgttcaatgcatggtggttgcaaacgacgccacagtcaaaggaggcacatactaccccattacccgtgagaagcacctgcgagcgcagacaattgcgcaagagaaccgcttaccgtgcatctactgggtgggatctg

SEQ ID NO: 125953 - DNA, 206 bp, Zea mays
  Clone ID: MRT4577_46339C.1
tttgtttttttttatgggaaaaaaaggtaattttatttcattcacttgagggggaaaaaaaagagaaatcatttcgttacatctgtgcgactccttaccataaaaaatattgaaacacctggaccaatatttgcccaaatcaaccataagagatcttagcccagtctgggttaaacccgcccttttaaaagagagaactgtttcgt

SEQ ID NO: 125954 - DNA, 208 bp, Zea mays
  Clone ID: MRT4577_4633C.1
actcaaatcataaacatagaacggggggggattttttttacctaggtgaggaaacacccaaacagtaaccaacatagaactagttaacaactacagacatacaaacttagagaaaggagttgtaaatctggctacgacattttttctccctcgagatcaaaaaaaagaagtgacgtggtgctacactaccacttgtttgttggtacgc

SEQ ID NO: 125955 - DNA, 287 bp, Zea mays
  Clone ID: MRT4577_46340C.1
ccaaaccccccctaatttatgggggcaaatcccttggacaaaaggcaaataaaacgggggttacttatgccacaaaatatcctgcgattttttgaacggggaaaggacctttctgataacccctttcctgacgtcaagcaaaactaacaacaccaaaaaaaagggcaccaaaaccgaggaaccctttaaaacattgccataatacagggggaacctcacatagggaaaaacaaccggaaaccataccaccattttttagcgatcatgccaaatagcccggggggggg

SEQ ID NO: 125956 - DNA, 249 bp, Zea mays
  Clone ID: MRT4577_46341C.1
atgcaagatgcagcacgacaggcatttttcagcattgacctgaagtactaccctcaccgttcgaccgacagtgctggaggtgtgattgtctcacccgttggtgaaggcaatccgaggctgaacagcatggtcaacctggccgtcgtgctcaacactaagctggaccacacccttgacgagttgggcaagatgtctgagaacaggcgcagaggtgcaaggcgtgctcagccagaacagcaggcaccctaa

SEQ ID NO: 125957 - DNA, 466 bp, Zea mays
  Clone ID: MRT4577_46342C.1
aaacccaaacccccgggaaagaaaaaacagaattcttccataacccgtctgagttcgaaacaacaaaactgcatgaattttcaggcgggggccaactttctaatataaaataggggtggcccaagaaggcacttagagcacaggggactatcaaagggcttgatcgggaacctaattcatccttttgaggagcccattgggggagttttcgggggtaccgggatcacccccccccacaaagggggtccttttttttttaaggcctcccaggggggccttcaacttgaatggccacaggaagttgttggcccccttgaagggggggccaacagtcatgatctcgggaacaaaatccccaatgcaaatgaaggtgggcttgcccaaaccctccccgataacttggttggtggacaaagggaccccctggttgttaaagtttccaaagccccttttggagaacaacccc

SEQ ID NO: 125958 - DNA, 710 bp, Zea mays
  Clone ID: MRT4577_46343C.1
ggtaaggtacatgtgttatattatttcaagagacaacaggtaaggtacatgtacagcactacagcccaaaatgaagaaaaaaaaaatcccagaccgttgaaaccgaacctaaagaacatcaatcaaacaaacaatacagcagcagaaacaacctgcgcacgacatggaaacaaggactcaatacccattgtagacaaagaacaaatgcatcgatcatgttgaagcagacaacacggtctggacgaagtgaatagcttcagttctgcgtgactgaatatcttcagttctgcgtcacccaatccttatttattcttcaggggaaaaagaaccgcatccggctactcatgttgaagcagacaacacggtctggacgaactcccggggccgacagactgccgccaacggcttggccatgggcatggacagcccaacgccttcggccatgtcaacacacccaccgacctcccagtcgaagcactgcaggagagccgccagagtcaagctgaggagacgcaaggccatcccttccccagggcagcgcctccgtccaagcccgaacggcagcaagggggcggcgaccgtggcagtggcgtccaggaaccgctccggcctgaactcctcgggggcctcccacagcctggggtcccggtggatgagccaggcgttcaccaggaccatggtgccgcctcgatcatggacgggggcctccc

SEQ ID NO: 125959 - DNA, 575 bp, Zea mays
  Clone ID: MRT4577_46344C.1
attcccgtcgtcttgcgcccccgatcgattcacttctctaggtgcgcgccgatcaaaaaagatgcaggtgccgctgtgtgaccacgaagatcggggacaatctggtcaagcagtctcaagaggccccacctcgaccgttacaatgtgttatgccatgctgccgcactgcctcggggattgcttcccgtgccaggacgcaacccaagggatgcaccttgtcgccctcccttggtgatgggactgacaagacgaccaggccctacctcccccacaagcccaagaatattgcgctgcacaccgattctgatatgccgtggctcatgatgcacaacaggacctactgcgctgacattgctcgctacgtgtccactatgaatctcataggagatgctggagcgtgctgaccatctccaccttgtggccactaccaagcttgctacgctccgcctacctgaagacgacaagtctgcattcttgactgatccacgaactggatgacgacattcctttctgtatgaaactacttcgcttgcggcttgttagtactgaaagccagatgcacgcctagctttttg

SEQ ID NO: 125960 - DNA, 262 bp, Zea mays
  Clone ID: MRT4577_46346C.1
attactgggaagttgcacattttagtttgagaactttatttttacagtttaaagcataaaaaaatctagaagatgggacccccaatgggggggtggtgcaataaggggggaggattcgtcaaagcaaggtggttaaatggcagcaattgttgttgttgtaagaaggggacattgtttgccacatcctgtgggtagaatgggagcaactgttgctgttgcaagaaggggttaatgtttcccacaacctgggggtaaaatggca

SEQ ID NO: 125961 - DNA, 277 bp, Zea mays
  Clone ID: MRT4577_46347C.1
gcggggtgtcacccatcaccatgggtggcagtgtgagcaatgacctgaatgaaccattgaaatggaaaggaataatatataatggaaaaaagatgattctgattcctcaagcaacggggaactcatataatcccttttccgcgacagcggggcggggggtcatcccggtcctggcgttcccttctgctcgctccgatcctctacctcctctcccgcgttcttgctggctggcctgttcctgttgttgctgtggtcgtcgcttgcctgtgcctgccgt

SEQ ID NO: 125962 - DNA, 122 bp, Zea mays
  Clone ID: MRT4577_46348C.1
gccctgcaaattttaactctaattccattcaatcaatttcgagggcttccaacagatgaaaaaactgcgctggggctaccctacatgaaaatgggtcgggtacagcagcttgagcagttaac

SEQ ID NO: 125963 - DNA, 296 bp, Zea mays
  Clone ID: MRT4577_46349C.1
aacggatacgcgctctcttgtactgatggagaacgtagcagaccgcgacacacattgagaactgtacatgtctgcccaccataaaaagcatgaacgcatgccgcgcccgaagccctgtgtaaggggtgacgtctccctgcgcttgacgccaaaagacacttgctacacccgctcgcggggcgatgtactgagccacctgacctccccagatccagacgatcagggggcacggacccacggctgccgtgtaaccgctcctgtcgcacaacgtgtggttccacgatcacgttgaagct

SEQ ID NO: 125964 - DNA, 310 bp, Zea mays
  Clone ID: MRT4577_4634C.1
caaaaacaccatacattatcttggggaaagttatatctaactactcgcacataaaatctatcaatccaagataaaacccatacttatagactcataacaaaatgctagctgcaccagttactatcacacacttacaccgacccattaatgggaacacccactactcttatgcaaaggccaccaaactttgctctcaacataacaacaaacaaccggccttatgcgtgcaacatcttctcaaaaaaaaacccaacgctactaacaatcaaaccacttgatctagcacgaacctggccattcatccaaacac

SEQ ID NO: 125965 - DNA, 261 bp, Zea mays
  unsure (1)..(261): unsure at all n locations
  Clone ID: MRT4577_46350C.1
tcaacttcctgagctctcattcacacctcgttggatcttnctaacnanactaatcttcacaccaaaattaaatcttggcttgcttttgctgcccacaacgctgttgaagtccatgctcttgctaatgcattggctgctcaaaaagatcaagcttacttcacaccaaatgcttctgctcatgcctcgagcaaatcctcaccccgtgtgaccaatgtaaaaatccataacgctactgatcctatcaaagacctctaccacctc

SEQ ID NO: 125966 - DNA, 230 bp, Zea mays
  Clone ID: MRT4577_46351C.1
catcgattatgtaaggactgtcacctaccctcagctcttacatccggagcagctcatcaggggcatggacgatgcatccaacaacttcactcgtggtcactacaccacaggcacggatatcgatcacctgcgcctagaccaaatacacgaaactcgcatataattgcactgatcttgactaatagctactacctaacgctgttcatggtggacccgaccctgtactcggt

SEQ ID NO: 125967 - DNA, 329 bp, Zea mays
  Clone ID: MRT4577_46352C.1
ggccttgaaaagagaataaaaaaggccgcagggttacccatgagtttttaataaaaaaaagcctgcttttgtttccccctcaacaggcagaaaacatttactttgcatattggccgggttcccgggctcaaaaattggaatagggcaataggcccctgccttgtcttgtctcatcgaaatgggaagggggcaatttttgggccccacatgttggtggacctctccccatacatatttaggggttatttacccggggcgggtgcttctgctggggctggatgacatcccattttttatggtagcctggaagaacccacagcctttttttt

SEQ ID NO: 125968 - DNA, 3947 bp, Zea mays
  Clone ID: MRT4577_46353C.1
ggcttcctcctcctcctcctcccccttcccgagctcctctctcttgccgtccacgctcgactgcgcgagacactggtcaacgcccgggtggcaggcggctctggtggtgtgttgtgtgtgtggtggtggggtcgggtgagtctagctccgtcgcttgcgccggaagaacttgtcgggagctgtctctagccctcgggttccatggggaggaacggtagcgtgaagcgctcggcgtcttcgagcgctgcgggtgctgctgcggggccgccgtccttctctgtgaatcccgccgactaccggttgatggaggaggtggggtacggtgcgcacgccgtcgtgtaccgcgcgatcttcctgccgaccgaggatgttgtggctgtcaagtgcctggatctcgatcagctcaataacaacatcgatgaaatacaaagggaggctcaaataatgagcttgatagatcatcctaatgtaatcagggcttactgctcatttgttgtagagcacagcctctgggtgataatgccattcatgacagagggttcttgtttacacttaatgaagatctcataccaagacgaatccctctcccctctctctttcttaccgtccacgcgcgactgcgcgggacactggtcagttttgatgagccggtcagctccattatgctcaaggaaactcttaagcctgttgctcaggatcaccggcagggtcaaatacatcgtgatgttaaggctagtaatatccttattgatggtgctggggcagtgaagcttggagcctctggtgttgctgcttggatgtttgatagatgtgagaggcaaagatctagcaatacaatggaaggggcggggtgctgtatggctgcagaagtgcaccaccctagcactggatataatttgaaagctgtcatattcaaattcggaattactgctcttgtacaagaacatggcgatgctctatattcgaaatcccctcctatgaaggttcttctcatgacccttccagaatgcaccacctggtcttgattaggaacgtgacaaatgtttctcaaagtcatttaaagaaatggttgcaatgtgcttggtcaaagatcaaacaaagagaccaacagctgagaagttgcttaagcattcatttttcaaaaatgcaaagcctccagagttaccaattgcgggtatctcatatcatgttcagttgcagcaagagctaaatgcgttgtactaccgagaagaaattgaggatattagggatgaggatatcgaagaaacataatgtatgaattatctgcctctccctgaggtcaggggagaacaagagaaggaaagcggcagggagaacaagcgatggaaagtggcgatgccgcaaatatttgctggatctagagaccagctgcggttctacggaatttgttctttgaaggttgccgtgcccctggcctgctgccatccagtgtgtataaccgtcttagttcggttttttttttgtgaccacaagattgaggcgtggtcatgcagctatttcggccataactatcattgggagtagctgtagtccgtaggctaccgggtggttatctatgcagaatttcagaagactgcaaaataaactgtattttatctagcaataggatgtatattggcgcattcgttgatatgtatcatatagggctattcgcaaacatccaaacagagttgtttgcacatatctaataaagtatgcatttactgcaaaaaaaaacataaaaaaaaaaaaaaaaaaaaaaaacaataagttctttactttatgatagacagcaatagtccaacaatttcagtaccatataacaaaatatttgctcatatactacctgtctacgttcttccaaataatttgttaacaagttgactgttaagctttgaaaaggctaagcacataagaataatacatgcatgccatgtttaaatggtaggcattgactgtgctaagaactttggggtatggatacatcgcggaaaccttttgaagttcattttctcttgtatttttcacttatctggttcagtctccgcacaaatgtgtaatgctgagtatttttccctacatgctattccgtaaatagtcacatgtcaaatatattagcagcattccttttgttgtacaattagggtaaatgccacagatattttaatagctttcttatcataaaaaactgcatggattcatacagagtgaatatcaacgcggcgttagtgcatggaacttcgatatcgaggatctcaaggctcaagcatcattaattcatgatgacgagcctcctgaaataaaagaagacgaggacattgcaagaaacattgaggttgaaaaggacttgtcttcacggaaccatttgggaaagtcatttgcaaatgagtgcaattccaggcagcgagcctttgtcaccactttaaaatcggatggaaacagccccaccacgaatgaagcttttgattttgattttgattttagcgaggctgccactacaagaagggctgatggacatgaaagaaacataagagagaatgattcattgccctctacagcaaagcgagatccagagtcgaatcattggacaaatgacgttgggcagagacaactgtcttctggtgggagcaatagctcaacagctgaaaggggctatggttttgagagggatgcagttgtgcaaacaatacctgacaaacaaagaagtgaggcgagaaaaacagcaagccttagtggtccactttcactgccaactcgtgcttctgcaaatagtctgtcagctcctattcgatcttcaggaggttttgtagattcatcaggtgacaagtccaaacgaagtgtagtagagattaaaggccgcttttcagttacatctgagaatgtcgatcttgcaaaggttcaggaaggtccacttagtagcctctcacggaaatcaccagagggttcactgctaagaaaatctgccagcactggtgattgtttgattaatactaagctgatgcgtaacgctaatcagctgaaggaattctgcaatagttctgtatcatcttcagtattaattccccaccttaacaaccttgtgcaacagaccatgtttcagcaggatgtaatcatgaacctacttagtaacttgcaacaggatgagaaagttgatagaacacagcctggaatatcttctcaagtccgaacgatggagaatggtaaagtggctgatacagctaactctgagaaggaacggtcattacttgttaaaatttcagaattacagtctaggatgataacactgactgatgaactaattgcagctaagacaaaacatgttcagttgcagcaagagctaaatgctttgtactaccgagaagaaattgaggatgttagggatgaggatatcgaagaaacataatgtatgaattatctgcctctccctgagacagatcaattacccgcctctccctgaggtcaggggagaacaagagaaggaaagcggcagggagaactagcgatggaaagtggcgatgccgcaaatatttgctggatctagagaccagctgcggctctacggaatttgttctttgaaggttgccgtgcccctggcctgctgccatccagtgtgtataaccgtcttagttcgtttgtttttttgtgaccacaagattgaggcgtggtcatgcagctatttcggccatgcctatcattgggagtagctgtagtccgtaggctaccgggtggttatctatgcagaatttcagaagactgcaaaataaaactgtattttatctagcaataggatgtatattggcgcattcgttgatatgtatcatatagggctattcgcaaacatccaaacagagttgtttgcacatatctaataaagtatgcatttactgcattaaaaaaaaaaaaaaaaaaaaaaaaaaaaaaaaaaaaaaaaaaaaactcgaagaggg

SEQ ID NO: 125969 - DNA, 510 bp, Zea mays
  Clone ID: MRT4577_46354C.1
gaactaaaggtttggctgactggtatctgtctaactaggcaatccacacatacagacacactttacaggacaggcatgatatcaaacacatatcactaggtgtacagttagcctggccccaccaacatgaaaacggggagatcatgcacaggggaacacacatatacatacattgacgtctaataactcgattttcggtattaggactggcgaggaatgaacatagaggaaacgggtactcatcagacttcgacgaggatccaatagggctgcacagagctgaggtagcacactataatattgctgtcaacacacatggggcgcgacacgaacggctgcacggctgctgtcgacccatggcctaggcccagtgacatgcagcaggaaaataccttcacccagggtgctgactagcagcgcagtcttgggttcaacataccaacgcatggacctgctcgaccatagcacgggcttgactagcacatgagaccctctggatcacggagcgct

SEQ ID NO: 125970 - DNA, 267 bp, Zea mays
  Clone ID: MRT4577_46355C.1
gttagggcgatgacttttcagtgctctaacaggagcaataaacacaacaggatcacgaactgactgatccaaaccagaaacatgacttgggggatctttagcacacaactagcgtctgactgatgaagactgtctttaggaatgctaagacacagaatgacacatggacgacactagaaggggagacatcccatacaccgatctaggcacgttcatgctgcagtacatcagtggaatgaagaccctactaactaagccatcatgggg

SEQ ID NO: 125971 - DNA, 560 bp, Zea mays
  Clone ID: MRT4577_46356C.1
actcctaagggcgattgggttcctcgaggccggccgggaaggtagtctctggcaagggcgcaaccaataatagtgagtgtgatcatccgttgatccatcttgataataagcctgcgtgcccttcgttcttcctcgtctcaatcccgatgacgttccgatcgtgctccggtaaaccacatcaagccgcgatgtagatgaagaaggacgactgcgccgttctcgacgacaacgcctccgccaacggggacctcaatcgacgaggccccggcgcccggccccaccaagggctcctcctgcgcgaacccgggcgcaggaatcgtgctggctgctccatgctctccttcttcccctactactgtgacgaaaattaaaggaggatctgacggagaggctgctggatgccattgcctgaatatcgggtggattcgcggtatacatatatctaagtacttgaaattgcgagtgaacatggctactgacccattccttctaataagatagacattactcacatatctgttaacttccgtatctaacgagtgctagaatgtgagacacta

SEQ ID NO: 125972 - DNA, 281 bp, Zea mays
  Clone ID: MRT4577_46357C.1
gtagcacccaaattaaattgcttaagagaggaaatgtacatcttgtataacttagggagcgaagaaaatgtaggcgcgaaagtgaaaagtgaggcagctagttcttcctattccattctcgaccaacctgccctttcttaatatgactagtggtcttgatgctagagtcaacttactctgttgctggctttagcagagaataggaggaaccatatgaaaaagatcaggctttctgacttccatccccaaaacacatttaccagcatactccaaactgtttc

SEQ ID NO: 125973 - DNA, 227 bp, Zea mays
  unsure (1)..(227): unsure at all n locations
  Clone ID: MRT4577_46358C.1
gcgnggacgcgtgggaaaaaaacaatgtttttttaacaaaaaaacaccagaacaaagggcttcgtaaaaagagaggaaataactacatgcacgcactttttaaaaatccggggggcgcaaaaataggcgccnaggggtttcctctcttcccgatctaaggttacaattctatttccctgggacaaaacagcttttttatggggacccttaaataaaagtttttgggg

SEQ ID NO: 125974 - DNA, 324 bp, Zea mays
  unsure (1)..(324): unsure at all n locations
  Clone ID: MRT4577_46359C.1
gcgttatacggctccaatttatctgacttgtccctgagcctttgccgccggctggagctggacggtcctcgggcagagcaggcagtcggactgccagagtcacctccatggcctctgctgctacttcaaccctccccaagggttagttgaggccaacatgcaacagatactttcaggtgaccggttaagttcatgcccacaccaaaacatgcgtagcctgcaagtgtccgacccatatccacgggttgatcgcttacactggaagaaggacgacattactcncggtgtctgcacttggatcacgtcagggctcatctgtcactg

SEQ ID NO: 125975 - DNA, 321 bp, Zea mays
  Clone ID: MRT4577_4635C.1
ggggataccctactgaactttatagggatcataaaaaagcaaaaaagaaataccggggggttgaagagacaaaaaaggggcggggaaaaaatgagggaaattaccggttgagaagagggtgtacccatgataaattaatttggggggccactaattgaaactaaatatcacagttcttgtgggggttattgaaatcaatttggtgactggtggggtcaggggcaggttttttttaattggtgggaataaaataacagttgaccttggaggggagggccttttctctggttcttaccttaaaggggcatggtatgtttaacc

SEQ ID NO: 125976 - DNA, 1721 bp, Zea mays
  unsure (1)..(1721): unsure at all n locations
  Clone ID: MRT4577_46360C.1
tggtcgtggcttgtcaggcattctaccacaagagagggacaggcagcccaaaccctctgatcaggctaccaggtctgactccacagatgcagcagcagcttatcctgcaggctcagcaaccacatcttcaccaacaactagtgacgtcgtcaagtcaaggccgaagctgctgctaaatggaagtgctgttcttggccgggatggacagacaaatagtggtagtgatattattccaaatattggctctccatgtcaaggtgttgaaggcttacatatgcttataaagtagaatgataatgctgaacagcagcaaccattacaagagaagagatatagccaacagctcccacagcaacatcagcttcagcaacctgctgtctctagccagcaatctcaaagttcaaatcaacatcttcaacaagaaaaactaggaattggaagtatgcctgttgatgggggcataccaaactcatttgggggagctgaacagacagcgaaaaagagaaagaagccaggctcatcctctggtagagccaatagttcaggcacagccaatactgctggtccctctccaagttctgcaccctcgacaccttccactcatacaccaggagatgcaatgtctgtgccacagctgcagcagaatggcggttcagctaaacccatggtaatgtttggctctgatggaactgggagcttgacatctccagcaaacccattggatgatgtggaccgtttgctggaagatggctcattggatgataatgttgaatcttttctatcacaggatgacatggatcctagggacaacttggggcgatgcatggatgctagtaaaggttttggtttttctgaggttgccaaagcacgtgcaagtgcagccaaagttgtctgttgccacttctcagctgatggtaagctgcttgctactggtggtcatgataaaaaggttactttgtggtgtacagattctctgaagcctaaatccttcctggaagagcactcgtttcttatcactgatgttagatttagcccaagcatgtcgcgccttgcaacatcctccttcgacaaaactgtgcgggtttgggatgcagataacactgactattcactccgaactttcacgggccattcagcatctgtcatgtcacttgattttcatccaaacaaagaggatatgatatgctcctgtgatggtgatggggaagtgcgcagctggagcataaataatggtagctgtttgacatgtgttaaggtgtttaaggcaggtgctactcagatgagatttcaacctcgtaagggaaagtatctagcagctgcctcagagaaagcaatctacatacttgatggggagacacaacatgcttgtagaagccccttgcaggggcacaataagaatattcaatcgctttgttgggactctgctggtgaatatctggcttctgtcagtgaagactcggtcagaatatggtcattcagttctggacgtgatggtgaatttgtgcacgaattgaatcgcagtggaaatcattccactcatgtgttttccacccaacttatcaatcctgttagtgattggttgttacgagtcctggaactttggggacataagggagaagaacaccatgaccttcaaacatgcgcagacggttagttgcagcccgtgcagcatccatgccacaaggaaggttgcctcataagccaggatangactctcaaac

SEQ ID NO: 125977 - DNA, 594 bp, Zea mays
  unsure (1)..(594): unsure at all n locations
  Clone ID: MRT4577_46361C.1
gactgatctgaccgatctctcacccgagaacactacaaccttattcccttttcctccgtcttctcgcgatggcgccgacgcgccgcgctgtactcgtgactctgcgagtctcctcctctccatctctcttgtggtcgcctcctttcattctgacgagctcgctcctcaacgatgacaacaaagatccagagcgccgccgacacatactgccttcgtgactcgggcttggccaagatcaacactgtgaacaagcatacacgtgcgcaggagtccgctgaggacctgtctagtacgaacaccatcaagatgagcctcactgagacgctcaaccagatggctgcgaagggcaccgtgatcccaaagatggccatcgatgtgctcaaccaggttaacgacaactagtacaaggctgagctgaacaaggcaaatattgataggataggctaggggcacctgaacactctacgttgcctgggacggcgtgtggaacaacatcttgacggactaaaggttaaagaatggattatgtcacggagcatgtgggcgatgcgaagatcgtgttatgttaatctatgttgctcgnataataagact

SEQ ID NO: 125978 - DNA, 483 bp, Zea mays
  unsure (1)..(483): unsure at all n locations
  Clone ID: MRT4577_46362C.1
ctaccagaatgttgccatgaatgggaaaaccttctgccaccagaatgttaaacagcanaaaaaaaaaaaaaaaaaaaaaaaaaaaaaaaaaaaaaaaaaaaaaaaaaaaaaaaaaaaaaaaaaaaaaaaaaaaccaaaaaaaaaaaaaaaaaaaaaaaaaagtccctccccggccaggaccttatccccaaacaaaaattttgcattgaataaagttttccaaaaagttttccgattgaaaaaatataataaaagaatctatggataaaaaaacaaaaaaggttttttccaatcgaaacaaaatttttttttgttttgtagaaaatgaaaccccaaaacctaaaaaacaatggttttggtttactaaaaccatcagtatattatattgtttaacctcggggaaaaccaaacttttttcctaagaatcttttgaataaaattaggaaacaaagtaggtaaattaaataaattttaagaaaaatt

SEQ ID NO: 125979 - DNA, 349 bp, Zea mays
  Clone ID: MRT4577_46363C.1
ggcctacttgtgaagacccaccgagtcagtaggaggcattgtttatagtagccagacatgcttgagctgcttcctgctctgaaagcccataagatatttaactcattcatttagctgaaataataccctgtcgcactggatgatcaattatgtcgtcgaatggtgcaggaacccttcaattatgattgtttcgggctcgattcctagctctgtgactggtatcatcacggcatttggctttcggagagaaattccctagtcgtgctctgttgccgacttagctatgattctacatggatcctctctttggaacacacataagtatactcctgcaatttagttgaggccc

SEQ ID NO: 125980 - DNA, 295 bp, Zea mays
  Clone ID: MRT4577_46364C.1
atgagatccaggggcaatgattacaggacacataaaacgtgcgacagttgtatgtgtacgtcgagatgtacatagacatggaatcgtttcgtgtctatgggcaactggtatcgagatgtatcttcttgtacacaggagatgcgcatgttggatatgctgtaacatttgtgaatggctaataccatgaatcatagggatgctgggtgaaaaactgatgctgcgtatgcaggccgtatgagatccaggggcggctgatcgctgtacaagatccaaacttacaggcccgtccatgtaa

SEQ ID NO: 125981 - DNA, 267 bp, Zea mays
  Clone ID: MRT4577_46365C.1
atttccgttcgaccgcacgcgtacggccactactttctctacccgttcgcatgttaccgcctacaccttctacatattgtcaatgtcctccttcgatgctttttctgctccaaattctatctcctcactgtctatggcctgatctatcgagtccgccccataactactccctgcaactccctcctgctacgatgacacaacacttagattatatcccgctcctacctccgtcctaaacactcttgtgttcttcggctccaccttcac

SEQ ID NO: 125982 - DNA, 632 bp, Zea mays
  unsure (1)..(632): unsure at all n locations
  Clone ID: MRT4577_46366C.1
cttccgccccaacccgccggcggagcccctacaccagacccaagcccagcggcggcgccaaggcctcccgcccttccccccgccttgatccagcgaccacgagacctctcgaaccctctcagaaggcggtgcgatccggtttgggtcgccgtgccgagcccgatgtgcccgacgcgcgcgcggctgagtcgaagccgaaactggcgcatggagacgataggccgccccttgaggagaagcgccgctgcagcggtgagggcggattcgtcttcctctgcgcccttgctggacacaccgaggctatcggtgggatttctctgccgtctggttcgaacaagctctactccggcagcgtcgacggatctgttcgcatctgggactgcaattccggcaaggtagcttggttctcggcttccgacgatgtatctgattatgcacgggttaccaacaatatctctgatatgcacgggctaccaacaatatctctgactatggacgagtaacgggctgcttccacggaggttccagtgaggaggttgtcattgttcgtggtggttcatgtgctgattagcaatgtgtgcaccctatggaaccaaccataaccgaatggtgactcctgattntttttctga

SEQ ID NO: 125983 - DNA, 952 bp, Zea mays
  Clone ID: MRT4577_46367C.1
tcgcgctcttcttcggatctttccctagccgcgcgtacgcgagactagccctagccgcgcgtacgcgagacaccaaccaccggcgccgctatgccgatctcctccacgctcgccacacgcctccgcaccggtcattcttccgcacccaaacccgcacggcggagcccctacaccagacccaagcccagcggcggcgccaaggcctcccgcccttccccccgccttgatccagcgaccacgagacctctcgaaccctctcagaaggcggtgcgatccggtttgggtcgccgtgccgagcccgatgtgcccgacgcgcgcgcggctgagtcgaagccgaaactggcgcatggagacgataggccgccccttgaggagaagcgccgctgcagcggtgagggcggattcgtcttcctctgcgcccttgctggacacaccgaggctatcggtgggatttctctgccgtctggttcgaacaagctctactccggcagcgtcgacggatctgttcgcatctgggactgcaattccggcaagtgtgttgatgtcatcaagatgggaggcaaggttagctgcatgatcacccatggcccatgggtactcattggaattccaaagtttgtggaggcatggaacacaaagacagggatgaaactaagatttcagggccttctagtctgtgttccatggctatcacggatgagatgctgtgccggagatcgcatcatgtcctgctaactgagatcctctcgtagcttggttctcggcttccgacgatgtatctgattatgcacgggttaccaacaatatctctgatatgcacgggctaccaacaatatctctgactatggacgagtaacgggctgcttcaccggggttccaggaggaaggtgtcattgtcgggggtggtcatgtgctgattagcaagtgtgcaccctatggaccaacctaccga

SEQ ID NO: 125984 - DNA, 165 bp, Zea mays
  unsure (1)..(165): unsure at all n locations
  Clone ID: MRT4577_46368C.1
cccgggtacggacccacgacgtgccgggtgggcctggttcgtacgacgtcgtgccttccacgccactgtnncagaccacagtcgagggcgactggatggctattcggctccacactccactcgaggcttcaggtaatcaagacctgtatgcacgaaggcatgtgt

SEQ ID NO: 125985 - DNA, 1355 bp, Zea mays
  Clone ID: MRT4577_46369C.1
cggtgctctccacttcggggactgccctccgacacgggcggcatggcggcggagctggggtggcacctcacgcgcccggagggccgcgccttcttcccacgccccaccggccggtccaacatttagttgggcgccaaattgcatctaggcgaaagcttgaacatcagctatttgagcccatttctgaaggcgttaggctccaattacagcaacggtgcaaatttcgccattgctggcgcagcaacgcaaccgcgagatgttccatttgcgttgcacatacaagtgcaggagttcttgtacttcagagatagatccttggaactcatcgatcaaggtctaagtggtccaattgatgcacaaggattccaaaacgctctatatatgatagacatagggcagaacgatgtaaacgctcttctgtcaaacttgccctatgatcaagttattgccaaattcccaccaattcttgctgagattaaggacgctgtccagactctatatagcaacggtagccgaaacttctggatacatgggacgggggctctgggttgcctgccgcagaagcttgccataccaaggaaaaacgacagcgatcttgatcagtatggctgtctcaagacctataacagagctgcagttgcgttcaacgcagcgctgggcagcctctgcgacgagctgagtgcgcagatgaaagacgcgacgcttgtgtacacggacctgttccccatcaagtatggtcttgtcgccaaccacactaaatatggttttgacaagccgctgatgacatgctgtgggtacggagggcctccctacaactacgacttcagcaagggttgccagtctaaggatgtggcggcctgcgatgacggctcgaagttcgtcagctgggatggcgtgcacctgacggaggcggccaatgcggttgtggccagagcgatactgagctcacagtactccaagcccagtctcaagtttgatcagttctgcagagcctgatacttgttagtacctcataccgtgcctttttagtttaggcaaatttactgaacacaacttggcacttcaaagtcaaaatggatggatccgcttctgataatttgattgccttatttacccgtcagggatgtgacccatcattgatctgtcagccatagcccataggccataactttggataggtgaaacttccaaatattgtgggccacatgtaccttcaaactacatgtcctatctgatatgttttcatcaaagagagaaatacaccatgggttatcaaaaaaaaaaaaaaaaaaaaaaaaaaaaaaaaaaaaaaaaaaaaaaaaaaaaagggcggcagctcgcgatctagaactagt

SEQ ID NO: 125986 - DNA, 360 bp, Zea mays
  unsure (1)..(360): unsure at all n locations
  Clone ID: MRT4577_4636C.1
gcttggggatttggctggccggaattcttggggacctcgngggcctgctagccaggggtggggcctcacgcattagggagttctttctgtctccatacacgtntgctgttcggtgngtggctggtgtcatggcttgcaggattggtcatgttctcctcactactatntagggagctgcgtgcgcttgaacaccctggagattccctggctccccggtcagcaggtnatatgcctgattcaagttcatgcgcacctgtggaacccctttggtctttttttgggcttccttgcacgctttagcaaatttgaagagatgtgatcctgggatcctcccagttttcacaggcggaccaattgtag

SEQ ID NO: 125987 - DNA, 123 bp, Zea mays
  Clone ID: MRT4577_46370C.1
gattggccgttgtttgacgctcgcgtcgtcagctctacattcgcttcgagtaaagatctgcactgcatgcagatcgatttcgtctcctgctgcaggtacccgtacagtctacgagcatacagg

SEQ ID NO: 125988 - DNA, 526 bp, Zea mays
  Clone ID: MRT4577_46371C.1
cacaatcacaaacatagcacaaaagcaactaaagtagaatgccatgtccacaacatcaagcacacaagagttactcaaacactcaataaccatcatccaaatcatctaaaccaacatcatccttgtcttgctcatcaccacagccaccactgttgtttgtttcttcttcatcatccatgtcaagggcgccaaacacaaaattgtcatcgtcttcattctcatcaccctcatcaacatcatcttcatcatcctcaagaattggcacttgagtaccatgagctctcctaggaaagtagcggccttgaagttgtgtagatgcaccgatggcatgatcaacatgctcccatgtgaaaagagggtcatccccaacaacagatgaattagctaatggatcaacccgctcattgtcccaatcaaaatcttcaagaaccaaaggatcaaagttcttcccttaacgcaatttttggaacctagcgaccaactttctattggatgaaacatacactaaatcattcagtcttttggg

SEQ ID NO: 125989 - DNA, 465 bp, Zea mays
  unsure (1)..(465): unsure at all n locations
  Clone ID: MRT4577_46372C.1
acagcacagcctggttatctactcgtgttcagttaacgttacaaatctcatgccatccctcctctgcagacgaccaagaactgaccaagttcagcaggaaggccagaatgtcgccgacgaatctaggagctggtttcgactggcctttccctgtagatccattcgtttgtttatttacatgaatgtaagccaaacggatcgtcattgttactactaattctattccaatgctaagtactagtattccatacaaatggggattaggcgaggtacccagttttgcggcatcgtcagctttcactgtctccataacaaacggttgcctggagccactgctaattgtaggggtgctttccagaggccagctaccaggttcagcatctcccttccacgatcgttcctgggggcttngggtccccatgntgctcaccagggtactgtaggcaatataattgcccaatccta

SEQ ID NO: 125990 - DNA, 512 bp, Zea mays
  Clone ID: MRT4577_46373C.1
ggccgcttttttttttttttttttgttgattattctcacgagactgctgctgaatattttttattgtgttgtacgttctcatggtccaactcgtgaggatatgccggtgaggaaataatgctggtgatgaggagcaaagaccaccagaagcgagtagaggacattactctgtccaccgcatactttataaatcgctctggtgcttcattacaaataacatgatgaaatgctgcggatgaagaccaacgatggtcccctcttctgctagagcacttggagaacaatgatcctgacaatcaccactgccctagaggtgttgatgatacctgctgctacgtgcatcaccagcagggggctccgctgacatctgctggatatcatcaccaccttatttctctccctcgatatactccgcgcataatattttgatagctatttgataccgacgtgacatcgtgctgttataatcacctggatgttcaatagaacgactcctctcgaagatgatgctg

SEQ ID NO: 125991 - DNA, 493 bp, Zea mays
  Clone ID: MRT4577_46374C.1
ccgggagccgagaatggagagtacggattgtggggagtcagatataaaaacgtgacaggggagtgaaaaggtagtaatcaagcaatttcgatgaaaaaaaaaaaaaaaaaaaaaaaaaaaaaacaaaaaaaaaaaaatctgcccgaaaagggtccctttgggttgtttttggtccggttatcgaaaagtttccttctgacttcttctccttggtctcatatcacgacaatgttcataatacccgttcccctttttaaaagcgagcgttcaaaaagggagtggcccgacgggaaccgaaaataaaaaatcaccgattttggggaggcaaatataaaaacctgccaggggagtgaaaaggtagtaatcaagcaatttcgatgaaaaaaaaaaaaaaaaaagtgtttcgctttctaaattactttccccccaaaagggggccctttgggttttttttgccgcatatatacaaaaaaaaccccttggtttttttttt

SEQ ID NO: 125992 - DNA, 849 bp, Zea mays
  unsure (1)..(849): unsure at all n locations
  Clone ID: MRT4577_46375C.1
tcgagccggccgggatactgctttctgcttcgcctctgcatcgctctaagctaaggaagaaccattgcttatccgctgatccctcttctccgcgtgcacctgcacctcatgactaggggaactcccgcttgcaaggtcaccagacgcatcatgtcttaccttctctcatatatgcatcgtcctcgacttctcgctgactgcgagatttactacgccaaatgccacatttgaggacccgctcatgtccatgtcacggcatgtaacccacgatcaaatcagtgatctacatcgctgccaaggtgtttggggaatcctagatcatctagtacaccgtactagacaatctcatgtccaccgggcaaaaccgaggtggcgatccataactagctactactacaaggagctgacctctccttggatctcgacgtgcgctcatcactgtgctcctccacgacgtgaacgtggtcatgcacgaagactgctgacacgggaagcctctccagaacacggacacggtgggcgtgccgctgctgatccgaatcttagaggacagtcgtggtctggacatgctgctcacccacatactcatgtgattccgtgaagacccaactcagcctcctcctcctcctatactttgaattacactgactcgtcagtctgatcaatccaaccgatcatatatggttgaatatctatctgnctgtctgcttcgcaatgctactctcacacataacaactgctgtacattctattgatgcgtgcacaacacttacaacacttatgttgagcactcatgtcccctgcagttatgagttacttgtcacattagctctgatttcttctgcgatg

SEQ ID NO: 125993 - DNA, 939 bp, Zea mays
  Clone ID: MRT4577_46376C.1
gaccctgggctgccggccagcccatagctttcccatctttccttcttcacctttcgaagagtgccccccttcgtttgtcgacgcgctccgactccatgccgctgtcgccgccgccgccctcctccagcccgaggcaagcagcgatccaggagctcaggaggggtacccagctggcggagctgctcaggcagcaggtagagctcatcccggagcctaaccgccgccacgctgcagcggtcaacgtgggcgagatatccatggctatggagtcgtcgctctccatcctccagtctcagatggagcaccccttctctgagcctgaggtcatggcggctgcgctcactgcccactccgacggaggcaccagcggggaaagaaatggcggtcccgtggcccgtacaaggaaggtgagggtgcggcaccggccaggcagaggcaggcctgcagctggagatgaactgccgatcaaggagatactgactgaggcaccagaaaatgatcgtttccactggaggaaatatggtgagaagaatatcctctattctgaatatccaaggttatactacaagtgcgggtacagcgacgaccacaagtgcccagcgaagaaatacgtgcagcagcaaagcaacagctaccctccgattttcttggtcaccctgatcaacgagcacacgtgcgacgccttgttccgagacgacgagcccatcatcagctcaagcagcagtggctcgtcgcaggtcctcgacttcacgaaggcgtcgctttcttctcctctccattgatgttggcggcggcgcggctgcaggggttaattgaagaaatagagatgcatggaagaagacagatattcgtgttcggatgatgagtagtactagctagctaagctagtcgtcttcaattcgttgcccacgatgatgtcggcggcagatcgatggagct

SEQ ID NO: 125994 - DNA, 796 bp, Zea mays
  unsure (1)..(796): unsure at all n locations
  Clone ID: MRT4577_46377C.1
caacctcctactcctcattgtacccattctaatcgcaatggcattcctaatgcttaccgaacgaaaaattctaggctatatacaactacgcaaaggccccaacgttgtaggcccctacgggctactacaacccttcgctgacgccataaaactcttcaccaaagagcccctaaaacccgccacatctaccatcaccctctacatcaccgccccgaccttagctctcaccatcgctcttctactatgaacccccctccccatgcccaaccccctggtcaacctcaacctaggcctcctatttattctagccacctctagcctagccgtttactcaatcctctgatcagggtgagcatcaaactcaaactacgccctgatcggcgcactgcgagcagtagcccaaacaatctcatatgaagtcaccctagccatcattctactatcaacattactaataagtggctcctttaacctctccacccttatcacaacacaagaacacctctgattactcctgccatcatgacccttggccataatatgatttatctccacactagcagagaccaaccgaacccccttcgaccttgccgaaggggagtccgaactagtctcaggcttcaacatcgaatacgccgcaggccccttcgccctattcttcatagccgaatacacaaacattattataataaacaccctcaccactacaatcttcctaggaacaacatatgatgcactctcccctgaactctacacaacatattttgtcaccaagaccctatgctaacccctgtnc

SEQ ID NO: 125995 - DNA, 232 bp, Zea mays
  Clone ID: MRT4577_46378C.1
ggggactgggtggggggctctggcggggggcgccgatgctgacccccttggccgggataccagcggccttccttttccgaagtaggaaccccttcacggcctaattttttctttaactttcccgacgatgcccaagcctttccggtccccgagccttcttcaagtttggccccaaacgcttggggccggttcccaacaacaaccttccggccgagggcccctttaacttccc

SEQ ID NO: 125996 - DNA, 298 bp, Zea mays
  Clone ID: MRT4577_46379C.1
acaggatccacctggaagtcattagggttatggtataatcaagtcacaaagctcgacaaaagcgccctgacatacctagctagctagataaaaattgcacataacaattaagtgagttagaccccccttaagtaaaaatagaaacttatcccgagtagcgaaaaaaccatcgcatccttaagaccctgtcacaagggaaagggcgctcgctgtgcgcctttctgatttcacctgaacttactagtcaaacaaaacgagtgagtgaagctcaggcggtcactgcttgcaacacactatg

SEQ ID NO: 125997 - DNA, 1873 bp, Zea mays
  Clone ID: MRT4577_4637C.1
ggaaaacccggtccgacccacgcgtccgcctctctcggcacgcctcccgactccgtctccctacccttcccccctccgccgaggcgaccagccccgtcaatccggcactcccacgcaaaccctagccagctagctagccacaccggctgggtccaatggcggaggacggctgcgacagggaccagcagcagcagcagccggcggcggcggccgccgcggcgtcaggtggcgccggggtcgaggggcgcagcagggagagcgtcaagctcttcgtggggcaggtgcccaaacagatgtcggaggccgagctggtcgccatgttccgcggcgtcgccctcgtcgacgaggtcacggtcatccgcgacagggccaccagggtctcgcgaggctgctgcttcctgatatgtccatcaagggaggaggctgacaaggctgtgactgcataccacaacaagcgcacactacctggggcctcaagtccattgcaagtaaaatatgccgatggggagttggaaagattggagcacaagctcttcgttggaatgctccccaaaaatgtaacacatgctgaaatgacggatttattttcaaaatatgggaatataaaggatttacagattctgagaggctctcagcaaacgagcaaagctggttgtgcctttctaaaatatgaaacaaaagagcaagctgtggctgctatagaagctctaaatggaacacacaaaatagagggttcaagtgttcccttggttgtcaaatgggctgacactgaaaaggaaaggcaggctcgaaaagcacaaaaagctcaattccagtcttctaacatgttgaatgcaaatgctatgcagcagaattcagtgtttggaggtttacagatgggttatgtgccgcagtacaatggatttggctaccagccacaaggaacctacgggcttatgcaataccctcctctatctcctgtgcaaaatcaagctgccttccagaatatggttcagcctgttaatcaaggaagctcgatccatggagctaattctgaagtttcgcctaatccagttcctagatcatttaattccgcgcagttgggaagcccctattcgcctttgcctggtttgcagtatcctggagtgtatcctggtggtcctattaatcatcgccccttttcaagttctcacagttcaaccaaagttcaaaactcaagtgctaattcgccgtcttcgagtcccagcagcaatcctggcccccagatagagggtcctcctggagccaatttgttcatataccacatcccgcaagaattcggtgaccatgatcttgcgagtgcattccatagtttcggtagggtactgagcgccaaagtttttgtagacaaggcaactggtgttagtaaatgctttggtttcgtaagctacgactctccagcctctgcacaggcagccatcagtgtgatgaatggataccaattaggcggcaaaaagttgaaagtacagctcaagagagacaacagcaagcacagtaaacctttctgacaaagcgacctcgttgtgtgctctcaccacgttcaggaaaaagtcggtacatatgtgtcacaattgatcattacattgtttcctccggcctctcaccattgcgttgccgccggtggtggctcttgttgtatctttgttcaattcacattcttgaaaactgtcgcattgtgtatttttcgtcgcagcgtagctgtagcgtttgtaccatcatcagatcttgtacatcagacattgatttattcaattgttttttttaaaaaaattcacatgaatcattttgttgtaaatatctttttcggtatctctcgttctattcaatgtttgagggtttctgtttatcaagaatc

SEQ ID NO: 125998 - DNA, 209 bp, Zea mays
  Clone ID: MRT4577_46380C.1
caaagtcaacatttcagaccatttttcatgttgccaccaacttgattccttacacggaaacaaaaaggggaagggacccacccacgtaaagttcagcctagcaatttcaaatttcaaaaatgatcaggaagctggatccaaaaaacttaaagaaggtgccctttatgattgatactaacagatgaaacaaatcaatggaccaaatatca

SEQ ID NO: 125999 - DNA, 501 bp, Zea mays
  Clone ID: MRT4577_46381C.1
acatcggaaccatctcgtcatcgagagagatcacatacgcctgactgcccacccacctccccttttccttcctcttacgcccagggtaggcatgcgtgcgtacactgagcgaggaatgcaacccaccaccgagagggagggacaggagacactacaacgaattcgaaaatgtagtcaggggttcgagaagatgacagatcctcgcttcttccgcttcctcggagtcgtcgccggcctcatcttctctgtgcatgacttgcttcgtacaaacacgctaaatggaactcgatgaggctgagatggaaagaattggtgctgagatcgatcatgcctgcctatgtgcccgtgtatcatgtactgatgtggtgctatctacgagatcatcatcgacaacgttctgagaacacaagatctgatgccgtgggtgcgcctactatcttgttgatgtatactccagacttccgcgccagcatgatatggtcctctttgggttctcacaat

SEQ ID NO: 126000 - DNA, 258 bp, Zea mays
  Clone ID: MRT4577_46382C.1
ggtcgttgtgcgtgctgtgcctcataagaaacatgggggtgttgtctagttatgtagcgcgacacgctccatagatgattaagtagccagcgatctaatgcgtgacagcttactgcttatttcccgccacaaccttcatggcgctaactgtggtctgtgctactagaggcttacacgagtgggcactgacacaagtcctggtcatagctgttttgtgcgctgaaattgacgcatcttgtatgagctactagataatga

SEQ ID NO: 126001 - DNA, 306 bp, Zea mays
  Clone ID: MRT4577_46383C.1
tcgctcttcggcggccgccctacagctttttctcctgcccaggacaccatactggttatgctggccgcgccggcctgcaacctggaggccgctgcccctaatggcatccgcgcactcgtcggtctctttgacaacagggggacggcccctgtaccagtacgtcgatctcggtataccacagtatctgtcccgccatagctttctttcgggagtcctacgagccctcgtcgaatcgcttttcaagacacgacgtgccgcacgaagaatgcgtagcgggcatcctcctccaggctgaaacatctgacg

SEQ ID NO: 126002 - DNA, 330 bp, Zea mays
  Clone ID: MRT4577_46384C.1
gcggactgcaaggttgccctattggaggataagttcaggttgttgtatattaacctccaggggcggagcacgacacaaaaacaagggcagcaggctagcaactagcaagcagcaaaagcaggctagggaagaggccgtctagcaactagcaacaggcttgcaagcagctaagccaagcaagcagccgaagcaggctagtaagcagcaaactgagcaccaagcagtagtcgtctggcgaagcacggccaaccagcaggctagcaagcgcgcgaagctagaacctgcgaggcggtgactccgtaaggcacgggtgcgcagtcgtattcggat

SEQ ID NO: 126003 - DNA, 381 bp, Zea mays
  Clone ID: MRT4577_46385C.1
gtctgatgcccagcggcatcactgagagagataatcacggagtgttatggccgcagcagcaaatgcatgggtatccacacgtacgggaagggcacggccagacgtctgtctcagggtgaatgcgtgctggtagacgaattcatcgactggcccgaccgtgcagatagaaggcatgttctgggctggcatgatcgatgaccagctctccattgattactgcagagctttgaaacggctgacaccactcaggtatactatgttagacggtctaaatctccagataagatgctctcacacgtattgccctactatctgccatttgtagggccttttaggttacaggatagagccctgctgggaggattgacgctttttagccat

SEQ ID NO: 126004 - DNA, 172 bp, Zea mays
  Clone ID: MRT4577_46386C.1
ctaacaaagtttcatgtatcgcttgccaggcgaaacctattcctgtgatcacattcccgccactgacccaccgattacagaataaagaccactataacattctggccgtggcatgcactattttcacgacccctaggctcggggcgcatggaccaacgccccctatttacta

SEQ ID NO: 126005 - DNA, 433 bp, Zea mays
  Clone ID: MRT4577_46387C.1
ggggttgggttttttttttttttcacccaaaaaaaaaaccccccccgttttaatagcccggctccccaccttgataaatcggggggggggccccggataaaaccaacaacctaaatggaaaaaggctttttttattacaggcctaaaaaaactacccccccccctccaacaaagggggggcatccttccgctcccttcataataattattccaagctccgaggcataggactttcctttaggaacagggttcctttggcttcaacggcgacaataaaaaaaactcccgaccgggggtagcttttaaaaactcttggcagctgcaaagatgctctccacggggaagccctcctccctgtaaatacgtcccggcaggagccctccccccgaactttttaatgccaatggccttgccctgggctcccacctacttt

SEQ ID NO: 126006 - DNA, 571 bp, Zea mays
  unsure (1)..(571): unsure at all n locations
  Clone ID: MRT4577_46388C.1
actcctncgatccacacacctcaccattctccaatctatatccaattacaaccacatatctcttcagtcccgacaaccaacgccaccaggacgacgaatacctcaccttccataactacttccacgacggaggcaggctcanccttttccatatttcactcccaactactacttctccacaggctatactacatcggctttctacacatcctgcttatcatgtttcgcatcgcacaacccataaaaacaatcttcctcatccgccttctatccaatccatcaaatactccattaattccctccactctgctcccaattcaaaccaaaatctgcctatgaatctatctcttctaccttcaccatcataaccaccttccttctcaaactctacacttacttcgactactcaatcacccaattactttctatctctctctgcaaactctcctaatagtccaacttacaatatcttcactcttgagccatatgctaatgaacctcaacttacctcaccacctgtcttctcaacttacacaactaagccatccactacaccattcaccccaccacc

SEQ ID NO: 126007 - DNA, 118 bp, Zea mays
  Clone ID: MRT4577_46389C.1
cctaagtgattagcatgtgctccactgaggcgtgtggtggtgaggaaatctgtggggagggcaaggtccttgtaagaaggacacagtgggtctacattgtatacgcagatacgccagg

SEQ ID NO: 126008 - DNA, 141 bp, Zea mays
  Clone ID: MRT4577_4638C.1
aagtaccaggctatagaattagcagctctaagtggcacgccgtagtaacgctgtttgcatgatccacagagtgagctaagtatcaatctaagcattgtgcctgcaagtagcggactttgcagagagcgtatccatctcctc

SEQ ID NO: 126009 - DNA, 332 bp, Zea mays
  Clone ID: MRT4577_46390C.1
aaccgccgtttggaagaaagcatccagttggtccgccgcggcgacttcaccctgcggggttatcaggggtgccggtcacggggggcgataccgccactaccttgctttgaggcgtgcgcaggagcactagtacgcctgctcgctgtcctgcatcttcaactaatacgctatgcgcatcatgtccgctcaatacgatcaggtctagatgttatcgaatcataggcgattgccgactaggcgagatgagatgttcctgtatagttggtggaagctatattttctgatctggatcagtctaaaagcaactacctgaacgagtactgaacttgagc

SEQ ID NO: 126010 - DNA, 279 bp, Zea mays
  unsure (1)..(279): unsure at all n locations
  Clone ID: MRT4577_46391C.1
cttcttagaccaaagtgcccatcncaccatagtagcctccaaaacctgtagttgtccnacnacnactcctcanccncatcttcaatctgatcctaacgccgccccctactcaggcagttccaattctctcttgttgaccgacgagacacaaaccctaacctatgtccttctccaaccccaaccaaaccacctttcacctcctccttcttatgaatagtaccaccggatcacttcctccagtgctcctttttgtggatactcctccacatctgcttcttc

SEQ ID NO: 126011 - DNA, 243 bp, Zea mays
  Clone ID: MRT4577_46392C.1
ggaagcaaaaatgagggggttacccctactgaactttattgggggcttaaaaaagcaaaaaaaaagaattccgggggtttgaagagacaaaaaatgggggaaatttcagttgttgggggtttagccatgacaaataaatttgggggggcctgaattcaaacaaaattttacagcactggtgggggttattgaatataaactggggggggcaaggcaagctttatttaattgaggggcttgttg

SEQ ID NO: 126012 - DNA, 636 bp, Zea mays
  Clone ID: MRT4577_46393C.1
ccccctctcgagttttttttttttttttttttttttttttttttttttttttttttttttttttttttttttttttggaagggtggtgggcagtacataaatccatgaacaacaaggtttaagggtcctttttttactccttcgcccataaacacacaactaaaattaaaaccaagggagttatttacttacacattaaaaagggggcccccatgaatgaacgtaaaaaaacactaccccctgcctgtaaagggttataaaaacataaaggaggccatccattttaaagcatcgttatctatccatttttaggattcctaaacctttttttgaaactccagacccttagctaaatattccatgattgcttgttctgtgggaccaatccttgatgaaacttggcaaaaacatgtccaattacaaactcaattggatcattataaaaaaattgtcatttagcatgggtcaattgcagcagttaacaaaaaaaaattaaaacatgttaatctaggggggggggtaagggagcaaccaaatattgttgaaacttcgggggaaaattatatcgatgtaatgtaacggaaaactttgatttgtcataaacatggccctgcatatggggaaattttttcactg

SEQ ID NO: 126013 - DNA, 294 bp, Zea mays
  Clone ID: MRT4577_46394C.1
tacgtaagctcggaattcggctcgaggccctgcgaggcccggcctcttgaccgtgcgggcgccgccaacgggggggggaagttcaagcacagcgacagggtcactcccgtacatatacgatggcgcgttgagccagcgggagactgacctgcgagactggatccgcagtggacgctgtattccatgcgtggctacttactgcataccacgctgagacgtatttgtgtgacgacaaaatgggtttgcgggaggccatcggtgaaactacacaatgcaggcaggccgcttacttgc

SEQ ID NO: 126014 - DNA, 269 bp, Zea mays
  Clone ID: MRT4577_46395C.1
aatcctttacaacaaacaactccacataaactctactcttattacaacagctaccctaccaccattcaacacctacccatttcaccactaaccttcttaacacaacaacaactttctcactctatcttaaccctcctcctaactctgtctccctattacatctacatcaactacttccacacaaccaactcgcttttacaaaccaaacaactttctaccaacaacccatcattcttcctgccctactttatactgctcaacatttatac

SEQ ID NO: 126015 - DNA, 462 bp, Zea mays
  Clone ID: MRT4577_46396C.1
gggccggaacccccgggccgacccacgcgcccgaaatcgattccgcagcagccgagcacaccaccagggagggacacaaccagcaaggggccaggcaacccagcagccagcggcggagccaagaaggccgagcagcgagctccacaccccacacctcagaagaaaaaggcgatggcgcaacagccgccgcgggcgccgagcgccgcgccgcaggaccactggccgacggcggcgggggaggaccagggccccgccgcggccaggcgcggcgcgcaccgccgctccgcgagcgacccggacgcgaccctcgaggccgagcccattgacgacgacggcgtcacaggcggcggcggcggcggcggcgacgacaacgaccgccccgaccacgaccagctccaggccatgagcgacgacgatgacagccccgcacacgacacccgacccggcagcgccggggagagg

SEQ ID NO: 126016 - DNA, 283 bp, Zea mays
  Clone ID: MRT4577_46397C.1
tttttgttatttttaaaattgatggtttaaacctgaacactggatcatattcctcaccataaacacgtcatccaatcaagacttttcccgaatgcatgccatccgtcctttcatgcaaagagagacgcttacgccatttagaggtgtactgcacacggtggccccagccccaagcatgcacgcacaaagtccaacacataaacaacttgctagagctatcgctggacccgaaactctccggtagctaacttttcatctacccacgactgtaaggggcatattc

SEQ ID NO: 126017 - DNA, 339 bp, Zea mays
  Clone ID: MRT4577_46398C.1
agcagtggtaacaacgcagagtactttttttttttttttttttttttttttttcttttttttttttttttttttttttttttttttttttttttttttttttaaaaccccgcctttttattggttcaacacaaacccatctttttttattctttctgacagcagcaggggaccccggggggggccccccccgggacaaaccacacgggagggggaacctggggcagggggctacacgaacaccaccccgggtactctggggtgtcacccccggttaagggggaattcccccacactggcgcgccggcctatggggcccctgctcgacccccagctgggg

SEQ ID NO: 126018 - DNA, 634 bp, Zea mays
  Clone ID: MRT4577_46399C.1
ccggccgcgaactgtcgggcctcaacccgatccatgagaccacgcgaccccagctagctgctccagctgccaggcacagcacaagctccagaaccgagggagggaggtgcctgccacccgtgcgtcgcgccgtgccgacctggctccgccccttccctggggacgacagagagagacagagagagcagcgcgattcggcgtagggcatgccatgaggactgctgcggcaccactgtcctgcgtggacctcatgtgctgcgtcctcctcggcatgttcgacggtctctagccggggctgatcctcaccctgatgtaacctccaccatggagcgacctccgacgtgcgtgagcaaggctcagcgctgcccaacggcagacgtatacgcgccaggatactagcgcttgggacaaatcaagaactggtacttttgccgctactcattgaaggctctgtcgaaatgcgtgctcctggcatatcgctcctaccgctacctgccgcctgcggagttcgactcctttaaggacatgcatgatagctgtacgtagggcgagatccagctgaccgaaataccaaccctctaggacctgagggagcaggtcacagtcgagctcgtgaaggatgtgctgccgatcg

SEQ ID NO: 126019 - DNA, 490 bp, Zea mays
  Clone ID: MRT4577_4639C.1
gggaaattccccaaccccatttcacaaaacatttggtgggttgcaaaaaggtccctcggtcattcaatgggggaagaaaacttccaactgggggaaaaaagacagttttaaaaaaaagggacccccccaccccacccccaaaaatagggcccaaacttgcaaataagttttttgccttaacgggggggcaccggggggggcaaataaaacctaacatccagggtggaaacaacattcacaaggccaaccattgttttgaagggacaatactggtatgggccaaacaacctttggaaacccccgcactgggttggaaaccgaaaatagtttgttatggccttaaagttaggacataatgccttcgggcagggataatgcggcaagcttactggtcgggaggtttgggttttgctggggggcccattggggagaaattcattgccttaaaaaccttggacttgagagcattaggggactcgggcaggggggg

SEQ ID NO: 126020 - DNA, 339 bp, Zea mays
  Clone ID: MRT4577_463C.1
aaaaaaacaggcccacaattcaaaacattggaaaaaaaaactttttggggggtccggaaacaacaaaggctcaaaaaaaaacttttagggggggctttatcaaacagagggggggggatccaggcctaaaattttggggccccgaatctttggaccggaaaaattcttggggggctcaaagggctggtttttttggcccaaaaaggctccggtttggttcccaaactaaactttttggttttttggggcccccaaaaaaagggggcgggggttgcaacaggggcttttgtttttttggggcccggggccagcttttcctcccttaaagaaattttcttt

SEQ ID NO: 126021 - DNA, 309 bp, Zea mays
  Clone ID: MRT4577_46400C.1
caagcacacacttttttttttagccagcgccagtatgaagagggggattttcgagagcggctagagccccctctcatctctcaatgtggggcttgaggtctgacctcaacaagcaaaaaagctaatgtcaagcatccaatctgaagataccaccctgaagggcccgaataaggttaagaagatcttcatttaactagaccctcggtatgatcgcaggaagcatgttgaagatgcaccactggaacgagcaaaggaagactaggcccttctatgacatgcttgacgatgtcaagaacagacatgttccct

SEQ ID NO: 126022 - DNA, 565 bp, Zea mays
  Clone ID: MRT4577_46401C.1
tatcaccggtttatcgtcgaccatgggactccatccggcgatatcccacagaatatttaaagctcaaaaaatacgcaaagggcttggcggacatttgtacgacaaattatcagaaaaccagatcgtccagatccaaaacgcaacgacgagaatcggctggagcagactgttgacgtggacttgtcagcgtgggcaactcgcgttgcgcgaaatctgcgtcgagacactttgacgcgtggatgaccggacacgaaataccacatgaaatggaagaagctgctctgtgcgcgggcatgaaaaaaggaaatatcgctgctttgtcgaagattcacaagctctatagcacgacgcgatcaccatcacagaaaaaaatcattctgagagcattggcttgtaccgacaacatccaaatgctgatgagtcatctggatctgatgcgattggatgacgtggaccatggaagcctgcaatctttcaaaactgtttgcgacaacgtcgtgaccacaccagtgggcgttaaagctctttccaggttcttggtacagaaactgaacgcgattcaatc

SEQ ID NO: 126023 - DNA, 421 bp, Zea mays
  Clone ID: MRT4577_46402C.1
ctcaaggttcccctgggaaatttcgggaccccccgtttgaaaaaaaaaaaaaaaaaaaaaaaccttggggttttctttgggggccgtttttttggtggaaaacataaaaaaattggggaaaaatgaaaaaggggggaaacccggggttatttttaaaaaattcccgcgtgcctaaaactggttgttttttatgggacatgaagagcaaccttttttttttcttttttttcccgagtttccttggaaaaaatttgccccttttgaaggttttccccctttccccaatttttccggggttaccggggcaaccccccctggggtttttggctttttttggcaccttggcttcttaaccgggcgaaggatttttttttcccctttaagggggtgttttcaccggataaactcaacctttcgggga

SEQ ID NO: 126024 - DNA, 588 bp, Zea mays
  Clone ID: MRT4577_46403C.1
aaagaacattgttgatccacgggatggaccttatggtggtcggaggtctaatgcgccaagagctgcacgatcaccaagaccatcaattgtttgcatctcacctgtatcttctatggaatcaaagtggctccatgctgttgctgttttatcagatgggaagagattattcctcactacatctggtggaagtggttcttcagttggattgaacagtggtctgcagaggccaacctgtttaaaaattgttgctactaggccgtccccacctctgggggttggtggtgggcttacatttggtgctgtttctgtggctggcagggctcttcctgaagatctagcattgaaagttgagtctgcattctattctgctggtgctcttgtaatgtcagattcatccgctacagccatgtcatctcttctggctgtgcagaaagattcagctgcgcagctatctctccccagcacctttggaacagcttctagaacctccagagctctacgagaaacagtctctgctttacctgttgagggtcgaatgctttgtgcctctgatgtcttaccacttcccgatgctgcttacatgatgca

SEQ ID NO: 126025 - DNA, 416 bp, Zea mays
  Clone ID: MRT4577_46404C.1
actggaactaatgtctagccgcaggatgctgataccagcaatagtgaggaaagactaattacagtctgcagcggcctagattagctagctacctatcatcatcactaggttggtcttgggccatgagaggatagccgggtacaggaagggaacactcttccaattaaaggatgggtaaagcacccatctctaggtgctggggaatgatattgaccactgcggctgccagtgcttgctcctgttcgagactcttgtacttggagagccactcttgtacggcgaccaggcgaggagagaaccatggctgcctgacagcctgcagctgttaaaggtggaaggcttgaaccgggccacgaacatgacatgcgtgccgatgctcccaaatagggtggagttcttccgcatgctgagaccta

SEQ ID NO: 126026 - DNA, 412 bp, Zea mays
  Clone ID: MRT4577_46405C.1
catgctattactagggcaggtttcataaaaaacaccatgcaaaattttcttaagaacaaattataagagcgcttggagaaacaagcataaactttcagcatcagtgggttactagctcgacctggttagaatccaattgggcatgctggctcaggccatggcaagcagggcattctcgccaagtttggtctgtcttgtggcgaagtctgacaacttaaatgggctgcgaggagcagtggggaacagaataacatggaacagaacggaggacaagaacaaattaagaccaggtacagctacatactaagtaagctagtcatcgtcagacattccaggaagaccttatgtccatttcacacattagcactccgtggccttattgagaaagagcataaatgcttcatggagattt

SEQ ID NO: 126027 - DNA, 1205 bp, Zea mays
  unsure (1)..(1205): unsure at all n locations
  Clone ID: MRT4577_46406C.1
cgtgcaaggtagcttgcacccatcgtgaagccaccgaagccgagggagcggcgacacattggtacctgctgtgctgcagtgctctcgtcctggtcggagatggacgctgaggccggcgaggcgggggtgcagcagccggccggggcggcgtccacgagcaccgcggcggtgccgttcgacaggtcgtcgtcgcggctaggcgcgccgggcgccgagagcttcgacggcgcgctcagggagctcaaggatctgcggtctcagctgcacgaagcggcggactgctgcgccaaggcgttcctcagcaccgacaagaagaagatgattctggagggtacaaagggttacatatgcgatgcggtggtagctgtgatcgatcacctggggacagtttcgtccaagcttgagcacaagctgcaggagaggactgaagtcgcacagacggaacgaaagatcaacttcttgaaacaggtgatcttcggaccagagcttcattcttctctgtcactgcgattttatcaggagatcagcatagacatctgcatgcggcaaggtgaaaatggtccacgacttccgcaaattactggctcaacagtatctggagctaccctcactctcaagccatatgatgttcaaccagccatcggaaaagaacataccgtggtatcagaaaacgttgaggacaacccaaggaccataagaaggtcattctcttttagagcagaggatgttcacgttgttctaggcgatcacaaaaagaagggcaaccatgggagtaacatcttgtcatttctcaagaaaaccaggcgataagcataagaactttgctaaagaaataaacataagaatcaatgcaccaacgggatagagtggaactgtagaggagtaccttttcccccctttggatagtcttttctttcgtggtactattggtcctaccggtcatgcagcgctttcactgtttcgcaataagtactgatatactgaaagcatttcttcaatgatatgtctaggttatcttcaaaaaaaaaaaaaaaaaaaaaaaaaaaaaaaaaaaaaaaaaaaaaaaaaaaaaaaaaaaaaaaaaaaaaaaaaaaaaaaaaaaaaaaaaaaaaaaaaaaaaaancccttgggggggggcccggggccccaattcccccttatggggggcgtattacccccccccattggccggtgttttaaaaagg

SEQ ID NO: 126028 - DNA, 322 bp, Zea mays
  Clone ID: MRT4577_46407C.1
gttcacccagggagcggttgcggcccttgtttttatctttgggtatggactcctaaacagagagacaatggctgtgaagggccatgataacgcgctgggtactcacaccatcttatgagggtcagccagcaggaacagggggggtgactgaatcatgttgaactcacgcgcctgataggagggggccacccagcttttcggggcacgcgctgacgtggatatgcctgcgcactgagcatccgaatcagagcagggctcatggctgcctacagtgtatcattaccgacatagatgggttctgtgaggaatacatatgcgatga

SEQ ID NO: 126029 - DNA, 683 bp, Zea mays
  Clone ID: MRT4577_46408C.1
taggggccttttttttttttttttttcagttttaaaaatagaatggcccttgtcattcagtactgccatgagttcatggttagtgccgcagtaaaataaatgtgccatcattgccacattagagtagaaacaggacaaatagctttttgctaaggataagtgtctcataattttctgataccgtgcttacagatgatcatgcttctttacggaacacatgcaaccagttgtggtgcattctagttcagaatggcttcaagtctgtattaacttaagatcagctacaactcccgagcattcaagttcacggaaccaggcttgctgcttcttgtggagtattttggggcgttccagaactctgctgattgaactggcagcatagttaatcgagcacgccgcagcgctcaccagcgaccgcgccatcgtcagcgcacagaacattccgcggccgccggagagggcttggtcggcggggtgcgtccattcgtcaaagatccagccgtagcggcggtcgaagacgaggcggcgcgggcggcggcggaggttcggagccaacgagtctgtggaggactgagccgccgccatggctggcgttgacgccgtcacgctctccgcactgtatatactagtgtttaaaattagttcgaccgtggattttttttgtttttcccggaccggccggc

SEQ ID NO: 126030 - DNA, 681 bp, Zea mays
  unsure (1)..(681): unsure at all n locations
  Clone ID: MRT4577_46409C.1
tttccctcagcggtctagatacgatgggttaagacgacgagatcgagagcgtcgctggcggcggcgagttcgctgccaaggactacacggaccctcccccggtgccgctgatcgacgcggctgagctggggtcctggtcgctgtaccgcgccgagatcgccgagttcatcgccacgctgctgttcctggacatcacggtggccaccgtgatcgagtacaagcaccatgacagacgcgctccgngtcgggcgccgacacggcgtgcggcgtcgtcgcggagctgggcatcacctgggctttcagcgacatgatcttcgtcctcatttatctgtttgtcggcatctcgggggggcacatgaaccccgtcgttgccttcgggctcttcctggtgcgcaaggactccctggcgcgcgcgctgctctacatcgtggcgcattgcctcggtgccatctgcggcgtcggcctcgtgaaggcgttccagagagcctacttcgacaggtacggcggcggcacctactcgctcgcctccggatactcccgtggcatcggcctcggagacgagatcatcggcaccttcgtgctcgtctacaacggcttctccgacacggacccctagagcaacgcccgctactcccacgtcccgggtctggctcacatccccatcggtttccgcgtgtgcat

SEQ ID NO: 126031 - DNA, 252 bp, Zea mays
  Clone ID: MRT4577_4640C.1
acgttcaaagcctatcacaatttctttaacttcataactctgaaggccatgtaaatacttatatgttatctgaccttcaacaactttgtcaacaactctttcaatctattcccaaccttatacttaacaacaaatctaagaccaaactgactatccatctttactcaatccacataaatctccccgctatccttcacgacccttacaacctaacctcttatatcgctaatagacacacctctactaatatca

SEQ ID NO: 126032 - DNA, 217 bp, Zea mays
  Clone ID: MRT4577_46410C.1
tcatgcgctcactcgtactaacacgaacttttatgtataccgctaaaattaacaactctaggaacggttactcaaactagcggctgaccagcatcattacattcaccaactcttagactgccaacacaaatcctatcttacttacatccaagactcacattaccgaccttttaatcatgattctgagcttcaacctgtaaacacatatgaaaactat

SEQ ID NO: 126033 - DNA, 299 bp, Zea mays
  Clone ID: MRT4577_46411C.1
gtattttctttcatcaaacacccaagttgtgtgggcaccagatcaaggctgcaacatccattatctaactccacaaaccacgaagctggtgcttgtggttcttgctttcattgctataacatcacgtgtttcttgtacacagacaggccgctgtagctgtcgacaacaacaaacccatgagcagcaacatcattcacaacaacatcatgcacaccatctccaacatctaccaccaccacaacatctccagcaggagccacaccatctacaacatgttcacatgcaaccacaaaaacatc

SEQ ID NO: 126034 - DNA, 493 bp, Zea mays
  Clone ID: MRT4577_46412C.1
gggcaccaaaccggtggtactctgttttaagatacgcagagcacatataatagcgcacagcttaacagacaaaaaccagtcgtgggatggatatgcattcaagatagaaaaaaccaagcaggagatacccgcttaagtctttttcatccaggccctgacttatccttcttctttacgcgcaacccaaggagcatcttgatccttcggtcagaacggatttggtctggggtcgtagacagcttcattgcatggggcaccttctcaacctggaatggagaccttatcaacctcaatgaacatgcttgtgaactcccttgacctcaccttccctataaccttttctagctaatataggagcggtggtttccgggtgatcacgcctgaaaattgatagcccagtaggaactgcatggggaaatatggtatacattcccctggattacatatccatacgcggaatatctagctgggctttgaaagcactcatgctacc

SEQ ID NO: 126035 - DNA, 326 bp, Zea mays
  Clone ID: MRT4577_46413C.1
aaaaaataaaactataagaaaaaggaagtgaaattggataagataagaaagtattttgggttatacatatagaaaagcaaaagtagaaaagaatgaaaaaagaatagagggggtttcgaatccaatcaaaaaacctattttggtcttagtatggataagagatcttcctatgttaaaaaaaagtctttattgtatgtacttttttttttatcttttatgcctgaagaactgttttccccttttctgttagaagtaggagccggtaaagctactctttcaatttgtcacaagcattatttatttttataatttgtcctctgtttcat

SEQ ID NO: 126036 - DNA, 1017 bp, Zea mays
  Clone ID: MRT4577_46414C.1
attctgtattccagaaaaattattcgtccgagaattttgaacacggtggatgaaagccctgatggagatcactgacccacgggcctaccttacgcactgtttgcccgcatagagaggagcggaggtgacagactgtgccatcgaggctcccaattcaattgtgtttccccagaccgagaatagaatacacactcaaaaatagcataccatcttcaaatagcccgaggaaattaccaattaataggtgtatgaagccctgatggagatcactagcccacgtgcctaccttattcactgtttgcccgcagagagaggattggaggtgacagacggtgccatcgaggctcccaaatcaatcgtgttcccccaggccgagaacagaatgcacgctcagaaatagcagaccatcttcaaacagcccggggaaattaccaattaacaggggtgatattgttgaagtagatacatggattagtgctaatggtaaaaatggaatgcgtagacattggcatgtacatgattctataacaggccatacaatactaaaggtgacaaggttcaaatctacgtcgtgctcatatgtctatatctttaatcaattttattagcaattgaattctaccagctgccatgttagtgttacgattgacacaacacttatagtttctctgctaaaaaacaacaaatcttctaggtgcaccaccggcaccctggatcattattgttattttttggtgtcctcttgctcctattatcctataatgcttctgcttgataatctcttttttgtataatgaggttttattggcattttaaggtttaccactgtctacaacacacaagtttggattatatcttgtgtctcataagcagtttggcaataaaaggaagtatcttcataggagaaccgccccatttccatactatgcaacaccaatggacatggttgtttaagtatatgttttttcttttttcttctgcttaatatataatggggcgcagttctcctgcgcgtct

SEQ ID NO: 126037 - DNA, 288 bp, Zea mays
  Clone ID: MRT4577_46415C.1
tctcgagcggctcgagttttggggctttacctcagtactggaggatgtggaacatggtaatctttttgttacttctatattcagattctatacccttttatttagttgagactttgttacttaactaaggacagttgtgatggtagtggtactcttctatttagttaagacttccttaacttctgtcactgagcttgagatatttgtctaataatatctttcaaataactgacaattagtctattttttgtcagcctgttcataagtggatcatcagacacatatatt

SEQ ID NO: 126038 - DNA, 380 bp, Zea mays
  Clone ID: MRT4577_46416C.1
gagctcactagatggcggccgcccttccattttttatttctgggggttttttttcaatagtctccggggtttttaccccacctaagcgccctcaaaggccttctaaaaaaacccacccccacatccaccgctcaacagggccagggcttgaacacccaccgacatgccaaataaatcaagtcggacaaaacccgaggcgataaaaggagggccccacacagagagagggacggcaacccccactaagcgaccaaaaacgccaaaaggcgccaaaaagctaactaatcctctcaatcacaacaaaaaaaacccagttaacggaaaattctcgaaacccgggaaaacaactcaaaaaaagcctccccaggacaatgcccccc

SEQ ID NO: 126039 - DNA, 431 bp, Zea mays
  Clone ID: MRT4577_46417C.1
gcggatggcggcggcggcagcgatgacggcggcgggctgcggaggggctggggcggcacgcgccctctcccgcttccgaggctgcctggcaggcgcgctgctcggggactgcgtgggcgccgtctacgaggcgcgcgacaccgtcgacctgacgtcagtcctgcgtcaggtccaggatttggagccggaccccggctctcccgggagcgcgcggacagaagcactgtgctacacggacgacacagccatggccagggcgctggtgcagtccctgctggccaaggaggccttcgacgaggtggacatggctcacaggtttgctcaggagtacaagaaggaccctgaccggggttacggtgctggagtgatcaccgtcttcaggaaactcctaagccccagatgccgggatgtctttgagcctgcacgcgccc

SEQ ID NO: 126040 - DNA, 367 bp, Zea mays
  unsure (1)..(367): unsure at all n locations
  Clone ID: MRT4577_46418C.1
ggccaacggggggaggnaggaagggacnngaaagagnaccaaaacncaggccaacaacaaggacaagcgggcccaagggaaagaggaggaaaaaaacacagacaacgcggggcagngaaaccaccaacagcagggacaanncggggcaacccaacgcgaggggggccgacgagnccnnncagcccggagaccggcccacagagcacaaccacacgaccngcgacnncaggacgcncaacncccgacacacacacccagcaagggcaaccnccacgcnncgcgagaccacncagaagngcnagcccancaagcagcnnccggacncagcaaagcccacaaccccaagcanncccagaacccaccgccg

SEQ ID NO: 126041 - DNA, 284 bp, Zea mays
  Clone ID: MRT4577_46419C.1
gaagaagaagatcggactggtgtatgtcttgtatgggccacatggcacgggcaagacctcgtgcgccagggtattcgcaaaggctttgaattgccattccccggagcacccgaggccctgtgattcatgtgcctcttgtattgcacacaatctgggcaagagcaggagcttgctggagattggaccggttggtaatatagatctggatggcattgtggatatccttgacaatgtgatgctctcgccggtgacatcccagcacagggtggttataattgatgact

SEQ ID NO: 126042 - DNA, 236 bp, Zea mays
  Clone ID: MRT4577_4641C.1
ccctcatgctctgattgtgcgtcgctacctctccctgctggacacggccgtggagctggagctcccaggataccggggtccccgccttccccgaaggcagcaagtgcccatctttccccagcctctcatcaccgaccgtgcccgctgcaagtacagtcacaaggacatagtagctgaggggttgcgccagctgctgggggaggagaaataccgccagacctgactgtgcctccagg

SEQ ID NO: 126043 - DNA, 613 bp, Zea mays
  Clone ID: MRT4577_46420C.1
attcctgcttctgcatgctcgaagctctagtcctaactatgtagtattggacaggtgagtggctccgcttctctctgctgctatggaccacgctgcaagccatacctgggcttaatggccacctaagcaggaccctcaaatagctagagtgctctggagaacaactgtcgcatttttctccacagaggacctggtgacggagatatcttatattgactacacgatctgatggagtcatcagacaaaccgtacgctgaatgttgattccctcgcaaaatccactttgcgcgactgactaccctctgacttcaccttcggtggcgtcacttcagagtacctacctgccggagattgacaatgaagatgagaatgtggaaagatattgtgatcgcttctgccacacctgtcctgacaggatactgggcgctcctcactcatagattgcatctgactcacaccatatgtgcaaaaccgacgtcacacttgctactaaggtcaatgtgtactgagactgatataggttctctatctcttgactgcataatactggcgatcggaaccatggaatgaggtgttaacccatagggcatctcgtactacagaaacctcatct

SEQ ID NO: 126044 - DNA, 326 bp, Zea mays
  Clone ID: MRT4577_46421C.1
aagcacgacccccaagcggccgccccccattttaacaccaaccggcagaacggcgcggggatgcaagaagaacggcgacacacaacagaacaccgaaggaccagaacgcccaggaccccgcaagaaacgaccacgaacggagcacgggaagcaggaacaaggccccacaaacggaaaaacaacgaccacacacgcaagacccgagggggacaacaagacccgacgccgacagacacaagcggacaagcccacgcgcagagaacacgaacgcaggaaagggaaaaccagccggaaaaaaacaaacgacgccaaaagcggccgacccc

SEQ ID NO: 126045 - DNA, 135 bp, Zea mays
  Clone ID: MRT4577_46422C.1
gccaaaatccaagcgcgtcgccacgcatttctcccattgcctcaaatccggaaattgcgcgtttggccggctctgaaggccttctttgtagacgcgcgcgggctgctatgcgttcgcgctgcagggaatttttcc

SEQ ID NO: 126046 - DNA, 178 bp, Zea mays
  Clone ID: MRT4577_46423C.1
gggggaaaaaaattaagggaaagccaaactggtttgtttaacaaacacagggttgttggcccttcccaatttcattaaaataaaatggaaccaacttaaaaggggaaacaaaagggtttggacttggtaccaatttttgccacttgtcctttgttgggacatacaacaccaattttac

SEQ ID NO: 126047 - DNA, 301 bp, Zea mays
  Clone ID: MRT4577_46424C.1
ccggccgggagtactcatcaagtccacaacccacgaaatgcacgggaggtacccagggcagtcgatcgatatcggacaatcgtagctcacggccgtctcctacaccatgagctccacggatcgcggagcggcgggcccggtggcaaacacacggtggcctgaggcgccaccgagtgactcctctggagggcaagaaggcgatcctgaaggtctgtgggacgcctgaatcgtggtgctgcacatcggctccgtggtgaccgggaattatcggcctaaccgcggacggatcttcgtcgacaac

SEQ ID NO: 126048 - DNA, 229 bp, Zea mays
  Clone ID: MRT4577_46425C.1
aagttgcagttgtagcgttggtgttattagtaataccgccgaatgtgacatgcagaatatccataagcatgttagttcgacatcatcatctgttgtagaccgtatgatgcatattgcattatttgatttgcagactaggaattgcagtctgaggatcatttagaagggcaagttcaggaggatatgacgatttgagaactttgtagatattcattgactagcaatgagc

SEQ ID NO: 126049 - DNA, 466 bp, Zea mays
  Clone ID: MRT4577_46426C.1
gtgtcactgtggaacagctatgacgctatatgcacgcgtgcgcgcgctcgtatcctcgtaaacctccagacgtgccgccctttttttttttttttttttttggacccgggggagtgggaatctgtcaaaccttatataaatacataaagaaacaattcggctctctgaattgttggacccaccactactgattaaaacctaccagctcgttaaacccgtacttgccgtatcaggaaagaaaactaattcctggcaaacactcgactttagggggctagattaatgttgcgatcactctaacctgctcattcgtcgcttcattatttatccaacacaagacagtcaatcttatttatacaccactctgaccatgatccaggctctatacagcgtgcatcgcttacgaaaaggctcagcccattgccactaccggctaagaacatttaataaacaattgttaatcctg

SEQ ID NO: 126050 - DNA, 350 bp, Zea mays
  Clone ID: MRT4577_46427C.1
agcccaaccataataattgtttatttaaactgttttaaagccaatcccaataacaagtttccccaggctttttttttttgggggaaagaaagcattttaaccccccagtacccaattttattttcaacaaaaacattttcttttttttagttaaaccccttttaaaacacattttttgacattgtccctaaaaggaaaaaacctggggctttagtgcccataattccacaaattttttttttttaattttcaaacctaaattttaaaaggtggaccccttccaaccaaattccaaacccttcgggccataaaatttaaggtataagcggaccttggaaacaaaacatttt

SEQ ID NO: 126051 - DNA, 875 bp, Zea mays
  unsure (1)..(875): unsure at all n locations
  Clone ID: MRT4577_46428C.1
cattgggaccctcgaggccggccgggaattgctttgatctttctttgcattgtttcaagcaaacactcacacgtccatcatgagcatccgaactgtcgaattgaagcctttccaggaccagaagcccggaacttctggtctccgcaagaaggtcaaggtcttccagcaggaacactactcggaggcctttgttaccagtattctcctgtccattcccgaaggcgtcgagggctcgttcctcgttgttggtggtgatggccgttactggaaccctgaggtcactcaggccattgctaagattggtgctgcctatggcgtcaagaagctcttgatcggccataatggaatcatgagcacacccgctgccagtcatctcatccgaattcgcaaggcgacaggtggtatcctgctgactgccagccacaaccccggtggccccgaggaggactttggcatcaagtacaacttggccaacggtgctcccgctcccgagagcgtcaccaataagatctacgaaacctccaggacactcacctcatacaagatcgccgacattcctgatatcgacctcagcaccatcggcacacaaaagtatggagagctcgaggttgagattgtccactccactgaggactacctcaagatgctcaaggacatcnttcgacttcgatctcatcaagtctttcctcaagcagcaccctgacttcaaggttctctttgatggtctgagcggtgttactggctcttacggagtcgacatcttcgagaaggagctcggtatccccaacagcacacagaactgcgtccccagccagactttggtggtcaccacccccgatctaactcgtctacncaagtcgctggtcgatgccgtg

SEQ ID NO: 126052 - DNA, 1444 bp, Zea mays
  Clone ID: MRT4577_46429C.1
cttcactgccgcgccgccctcctcccttctccctgctccttcccatggtgcgcagggcgtcctcccctcgatttcctccgtgcctccttccagtcagcgacgaacgaggttctaggcggccacgtcgttgtccggcacctcgtctgtgtttttctctgtgccacggtcgagctcgccgcgtccctttgtttgagtccgtcaacctccatctcgccccgagctccttccatggctgtcgtcgcctccaagcctggggtattgccgagctcgcccagcccttccccatcacacgccggcggtcctccattcccagccacgccgctctctgctcactggtgctcgcccctgccctctgtctagcgccctccctgctccacctcttcccatggccgcctgcagctctcgtcctccctcaagccctagtcgagcttttctatggcgccctggatgccagcccctttactcgatgcccctactaggttcctggcatgttcgccgagccatcgcccaagctcagcttatccatggcgcagggaacaacaacccctttctgttgatggcatgctgcagccccctccatcacgctatctcctgttctccatttttgctgcagcaagtggacgcccccagccctccattatttgcccatcttccccatggtgccagcagcatgccaacggttcaacgataggtgcagcagtctgcgcgtcgtcaatctcctcacatcaggtcgtgtccctctctgtccttgcatgttctagtttcatttcactttgttgtccatgtcgtgacgcttgtgttatctctggtttatttttgtgtatggtgaggaagagaattctaggaaaaatcgatgaagaaaacatgtttcagttcggtgcgctctaggtgtttgacgaaatgggagcaccagggaacaatcgtcgttcttgcataaaccaagtcgatttgactgtggtacgctacatgatcacgtgatacggaattcaagaactgagttgatctcaagatgatgaaatgatgagctactccgacaaatgatgtctgtgaatcaacctaatgagaggtggaccgatcaagtgccaagatgaatatggtcgtcaaatgatcgtcatctaaccaacactaacctagtgttatcccagacaagccccggtgcatttgccacctcattctgttttaaaaagttttatcaccttgaatgatgcattaggtgataggagttgtgatcaaacagttgatgcatttccttccttgattagacaaccctaatacccgttttatgaaaatttagtgatgcttagcccttcttattaatttaggatttgtttttttaaaagatgatatgtaacacgggataagggagtttgtgaaataaaatgacttgtgatgatgaagccgttgtggccgcgatgatttcatcattcaggtagggtacctctct

SEQ ID NO: 126053 - DNA, 452 bp, Zea mays
  Clone ID: MRT4577_4642C.1
atctttttcagatgataagtaaataaggcccgttctgacggttcgttatccagtttcggaaaaaggtgcttactagtgtctcgtcgttatccggggggagggttgtctccactctaaagaatgtgcattgattttattgctctaaagctcgcctaacttatttgacttgacaagaacagtggaagagaaagattctcaacgtctaacagctgctttagcttgaatcgggttgcgctgagttgagtgagtggaaatgagttgaaatatggaagcgagaacagctccgccgcttgagaagagacccagaattgctcataaaactctgtttcaacattttctgggtttagagcacattagaaatatggagtaggtaatccgcttggtttccctgatttctctatcttagatccgcataccatacccggttcagattggaaagccaaggtagtggc

SEQ ID NO: 126054 - DNA, 265 bp, Zea mays
  Clone ID: MRT4577_46430C.1
aaggcgaccaactttcagcatataaagcacattaatgatccatctatggccgccaacatattgggccttcttgggctccttgatctttctccaagtgctgctacctcgacccttttgccacattgctcgcaaactcctatacctttccttgttaccctttacctttcaccaacagagtcttctgtattatacaacccaattcttgaacctttcatgatacaacatgtaataccatctggcctcttacctttatcacccttatttt

SEQ ID NO: 126055 - DNA, 310 bp, Zea mays
  unsure (1)..(310): unsure at all n locations
  Clone ID: MRT4577_46431C.1
tcttccccccgaaaacacccccccaagggggcctaaaagaggaanaagggggtcgccaaaagcaagacaaacgcaancaaacaaggnccacgcaccacccagagcaaaggaaaaaacgggacacggcccaaaagcagccacgccagggaagggagaggccgccccgaaggcaacccacgggagaaaggaacaaccgaacaaggccgaagggaccagggagcacgccccaagcggccaccagggggncggggaaanccgcaccagcagccccccaaacagaaggggggcccgaaaccaagggcccaggaac

SEQ ID NO: 126056 - DNA, 407 bp, Zea mays
  Clone ID: MRT4577_46432C.1
gggctgccaggagtcctggaagcgtaccggcacgactacgaggagggcatgcacgcctgcttgcatgccgactaataatggatggttattgctgcttcaaacgaggagatatccgtaggcaaacagcggatgcactgagagcaacctcctcaccttggctgacttgtgttgacttgaaatggggaaaattcttcctgaagggatcggggaggggcacgaacagatcgacctgtgtgactatgctgggcataaggcacagctatggcactgttatacctctgaacaccacctgtgatgatggcacgcaggaatccgttgaattgccaggtgcctaacggcgttcaatttcctttgtgctgtgcttgtctggacagcttggattgctttgccctgcgagacactgagtc

SEQ ID NO: 126057 - DNA, 508 bp, Zea mays
  Clone ID: MRT4577_46433C.1
ggatcctaatgcaacaagtgggaccaaccttttgtgttgggagttgttgttctgcaaaaggaagggactaaacctgacgccctaaaagccaaacaccctttgaaaaaaaataaaatagaacctcttctctaaacgaactttgtggggcccgttctagaattttctaaaattaaagccatcttatcctaaagttttacaaactccttggggcccaatgaaggggaaaagggggaaaacttttgtggaaccaacaaaaagcgtatgatgcctttgcttcaaaaacgctactggttaattcccagtgttattggggccggcacaccccccctaggttggaatattctttaatatttcggagctccccggatttggattccatttgtagactcgatcttgttgtttttgggcttacacaaaaacccctttttaggcctattgcccttggcaacaaaaatacggggggatattcccggggggaataaacccacttttggatttggccagaagg

SEQ ID NO: 126058 - DNA, 325 bp, Zea mays
  unsure (1)..(325): unsure at all n locations
  Clone ID: MRT4577_46434C.1
agcaggggtaacaacgcagagtacgcgggtcctatcatgatgattaagggaagagtgaattgaaggagatagagatggttcttttgttcgggagacaaccactgtagattccagccaaaaaaaaaaaaaaaaaaaaattttaaagttttctgcgttgttaccactgcttaagggggagggccagcgcactggcggccgctgctggtggctccagcctgggtaccaaggtccgagtaatcattgtcatacgtggatcctgtgagaaattgttatacggtaacaattncacacaacataccagccggatgcatataatgtaaaagac

SEQ ID NO: 126059 - DNA, 251 bp, Zea mays
  Clone ID: MRT4577_46435C.1
gttatgtgcaacaatgaccgatgtataaacacgagcggcatccactgtagtctggcatgatgaacgaacagaagaagatcaacgtctaacacatggatttacgcaacactgtggacatggactgcatagacaatctctgggactgagggctgtccatagacttgcacatattggaaccaacacacctcacagagcaagactgagacaaatgcggctgcggagtctaggattactacctgaccgggatgcat

SEQ ID NO: 126060 - DNA, 327 bp, Zea mays
  Clone ID: MRT4577_46436C.1
agagttacgggcaccgttgttaggattatggattaagggacatggctttgctaacaaagttgctggctgtgttcgctcggctaagataggtccatgcatgattttccagtggcatgagcctcagacaaaacgaaggcctggggctcacttgcttgcggggtgatgataaaccgaacaaaccgatagatgtcgaataacatgaagggaggagggattaaaatagcgtcggacgggtgctgaaatatgggcaacgtgttaacttaatcctacgtgatctatatgcatgggtggttgttgttcacttcaatcctagctggcctgttgttt

SEQ ID NO: 126061 - DNA, 114 bp, Zea mays
  unsure (1)..(114): unsure at all n locations
  Clone ID: MRT4577_46437C.1
gaaaanaccccctttctgctgcccggctggttcataaatgtaaagggcaaaacttttcatatgctttcttcatgggaaaaacagctacggtcggaagggcaaaaggataaacca

SEQ ID NO: 126062 - DNA, 622 bp, Zea mays
  Clone ID: MRT4577_46438C.1
tggcccggcaaacatttcggccagaattcttgaacaggatagatgagtacattgtgttccaaccactggatacaaccgagatcaaccatatcgtggagatccagttgaatcgggttaagaaccggctgagacaacagaagattcatctccagtacactgcggaagccgttgagcttctggggtctcttggctttgacccgaactatggtgcgaggcctgtcaagagagtgattcagcagatggtggagaacgagattgcccttggtgtcctgaagggcgatttcaaagaagacgatactgtcctcgtggatgtaagttcggcggcgatcgcaaaaggactcgctccgcagaagaagcttgtccttcagagggtagaaaacggaaacgacgagttagttgctaatgactaggtcagatgggatcaccttttagcgagaatgttcaagtgtgatgaaacgcagctgttagctctgcgttttcgcgtatgagaaacttggccttttatttaggttctaccatgaagtcgtgtccagtctccggtggcaaaactcaatgttcaaatctctctgaatataatcttgagagctctacctcaagagctgtgaatatctgttcaggcacc

SEQ ID NO: 126063 - DNA, 584 bp, Zea mays
  Clone ID: MRT4577_46439C.1
ggaggatcaggaacggatcgaataatcgatccatgagatcttttggttgcttcgactcgtcgttatcacgcgagcatggacatatgtacgtacacacgcaacacacacacacacacagagagagatgcagactccagtgacgatgacagtcgtcttcagacgaactcatcctccatttcctgcatggacttgccggcggaggcgatctggcggttggacgtcatcttctcggccaccatgaggcccttgtagctccgtatctccgcccatttctccttctcaagcctttccatctcctccttccgtttcttctctttcagctgcatcttcctctcggccttttctgctgcatttgatgcctctttctcggctttcaagtctggcgcccggcgttctacccgggttttattcagcctgttgatgatctcgttgacacgcttctcgactataagcacatgtaccttgaatggagtgagccttgacgagctgcgcacagtcctccaggagggcctcgctgatggtgtgtatcgtctcgcctttctttagcctcaggtagacgtgtgccgaggataccttgtccacat

SEQ ID NO: 126064 - DNA, 467 bp, Zea mays
  unsure (1)..(467): unsure at all n locations
  Clone ID: MRT4577_4643C.1
aaaaaaagcgggggggggggggggccaccaagaagagggggggaggccgcacggcanggaagaccgccacancgccgagncccggaagccggacgacagcaacggagacgggccggcccccgggcagagacggacactccggcgccgaccncnacaaggaggggggggggaacttctttttttttttccgcangggccaggngaaaggagagggggggggcggcagcacccgccccccacacnaganaacnncagcaanccagaagccagacggagcgagcgcaagccacgcagggcacgaggnaggcaaaggaagcacgcgcggcacgggcaggggnccggacccagccgccgcgagcggcccggacccggcgggggggagcgcggcgcgcggccaccgaacgcaccggaaacgaccggcgaaaccggcagacgacgacgccgagaagggcacgaagaagggcagg

SEQ ID NO: 126065 - DNA, 674 bp, Zea mays
  Clone ID: MRT4577_46440C.1
ccggccgggaactcgtccgtatcaatccatcatcagccgcagtctattgagcgctgcgtgctgacgatcgcaatgaacacaatgttctcttcaatcacgcgcctcgcgcgccccgtcttggccaagtctctggctcaatcgcccaggacattcacaaccctcgtccctctgcgaccttctctaacccccatgaacggcgcaatccgaagaagtgttctcccgtcaagcttcactccctcagtggccgcctcagccgatatcgtgccctcaagcgccatcacagaacaccccgcgttgggcggcatgcaaatccgctgcggaccccgaaacgctatgaacggacacaccagactcgtgcagaagcgcagacatggcttcctcgtccgaaagcgaagcaagacgggcaggaggattctactcaggaggaagatcaagggccgaaggaacattgcccagtaggccacccatgcctactgagacatttaggaggttggatgacacgtcaatgaagtcgcagcggcatatgtacgatacgggaaaggggtagaggacggtggttctgggggatccagatgtctctcagccaccctcgtgtgttacgaaatctgtacaaagactaccaaaaaaaaacaaaagatcttgcacgcaaaaaaaaaaaaaaaaaacccgcggcc

SEQ ID NO: 126066 - DNA, 2369 bp, Zea mays
  unsure (1)..(2369): unsure at all n locations
  Clone ID: MRT4577_46441C.1
gtacctcagctgcttgttattgatttgctcgtgtcagttgggctgacctatttgcgaatataagcagtgtgggagttgtaatttacttactagctatctactgtgtggcaggtacatgtgcttatagtcgagaagcgtgtcaacgagatcatcaacaggctgaataaaacccgggtagaacgccgggcgccagacttgaaaggtgcttaattactaacacacagacacgctgatctgcccatgcaggcttcagttgattaataatctttctcccctcgctcgtgtgcagccgagaaagaggcatcaaatgcagcagaaaaggccgagaggaagatgcagctgaaagagaaggtatactcagttaacattgctgacagcgcggccatgcacatcatgtatggcgtctaacgacggttatcacgctgaatggattggcagaaacggaaggaggagatggaaaggcttgagaaggagaaatgggcggagatacggagctacaagggcctcatggtggccgagaagatgacgtccaaccgccagatcgcctccgccggcaagtccatgcaggaaatggaggatgagttcgtctgaagacgactgtcatcgtcactggagtctgcatctctctctgtgtgtgtgtgtgtgttgcgtgtgtacgtacatatgtccatgctcgcgtgataacgacgagtcgaagcaaccaaaagatctcatggatcgattattcgatccgttcctgatcctccgttgatctgtgctctgtacataacatgtgctcccagcatggacatgtataggtcacgagaagagctagcgcgtatgtatacaagtaactagtgacgagctgttgctcggagggatcgacgcgcgcggcgacagagaatatacacgagtatatacagtagccgccgccggtggagtctctagctggcagccggccggtcggtcggtactctactctagaagctagagagattctgtactactctgcaggctagctagctagctagctagaggtagaagaggccggcccggcccgattgaagaataagatagatctgtcagctgttgagcgacgacggcgatggtgctctacttcaaggcgcgtccggacgccggcgactacaccatctacatgggcgccgccaagaacgagaacgaggagctcatcaaatacggcctccccgaggacgtctggttccatgtggacaaggtatcctcggcacacgtctacctgaggctaaagaaaggcgagacgatacacaccatcagcgaggccctcctggaggactgtgcgcagctcgtcaaggctcactccattcaagggaacaagatgaacaacgtcgaggtgatctacacgccctgggctaatctcaagaagtccccatccatggatgtcggccaggtacatgtgcttatagtcgagaagcgtgtcaacgagatcatcaacaggctgaataaaacccgggtagaacgccgggcgccagacttgaaagccgagaaagaggcatcaaatgcagcagaaaaggccgagaggaagatgcagctgaaagagaagaaacggaaggaggagatggaaaggctggagaaggagaaatgggcggagatacggagctacaagggcctcatggtggccgagaagatgacgtccaaccgccagatcgcctccgccggcaagtccatgcaggaaatggaggatgagttcgtctgaagacgactgtcatcgtcactggagtctacatctctctctctctctctctctctgtctgtgtgtgtgttgtgtgtgtacgtacatatgtccatgctcgcgtgataacgacgagtcgaagcaaccaaaagatctcatggatcgattattcgatccgttcctgatcccaaggtacatgtgcttatagtcaagaagcgtgtcaacgagatcatcaacaggctgaataaaacccgggtagaacgccgggcgccagacttgaaagccgagaaagaggcatcaaatgcagcagaaaaggccgagaggaagatgcagctgaaagagaagaaacggaaggaggagatggaaaggcttgagaaggagaaatgggcggagatacggagctacaagggcctcatggtggccgagaagatgacgtccaaccgccagatcgcctccgccggcaagtccatgcaggaaatggaggatgagttcgtctgaagacgactgtcctcctnactaggagccagcatctctctctgtgtgtgtgtgtgtgttgcgtgtgtacgtacatatgtccatgctcgcgtgataacgacgagtcgaagcaaccaaaagatctcatggatcgattattcgatccgtccctgatcttccaaaaaaaaaaaaaaccccgcccgcgccg

SEQ ID NO: 126067 - DNA, 1610 bp, Zea mays
  Clone ID: MRT4577_46442C.1
cggacgcgtgggcgctgccgcctgccgtagtgctgctcccggccctccctctaattgctcttgccgctttatgtatttgccgcgcgcggcgacagaggatatacacgagtatatacagtagccgccgccggtggagtctctatctggcagccggccggtcggtcggtactctgctctagaagctagagagatactactctgcaggctagctagctagctagttgcaggtagaagagcccggcccggcccgattgaagaataacatagagctgtctgctgctgagcgacgacggcgatggtgctctacttcaaggcgcgtccggacgccggcgactacaccatctacatgggcgccgacaagaacgagaacgaggagctcatcaaatacggcctccccgaggacgtctggttccatgtggacaaggtatcctcggcacacgtctacctgaggctaaagaaaggcgagacgatacacaccatcagcgaggccctcctggaggactgtgcgcagctcgtcaaggctcactccattcaagggaacaagatgaacaacgtcgaggtgatctacacgccctgggctaatctcaagaagtccccatccatggatgtcggccaggttggcttccacaacccgcggatggtacatgtgcttatagtcgagaagcgtgtcaacgagatcatcaacaggctgaataaaacccgggtagaacgccgggcgccagacttgaaagccgagaaagaggcatcaaatgcagcagaaaaggccgagaggaagatgcagctgaaagagaagaaacggaaggaggagatggaaaggctggagaaggagaaatgggcggagatacggagctacaagggcctcatggtggccgagaagatgacgtccaaccgccagatcgcctccgccggcaagtccatgcaggaaatggaggatgagttcgtctgaagacgactgtcatcgtcactggagtctacatctctctctctctctctctctgtctgtgtgtgtgttgtgtgtgtacgtacatatgtccatgctcgcgtgataacgacgagtcgaagcaaccaaaagatctcatggatcgattattcgatccgttcctgatcctccgttgatctgtgctctgtacataacatgtgctcccagcatggacatgtataggtcacgagaagagctagcgcgtatgtatacaagtaactagtgacgagctgttgctcggagggatcaacatatatggagttcatcaagagaataaaaaaaagcgcggtgcaacacgcttgccaccaggagaaccagccatcaaatgcagcagaaaaggccgagaggaagatgcagctgaaagagaagaaacggaaggaggagatggaaaggctggagaaggagaaatgggcggagatacggagctacaagggcctcatggtggccgagaaaatgacgtccaaccgccagatcgcctccgccggcaagtccatgcaggaaatggaggatgagttcgtctgaagacgactgtcatcgtcactggagtctacatctctctctctctgtctgtgtgtgtgttgtgtgtgtacgtacatatgtccatgctcgcgtgataacgacgagtcgaagc

SEQ ID NO: 126068 - DNA, 626 bp, Zea mays
  Clone ID: MRT4577_46443C.1
atcttcctcgcgagctttctctctctctctatctctatggaggacacgcctacaatcggcgctctatcccatgctccaggacttcgcatcttcccttctgcggaaacgagaaccaccaatatttttgtgtgtacagagttcacagcacctttcacttttacatcaccgccaaactactacacttcaagcttgagctctctccgtgtgaagtgaaatgaagactattagtatgaaattgtaacagacaaaccggtgacgcagaaaatatctgagcgctcgacaccatatcacccgatgataaaagatgatggatcattgatatccgatccgtgctattctacaaatgccttgatgaaactgaccagcatgaatgtatctgaacagccttacatggtgtggattcttctcgcattaacatttcaaagtatgatgggctgtccatctccttatgacgatacctatggcatatatcgatatgctgaccctgaatgtgacacaacaaggatgatgctctaggagcatcgactcgtccactacgatgagtaccgcaatgctaaagagctgatgatgactggatcccttactgctcaagacgccgatgaagataactgagctgccaccatctc

SEQ ID NO: 126069 - DNA, 1146 bp, Zea mays
  Clone ID: MRT4577_46444C.1
gcgcccccggccgaggcagctgcaggcagcggcccggccggcggagaagggcggaagggcaaggcgcccaagggcgggcccgagaacggcaagttccggtaccgcggcgtgcggcagcggagctggggcaagtgggtggcggagatccgcgagccgcggaagcgctcccgcaagtggctcggcaccttcgccaccgccgaggacgccgcgcgcgcctacgaccgcgccgcgctcctcctctacggcccccgcgcgcacctcaacctcacctccccaccgccgcctacgctcgccgcgccgcgctcgcacccgcactcctcctccgccacgtcgtctgccccgccagcgctccgcccgctcctgccgcgcccgccactgcaccagctctccagcgacggtgctcctgcaccggatttccactaccacaaccagttccagcgccgtctcttgccgcagccgacacccacactatactacgccaacacggctacggcgtccacagtgaccaccagtgtgccgacacgggtggcggttccgcaggagccggccatcgcgcccgcagtaggctccttgacgtcaccgggggagccgcaggtgggtagaaaggaggaggcgcgcggggaggcagggtgggactacaacggcggcgaggaggaggattatgcggcggcgctgctgtgggacgagccggagcctttcttctggtttgatgtcttcctcaagtgatgaccagcacggcgctgcatgccagcaattcgaatcctgcatggttggtttggagtttcggagtgacggcagctcatgctcctgcatctgcatgcatgtgttgggcagtaagcaagcaagaaaggtagataggcttgctagctagggtttctgactcctttgtactaaattatctttatattttttatcttatccttcttttttccctgagggtgtgattgaggtatagtaatgtgaggtggtattactggtgggaggatttagggttctctgtcttgatttaaagattcaattttgaatcacatcgagtcgatttcttgcatggggatgcaatctatttaactgtggcatgtataaaaattagcgatgcaacaatttttaattctgtgttttcttctatcgaatgttgaactttagtcc

SEQ ID NO: 126070 - DNA, 381 bp, Zea mays
  Clone ID: MRT4577_46445C.1
atcgatctgtgtgtgtgcagttttatttctgggtgctgtgccatctgtacaacaagaagaacgagtgggagaggatgcggctggggaagggggcagccttccgtacaattaaagaggaggaggccattgacatgagcacctatcactcgcagatcacccactcctggatcaagacgcgcacgccggagtcagagatcgtgtacaactacatgtcgttccctgatcccgcgatgattgtgcccaagaaggagcgggttgacgatagcagcagacccaggaccagcgacctgtgcgaggatcttaactactaccacatctaaggcatgtacagcgtgctcaacatgctgtccccgcgcggcgaggactagtactcctcggtct

SEQ ID NO: 126071 - DNA, 231 bp, Zea mays
  Clone ID: MRT4577_46446C.1
atcacacacaaacagccactccttacctcccccgtcctacgggtcatgttctgctgctgcccatgtggaccccactcgacctcgactacataggcctctcgccggcggaggatggcggccttgcccacgacgacctgaatgggacccagcttcgacttggtctgccggggttcggttcgccggaccgtcgtgtttgtggcttgcaccgcaaccaccctggacctgctcccg

SEQ ID NO: 126072 - DNA, 303 bp, Zea mays
  Clone ID: MRT4577_46447C.1
gacaaacgcaacgtgatcagcgtcacacccttccgtacgatacacagactgaagtgctcaactgacgcaggtcgcctcgcagtggcaactgccgatcgatgcaacacataatcagcgcctgcagtctgcctcagacacagcgggccgccgcgctcctgccactgaggcgatcgctcaggcgccttccagtctcagcatgtgcgccgccgccgctgcgattggtactcaggaggagatgctaagaagaggataagcatcagcaataggccgatgagggaagcagccctgacaatcaggagcagg

SEQ ID NO: 126073 - DNA, 391 bp, Zea mays
  unsure (1)..(391): unsure at all n locations
  Clone ID: MRT4577_46448C.1
cggaattncccgggctcgatcccacagcagtccgcattcttcccggagtctttagtatttttagacagtatatctatatagatagaccttagagccgagtagcagagagcagggccaggccgatataatagaagtatgcagctaccttacagagaaagagctcaaagagaatagtagtatattaagtaagcaagccccttcctagggtagcaatattattcattcattttagtagccaactagggagactagacaagatatctcattttcccaggatagtaaatcagattagtctatatataaataaaaaataaataaaaaaaataaaaataaaataaaaaaaataaaaataaaataaaaaaaataaaaaataaaaaataaataatgggct

SEQ ID NO: 126074 - DNA, 528 bp, Zea mays
  unsure (1)..(528): unsure at all n locations
  Clone ID: MRT4577_46449C.1
caatataggaacaatactttcatcttaagatttcaatcgggcattcaggtaatcggtcacactggacactgggacccatggtgatgcctgacacattattactcagtgatcgacgtttaatgacttaactagctagctagccagcggctatactacagaacatagttcattcattgggggacaccggcggcagcagcgtttgggcatggagtccggtgctgcaagccgcacatcgtcgacagatgctgcgctatctgcgccgccaacaggcccataacctggcccctttgcagatgctgctgcaggatggactggaggaccaagccaaagatcgcctggtaccggtgctgcggctccacctgcctgagctgctggcaacactgctgccgcaacgactggcactgaggcgagcagtagggcgtacccgncgggctgcactgatgcctcataaactcnacgcactggcccaggatcggggggctgccaacgccgaaggtccctgcagctggacggggcttggatgccggt

SEQ ID NO: 126075 - DNA, 788 bp, Zea mays
  Clone ID: MRT4577_4644C.1
ccggccggatcccatctctgatctctccactcaatactcgtagaacagctacctaaagtaagctgggcaccctcgatcaagccatggcaaaacgagctctagctccattcctgctcgtgaccaccctcttggcgtcgctccttgccacgtgccatggcggtggcatcgctgtctactggggccagaacgacggcgaggcgtccctgtccgagacgtgtgcgtcaggaaactacaagttcgtcatcctcgccttcgtctacaagttcggcaagggccagacgccgcagctagaccttgccagccactgcgacccctcatcgggcggctgcacggggttgagcaaggacatacgttcgtgccagaacagcggcatcaaggtcctgctctctatcggcggcggcgacggcagctatggcctgtcgtccgagggggacgcgcgggacgtggccgcgtacctctggaacaattacctcggcggcacgtcgtcgtcgcggcccctcggcgacgccgttcttgatggaattgacttcgacatcgagcttggcggcgccaagtactgggacagactggccagggacctcaagaacaagggcggcaaggcggtgctcctgagcgcggcgccgcagtgtccgttcccggacgagtgggacggcggcgcgatcaacacggggctgttcgactacgtgtgggtgcagttctacaacaaccctccgtgccaggtgaacgccggccgcggcgcgttcatggacgcgtgggaacagtgggagtcggttcccgcggggcagatc

SEQ ID NO: 126076 - DNA, 263 bp, Zea mays
  Clone ID: MRT4577_46450C.1
gtggggggggggggggtttttttttacatccctaaaacaaagtgaaaagggaattgggagctttttaacaaaaagggtcatgattaattacaaaaaggtggaggggattggtctccattgtaacacagtctttattccccttataatatttaaagggccaaattaaatcgccaagaaataatatttcgaacaatttgatcataaccttctaaaaagcagcatatataatattaacctggcctggactttttcaaacagataac

SEQ ID NO: 126077 - DNA, 434 bp, Zea mays
  unsure (1)..(434): unsure at all n locations
  Clone ID: MRT4577_46451C.1
tttgggctgatttatgtgttgaaccgaagtatcgagggctctccataagcacnacgaatttaccccgcgccttccccgtaatcatgaacacgggtctcgtgacttccgtaacggactcggcgcgatacgactcgacgaccttcccccttaacccctcacccaggaaatagcgaccattatagtctacatccctcgcgatccgtagggacggacgggattaaatcacctcacccttatagtccgcgtcattagcaatcctcgcacttccaacgtagtaaattatactagaagaggtgaagtcgatgccacgtctcgtggcggcctcgacgtattctccactttaactggaccgggaggccccgcggttcgtagagtatccctatagaggaatagcgatttaataaaagtcctctggttccgggatacgggatgcg

SEQ ID NO: 126078 - DNA, 146 bp, Zea mays
  Clone ID: MRT4577_46452C.1
cgacccacacgtcagcccacgcgtcagccaactcattatcctacattttctgggtataatttctgtatcatgactgatcggttcatggtgtcaatgccatttgttctggatacactcagtggatgcttaaagctggttcatttgtt

SEQ ID NO: 126079 - DNA, 374 bp, Zea mays
  Clone ID: MRT4577_46453C.1
gcgactcactgaactatgtatcattacacttcacgtgattaccgccatggtttatagcagcaccaccacactcactattaggacaaagatttacaacccgacactaccaaagcttgacatccctgtaacagaaaacatttaaatatcacttgatcttttaccctcccgatcagcatataatacaaccattcataagactacctcttataagattctctaatatgtcaaataatctactactaattgactcatttcacaacttacacgaggtaaaactgctactaaatctctctcgaatgatcttgctactaggactggaccagagcatttttgacatcttaaccgcaccaacgttgtttctacaaacagcctaa

SEQ ID NO: 126080 - DNA, 356 bp, Zea mays
  Clone ID: MRT4577_46454C.1
tctattcgtgcggatagacttcagattgcaacgggggctgttgttttgtaatcgctaaaaggtcttctccatttgacggtgggtatcactgatgtccatgaacaggtatatgaacgtattaaagcaccctaccttactgtgttgtgtgctagcggacctgaacagacatactctgtgctatgacatctacatcttatggggatgcgtgctgcagtggaatttatctcagactgtacaagcttatactgacaatttagtgatccttgatatgtgcacaagttgaaactagagatgtggactgctatagtacaggaatgcatcacatatgacattgcttgtgaactattttaatatgc

SEQ ID NO: 126081 - DNA, 282 bp, Zea mays
  Clone ID: MRT4577_46455C.1
gcctctggactctcacttctacctctgaaaaggatagtatattctgtcagctgagtgtgggcttcccgtagaaatatttgcgaatattttcacggccccacggactcctggggccagactcaccagggtagggtgcctgtgagccaagcctacctaaaccccgggagcagactttaggataccagagacacaaggtcaaagaaaataagggatggggactggaaatttgaatgagtggcagaacgcttgcttgcctagcctgtacaaagccctaaactgtat

SEQ ID NO: 126082 - DNA, 384 bp, Zea mays
  Clone ID: MRT4577_46456C.1
ccagcttacccctcgggattcaaaaaaggctttcaataattcacaaacccatcccatcgatggcaacttttctggagtcaacaaaaccccaatgatcgggccccaattggtacctaaaaaaccggccaaaaataggattctggcggggttagatttaaatggaacagaacaatccgggaatcctacaaatcctaaaaaacggccattgtctttacccaggcgagggaaatgatcttttttaggcagcacggggcccagtacatttaaccataggcgacgggggggtttttcacccacacaggcagagtaatccccggaggccacactaaacacatttttcaagcagcagcgggtttgcccaactcactttccccatgggcaaag

SEQ ID NO: 126083 - DNA, 562 bp, Zea mays
  Clone ID: MRT4577_46457C.1
atgtccagactcctgtgcatttgcctgttattgaactgcagatcctgcctgtccacagctacgtagactacaagcaactgcagctggcttgactgctctgccgaatgacatcaaaagatcgggggcctaggtaagtgagttctcggccaaggactacatcgaccatccgccaggcgacgctaatcgaatgggaggagatcaccctgatgctacactgtacgcgcgcgcgtgatcacccgagtgcatggctcgagcatgctcttcctctagatcacctgtcgcccacatctgacggccaacgactgccaaacgtacccgtcagcaacaacaaccccacctacagctgggaggggcacacctcctcctaattcgttgaggattcattcacatgatgtgcatccgctgctaatgcaccggcgggatctatcgcgataacttctactcgcgagacaggaactgcagactgctcctgaacagaagagaggtgcctcagcagctactggtgctacatactcgttgaacggctgggttgcatctgagctgagagagctcatgcagtact

SEQ ID NO: 126084 - DNA, 200 bp, Zea mays
  Clone ID: MRT4577_46458C.1
cccaccccccaactaccctcagtatctcagctcctcccccgacccgacaacccatatgaacttccccacgaaccacctccaccacatccgctacatctcctccaactacatctccacctatatcatcacgaacgccatcacgccactcgtcttctgccatcctggctcctcctacaacatcaaactctgcaccatcaacc

SEQ ID NO: 126085 - DNA, 505 bp, Zea mays
  unsure (1)..(505): unsure at all n locations
  Clone ID: MRT4577_46459C.1
ccgcgggcgtcgaggggcgaaacgcacccgcgtagctcaaactattccgaatacctttacgtagtaccatggccaaacgacctttcccaagttgaatcgtcctaacccccccaaagttccgggcttacatggcacacgaggtgaacccccaccccggacgcgccaagttttgaccacaccgccctctaatcctcggtcctggcaaaggagngataacgatagacataaagagcggtntgctgagctgtaggcttagggcagccatagcctactacgtcctagccctacgactcgtacgacctccgcttgttcctatgtccatttttactccacaacacgggagacgtacattaacgatattactgaaagaacctatgtatctaacggtactaagtagtaggcggtctaaaagaacgtcgtacatctccgtagtatccttgctacactagggttctaccgtaagtttataaaagttccctaaaccctatcttaactcaccaccaac

SEQ ID NO: 126086 - DNA, 202 bp, Zea mays
  unsure (1)..(202): unsure at all n locations
  Clone ID: MRT4577_4645C.1
angttcctttttccaaccaccaaacaggcgcgggaagctttatattttagtggggcatttttacaaaaaaaaggagagagaaatacaatccaagatgacctttttgtagccacacaaacgccaacggtgcgagcttttcaggcagcgacgagcccattccgcacgtcacccgcataatgcacgccatgaacccgccactgag

SEQ ID NO: 126087 - DNA, 220 bp, Zea mays
  unsure (1)..(220): unsure at all n locations
  Clone ID: MRT4577_46460C.1
aaaaaactgagatttcctactggctggaagtttgtctatttagcaaaataattagtaataagtgttgactaggtctaaagaatgaacacattgtagacagttgccacagtagtgtctaataaattgatcataaaagcagctatccttatggggnngaatcctagcttctttttatgggttattggggtacctaataaaggataatttatatcttattacg

SEQ ID NO: 126088 - DNA, 676 bp, Zea mays
  Clone ID: MRT4577_46461C.1
ccctccctcgagttttttttttttttttttttttttttttttttttttttttttttttttttttttttttaacaacccaaatccctggggaaaaaaaaagtatttgtttcgaacaaacaaactatggcccctttttagctcacccgataataccctgaaaaaataagcccaacaagcccgatcgattttacaggacgagggcccttggaaacaaaactcgtttttatatggcagcattatttttgccatctgccgaccaggatgtaaaaacgggacattaatcatcgattaaaccaagctccaggagtttttttccacacagctaacaggaagttccgttgaacagccccagatgcgaaacgggaaaataatccttgcgacatgttctttgggttaaaggccacattttggcccccaaaaaacaaatccttttcccggccccagggtttccagggggggcttccctcccattcctttttctccggggggtttggcttttttttctccttttaactctcccggggcttcggcacaagggacactgatcgttgggaggggttgtttttatctacaattgaagcatccgggtttttgcttttcacgtgggcgccttttgaaattgcctttgtcttattggaggcttttaaatagctttggggggctttttgggccctat

SEQ ID NO: 126089 - DNA, 596 bp, Zea mays
  Clone ID: MRT4577_46462C.1
cttttcttttttttttttttttttttttttttttttttttttttttttttttttttttttttttttttttttggacttcaaaactcaataaaacgctaaagcaacccctgacttgtttttaaaatccagggaataatcccagcccacacggacttaatgccaactaggggaaacacaaagcaagggggaactaattcgaaccctccccccctactaatataaaaaaagaagggggggaacgggaaatcagttccaatattagcccggcacagttttagtttcgacaggttaaagcatttaaaacaaggggctcaaacaatatgccctttcccaaaattattggccgtaaccagcctaacttttgggggtttttttgccctaataaacaccatcctccgggggggaaaaggtccaaagggtcaagttgcccctaaggagctgcatgatcaaagggctttttttgtatgacccctccccaagggggtttaactgggaaatagtttcataaaacccctgttttgcaaggttgaagctttgctggggagttcaaaatctcataataaaacactggagaagttaaaagcaagcccaaccct

SEQ ID NO: 126090 - DNA, 271 bp, Zea mays
  Clone ID: MRT4577_46463C.1
ctgagctgcagtggcaattagaccagaagatccccgctcctgtctctaaagaggggaaagggcaaggatggtggaggctttctgtgctacctggaagctggccaacagtcagaactttgatgagtacatgaaggctctaggcgtgggctttcccactaggcaggtgggaattgtgaccaaaccaacggtaattatcagtcaagaaggagacaaagtggtcatcaggactctcagcacattcaagaacacggagattagtttccagctgggg

SEQ ID NO: 126091 - DNA, 530 bp, Zea mays
  Clone ID: MRT4577_46464C.1
gcacacgcacgcgtgcgtagagctcgtgataccgctaggacgcggctcgccctttttttttttttttttcttggtttaacgtgctgttttttttcaccaacactcaggagaaactaattcgtgctctctggctcggtttcctatcgatataaaccagagtgtacttttctgcggggaaacaaacctttattggacacgtaactagagaacgaatcaatttttttatgacaataaggataccggtgactttgaaacacgatgaacaaagccacattatggttgggcagacttcgtcaggcttgaacagccttacccgacctgaaaccatgctagctctccacagccgacgtgtccaccgcggtgccttgcttacagccccctaacttgttcaaggtaacggggccgggggcacaacccggcctattaaaggcaggagcgcatcgccggagaagggtcgagccggtcggtttcgccgtgaggcggaccgggcggcccggcccaggtccactacgagcttttaactgcaacac

SEQ ID NO: 126092 - DNA, 390 bp, Zea mays
  Clone ID: MRT4577_46465C.1
ttctcctctcggcctctcctcctctcctcgcatcggcctcccgatccctcacagaccacccgcggcgcgcacacgcccggacctcctaccggccggcaccggttcaaccaacaaaccagcccaggcacctccggccgcgcgtgcgtgtttgacataccatggcgcagcgggatcacaagcaggaggagcccacggagctgcgggcgccggagatcacgctctgcgccaacagctgcggcttccccggcaacccggccacgcagaacctctgccagaactgcttcttggccggaccagcgtccacgtcgccttcttcctcctcctcttctctgccgggcgtgtccgcgccgacccccgtcatcgacaggcctaggccggcgccgttggagg

SEQ ID NO: 126093 - DNA, 133 bp, Zea mays
  Clone ID: MRT4577_46466C.1
ttgttattacccaggtaggcgaacgcataagcggggcatttttttatgcattacacggcctttccgccaaagccttgtaggtgtgaaacaacacactatttggtcaagtatagaaaaaaatgaagcaaaaaca

SEQ ID NO: 126094 - DNA, 453 bp, Zea mays
  Clone ID: MRT4577_46467C.1
aaataaaaccaaaattttttttttacccttcttttttttttgggtcttcccacaattaaaattgggtgtcttttttttgtttttttccttttttaaataaaaaaaattgtttaaagaattttcccaaatttttttaattaattattggggggaattggcagggaaacccccaaaggttttggggcgtaatttggcaattttttccttccccgggggccctttaaaaggggaaatttccacccctttgggggccttttttatggattccaatttgggaccaaattttgggaaaataatggaaaaatttttttcttgggaaaaatttttttccgttaaaatttccacaaaatttacaaccggaaaaattaaggggaaaaccttgggggccttatgggggggcttacctcaatttttttgggtggccttaattcccctttttcaaggggaaaaact

SEQ ID NO: 126095 - DNA, 1099 bp, Zea mays
  Clone ID: MRT4577_46468C.1
ccggccgggccgggtctcagaaataattgcctcccttcattggcctcatctctccctccctccttgacccatctgcgacttcccctgcattaaggatgacctcttctctctaggtcttacaaccctagacgtggaatcaggatcagtgtgcacggggaaccagcaacggcagcacgtacgtggaaccggcaccgacgaattgcacggggcagcagacaatcgtcgcctccttgactccatccgcgaccttcctccatccgtggtgccagcaaactgcacgagaagacctaggtcaggtgtcctttactttctttgatactgctttctttaaccacttattacttgttctatgtttgataataaatttttttcacagaggtgactcggtgctagccacactattacaagatgcctcctagtcgtttgcaggttggaacaaaaacaacagaaggacataaccaagcaggaaacacattacatccatatgaagtgcagcgccttagacaagttatgagaaacaatgcaaggctgcaacaactgggaattcctggtttatgcgacacactgccaaaggcatattcctttcatcacaacaaaaataagccaaattttacaaataatgaagattcagaatctgattataatccttcatcaaatgacactggtgaagaagatttacttgatgatctgaacattgtcatcatcaaggattataatatgaggactacaaacatgtctaatggtgtaatcaagctacgcactaaaagacttcttgcagagaaagaatctattagaattacaaggtcaaaaaaaactgctgcccagcctaatggtactgaagtgtttgacaacaacgatggccatacccaggctacagttcaagctagtgaccctgctctatttgacgagtacacccacatggctaatggaggtcattccattgctcgccctgatgggcacaacctgatgggaaacaaagataatgtaaacatccaagttgatgacaacatgaccagtggaggtgaagctagcatcgagcctagtgtacatgtacaactaggtgaaaatgatcgatgggaaaggggagttaatatgggac

SEQ ID NO: 126096 - DNA, 402 bp, Zea mays
  unsure (1)..(402): unsure at all n locations
  Clone ID: MRT4577_46469C.1
gggaaaccggggccgaccaacgcgtccgaaaaaaaaaaaaaataaaataaaaatttaattttttaaaacaaaaaaaaaaaaaaacgccagcgttaaaattaaaaaaaaagacgggccaaaaacaccncccaatttaaagaaacccaacctaccaaccccagccacccaacaaaaataccttttttaaagccaaaccaaaattcactgccctgccctaaaaacaccaactacttacctggaaaacccctgcccatccccacttaaattgcctggcaacacatccccctttcccccgctgacaaaaactctaacaggccaaacccgatccccctcccaaaaaaacccccaacctaaatgccaaacggccccccccctgaaacacccacaaaaccccgcccattg

SEQ ID NO: 126097 - DNA, 317 bp, Zea mays
  Clone ID: MRT4577_4646C.1
cccacgcgtccgcccacgcgtccggtcgtgcggccacatggcgaccccgcccaccgagacaccgccgatcacgcccagcaagaagcaggacgacaagccgaagccggggccggatgccgccaccgcggcgaactaggcgtcgttgtggtcgcgcaagagcttcaggcagcgcgctgcccgcgctttccgccgcaacatgtcgggcgtccgcgtcaggacggtcacggacctcgcccaggaacgggactcagtgcgcgccgtcagcaacaaggtctccgatgaagccgagggcgctaccgcggtgccgcctgcaggtg

SEQ ID NO: 126098 - DNA, 411 bp, Zea mays
  Clone ID: MRT4577_46470C.1
aaaaaaaaaagggcggttgcttcacaagggttggaacaaaaaaaaagggggaaaaaaaaaggggggtacaaaaaatcggggggtgcaacgggggttgtaaaaaacataaacagggtgtcaaaaacaaaaaaaacccttgaaaaatttgggaaggggaaaaaaagaaaaatttgttcacccccatggagaggcccaatttaaaaaaccccggggccgaaaagatccaaaatttggggaaaaaaaatgggttttgttttggaaaacccgaaaaacccggtttttttgacccggttgggggccccccaaaaacaaagagcctttggggcttttggaattccaacttaaaaaacgggggggggggggatcccccccaaccaaaaaggggggacctttttggggggaggcctgttt

SEQ ID NO: 126099 - DNA, 439 bp, Zea mays
  Clone ID: MRT4577_46471C.1
acatgagctatatttactccacagcgcaatttaacccgatcgacaccatgagggcagcagggggtagccctacatcttctggctcttgccgtgagcgccaccttcacacctacaacacaggcgctgatgatgccacacacctcactcgcttcatgtaccgtcatcacagcatctgtcacatcaggtacaccagtgaccttcgagcatctaccagcgcaagcctatatgctacaacaagcacacctggcaagcgtggtacatgtgccaacttcgcatcatcatcagccatcctcgtgacatttaactattcaaacgatcgggacgcagcatcatcaacaattcctaccatgactgagccaactagccattgcgaaccctggcgactacttgcgacaccagttgcttgcatcaaacccactcgctgtggcaaacgtagttg

SEQ ID NO: 126100 - DNA, 287 bp, Zea mays
  unsure (1)..(287): unsure at all n locations
  Clone ID: MRT4577_46472C.1
cccgggtcgaccacgctttttgccgcccttttttttttttttgggggggggggnggggnnngaanagtgntgcccgtgcgtgggcgggggnacagaatgtgnggccgggtctggggttctgcgagccacggggccgcgctccgcccaaccagaaagcgcgggacccactggcctcacttttccccaacacaggaaccgggggggggggcacccttctcctccncctgctgnccctggtnggcccggggggcgccgacctgggggagcgggccgggggccgttcctcc

SEQ ID NO: 126101 - DNA, 1192 bp, Zea mays
  unsure (1)..(1192): unsure at all n locations
  Clone ID: MRT4577_46473C.1
cctcgaggcctggccgggctctgagaaaaccaacaaaaaccctcgctcgcctcacttgttcgctcacctcggtgcggcgcgtcgttcggacacggagatacagcggcgattccgacgatggagtacgtgaaccccctcaccggcttccgcgtcgacggccgccgccccaacgagatgcggcaactcaagggcgaggtcggcgtcgttgcgcgcgcagacgggtcggcgctgttcgagatgggcaacaccagagtcatcgccgccgtctacggcccgcgagaggttcagagcaaaggtcagcaagtaaacagcaaggaggctttggttcgttgtgagtacaggatggcagagtttagtacaggagatcggaggagaaaaccgaagggtgacaggcgatcaacagaaatttctcttgttattcgacagacaatggaggcaagcatattaacacatttaatgccacactcacagattgatatatatgtccaagttcttcaagctgatggtggaacaaggtcagcttgcataaatgctgcaacactagctcttgcagatgctggtattccaatgcgagacattgccacatcatgtagtgctggttatctgtgttctactcctttgctcgatctgaattacctcgaagacagtgctgggggttccgatgtcactgttggcattcttgcaaagatggacaaagtgactttgcttcagatggatgcaaaattaccaattgatacatttgaaaatgtaatgggacttgcaatagaagggtgcaaagcaattgcaacttatatccgagaggtgctattggagaatacaaagaagcttgagtgtcagcgtggttaaccttaggagtgcaggcaggttgatgacctgaacctacacagccattaaaaggcttactggttgtggttgtgggtggctggctctggtgcagtgcacaggaacttccaacggagtatgtgcaagtcgtcagaagttgttcaaggcagcttgtcatcatcaccagggatacaagacatgcttcctcagtaaggtgttatcggaatttttcagttcctgtaaactgataaatcgatggtggcactgtactgataatcttccgtatggtgttattggaatttgtgtgacagttccagcggggctcctgcctcctaaatcactccctcccacattgtggggtttttgtnaa

SEQ ID NO: 126102 - DNA, 1305 bp, Zea mays
  Clone ID: MRT4577_46474C.1
cccatgccctcccgcgggtgcaggcctccaggggcacggcgatgggacagcacgactctcttctctgagaaaacccaacaaaaaccctcgctcgcctcacttgttcgctcacctcggtgcggcgcgtcgttcggacacggagatacagcggcgattccggcgatggagtacgtgaaccccctcaccggcttccgcgtcgacggccgccgccccaacgagatgcggcaactcaagggcgaggtcggcgtcgttgcgcgcgcagacgggtcggcgctgttcgagatgggcaacaccagagtcatcgccgccgtctacggcccgcgagaggttcagaacaaaggtcagcaagtaaacagcaaggaggctttggttcgttgtgagtacaggatggcagagtttagtacaggagatcggaggagaaaaccgaagggtgacaggcgatcaacagaaatttctcttgttattcgacagacaatggaggcaagcatattaacacatttaatgccacactcacagattgatatatatgtccaagttcttcaagctgatggtggaacaaggtcagcttgcataaatgctgcaacactagctcttgcagatgctgggattccaatgcgagacattgccacatcatgtagtgctggttatctgtgttctactcctttgctcgatctgaattacctcgaagacagtgctgggggttctgatgtcactgttggcattcttgcaaagatggacaaagtgactttgcttcagatggatgcaaaattaccaattgatacatttgaaaatgtaatgggacttgcaatagaagggtgcaaagcaattgcaacttacatccgagaggtgctattggagaatacaaagaagcttgagtgtcagcgtggttaaccttaggaggcagtgcaggcaggttgatgacctgaacctacccaacaacggacatcacacagcccattaaaaggcttactggttgtggttgtgggtggctggctctagtgcagtgcacaggaacttccaacggagtatgtgcaagtcgtcagaagttgttcaaggcagcttgtttgtcatcatcaccagggatacaagacatgcttcctcagtaaggtgttatcggaatttttcggttcctgtaaactgatataaatcgatggtggaactgtactgataatcttccgtatggtgttattggaatttgtgtgacagttcctgtaaactaatgcagagagagagatccagcggggctcctgcctcctaaatcactccctcccagattgtggggtttttgtagaagcaaaaaaaaaa

SEQ ID NO: 126103 - DNA, 1245 bp, Zea mays
  Clone ID: MRT4577_46475C.1
ctcgaggccggccggggggaaagaagagaacaaaaataaagcaagaggcgagaggagagagcaacgacgccatcggagggaggaaagagaagaagacgatccgctagcgtgtgcgtggcgacgagatgtggcggaggcgagtgggcgccctccttctccgatctccacgaacttcttcctcggcctcctcggcctgccagagccgccgccaccatcttctccccagcgaggaacctcttgctctcaaccgtcttgccaggcttttcacgtcccaggctggaagtgatggtggcgatacccagaagccctttattgcttttgtcttaggtggtcctgggagtggcaaaggaacacagtgcactaagattgcttcggattttggatttgcccatctgagcgctggtgatattctccgacatgaaatagcatctggcagtgagaaaggggagttgatcctagaaatcataaaggaagggaggattgttccgtctgagataactgtggaactcatcagaaaagcgatggaaatgaacaatgctaaaagggttcttattgatggcttcccaaggtgtgaggaaaacagaatcgccttcgaaaggattgttggaacagaaccagacattgtgattttctttgactgtcctgaggatgagatggttaaacgccttctaggccgtaaccaggggagagttgatgataacattgagacaatcaagaagcgtctaaaagtgtttgaaagtttgaacattcctgtcgttgactactactcttcaaggggaaaagttcacaagataaatgccacgggcactgcagatgaaatatttgaagcagtccgtaggctgttttcttccttaaggttatgacgaggctagggtcttccagggaaccttgggatttgtctcttccacgcgcatggattttcggaaaagctactacgcatttcgatcagcatccacggagtttattatgtatggatgtatgtgttccctcagcacattgacatcttgtatatatgcccaaaaatgaatgtgaaccatgtggagtgtttctgaaaaaaaaggagctgaaccctggttggttgttgtagcagagactacatgtgcatctcttgtgtttgacatgcaatgagtgtgagcctagtgtgtgccgtggcgtatcgtgtctggccggtcctgttcgattgcttaagaaaccacgaaaaaagaaagctttacaggcagggcaggtagtagcctgctaattttt

SEQ ID NO: 126104 - DNA, 263 bp, Zea mays
  Clone ID: MRT4577_46476C.1
aaagaggcgatgagcacagcctcttggattgtttacctgaaggggtcatgggaggactagagggatggcgttggcggctcagtcttgggcgccacaaacagctatacttggccaaccttccattggcagcttcgtcacgcattgcgggtggtactcggacctagagagtgtgatcaacggtgctcctatgggtgcttggccactctacgccgagcagaacatgaatgctgcgatgatggagcgccaggttggtgtggcattgc

SEQ ID NO: 126105 - DNA, 476 bp, Zea mays
  Clone ID: MRT4577_46477C.1
cgggggcgggggtgtgaaccggggaaccgggcaccggcaccggcaggcgccccagctatcccgagggggaggcgaacgagagcgggggggagccaggggcaaagcgggggccagggggaaatgggcacccgctcacaaacccaaaaaaaatacgaaaccgaaagcaaaaaaggcaaagccggggaagcaaaaagaaaaagcaaaccaaaaggaagggggccgcggccaccgcccgagaaaaaaaagggaaaccgggggggccagcaaaaaaaaggaaacccccaagggggggggagaggccgtatggggatcgggggccaggggggcttttcccaggaagagggagacgggcaacaggcgattgcccgaaaccgcctggcccagaaaaaggaggaggaagcggcccacgcgggctggccccagaaagcaaaaatccggggggggggagggcaacggcggaaaaaaacaggagccgg

SEQ ID NO: 126106 - DNA, 302 bp, Zea mays
  Clone ID: MRT4577_46478C.1
tggttttacccacgcgtgcggaagtaaggcttctacctcaaggccttgattcttgtttacctggaaaggcccttcgcttgaaagcagctcgcctatctcgcctccaagcccttcttccatggcctcttggactacatcatctctggccctgtggtggccattgtctgggagggcaagagcgtcgtcacaactggccgcaagatcattggcgccaccaacccccttgcttctgagcccggcaccatccgtggcgactttgctgtccacattgtcaggaatgtcattcattgtagtgacaccat

SEQ ID NO: 126107 - DNA, 347 bp, Zea mays
  Clone ID: MRT4577_46479C.1
gggggctggtgtttttttttttttttggccaccaaacccagggaacaagccccttggcccccttttttttatttgggccttggattttttcatcccccaaaccccggaaaagctccaaatcttttaaaaggggcgaccattatttatttcggggccaacaaaatattgggggggggcttttattgaaacctttgcaaccccccctaggggggaaaaccgagggttccggatactttcataaccaaaagggggcggcccttgtttttctcgggcccctccatgggcgggttgacctcccccattttgaagacctcaaccttgggcccgaggcccggcttccccgggaa

SEQ ID NO: 126108 - DNA, 800 bp, Zea mays
  unsure (1)..(800): unsure at all n locations
  Clone ID: MRT4577_4647C.1
tgggtacctcgaggccggccggggaacggtggaagagacgcctcggaatcagaggagcagcgaggaagctgaaggaggggcgaatctaagcccaattgaagcatgagggcgtcgattaatcgtcccccgacgccgagcgcggaggaggatcgggacaagcagccttctctcggagagatcattaacatcaagttggtagagactggggagaaggagaagctaatggagctactccgcgagcgactcgctgagtgcggctggagggatgagatgaaggcactctgcagtaataaacacatgcatccaatgatgctgagcaagtgcttcacattcctaagggcctatgcaaggaagaaaggaagaaataatgtgacagtagatgacctcattcatgttattactccgaaaggaagagcatccgtgcctgattcagtgaaggcagaactcctgcaacgcatccggtccttccttatgtctaccacacttcggtagtcatttgtcgcgacggttggagcctatatgtaccattgtaggatcattgggaagtcgatcttgttggggaccaaaggtgcaggaaagcagtgcgtaggggaatattgtgagcatgaaaagaaacagtgtgatcttcatgacactgtcgacatgttcctcgtcaggcgcaggcggttggcgtaatttcaggtgtaccaatagagttgtaagttgtaacccctgaatactgtattgttanagcaaccttccaccttgtaatgctacattgtactataactgctcagcgctgatgcttanttntccattag

SEQ ID NO: 126109 - DNA, 243 bp, Zea mays
  Clone ID: MRT4577_46480C.1
cgaaaaagatattgttcgatactactcctatggattcttttccgaacgggatgcttggacccatggggctacatacctagattctgggcacggattaacgaatatgggccagagctctataagactctgccatgctatgagatgcttccttacggggtatggcacccccactaccttcgggggcttctactaattcgggacttaattagaaagccgtattttcacccggtcgctcccgggggg

SEQ ID NO: 126110 - DNA, 725 bp, Zea mays
  unsure (1)..(725): unsure at all n locations
  Clone ID: MRT4577_46481C.1
cattgggtacctcgaggccggccgggagggttcgtcaatacagtcgccgccgcgactgctcgcaagcgagctaccgcgcacacatcgctctctcgatctcagactggggaaggtgtagcagctgcaggacacgctcgaagtcttcaaccaatgaaccttccatgatggacacgaacaccgaacgagtcttcacactgctctgccatgcttctattctttaaccttaacgctactaccaatgtcatggaacccacgatgaaatctcgcaggagaacgacatctcgttgaactgactacctcactgtgaacgcgaccaatgacgctatggacctgccgcacaccgcaccacgttactccaaaaaatgtatccacaaggcgcagtggccgatcgactagcagcctcacaaactcgttcatgatgtacgtacgcaacaacggcaagaaggtgcatagatagacacatcatcaagcataccctgtatatcatccacctggtcaccgatgacaaccccatccagtgcaccgacgacgcgatcatcaacatgtggaccccgcgaagatgccaccctgattgcatccactgatgttgccaggatgcatgactgtgatatctcacccctganagagggtgaaccaggccatctacctcctcaccactgttgacagagagagagctttccggtacatcaaaaccattgcctagtggcttgcagatgagctgatca

SEQ ID NO: 126111 - DNA, 635 bp, Zea mays
  Clone ID: MRT4577_46482C.1
gccccttctcgagttttttttttttttttttttttttttttttttttttttttttttttttttttttttttttttttttttttttttttttttttttttgaaacccaacaaattctaaatccaaaaggggaccccccaaggggcaattgtttgcctataaaaaaggggggcaaatttgatcatttttttttatcccaaataattttttatccctaaggcctgaaaaaaaattacccccccaggggatgcctgataacccccccccccttatccaaaaaaaaaccgttgtccctgaaacaccccctggaaaaaaagggcttaaaaacgaaaatttcgtttttttgggccttggtcctaagggcccccaatttgaccccaacgggaaaaaggggggagggtgaccctcccatgattttttaaaaaggcacggggtcctttaccaaggggcccaaaaacaaaaaaaacaacccgttgaaaccctttttgaagggcagggccttccggaaatttttttggagggctttctgcacaccaaatttttggggcgaaataaaaaagtcaagcaagacccgggtggccatgtaaacattttcctgaaacacggaactcctcaaatgcatccttgggggggcccc

SEQ ID NO: 126112 - DNA, 949 bp, Zea mays
  Clone ID: MRT4577_46483C.1
aatccacaagtgaagaagcagtttcaagcggtttggcagggcgcggccggcgggccaaaacgcaaaacacgagcgagcacaaaaaaaaaaatcccaatatccgcaacggcaatgtctccgctgccccgcatcgtgctcctcgccgtcgccgccgccgccgccgcagcggtcacggcgtcagccacgtcgctcagcggcgcggcgaacgacctactccccaagtacggcctcccgaaggggctcatcccggactccgtcgcctcctacagcttcgacgaggccacgggcgccttcgagatccacctcgccggcacctgctacgtccacttcggctcccacctcgtctactacgagaggaccataaccggcaagctctccaagggcgccatctcggacctctccggcgtccaggccaagaaactcttcctctgggtctacgtcacggggatggtcgcgcaccccgaccagggcaccatcgagttccaggccggcttcatctcggagtcgctatcggcctcgatgtttgacgaggtgcccacctgcggttccagcgttggcgcgcagctgcgcggcgcggctggggtgatcggcgagcttgggctgctccccgttgcacaggcctgaacgtgggttggagagtccacatacagtcccagagaaccgcaggaccttaccgtctgctgtcgcgtgtcgcctgagccctagacagccgtggtgtgttctgcttctgcctgtacgtaccagtgtctggttgttgctcccggtgtcaaatggacatggatgatctgtagaaatgtatgtctataatatgctgttactgaacatgcgtaggatgtaggcaaattaggccttcctcagtctcttgtagtcccggactatcgtgtcatcgtgtgtggcaccatgaacttccccacaactagctagagtgcccgccttatggtttctgatg

SEQ ID NO: 126113 - DNA, 575 bp, Zea mays
  Clone ID: MRT4577_46484C.1
gggcctaggtgccttttttttttttttttttattttttttttttttttttttttttttttttttttttttcttttttttttattttttatgtctggaccaacaacccccaccaagccgggccaccacccaacacaaaccccaacaaaaaaaaaagagcaaacaaaaaaaaaaaaacaacaacaaaaaaccaaaacaaaaaaaccacacaaaaaagaagcgaccaaccacacaacaagggcgaaaacccccaaaaaaaaaaataaaccgaaaccaaaaaaccaaggataaataaaaaaaaaccacaacgaaaaaggagccacaaaatcggtgagagaacaaaacaattaaaaatgcacaaagagaaaagaacaattagaaactaaaaagaaaattcgaaggcgggaaaagcaattagaaatcggcatgtcgatacaccaaccaggggccgggcgcgcaaagaatgttgactctagggggggacccccacagcgctcagctgaccgtggtccctcagtcttccccagggcaccttgatcggggcccaaaacaaggggtcggcgggctttagccaaaa

SEQ ID NO: 126114 - DNA, 1016 bp, Zea mays
  Clone ID: MRT4577_46485C.1
gccggcctgtccggggcaaaacacgagcgagcacaaaaaaaaaatcccaatatccgcaacggcaatgtctccgctgccccgcatcgtgctcctcgccgtcgccgccgccgccgccgcagcggtcacggcgtcagccacgtcgctcagcggcgcggcgaacgacctactccccaagtacggcctcccgaaggggctcatcccggactccgtcgcctcctacagcttcgacgaggccacgggcgccttcgagatccacctcgccggcacctgctacgtccacttcggctcccacctcgtctactacgagaggaccataaccggcaagctctccaagggcgccatctcggacctctccggcgtccaggccaagaagctcttcctctgggtctacgtcacggggatggtcgcgcaccccgaccagggcaccatcgagttccaggccggcttcatctcggagtcgctatcggcctcgatgtttgacgaggtgcccacctgcggttccagcgttggcgcgcagctgcgcggcgcggctggggtgatcggcgagcttgggctgctccccgttgcacaggcctgaacgtgggtttgagagtccacatacagtcccagagaaccgcaggaccttaccgtctgctgtcgcgtgagccctagagtgcaggaggcgttcagcccgtggtgtgttctgcttctgcctgtacgtaccagtgtctggttgttgctcccggtgtcaaatggacatggatgatctgtagaaatgtatgtctataatatgctgttactgaacatgcgtaggatgtaggcaaattaagccatcctcagtctcttgtagtcccggactatcgtcgtggtcatcgtgtgtggcaccatgaacttcccaacgactagagtgcccgccttatgctttgtgatgatacaggctatgccgtttttcttcttttctgacactgcaaaaacttcgtcgcatctgaaatggaggacactgcctgactacagtgtagccccctctcttggggctc

SEQ ID NO: 126115 - DNA, 969 bp, Zea mays
  Clone ID: MRT4577_46486C.1
caggccggccgggccggaagtgtacaggcagtttaaagctgactcgcaggggggcttgcgcagcccaaaacgcaaaacacgagcgagcacaaaaaaaaaatcccaatatccgcaacggcaatgtctccgctgccccgcatcgtgctcctcgccgtcgccgccgccgtcgccgcagcggtcacggcgtcagccacgtcgctcagcggcgcggcgaacgacctactccccaagtacggcctcccgaaggggctcatcccggactccgtcgcctcctacagcttcgacgaggccacgggcgccttcgagatccacctcgccggcacctgctacgtctacttcggctcccacctcgtctactacgagaggaccataaccggcaagctctccaagggcgccatctcggacctctccggcgtccaggccaagaagctcttcctctgggtctacgtcacggggatggtcgcgcaccccgaccagggcaccatcgagttccaggccggcttcatctcggagtcgctatcggcctcgatgtttgacgaggtgcccacctgcggttccagcgttggcgcgcagctgcgcggcgcggctggggtgatcggcgagcttgggctgctccccgttgcacaggcctgaacgtgggtttgagagtccacatacagtcccagagaaccgcaggaccttaccgtctgctgtcgcgtgtcgcgtgagcccagagccctagacagccgtggtgtgttctgcacttctgcttctgcctgtacgtaccagtgtctggttgttgctcccggtgtcaaatggatatggatgatctgtagaaatgtatgtctataatatgctgttactgaacatgcgtaggatgtaggcaaattaagccttcctcagtctcttgtagtcccggactatatcgtgtcatcgtgtgtggaaccatgaacttcccaacaactagagtgcccgcctttacgctttctg

SEQ ID NO: 126116 - DNA, 816 bp, Zea mays
  Clone ID: MRT4577_46487C.1
cggacgcgtggggaaaaagacactgcatttagctcttggcagcaacgatttggaggtggtaaagtggaatgacaaactccgcatggcttttgatgaatgcatagtccagctgtcaaagaaggtaggtgatgctggaccagttcttgacatgatgtctgtgatgctagagaacatatcacacactcctcttattgctatagcaactacttctgctgtttatcgcacagctcaaataattgcttcaataccaaatttgtcatataagaacaaggtatttccagaagcactttttcatcaattgctgttagcgatggttcaccctgatcatgaaacacgtgttggtgcacaccgcatattttctgttgtccttgtcccatcttctgtttctccttttcccaatttgaaatccctagatcagtgtagaaagcatgatgtccagaggacactctcgagggttgtatctgtcttctcatcttcagctgctttatttgataagctgagaagggacagaaactcctttagagaatatttacatgaaggaagcatgaacagaattttgcatggtattgatgatgaaattgctacccctaatgacttgccaggctcgcaaagcttgagacaaagcctcagactttcttcagtgtctcacaaacattcttatacttctttagaggaaggtcaaagtcccttgacagagtcaatcaacgaaatggaaacaattgtgttaagactaagcagccagcaggccactcttctgctctcatctatttggcgtcaagcactttctccaaaaaatgctcctcaaaactacgaagc

SEQ ID NO: 126117 - DNA, 231 bp, Zea mays
  Clone ID: MRT4577_46488C.1
cgggggatcagttaattaaaaaaaaaaaaaaaaaaaaaaaaaatatcaggccctaaagctaacagctattgatccctgttaaagagggcgacctgccgcgctccgacgtaatgatggctatagtgggggcctgtgggacactggactccgctaacaataatcacacaacatactgagccaaatgcataaaccgtaacgcctgcacacgcctaacgaacccgctaacatcac

SEQ ID NO: 126118 - DNA, 221 bp, Zea mays
  Clone ID: MRT4577_46489C.1
cccacgcgtccggacgaggcacccttcagctacgggcagaggggtaaccttgacaggaacataggtcgtagggccctcgccgtcgctattttcttctcgtttgtgtcttgctgctctcgtggtgaactcgctactccagtgctctgcaatattaagcagaagctattgtattgtttgggtcgtttgtcagctaaattgaaatgcgatggacatttactagt

SEQ ID NO: 126119 - DNA, 564 bp, Zea mays
  Clone ID: MRT4577_4648C.1
gggggggggggggggtttttttttttttttttttttttttttttttttttttttttttttttttttttttttttttttttttttttttttttccggggggcaagacgggatctttacatttatttcaccccgaaaaaaaaaagggaaatgggggggccggggcaaaggcccattatatggggccatacatgcatacccaaccattaattgaacggggcggggggcaaaagcaaaccacgacgggtttaaaacccttcatccaaagcggaaatggaggggggaaaaaaataggcgtaggcctggtcccccacctgctgggaggagcccccaaagaaaaccttgccgtaaaccaagccaaagaggccccccccaaaaagcgggcccacccaataaacccagtttccggcaaaatcccccccgggaaccggggggccaaaggaacgggcggggtttatggagcccccccttaaaggcccccgggagaggatgttggcccccacaaaaaaacccatggcgatgggccccaaggggcccaacgagcccttcttgggggcgggggggggg

SEQ ID NO: 126120 - DNA, 341 bp, Zea mays
  Clone ID: MRT4577_46490C.1
tgctccagccgccgccattatgaataatatcagaataatcccttctcttcagccccccccccgtcacaaccacaacaacttttcctacctaaacctgattacgaagctgatcttctacgacgacttccattcaaaccactagttgcattctactctgttgcttatacacatcaacctcaactaccatatagccatcatcctcctgcctacccccaagaatttcttccattacacccaactagcagcattgaactatcctgcttatttacagcattaacaactactaccatccaaccatctagctgctgttagccctgctaccttctttacacaaccacatt

SEQ ID NO: 126121 - DNA, 176 bp, Zea mays
  Clone ID: MRT4577_46491C.1
ggccgcttttttttttttttttttaagggcgaacaacgctgcatggcactttattgataaaacgcagcggccggacttggctcggcattccatcaagcagcttgagaacatagaccgtacaagggcgtacaaagcagacgcctgccacacttcggggcccgagcagcccccgaccc

SEQ ID NO: 126122 - DNA, 238 bp, Zea mays
  unsure (1)..(238): unsure at all n locations
  Clone ID: MRT4577_46492C.1
ttnnnttnttntttttgggggatttagaacggagcatatcacattatgtaaaccctaatttaaattccataggcgagtaaaacaatcaacattcttgtctttcaaaaaaatgaagcacttcacacgtcccattaatttcgtgggctaccaagcttctctggaatatattgtttactttaagttcttttaagggggcccaccgtgcaacttgcaaaaaaatttgggttttttgtcacct

SEQ ID NO: 126123 - DNA, 236 bp, Zea mays
  Clone ID: MRT4577_46493C.1
tatccaaaactatgtccacacatgggcgctgtcgtattcttgtaccccctagttctgccacccttttttcacaattttttctatgttcatatcacaaattgacacacgtcctaatatgtgagtgtctcacccccacattaggctacatccctaaggtgacctacacacattagggtaattacataagttctccaggccacacaaggtcacatccatagttcacattcctagttcac

SEQ ID NO: 126124 - DNA, 283 bp, Zea mays
  unsure (1)..(283): unsure at all n locations
  Clone ID: MRT4577_46494C.1
actcactttttatattttcccncccccnaattacnnaccgccgctttttattaaaccacgcccccctataataaataatattaaatcttctcntaatcatccccataactatttcctatataaaataattatcccctcacaatttcatacaacatactacccncaatcataaaatacaaacccctcccttcctaatcacttaactaactcacattaattcccnttccctcacttcccccttttcaaacacaaaacctttccttccaatttcattaatcaatcc

SEQ ID NO: 126125 - DNA, 167 bp, Zea mays
  Clone ID: MRT4577_46495C.1
gcctggcccggtcccttccagggcaactcccagggatgtggtgacatgcagggttcaagtgttcttggttccaggcacctcccggctcacggggagcatgccgaggagaccaggcaggacctcccgaggctgcgccccggccggcccatgcgttttgtgatccaaag

SEQ ID NO: 126126 - DNA, 297 bp, Zea mays
  unsure (1)..(297): unsure at all n locations
  Clone ID: MRT4577_46496C.1
ggccggnacgcccgggncgacccacgcgnccgggcgaactctgctgcgnacctacaagagcgacggcggngacaaaaaccactagcagngcctaacccagngggcactgcctnnctacagcagcaacaattgctaccatacagccagttctctttgatgaaccctgccttgtcgtggcagcaacccatcgttggaggtgccatctttggaggcggatganatgtaatcgataatggtgccctaataccggcatgtgtttcctagaaataatcaatatattgattgacatttatctgg

SEQ ID NO: 126127 - DNA, 350 bp, Zea mays
  Clone ID: MRT4577_46497C.1
gccggccgggccgggcccatctaatacgcccatgcccccagactaccacccgacctaatccaccctcctccgaatccccatagagcacgctgtgtgctctttctcggcgaaggtctcttcgcccattatccagagttcgctactcctggtatacagagacctcctctacctcctgcatgtggacctaacctccttcaatttatgcaaacaagggttaagatcctgttccttgcccttatggacgaaaaaaaagaacacggcacccaggactgttgaagtccaagggtacattctccaaaaagaaggcgggaaggggactctggaaaacctccaaaaccacccctttgcca

SEQ ID NO: 126128 - DNA, 701 bp, Zea mays
  Clone ID: MRT4577_46498C.1
agttcgcaaatgatatcctcggtgaagggaaacgacaagatggcggctggagcatcgatctcgccaccgtccccaacccgccgccggcgacagagcatcgatctcgccgccgtacgcccgaggccgcaacgcctcggtcagcgctgctccctccttctgtttcgtcgagcggtttcgcctccgacgtccgtcgcccgtgccacctcgccgccggcgagcttcccggcgactacagaagagaaccccgccaggtcccatgtctaccgaatgggaaggggtagaagccaagaagcctctcttggtggcccggaacagcagcgtttcttcgatttgggtggtggtcgctagcaccacggtcgccgttgctggatccttcgtgttcggcatctcggtgggctactcttcgccatctcagaagggcatcatgcgggatcttcatctttccttagcagagtattctgtctttggctcgatattaaccataggagcaatgctgggcgctattgtcagcggtaccatagcagatcgagttggccgaagatgtgcaatggcaatatcagatgtgttctgcattcttggatatctccttatagccttttctaagaactctgtgtggcttgaccttgggaggctctcaattgggatgtggaattggccttctttcctatgtggtcccagtatatatatcagagataacaccc

SEQ ID NO: 126129 - DNA, 526 bp, Zea mays
  unsure (1)..(526): unsure at all n locations
  Clone ID: MRT4577_46499C.1
gccagtcgttcggggcctggctgaggcaccgacgggaaggaccaggtgacggaggaggacgtgaacgagggcggcgccatggtgcccgcccgggtgcacaccgtgctcatctacacgaacgacgacaagaccgagaccaacgacgagatcgacgacgacctcatagagcacgtgatcaatcccgagatccttgacaagtaccatcatactagaagaccatcttgcacctgaacttgttcaggcgcttcgccatcggtgagccccaccgtgacgccggcctgaccatcctcaagatcatcatcgacacgtacggccactggggagcccacttctgtggcaacttctccagcaaggaccacaccaaggtggaccacatcggcacctacgtggccaagcaggtcgtcaacagcatcctggccagcggcctcctccggcantggctctagcacatgtgggacgccatccgcgtgcccgagcccctgaacttgttcggcaactcgtacagcaccggcaagatgaccctcaa

SEQ ID NO: 126130 - DNA, 1050 bp, Zea mays
  unsure (1)..(1050): unsure at all n locations
  Clone ID: MRT4577_4649C.1
ccggccggctcggaatcagaggaacccgaacggtggaagagtacgcctcggaatcagaggagcagcgaggaagctgaaggaggggcgaatctaagcccaattgaagcatgagggcgtcgattaatcgtcccccgacgccgagcgcggaggaggatcgggacaagcagccttctctcggagagatcattaacatcaagttggtagagactggggagaaggagaagctaatggagctactccgcgagcgactcgctgagtgcggctggagggatgagatgaaggcactctgcgggtttgacttctctcgcatcaaactcaaatattattcatgctgagtgtattctttcttgctactaacaaattacgtttattgattcatagtaataaacacatgcatccaatgatgctgagcaagtgcttcacattcctaaggttctgatatttgcattagcatatgaattgtttgcacttcttgagaatgcatgatgttttttccccaacttctcagtggtcctctcaatttaaatgcctttgacgattacaactgaatgcatgtgaaaggcacacattaatatgtcacaaccccaaacattgttctatctttctcaaatatgtgcagctaaattctgaagcaaaagtgtgatatcctggcccaaaccttaatagggttgatagaatactcaacaagttgcatcttcttttttgaaagtctatctcgaaagaacctctctttaagagtgcttggcccagagtaatcttgagatgggtgatcgactgagaagttttctctgatgcgcatgaatgaggacaaagtgcacataaaagactcatgttggtctgtgtggatgatctatggtcttagagagctgtcaggagtaagtatcgttggttcgagagtgaacggngcattacaaatggtattagagccgactctcgcggtttcatggtcgtgtggcgctaggggttcggccatatgatgcatggcgcttgtgggcttagaatgggcacatggcatgacatatgatgacactagacatacatacatgacca

SEQ ID NO: 126131 - DNA, 374 bp, Zea mays
  Clone ID: MRT4577_464C.1
gagataaatgtcataaatatcataaatgtacttattatatagtggaagtcttacaaaaataaatgataaaataaaacgaactaaatattattccctagagccacaaagctgactgggagacgccacctagatcaagtcgaaagcctcagtgttaggcggctcctctttgaccacctgttctcctgtaggtagggatggatccggatatttattcggatgtcaattttttggtcttctttcttcaattgtgaacaaataacatatagaatttgctatgaaaatttatattcttgtttttagcattgaagctattaatcttcataaaaaataaacattaaattccgtttatatctttttaaataattgatataaaa

SEQ ID NO: 126132 - DNA, 169 bp, Zea mays
  unsure (1)..(169): unsure at all n locations
  Clone ID: MRT4577_46500C.1
ttttttttttttagatcgggcatctacataagaacgtcaaaacagttcgaagacactgttgttttgcccttctgnnagaangagganggaaatacaccnnannnnaacagaaggcaaaacacganggggcagcgaacaggagcggcggggggagggagaggcccgaccg

SEQ ID NO: 126133 - DNA, 149 bp, Zea mays
  Clone ID: MRT4577_46501C.1
ttatcgagctactgtctaatggtcatgtagattgatctaacgtcggatctgtatcatatacgtataggagtcgggaaagacaaagcgaatatatatgtgcacgtgatccgtgacagttatgatgagcgtattcatgtatcgcatgatgc

SEQ ID NO: 126134 - DNA, 447 bp, Zea mays
  Clone ID: MRT4577_46502C.1
cggtctcgtgggcgcgcgccgccatgctgctccgccgccttctgcactcgacccgccacttccggcacggcctccggaccgtaacttcggccaccaccaccaccacttgctatttctgcacccccattacgtttcgctgcctcccggacctccccctctctcgcgtcctctccccgcggctcctctccacctacggccgcgacgacgaccgcaacaagccgtggagcttcgaggcggactctggcgatccggacccctttgccaatgaggacgccgcggacgatggcgccgccgaggggccgccggtaggacccacgcgcgccgacgacgagccctgagcgactgagttcggcggggaggacggcgagaacgcgacgtgtcgaggggatctacaagaggctgcttacgggaccccgcgcgcggagaggcggctcccggcgaaatgac

SEQ ID NO: 126135 - DNA, 394 bp, Zea mays
  unsure (1)..(394): unsure at all n locations
  Clone ID: MRT4577_46503C.1
aggccggccgggatgggattgatgcctggcctggttgctagctgctattgcccgtgcgtccatgcatgcacgatgatgatgttgtgcatatgttattgaaggttttccgtgtgctggtgttggcctggtgatacggaggaagaaatgccttcaatctactgtacccggccggtacgttcagatgaattgtgatggcctctgccacaaacctatgtgtacgtattgtgtatatgtgcacgacactattttagcctcttttagacttacgagtgttcgttctgcgatccaattatttccttggattcatgcatgctccagtaattaaccttttannaaaaaaaaaaaaaaaaaaaaaaaaaaaaaaaaaaagaaaaaaaaaaaaaaaaaggcggcc

SEQ ID NO: 126136 - DNA, 558 bp, Zea mays
  Clone ID: MRT4577_46504C.1
tggtccctcgcagaagcttgattttgagcttgagatggttagcttcttactaaccctagaccccatgtacttactctcttttgtggttgtaattggcctacctacctaattaagctgtcgagtcactttcagtaattgtttttttctcattaagcggtaaggtcactttcagctattattattttccccacacactttcagttatcattggtatatgattatcaattatgggactagtataggtaactgtggtttatttcagtgacaattttctttattcactgtattatatcataataattgctggcttgttgctttcaggctgccattgttggtccagggaatgaattaggcaaacctattgatattaatgacgccgaagaacatatttttggcctaactttgatgaatgattggagtgccagagatatccaggcttgggagactatacctcttggacctttccttgggaaaagcttcagtaccacggtatcaccatggattgttaccctagatgctttgaagcctttcatgtgtgatgctcctaagcaggaaccc

SEQ ID NO: 126137 - DNA, 781 bp, Zea mays
  Clone ID: MRT4577_46505C.1
agaggtccacagtccgatcctcatcccacttgggtgcgctgtccccgcgcacacacacatggagggatatgaagggataggaggcagaggcggcgattgcgaagatggtcgagagcatgcaggcggcggacccagcgggtcggataagcgcactgctcgcgctgcgccaactcctcgccatgctccagtcgctggccctgctcctacccgtccagtggcacgcgtagcgggggcgttcgatgccgcggcctccgtgctgggactagcgggaaaaggggaaggcaacggcgtcagtggttctacgggtgctggccgggtcgctcatggtcgccgcgcgaagggagatagccacacgccgggcgcaggaggctgggcgggagtacgagctgatccccaggacatgtgccacaatgtggtttaaatgaatggtgagatgaaggaatgctatccttcaaggtccagttcgtgcatatactgtcctgttggcttaatgcagctatgagtattccaccaacgccactaccaagctgcagttgtcgctgcacagcggccccagccgaggtcgcctctgcacccacgaaagatgtttaacacctctgcaactactagaagctattgcggttctgcggcctgactcgacaccatgtggtttacttttctatgttgttgctgatttctccccttgtatgatggtgtgatttatatgcctaggaaacccttccatataatgcatatagcctatctaatatgttgttgtgtaatataaatttcctgtatggct

SEQ ID NO: 126138 - DNA, 398 bp, Zea mays
  Clone ID: MRT4577_46506C.1
aaaaaaaataaaaaaaaaaaaaaaaaaaaaataaaaaaaaaataaaaaaaaaggaagaagctgttaaaaattacatgcttacgttaacttgcttgcaattatttatattgttttattatcttcgcctaaagatatatattttttcattggttttacacattgtaagctagtgggatatccttgtcttaataaactttatttgactttgactatgtaccgttttcttaagtttggatattatagatttggcacgtactgatcttacattagaccaattatctggtcttacatgctaatgggacccgccattgtactgctctttaatcgcgatgggtctgaatgttacgcgcaacgtgatctcaacacttattagttgccatctgcctgctatatatggt

SEQ ID NO: 126139 - DNA, 878 bp, Zea mays
  unsure (1)..(878): unsure at all n locations
  Clone ID: MRT4577_46507C.1
ccggccgggtcaggatgtaagaaacaataaacctccctcctgctgtcctgcaccccagccggtcgccgagcccgatcgagttcccgtctaagccgcgtcgcggtggggtgcgacgacggcaccgtgggccttctcgaccgcgggttccgcctctcctatggcttccaggcctacgcctcctcggtcctcttcctccagcagctcaagcaaagaaatgttcttgtcacggttggagacgatgaccagtcatcttctcaggcatcagcaatctgtctaaaggtttttgacctcgataaagtacaagaagaaggatcaagtacaacaactcctttctgtgttcaaattttgcggatcttcactgatcaatttcctcaagcaaagattacatcatttatggttctagaagaagcaccacccatactgttgattgccattggactggacaatggtttcatttattgcatcaaaggtgacattgcacgtgagcgtattacacgtttcaagttgcaagttgagactgcttcagatggcagcactagtttgcctattactggtcttggttttcgagttgaggggcaagcacaccagctcttttctgtaactcctggttctgtaaccttgttcagcttgcatattcaaccaccaaggaggcaaacacttgatcagattggttgtcagaccaatgctgtagcaatgagtgaccgtatggacttaattattggtagacctgaagctgtatatttctacgaagttgatggtagaggcccttgctgggcatttgacggtgagaaaaaggttgtaggttggtttcgagctatttactctgcattattgaagatcagagaacacataaaagccaccttaatgntttatgatct

SEQ ID NO: 126140 - DNA, 379 bp, Zea mays
  Clone ID: MRT4577_46508C.1
gtacaacaccgggcgccaggatcgaccgactgctcggctgggcacatctggaccgtaaaatcacaaatacacaggtcaactgttaccgtctaacacgagaaatgcttcatgcctacgtcactctcactatggcgtacccgatcctaacggaccgggcaaagcctgggcataacgaacacgaccggcggtgaacaaaaacggaatagcgtgcacattcatttagccggagcgtgacggaatacggaggcgataggaagaccaggaacacccccgggaacctttgaaagacgcactgtttctgcttaacgggctaccaaccctggaatcgggtcacccaggggtcacctccaaccaccggataagcaccgcacatacatcg

SEQ ID NO: 126141 - DNA, 488 bp, Zea mays
  Clone ID: MRT4577_46509C.1
attcaattggaacctttctttttaacaaaaaagcaaaaaaaaagatatagaaccacaaaaaaaaaaaaaaaaaaaaaaaacggggaacgaaaaaaaacggggccccagccaaaagcggggggaggtggcgggcaggaacaaaaaaaaaagtaaaaaaaaaaacaaaaaccccggtacttgcccaaccaaaaaccagacaccaccttgaaaaaaaagggacaggggccgagtacaaactaaaatgttactcaacaccaacccaaaaccttaaacaagaggtaaaattcccctgaacactggggtataggccttcagcttcctgaaaaaaatgaaaaacgcagaacgaaaaagggcccctccaccggaaaaaagagaacacacaatcctcgttaacgaaaaaaacaaaacacgcggagaggaaacacgaaaaaaaactgggtcccccactgggcacaaaagaggaaaccgaaaacccctgggcccggggg

SEQ ID NO: 126142 - DNA, 858 bp, Zea mays
  Clone ID: MRT4577_4650C.1
gtcgccctactacgcctcggaatcagaggaacccgaacggtggaagagtacgcctcggaatcagaggagcagcgaggaagctgaaggaggggcgaatctaagcccaattgaagcatgagggcgtcgattaatcgtcccccgacgccgagcgcggaggaggatcgggacaagcagccttctctcggagagatcattaacatcaagttggtagagactggggagaaggagaagctaatggagctactccgcgagcgactcgctgagtgcggctggagggatgagatgaaggcactctgcagggcctatgcaaggaagaaaggaagaaataatgtgacagtagatgacctcattcatgttattactccgaaaggaagagcatccgtgcctgattcagtgaaggcagaactcctgcaacgcatccggtccttccttatgtctaccacacttcggtagtcatttgtcgcgacggttggagcctatatgtaccattgtaggatcattgggaagtcgatcttgttggggaccaaagggtgcaggaaagcagtgcgtaggggaatattgtgagcatgaaaagaaacagtgtgatcttcatgacactgtcgacatgttcctcgtcaggcgcaggcggttggcgtaatttcaggtgtaccaatagagttgtaagttgtaacccctgaatactgtattgttaaagcaaccttccaccttgtaatgctacattgtactataactgctcagcgctgatgcttaatttcacaattagaaaacagaaaaacaatcttgatataaaaaaaaacacgcatgtaaaaaaaaaaaaaaaaactgggtcatcttcaattgtttttttaaaaaaaaaaa

SEQ ID NO: 126143 - DNA, 233 bp, Zea mays
  unsure (1)..(233): unsure at all n locations
  Clone ID: MRT4577_46510C.1
tttccaattcactaaatttactaaaaatctaactcanctttttacacgacttaaatagaagagttttttccctataaatcctaaccaaaaaatattataatgctttcgtattcctccatcatctcactgatcctattacgcataaacaacgctatctttataaatcacactccacaaaataagtacttttctattacaacattcattccatcactttatcataaaaatcctaa

SEQ ID NO: 126144 - DNA, 424 bp, Zea mays
  Clone ID: MRT4577_46511C.1
aaaaaaaaaaaggccgggtttgggtttttttttggataaaaaaatttcatcgggggccggggggggggggggtcccggagaggccatggggtcaaccaacagggggggggacccccctccctccatgggcccaaaggcgggccccaaacatgggggggggggtggcaaacggaaaaactttggttttttttttttaacacacaccaaaaaaaaccttttttggggacccccctcgggcccgcttatttttggtcaaccccccccccaggctaaaaagaaaaaaaacatatccatgggccgcaaacgaagggaccaaaagtgggggggggcgcacttgcaattcccacccaaattgtagccgggggggggctctgcggactcccccgggggctcaaaaaactggggggcgggcttttttttcggg

SEQ ID NO: 126145 - DNA, 600 bp, Zea mays
  unsure (1)..(600): unsure at all n locations
  Clone ID: MRT4577_46512C.1
ctccaataccctagcccgtgctcggccggcgaagggaagcctggtatgccgaaggaacggtgggcggcgcaatggtacccttttacagaggagcctggccaaggggcgcccccgccggcaccccgtgcggccaatccgccacggcaaccttctgcaggtcgcgtgcctccgcccgccgaattcggacggtggcggcggcacggaggaggtcgttgggagtgtggtggaggtgaatctcggcgacggtggcagcggtggctcggaggccgaggagaaaattgacgaggcggagatgcggaggatcgagtacgggtcagtgccggccttcgcgctgctgcagagcaggaagaacaccctcgcagatgttgctactatgtcgcacgtgccctcagtccctgatcatgcagaatggtggcaatatgtgcttgaatacagcaaaaccattggcagtctccttgggaacccagaccctttctggtttcatgattgaagaacccaagacaattcttaaggttagggagaaacccacaagtttaagggctgcttggggagttgctggnagatattctatgttgataaaacgtttgcaagggctggctt

SEQ ID NO: 126146 - DNA, 493 bp, Zea mays
  Clone ID: MRT4577_46513C.1
gggtacccgggcccccccctcgagttttttttttttttttttttttttttttttttttttttagcatgaagtattatttacagttttaacttatgttagctgttttgccaggttttccctactggggtataacattacaaatttgaacagggggagaaggctttcgaatactaaggtagagaggtaacagaactgaatcgcgtgtttgcattttatctttgaacttgcgacattatgctttcaatgacaaagcacatcttggtatcttcttcctctactgcaacatgtttgtcagcccggcagcgtcccccagaccaggggcagaaaatcgacgggcgtgggttgctgtcgtggtcaggcagcactgccttgaccagacagccaaacaaggcagtctttgggatctctccctgaagctctgcaataggtacagagttccaagtaactgccagcaaagcaagagccattcaattacttgccaatacgagggggt

SEQ ID NO: 126147 - DNA, 2573 bp, Zea mays
  Clone ID: MRT4577_46514C.1
ggccgggagagacgccagacgcgcattgcttacacaaaattcccgctcactgtcttacgcctccaaaaccctagcccgtgctcggccggcgacgaggatgcctggtatgccgacggacggtggcggcgcaatggtaccttttacaggggagcctggccaaggggcgcccccgccggcacccgtgcggccaatccgccacggcgtggcgccgcccatcttccgcatctacgtctcctggtccagcggcaaccttctgcaggtcgcgtgcctccgcccgccgaattcggacggtggcggcggcacggaggaggtcgttgggagtgtggtggaggtgaatctcggcgacggtggcagcggtggctcggaggccgaggagaaaattgacgaggcggagatgcggaggatcgagtacgggtcagtgccggccttcgcgctgctgcagagcaggaagaacaccctcgcagatgttgctactatgtcgcacgtgccctcagtccctgatcatgcagaatggtggcaatatgtgcttgaatacagcaaaaccattggcagtctccttgggaacccagacccttctggtttcatgattgaagaacccaagacaattcttaaggttagggagaaacccacaagtttaagggctgcttgggagttgctggagatattctatgttgataaacgtttgcaaggctggcttcctgagcgtcttgttgattggttagccgattttgacagcctgctgtcaacgatggcgagcacggtgtactctaagctcagcaatttccagaaaaaactcgttaacttacagattgttgaagacgatcctgattactggaatggtttgtcagcagcactttcggttggatggcttgatattgtggtgaatatgctacggtttcatggatcgtaccaattagatcagatggatagccgtgagacagaaaatggattggtcgaggctgttgctgttcttgtatcaatgatgccccgcatgagaccgaatttgccaactggtaaattaggccagtgctgcaaaacaagacctgattttatcaaggcatgggaaaagtggcgaggtcaagtaactaaactggagtgcagtgcattttggatccagtgcggccaccaaaaaacccgtgatggtttgaagaatttgcttcatattatgatggggaacataaaggaaattactgctgctacttcccattggctggagctgtttgcttctcattttctttacataaaaccatttactgtgggttttgaagggatgcaccatttagcacagaaatgcatacagcttatgccatcctctggcactaatggattaacaggcctcattatcggtgttatgtcagaaaatccagaggttgtcttggcagaatgcacaaaaaattttggcccttggctggtcacacatgctatggaacttctgacagctgataatgactatgcggatattatgttgcatgaagagcgacctaacttaggcggtataagcatagaggaacttcaccgattagtctatgctcaagttttatgttgtcatcctttaacttggcagatcgcgccgacttatctgtcctcatgtctaaaccaaggcctaggactcttggagattctacttcttaagcaacccatacaagataattgcctagtactcaagactttggaaatttgccgattgtacgaactggagaatgttagtacaatcatcatgaagattgctggcatttatcgttggaagcatggacgaaaaggaactggtgtatactggttccagcaagctcgtgataaagtttgtcttgatagaattgctcaacagttattcgaacacattgggaagtcagtgacagacgatagttttaagcaatgggaagggctgctcgagctccttggttctgacattggtagtgcaggcggtcttgagttccttcacaggtaccgggatttcaagaggtctctgcaacaagctctagacagaaggtgtggtgaggctgctcgacaaactgtggattttttaatacagcttatgaaaaacccatccacacctcaacgtttctggctaccccttctacatgattcggtggagctacttaatagcaaactcagccctcttatggatgttgctgagacgacattgttgctcaacaagctgcaagagctgtcaatggccaagctgcgccctgatttttccagtaatcacctatcaagccatgcgatgagctctgtgagattggctctggcatcaaatctggcacgtgccgttcttgaagaccgtagtccaagcacactttagcacaggagtatgacgtccagtttgctggtggattgtgaccatgtttgcttggggcctcctgacaattcaaatgatcgggtttgagaaagattgaccatgtaacatacattgtactctgcttgcttgcttagtgcatttgtgtcgcgaatgcatgcatcatgctgagcgctgtggtttgaaggaaagaaataaaggatcgacatgttgcttgaaaaaaaaaaaaaaaaaaaaagaactcgagaaaaggactctcctcgagaaaaaaaaaccacgc

SEQ ID NO: 126148 - DNA, 221 bp, Zea mays
  Clone ID: MRT4577_46515C.1
aagttccggaacgacccgggcgtcccacgcgtcctgcactttttatcagacaaaatgttgataaatattgggaaatcaagagtgaagcgggggcagtgagagtatttgttgatcctaaaaacaagcataagaggattcatctggatatattatatatggatgaaaaacacaatgatgatctagataagctgtacatcaatgatgcttagcacacaaacatt

SEQ ID NO: 126149 - DNA, 1402 bp, Zea mays
  unsure (1)..(1402): unsure at all n locations
  Clone ID: MRT4577_46516C.1
gtcgttttcactctgcgtctccgcatcaaaacccttagctgcctcgcaattcttttttttttttcccgttcaccggagaaagaatggcgctgccgacagctaacccgggcttccgtctcggctgccaggagtctcccgcgatgggattgaggtcggcgccgcggttggcactgcgtcgtcccggcgcggtctccgggcacaggagtaggactggcagagggaagtttccagtggcatccacaagtctagatgactatcttccaatgcgaagcactgaagtgaaaaatcggacattaactggtgatatcacaagcctcagactaatcactgcagtgaaaaccccttatttgccagatggaagattcgatctggaagcatatgattctttgataaacatgcagatagagggtggttctgaaggcgtaatagttggtggaacaacaggagagggtcacctaatgagctgggatgaacacattatgcttattgggcataccgttaactgctttggcactagaattaaagtgataggcaacacaggaagtaattctaccagagaggctgttcacgcaacagagcagggatttgctgttggcatgcatgcagctctccacatcaacccctactatgggaaggtatcaactgaaggattgatctctcattttgaggctgttctgccgatgggtccaaccatcatttacaatgtgccatccaggagtggccaggatattcctcctcaagttatcgagacactctcaggttatccaaacatggcaggagtgaaagaatgtgtcggacatgagagggtcaagtgctacaccgacaaaggtataacagtatggagcggtaatgatgatgagtgccatgattctaggtggaaatatggcgccactggagttatttctgtagcaagcaaccttgttcctggcctcatgcgtagtctcatgtatgaaggggagaatgcgttgctaaatgagaagctgttgcctctgacgaaatggttgttctgtctgccgaatcccatcgcactcaacactgctctggctcagcttggggtggcaaggcctgttttcaggttgccgtatgttcctcttcctcttgagaagaggattgagtttgtccggatagttgaagctattggacggggaaactttgtgggacagcaagaggcacgtgttctcgacgatgatgattttgttttgatcagtaggtattagtaagcgagcttgtttactttggtgaataaaatataatagcatcatgttatgaggatttttcagtcttttgtaaagaaataaaacagctaatcctgatttggcttacagtttcctgtaaaaaaaaaaaaaaaaaaaaaaaaaaaaannaaaaaaaaaaaaaaaaaaaaaaaaaaccctcgaggggg

SEQ ID NO: 126150 - DNA, 258 bp, Zea mays
  unsure (1)..(258): unsure at all n locations
  Clone ID: MRT4577_46517C.1
ggcgtcggcgggccggggccgtatggtggcacgtacgttggtggtgatggccgaggcgtnggngggacatatggtggnacgtacggnggtgatgggngaggnnttgtgtctcagcctggtgttgtttcgccttatgtgtccccggtcccgtccttctctgtcaaccctgtactcggtcactctgttgcgttttttgccggggtcacttttctttgcctttgttccgaactgtttcttttgttgctccacttcaaggcc

SEQ ID NO: 126151 - DNA, 398 bp, Zea mays
  Clone ID: MRT4577_46518C.1
aaaccacaaaaggggtgggccctttttgcttaaccccctttttggggtttaaccgcttgggggacccaattttttaattgcaaaccccccttatgtccttgctgccgcctgggtttttttgggggtttgagggggcccacccccccctttgtgggggggttttggcctctttcaaaatttccccccccctttgagtagcttgttgaaacccccaaaccccccaggggggggggggggccccccccggattatggattgaacccctttttaaaattcttggggaaagtatttgggctcaatttgcccaaaaaataacaacacttttggtgcaaaacccggcaagtactttgttttttcaaacctcattggggaaaaaaggttttcccaaagggggcccc

SEQ ID NO: 126152 - DNA, 1579 bp, Zea mays
  Clone ID: MRT4577_46519C.1
gccctctagaacaaaaagtaattcagggcccaagaagaaggccagacattagttatgcctgatagggcttggcaaatatgctggaagaatgatgtatacttccgaaaaacgacgcggagaaatcttaccaaaaaatttatgattggcaatacatattctgccttgagctttggaccagtgttgtgtgcggatgtagttctgaggaagaattccgacctctagcttatccgttgacacaaataatacatggtgtggcatgcctcgtacctagcgcacgttacttccctgtgcgctttaggtgtgtcagaatgcttaattgtattgccgaagccactggtaccttcattcccgtgtcctccctgctgcttgatatgcttgaaatgaaagaacttagaggacgtccagatggtgttggcaaagccgtgaatttgttcagtgttaaacaggttgacaagaaaacagtaaagacacgtgcctttcaggaagcttgcatttattctgtggtcgatgagctggctaaacatttgacccaatggagctactccattgccttctttgagatgtcctttattccacttgttcggctccgaagtttttgcaaaaccattaaagcggacagatttaggaaagagatgaaggatcttatctatcagatagaggccaatgtcgagttcattaagtcaaaacgagtggggattgcattttcacccaatgacccagctgtagagtcatttctgcagaccgaaaaggaagaacgttgcagccctctctcaaaatttgttgctactttacaccagagagcgcaagacaggatggatgctctggatgagaccagtgtgattgtgggtgccgagtcctcaaccttctcacggaggttatcagaagcgcagaagcaacaggatgagcaggacgatgatgaaggcactatcgctttcagtaagaactggctgtctgaaaataagaaacccaaaaccccaaaggaggataaaaagcgaccccgggaggatgatgatgtcgcgactgaggaggatcgggttgaggatttggtcttgagctcagatgaagaggatggcaacaatgaggaagcagacgatggttttgttccggttgaaggtgatagtgatgaagactttgtagaccctgacagcgaatataagaaacaaaagaaggcgaagctgaagaagaggaacaagcgccagccatttctgcacaaggcgccctcgagaacaaaaagtaattcagggcccaagaagaaggccagacattagttatgcctgatagggcttggcaaatatgctgccgttgtgatgtatgcttctgagttccgaccgataaaaacattgtcccttgagtggaaaaattattatattttttcaagaaaagtttcaagtctttttttgaccccaacaggacaaagatagaattaactcgagactagttctctcctcgtgctcaagggtttacatgattcaaatgtaaagggtttacattgccatggaaaaaattgtacaccaaacatcacaaatatctacctgttcctggtagtgtttatatacgtctagcatgggcgaatgtccct

SEQ ID NO: 126153 - DNA, 360 bp, Zea mays
  Clone ID: MRT4577_4651C.1
gggaatcaaatgaattaatggtttttatgaaataaaaaaaaacatagtgaaggtaggggacaaacacacaaaaacaccgggggcgggcacagccggaacaaccatcaattacacaattggctcaacggaaaaaaaaaaaaccgggtaattaaaaacaaaagacccaagagcagcaagagcggggaggtagctcaggggccccccactcgaaccaggggggggggggggaattatttcacagagaggagccaacgaaaccaccagcggggagggggaagacagggggggcacagaagaagcacgccgaccagggagccaggggccccacctgccaaacagggcgggcgggggctcttaccc

SEQ ID NO: 126154 - DNA, 294 bp, Zea mays
  Clone ID: MRT4577_46520C.1
agcaggcgtcgctgcagtgttcatagcgagtgcagaatgctgaagtgcagggttttgtcgctgctcacaagagctctgcgtacttcagtcgtttccacgtgaatgtcaggatgaatcgcgatggcaagacggattacatggccatgataaggatgattaccctcgactcgtacaagtacaatgcagacatatacagagttgttgttcggtataccgccaaggacatctctgcacaggtcatctctgctagtatagcaggtgatatggttcttgcttctgcttactcgcatgagt

SEQ ID NO: 126155 - DNA, 333 bp, Zea mays
  Clone ID: MRT4577_46521C.1
gagaacccccaaaaggtgccctttaaggactaaggaacgtaaaataagccacaaccaaagaaggaaaaggggaatgcccggatccggcccattaagcaagactgggaaccggttggttttccgaaaaaaggacccaccgccgctgccaagaaagatgagaaggccgtcaacgccgcgcgccgctccggcgccgaaattcagaccatgaagaagttcaacgctggtattaacaaggcggcgtccagcggcacatccctcaacaccaagcgcctcgacgacgacacagagaacctcgcccatgagccagttccaagtgacctgaagaaaaatctc

SEQ ID NO: 126156 - DNA, 412 bp, Zea mays
  Clone ID: MRT4577_46522C.1
ttggacctttaaacggccggccgtggttgttttttttttgtcgctggatcaggagcgattatggcaactatgccgctgctggtgtatcttttgccctgcctcgctgccaaaaaacaaaggggctccgatcttgtgtgtctgtttcacagctctcaaaacttgactgtttggggggtgcgggggggtccatgtatatggcagcagcactgctaaacttgtttctcccgggaacaggggggggcaagcccctgtccagggtcttattccatactcttccatgcgccgaggacggtcggacgcctgcctcacttgcggaggcgtactctcttttatttgccttcggctaaggtgaccaacagtttgctgtgcgtgcgccagcgccgcgtctctctcggtgccgcctcttgttcat

SEQ ID NO: 126157 - DNA, 375 bp, Zea mays
  unsure (1)..(375): unsure at all n locations
  Clone ID: MRT4577_46523C.1
aattaaagcagggaaaggggtgggccctttggattacgggtttacaatcaattacaggggaaaaaaagggggtttgaacccccaaaccgttttacttaaaaaaaccaaaattgttttggtggcaatttcaaaaaaaaaaattggggacttttaattacccgactgggaaaaaaaaaagggcccactggcttaaaaagaaaaaaaaaaaagggttaaaaaaaggggccgaatggagaccaattttttttccgggaaggggcccataattttttttacaggagggatgcgccttttttccttttntcgcattaaaaattagcccaaaaggtaggggacatgacccccccacttttgggaaggggcgggccaattcca

SEQ ID NO: 126158 - DNA, 762 bp, Zea mays
  Clone ID: MRT4577_46524C.1
tatctttgcaagtcgatcccacctttcccagtttcccccttcaccgccggacgatggccgcttctcgccgcctcgcgcggaagctgccgtctctgatctcccggtatgagcgcctcatctccccggagactgacgcgcctgaactcaccgaagcccccaccacctccgcatccatcccgctcgacccctcactccctgtccttccgctcgccgtctcccacctctcgccgcctaacccgctcccggtgctcccctccgctcacgcttcctccctcgcctctctctttcgtctcctccgccgagcccgccaccacccgcgactcgcggcgctcgacctccacatcctgctggccgccgcagacgcgtcctccgctttccgaccagaccacggcgtcacgtccctcgtcgacgcccgcctcgcggcttcccgccgcctcccttcgctccagcgcctcctggaggctcgtcctcacccgcccctgcccctgtgccgacgactccatctttgcatgccccgagctcctccccaccttccgcaaggtcatcgtcgccttcgccgcctccggcgacatcccctccgcatcacatgccctcgcctctctccggcgcgttgctgactccccactacccgccgagttctacaacatcatcctccaagctctctcccgcctccgtcgccacgacgatgccattcgctgctacggcgaaatgacctccgtctacccgttcgctccggatgtcacaccttcacatactcatcag

SEQ ID NO: 126159 - DNA, 295 bp, Zea mays
  Clone ID: MRT4577_46525C.1
ggcgtgacgcccattacaaacttgccctccgacaaaaggcttatggcgcaacttgtgcccaaaaacccgggggggcgcggggttattcaattcccaccaggaaacccaatttgttcctttgacaagccatgcaagggccgagatattcgccgcctcaatccgtgagaccacctttttccaaacccggggacaaaacagccaatggcgggccggaacctgggggcgaaccagctgtatttatagggggccccattaggggggggccaaatcatgggcaaaatgtttttctgaggaa

SEQ ID NO: 126160 - DNA, 367 bp, Zea mays
  Clone ID: MRT4577_46526C.1
attcggctcgaggtattcccggccggttcttctgaagcgcgccctgctgttaggcaaagtgggttcttttcacaacagttgctggtaattcaccccgctgtgagaaagaacgcgagggatcctatttcaccatgcgcacaaacgggcggatgacacacaccaaaagacagtggaacatccagacactgatgaggacacacaatcaccaacgtaagatgagcaggatgatctacctaaaaaccggcagcgacgaaggaaatgagccatacgacggcgacatgttataggccatctttcatcagagcggaaattggaagctgtgcatagatgaatcctagacattgcacgcgggggcagcaagcgtgta

SEQ ID NO: 126161 - DNA, 415 bp, Zea mays
  Clone ID: MRT4577_46527C.1
gtttgtctctgcagtgtgcaagtgtgagtttacgagggacagggtatatagcttcaccatactgattgatccagtcatactggttattttttggtctctagagtaaatagtacaacatatccatggcaccagccaattggaatgaaaattaggttgaaagcgatctccataaagaaattcatggattttttttggatatccctcgaatattcgagccccatcatctttacaaaaatctggttggatgaagtggtttggtcgtccaggtatctactttaccatccttatcatgagcagccaaaggttaggacaaaaaaaacgatagctgttgctgtcactcaatgcttggtatttgacagaagtgctgaataatttgtatgaacccaatgtcacactggaggataagtaaatgaag

SEQ ID NO: 126162 - DNA, 170 bp, Zea mays
  Clone ID: MRT4577_46528C.1
gctctttctccccttcgcccacctcctcgatctccttctccctgattcttgccccccttcgccgtgcccatccatgtgttctgttcgacagggctctccaattcgattaatcggctcttgggctgtcggatcaagtttcgcttgtacagttacgacaaggattacacgga

SEQ ID NO: 126163 - DNA, 213 bp, Zea mays
  unsure (1)..(213): unsure at all n locations
  Clone ID: MRT4577_46529C.1
ccataaaaaaaatctgtgggggccaaataaaaaataaggcggcggcccaaactaacccaaactctattaaacgtttcaaccaccttataaactcatctaacatancattagcaaactcttcacatatatggcaactgttctaaagaacactacctcctacatataaggcaaacaattcaatcccataacttaaatattctctcccctcttttt

SEQ ID NO: 126164 - DNA, 1739 bp, Zea mays
  Clone ID: MRT4577_4652C.1
aggaattcggcacgagccccattccaaacatgaccgttggcctcgagggcggccggggccttcctgagatcgccaaaaccccgacgccgcgctctcccaccttgcgcacgagaatactcgcgctcgcgcactcgacattcctcgccaccgacgccggttcatcctgcgcgcacgcgctctccatctcgcactcccccgggcggaggcgtatgtcctgcgccgaggcgatgccgatcgacttgctccacgctccagctccgtgggaggaggaggtgaaggcggttgaggaggaacaggaggaggtggaggggagtaggatgcggcggaggggccgtggtggtggtcgcggcggacgcggaggcggagggtcacccctacgacttccacgtgtccgggccgcgcaacctgccgccgcccaactggaaggagataatcagatcgagctggaaggatccaaattacaaaaggatggtaatggcctgcttcattcaagcagtctacctgcttgaactggacagacaggacaagaaaggcgaagaggatggccttgctccaaaatggtggagacccttcaagtacacattcacgcagccactggtggatgagagagatggttccatctatggcgccatgctggagtgggatcgttcttctgccttgtctgactttatcctcatgagaccaagcggggcaccgagggctgtgttagctctcagaggaaccctcctgcagaagccaactatgaagagagatctgcaggatgaccttcgcttcttggtatgggagagcctcaaaggttcagtgagatttgttggtgctttagcagcgctaaaatcagaagttgagaagtttggcagcgccaatgtttgtgttgccgggcactccttgggagctggctttgcactccaagtctgcaaggagcttgccaaacatggagtttttgtggagtgtcatcttttcaatccaccttctgtttcactggccatgggtgtaaggaccatgagtgagaaggccagctacctgtggaagaaagtcaaaggaagtctgccattgaaggaagacacaacaccaccacttgagactgctaaggctgatgcaagtgacaagaagagattgcgcgccgagaagaaatgggtgccacatttatatgtcaacaacagtgattacatctgctgccactacaacgctccatcctgctcgtccacaacaacagatggtgcttccaacgaacagcagcaacaacaacgcaaggctagtgaaattgccggtgatgtggtcgcaaagctctttgtgacatcaaaagggccacagaaattccttgaggcgcatgggctacagcagtggtggtcagatggcatggagctgcagctggctctctatgacagcaagctcataaacaggcagctgaaatccatctacgcaacaacaacagaaatgccatctcctgccaagtcctagacacggcttaagccgctgttgcatcggtcattagaaatactctttctaaccagtgtgtgttcctttatcaactgagaatgttttattactccagtgatgccccaaaacagtcaaataatttgaaaaactaagacaacattattttttcaactcaaatgttggttgtaggataggcgcactcactgtcagagttcgctctatctgacctgcactgtcattacaaaagtaatataggggatacatttttccattaatccaaaatattgttttcccagtatctt

SEQ ID NO: 126165 - DNA, 405 bp, Zea mays
  Clone ID: MRT4577_46530C.1
gctactacgccttgaaacgaatcatctacctaatcggaagacacgaaactcacgacgattcctctagggggctcgagccaaccgggagctgcccatcttgagaatcgaccggtctcgcacctccaaatagtactctgcagaggtgttcatagggactgtccggagctcaaatctcattaaagggacgcctgccaaggtgagagcctccaatccctccgctcccagtcgtatcacgaggagtcctcactcgagttaccgtgatcgttaaagcacacaaaattactctgtatactatggcaaatgataaatacactctacagatcaatagtgaacaagttctgttagaaaaagatgaaaaggtccttgaccagagagtcatagagtgcttgccttcaccacaaggaa

SEQ ID NO: 126166 - DNA, 270 bp, Zea mays
  Clone ID: MRT4577_46531C.1
cggacgcgtggaaaaaaaaaaaaaaaaaaaaaaaaaaaaaaaaaaaaaaaaaaaaaaaaaaaaactcaaaaaaaaaaaaaaaaaggggggccgcccttttttatttttttaactttgaaatattttaccgcgaaaaaaatgaaatcccccatttacggacacaaaattgtgtaaataccgaaaaagaaaaaaaatgaacgcccagacccaaaattgaccctgcaaaataaagaagcatacggattttcacttgggagttgtttccgtttc

SEQ ID NO: 126167 - DNA, 356 bp, Zea mays
  unsure (1)..(356): unsure at all n locations
  Clone ID: MRT4577_46532C.1
caaccacanttcattctaatccaatctcttcaaatggaaccttccaagttcccccccgccagtttacatatataccaggaacacttntttttccaataataccattttataactcaactgctgttgatccatacatccaactcatgttggtgatgaatccatttctttctccaatcacctcaaacctctcagcatacacctatcaccttaagtcatacaacttatatccagaacttctacactatctctaaatacacctcatgaattaccaaccacttcaattattcatttacttcaagcttctatcacacatattcccttaccttatgtttttctactacataccaaaatctttt

SEQ ID NO: 126168 - DNA, 1457 bp, Zea mays
  Clone ID: MRT4577_46533C.1
cccacgcgtccgcccacgcgtccgcagttcgggaatcaccactgccggaatattttaactcgaccccgccctacctctcgccgtcgaccacaagtccacaacccacaaaatgcacgggaggacccagggcgccgccgtcggcgacatgacccagcgccttctcctcgccctctcgctcatcgcatcagcgaccgccgtgcccgctgtcatccgcacggtcccggacgaccccaccgcgggctcctctggcgcggcagacgccgcggacgcgctcttctgtgacagctggaggctgtcggtggagacggccaacgcgggcccctggagcgccgtgccctcgcgctgtggggctttcgtgcgggactacatggagggacctcgctacgcgtctgactccgccgtcgccgacgccgacgccctagccttcgcctccgaagccctggccgccgccgagtggggcggctcggcgagcgcgaggcctgcgtgggtgttcgacgtcgacgagacgctgctctctaacgcgccgtactacgcggtcaacggatggggatcacaggaattcaatgagacctcatttgatgaatgggtagatgctgcaaaggcaccaacattaccatcgagcttgaatttgtacaatcaacttcagggacttggtttccatgttatcctattgactggccggagtgaattccaacgtaatgccacagaattgaatcttttgtttgctggctacaactcatgggaaaaactcatactgaggcaaccttatgatattggcaagaacgctgtgcagtacaaatcagagagacgagcagcaatggaagcggaaggtttcaagatacttgggaactcaggggatcagtggagtgatttgataggatcgcccatggcaacgagatccttcaagctaccaaacccaatgtacttcatcagctgattttattgttagagcagtggacgaaggagcaggttttcatagggtgttcatatggtcccggtgtgaaactgcttttgttagacatccctcgggacataaatttagatttttatcttcaagcatgttgaaattcaactgaggcttgggtccgtcgaatctgccctatgatgatctgtaattacacacttcttttcccacactactggaagcatttgtggtaaggcaaattgtgaggtcaaaaaaaaaaaaaaaaaagaataacctctaccagaaattttagagactggaacaatggttccccacgcttcattaactatgttgagtgatctactagggactaaaaagacctgaactgtagttactaaagttttgaatgtgggacctaagcatacccttactgcgattctaaattataggttttaaaggtaactgactgcttttgtttgatacacccgtttttagagcaaactcagatgtgtgttatatgtacgccagacaagaccaacaccttttatgactt

SEQ ID NO: 126169 - DNA, 371 bp, Zea mays
  unsure (1)..(371): unsure at all n locations
  Clone ID: MRT4577_46534C.1
gaattctcattccctcccctgcccctncccgggcccgtgccgccatatttttggtttttcccactcagctgcagcggcagcaggccgccggcaaccacaatcccataaaactaacatcctctgccgggggacctcaaccgtcccccacagaaacaaacaaaacacccttcaaccctgtgcgctccccgttgcgggccgaaagtccccaagggaccaaaaccaggggctccccccatgggagctctgccccggctccacttctgcaggggcccccagaagaaggcggggggctgcaaaatgaaacgcccaacattagggctggcacccccccaaaacgcctggcaaaaaaagggcaaagccctccccatggg

SEQ ID NO: 126170 - DNA, 471 bp, Zea mays
  unsure (1)..(471): unsure at all n locations
  Clone ID: MRT4577_46535C.1
agcgagtcaatccataactagatagccgctaactcttctacctgctgtgctcccatatcacctcatcaatctggtgtgatctgcacaaattctttgctgtcagtcagtcagaatcagaagatgaactagagctgcgtgccgctgcactcctccgatctttaattgcgggcaccagctgctgtcgaggatcacggaacgacgaagaagactgcgacggattcccaggaagtcgcggacaacgacgaacagccgtaggccctcatccttccctgtgctcccatgnngaagtagtctacagtangctcgccaccgagatggtcagcgtatcggcgtccaggattgctgccttccgcacgttctggaggtcgtctcccaggctcgaaacacgcccaggcctagctgcttgtagtgctccgtgtcatcgctgacatcctcgcagcgtcgtcttgccgtcgacccccttcacgtctg

SEQ ID NO: 126171 - DNA, 522 bp, Zea mays
  Clone ID: MRT4577_46536C.1
attataaggtatttgtataaaataatattattcattaagccatgaacgatctttgtatacatatctaggatgtacatttgtataaaataatatttacggaggcgaaagctgagagcctgagatcatgtgcatactaaattaacctaccagggcgtagtgtccctaactctttttcattctgctgtaagcgagtcaatccataactagatagccgctaactcttctacctgctgtgctcccatatcacctcatcaatctggtgtgatctgcacaaattctttgctgtcagtcagtcagaatcagaagatgaactagagctgcgtgccgctgcactcctccgatctttaattgcgggcaccagctgctgtcgaggatcacggaacgacgaagaagactgcgacggttgccttccctttgatcctgatcctgccgctgaaggtttcttgttattagcagcagccttggcagccgcctctttcacctctctgcacaccttgtccaggattcccaggaagtcgcgga

SEQ ID NO: 126172 - DNA, 470 bp, Zea mays
  Clone ID: MRT4577_46537C.1
ggccgcttttttttttttttttttcttttttttattttttgtttgttttatatgacaaatgacaaagggaaacagacaaaaggccctactgcaccgtatccgggctgggctatggccctatccgaactgcgcgtagcgcgccatacaaagggaatcacccttctccatctgcaactagcactgcaacttgcagagcgcctggagcaagaaggattagaaccttgacatgtggaccatgacaccctgcttcatgatgatctcggagatcgctgaccacccctgcgcgcggatgggcattgggccctggaacacggagcgggccctggggcactgggccttgagcgttgaccgctcctccgagacgcaggactcgacgctccggaggcgcatggcgcgcgccgggtgcccgttgaacgtggaggccatccagcccatcttgcctcacggcacgatgtgcaagatcacggagc

SEQ ID NO: 126173 - DNA, 1173 bp, Zea mays
  Clone ID: MRT4577_46538C.1
gcacgaggggactcttagcagcgacgaggagctaagcttcggttatacaccggggagctcactcaactgggtcctgcagagcaattcttgaggaccatcattgacataccttacctctatcagcgcctggatgtgttgcttttcatgtccactttgccgcgcgtccgtgcaaatgcagaacaatcatttaaaaccctggaggtggcctgccatgagcttcggaacagccgtctattcaagaagctgctagaggctgtactcaagactggcaaccggatgaacgatggcacctttcgaggtggggcccaggcgttcaagctggacaccctcctgaagctctcagacgtgaagggggtcgacggcaagacgacgctgcttcactttgttgtccaggagatcattcggtcagagggcgtgcgtgcggttcgggccgccaaagagcagagcaacagcagcatatccagcgtgacttctgacgatctcaccgaggatgtcagcgacgacacggagcactacaagcagctaggcctgggcgtcgtttccagcctgggagacgacctccagaacgtgcggaaggcggcaatcctggacgccgatgcgctgaccatctcggtggcgagcctggggcacaagctggtgaaggcgaacgagttcttgaacacgggcatgaagagcttagacgaggacagtgggttccatcgcaagcttggcgagttcatcgagcagtcccaggtgcgcgtgacccagcttctggaggaggaaaagaagctacgggcgctggtacgcacaactgtagactacttccatgggagcacggggaaagatgagggcctgcggctgttcgtcgttgtccgcgacttcctggggatcctggacaaggtgtgcagagaggtgaaagaggcggctgccaaggctgctgctaataacaagaaaccatctgcggcaggatcagaaaaagagttagggcaaccgtcgcagtcttcttcgtcgttccgtgatcctcggcagcagctggtgcccgcaattaaagatcggaggagtgcagcggcacgcagctctagttcctcttctgattctgactgacagcaaagaatttgtgctggccacacaccagactgatttaatggtggtgggtatgcaggtagaagagcccacgcgtgggcggacgcgtgg

SEQ ID NO: 126174 - DNA, 364 bp, Zea mays
  Clone ID: MRT4577_46539C.1
gacaagaaaaaagagtgatcgtgagctttgcacaaccacgcataatggacattcaactccactctccactccttttgcatgtcttgctaaacacacacacacacacccctacaaggggcacaaaagaaaaagaacaaagcgaccacacattatttcacgcatgcacaaagctttcctttttctctatctctatctatctgtgtgtatctctttatctcctttcaagcaagcatcttcatctttaacctctacatgtctctggtttcaaggtaactgctgctccattgttggcacagacaatgctaggggagaaggtacataatacttaacaccacacccccacacacatgcaaggacgccttgg

SEQ ID NO: 126175 - DNA, 716 bp, Zea mays
  Clone ID: MRT4577_4653C.1
attgggacctcgagccggccgggaacatgaccgttgggccgctgttccgctgtccccttcctgagatcccaaataccccaccgccgcgctccctcacctggcacccgagaatcctcgcgctggcgcactccaaattcctcgcccccacgccggttcgaccgttgccaatctccccgcgcgcacgcgctctccatctcgcgatccccaccccgagccgcgagcactttcccgggcgggggcgtatggcctgcgccgcgacgatgccgatcgacttactccccgctccagccccggcggaggaggaggtgaaggcggttgaggaggacgaggagatggtggtggaggtggagggagaagggtgcggcggaggggccgtggtggtggccgtggcggacgcggaggcggagggtcacccctacgacttccacgtgtccgggccgcgcaacctgccaccgcccaactggaaggacataatcaggtcgagctggaagggtccaaattacaaaaggatggtaatggcctgcttcattcaagcagtctacctgcttgaactggacaggcaggaccagaaaggcgaagaggatggccttgctccaaaatggtggaaacccttcaaatacaaggtcacacagacattggtggatgagagagatggttccatctatggcgccatgctggagtgggatcgctcttctgccttatctgactttatcctc

SEQ ID NO: 126176 - DNA, 505 bp, Zea mays
  Clone ID: MRT4577_46540C.1
ttttgttttatatagtgaggtggacttgatggtgggcagactgggagaaaaagtgttcaaactacctctgtcagattggtgcagatcaggtctgatgcagtgactgtggttttggtttagtgttttccctagattttagagttaatttgtttttttatccaaggggtataagtctatggcctctgtggagatttgtttttggttagttggtgaacaaagttcaccaagattgattccgtgatgttgcttgccactagaagaaatgaaagggtggaaggaggggttctgttaagctgtggtagttcagtgttggtcaaaaggaatctgaaaaagatcaccccctgctgctctcacctatgagcttggatggggataaggttgaaaggtgtcactaaagatctagagaacattcactagtgcaaaatatccaagttggactgcagtgagcagtggggtgtttaattgtttcagttgtcgcttgcagttggggacaaaggggatattt

SEQ ID NO: 126177 - DNA, 433 bp, Zea mays
  Clone ID: MRT4577_46541C.1
ggccggggactctccgaccgccaagacccgtcttccgtgtgacacttgcgtcttcgtctcgcaatccggtgagactgccgactcgctcggtgctctccgctactgcttggagcgtggtgccctgactgttggtattgtcaacactgtcggttcctccatctccctcctcacccactgcggtgtccacatcaacgccggtcccgaaatcggtgttgcctccaccaaggcctacacctcgcagttcgtctgcatggtcatgtttgccctatcgctcagtgaggaccgtgcctcgaagcagaagaggcgggaggagattgtcgagggtcttggcaagatctctgaccagtttcaaggaggtgctcaagctcgaccagcctatcaagaagctctgcgagagggtcagaaacaaaaagctctgctcctgcttcgacgt

SEQ ID NO: 126178 - DNA, 334 bp, Zea mays
  Clone ID: MRT4577_46542C.1
gttctagctaatgttttgtttgtttcatttcatcatctatttttttttttaacaaaagattcatgggttatttcttgtttcatgcaccaaattcccgcgacagcaaagtgggggggaacacatttcacacccaatagcttaagacgcgttctccaaaaaagagagagcccggggccccccacgctggaagcttaaatccgggattccctacatgttccgaacagacggacaaacgatcttactttcgttcagtttggaacaaaaaaaaaaatcgcatatataaaaaaaaggccgtacctaagccaacccgtggacgacctgaacacggcccaaa

SEQ ID NO: 126179 - DNA, 270 bp, Zea mays
  unsure (1)..(270): unsure at all n locations
  Clone ID: MRT4577_46543C.1
gcgaggcaaaancgcaaaacgcgaccacagacagagcgcgcttcaaggcttttttttttgagataacaaggaggagacgaggagatggcggtcacgatcacctgggtgaaggcgaggcagatcttcnacagccgcggcaaccccacgtcgaggtggacgtgggcctcagcgacggcactacgcgaggggggcgtaccagcggggatccacggaatatatgangcttgnacttagggatgnagganctgattattnggcaaggtgtcttaa

SEQ ID NO: 126180 - DNA, 199 bp, Zea mays
  Clone ID: MRT4577_46544C.1
tgttcgggtgacaaaggcaccgaacccgatgtgtctaaaccactgaagaattactaaggaaccttcatatctggaccgtgcccatcatgtattatgtgcaggaacccacgctggacaaattggcacctcattcccattgctcataactcgaacatattggctccaagatacagctccgaccccaagcagaatcgaaggg

SEQ ID NO: 126181 - DNA, 687 bp, Zea mays
  Clone ID: MRT4577_46545C.1
cctgccgcaagggcgacggctgcgagtacgcgcacggcgtcttcgagtgctggctccacccggcgcagtaccggacgcgcctctgcaaggacgaggtgggctgcgcgcgccgcatctgcttcttcgcgcacaagcgcgaggagctccgcgccgtaaacccctccgcggtgtccgtcggcatgcagatgcagcccaccgtgtcgccgccgccgcccagcggcctcggcgacatgctcagcccggcggcctggccctcctccccggcgagcaggctcaacaaggccgcgctcggcggcggccgggacctggacctggaccagtaccagcacatgctgttcgacacggtgtcgtcgccgagggccaactggggctcggccggcgggatcggctcgccgcttccccccgccagggccgtgccggactacgccgacctgctcggctccgtcgacgcggccagcatgttgtcccagctgcacgcgctgtcgctgaagcaggccggcggcgacatgccggcatacggctccatggtggcggacacgcagccgcacatggcgacgacgtcgcccatggtgggcctgggctccagcaccgcgttcgggctcgaccactccatggccaaggccatcctgagctcccgcgcctccgcgttcgccaagcgcagccagagcttcgtcgaccgcggcggcc

SEQ ID NO: 126182 - DNA, 413 bp, Zea mays
  Clone ID: MRT4577_46546C.1
ctcgaggccggccgggccactctcgcgccggtcctccaacctccaggagagcgcgacgcgatccaattgaggtccaggaggtggagggtgcctgcgctgtccgtgtgttcccctttgtttccatcccaagcctggccgcgccgccgctggacgccatcgctcgggagacccggcgcgaggaagcggtggccgagccggcggagcgcgatgctgtgggtggcgcgcctgcccggcttgttatccgccgccatggtggtggtggtgctgtcgccgtcgctccagtccttcccgcccgccgaggccatccggtcgtcgcagttcgacggcagcgtccgcttcccgggacatttctttgggggcgccaggggggtcgacttccgccgcgccccgccgttccgcaatgccgtcgactg

SEQ ID NO: 126183 - DNA, 1020 bp, Zea mays
  Clone ID: MRT4577_46547C.1
gccggccgggtcgggaaaacgaaccggagtgtcagattcagaaacaataggcagcagctatagagcaagcagcatcgcagcagacgccaccgtcacgccaccgcgccgagagagaaaagccgagcggtggcaggcgaggggacgcctgccgcggtgggttggtccgttggtgggtgccgcctccgcatccggtgccgctgctctgttcctcagtccgcccccatttacctcgcatggattcctgcttgcttctccccaactccacgcgccgatcctccaacctccaggaaagcgcgacgcgatccaattgaggtccaggaggtggggggtgcctgcgcgctgtccgtgtgttcccctttgtttccaacccaagcctggccgcgccgccgctggacgccatcgcgcgcctgcacagcgtcttggtgaggtggtcgaagcagcaccggccggcgccgctcgggagacccggcgcgaggaagcggtggccgagccggcggagcgcgatgctgtgggtggcgcgcctgtccggcttgttatccgccgccatggtggtggtggtgctgtcgccgtcgctccagtccttcccgcccgccgaggccatccggtcgtcgcagttcgacggcagcgtccgcttcccgggacagatcgcagggggcgccaggggggtcgccttccgccgcgccccgccgttccgcaatgccgccgactgcggcgccggcgcggacaacggcaccggcgccaatgtctgcgacccatggctcgtccacatcgcgattacgctcgacgacgaatacctgaggggctccgtcgccgcggtccactcggtggtgcagcacgccaggtgccccgagagcgtcttcttccacttcctcgtctccgacccggggctcggggacctcgtccgcgcggtgttcccgcagctccggttcaaggtctactacctggaccccgggcgcgtccgcgggctcatctccacgtcggtgcggcaggcgctggaacagccgctgaactacgcgcgca

SEQ ID NO: 126184 - DNA, 165 bp, Zea mays
  Clone ID: MRT4577_46548C.1
aagcttaagattcttttttttttgagaggttcttcattaaaatattcccaatgaggctcattattgaccaaataaacatctaaattccgttaattcaaattcatttttgtgtgattcccaaataaaaataaaggctttttactttatcaattcaaaaacaacaca

SEQ ID NO: 126185 - DNA, 326 bp, Zea mays
  Clone ID: MRT4577_46549C.1
agagttaaggtgatgctgaggcgttatgcacacgtacgcatactgtagctccgaattcagcgtcgagcagaatcaagcgtatctactagtcttgatacttaggcgtatgagcaagtgcagagagtgcgctaagatcctgagtatcctgtccactcggtgcacaatcttcaggcagcctgtgtagcgtctactgtagatcacagttactagcagatctgaagatctccggcatacgcgctattcctaaccgagcgtatacctgagtctgcaacttgagaggatgtagccttgatccaagtcagttctgagctattatatggctcgaa

SEQ ID NO: 126186 - DNA, 288 bp, Zea mays
  Clone ID: MRT4577_4654C.1
tagccgataatttctccacctgtagccaaggctattctgggagtctcaacccagcttcgggatgactcctgatcctcacaccacaatgtctggcaacatggcctacggtccgtacgggggcagacactacccatcacaccccatcgaatcttccacgctaccgctagacgtcataggcgctggtgagctttacctcctcgctggacggggtcttgctcggacttactacgactgccgcaaggtcacctacgtgctacaaggaccttgtaccttcggggcagttactcc

SEQ ID NO: 126187 - DNA, 310 bp, Zea mays
  unsure (1)..(310): unsure at all n locations
  Clone ID: MRT4577_46550C.1
ggcctgncctgtacagccggctgctgggctggaccctggcgcccgcactcgtgcccgtcggctctggactcgtcgtggtggccgtgcgttttgcttcttttcctccgttctggtttgtttgttggtgcgtgcttctcgggttgccgttgtttttttggtgttttgcgtgcttctttccctggtgttgtgggtggggcgcgtttgtttggttttggggtgtcgtgggttctgtccgtcgtttccgttgttttttggtttcttgtcggttcgttcggtcttcttgccggcgtcgcgtctttcttttttgtgc

SEQ ID NO: 126188 - DNA, 688 bp, Zea mays
  Clone ID: MRT4577_46551C.1
acgatagttcaggtggagctgtgcttcgttatgctttgcacctgcgatttctgtgcccctccaagaaaaaatccttgaaatcaatgcttcggtgcaaatctgatccatcaacggcaccatatagcagcaatacactacctgaggaagagcggaggttctatctctacaatgatcttagagttgtatttcctcaaaggcactcagatgcagatgaaggcaagctgcgagtggagcatgacttccccgccgatcccaagtactttgacataagcaactgatggttgcgctgctgcgccgcacaataagaatctgtactgggatcgccattgggtcctcgatcctcgttggggttaggcacggagaaaattccttctctatggtagggaacaaggacaagggtgcatggattttcttcaaaggtcttgtttagatactctagtatgtatcacaatccacaggtcttgtttagatactctagtatacatcacaatccacatatgttgaggtgcattggggtgtaaattaaattaatttacactccaatgtatatcaatacatataatacatatggatttgggtggatactagagtacccaaacaaagcataaatggggcggttacgaggagacattcctagcaggaatttccctttttcatctcgaattaccctaagatgggtaagagtttg

SEQ ID NO: 126189 - DNA, 721 bp, Zea mays
  Clone ID: MRT4577_46552C.1
tctaagatcaacgatagttcaggtggagctgtgcttcgttatgctttgcacctgcgatttctgtgcccctccaagaaaaaatcctcgaaatcaatgcttcgttgcaaatctgatctatcaacggcaccatatagcagcaatacactacctgaggaagagcggaggttctatctgtacaatgatcttagagttgtatttcctcaaaggcactcagatgcagatgaaggcgagctgcgagtggagcatgacttccccgccgatcccaagtactttgacataagcaactgatggttgcgctgctgcaccgcacaataagaatctgtaaatatgttgtcatgactaacttggtcaccagccgtttcatcttttcaccaacaaatgtacaggtcaatgttccaataataggtaccatttagttgtgcgggttaggcacggagaaaattccttctctgtggtagggaacaaggacaagggtgcatggattttcttcaaaggtcttgtttagatactctagtatgcatcccaatccccaggtcttgtttagatactctagtatgcatcccaatccccatatgttgaggtgcattggaatgtaaaattaaattaatttatacttcaatccatatcaatacatatggatttgggtggatactagagtacccaaacaaagcataaatggggcggttacgaggagacattcctagcaggaatttcctttttc

SEQ ID NO: 126190 - DNA, 3711 bp, Zea mays
  Clone ID: MRT4577_46553C.1
gagtcctagttggagctgtgtatgaggaaaattccttccccatggcaaggaagagacagacatatcagcatcagttttaacaggtgacagctagtgttcagaaacatgacagaacagccctctgacggcagccctctgacggtttcgaaatctggaggaaagaatttataggcacaactaaatggtgcattttatttggaacattgacctgtacatttgttggtgaaaagatgaaacggctggtgaccaagttagtcatgataacatatttacagattattattgtccggtgcagcagcgcaaccatcagttgcttatgtcaaagtacttgggatcggcggggaaatcatgctccactcgcagctcgccttcatctgcatctgagtgcctttgaggaaatacaactctaagatcattgtagagatagaacctccgttcttcctcaggtagcgtattgctgctatatggtgccgttgatagatcagatttgcaacgaagcattgatttcgaggattttttcttggaggggcacagaaatcgcaggtgcaaagcataacgaagcacagctccacctgaactatcattgatcttagaaggtgagcagcatgatttcttttctcccatgccaaacttatccatttgacagcagcaaccatcagaatcagactggtctttcttatttcctggagaactagacttatttgattcattagaatcactatccaatgatcgacatcttgttttcagatctcctttttctgattcatcatttgagttgcagttctgtccaccgttgcagcattcagaacgagctccccgttcgctaggttcatttccacatgaaactgactgagaagatttgtgaccagaattaacatcacaagtcttgcttccttcttccactggattagaaggcaaggcagagggggagagagtgaccttttgccgcacgaaagtcttggttccaggaggcatgtcactcaagtcatagttgcagaagaaagtatgaagtggagtcttctctgggttgcttaccaccagctgtatgcgacccttaacagggatgcgtaaacgactctttgctgaccgcgaatcattattactgtagcttctttggagctttgggcttttggtgttattcgaaggcaacctcccagcaagatcaatagaagaatagtatagtaaggagctatcctcatcgatgcttgttactgagaatggaagtttctgagttgtggggaagaaactaccaccagtgacatttagaacagctaagaaaccatcaattgtctgactgtcttttccatacgagtatcgaccagataaaagagactcctcaaaggagccaacaagtgacctccttacatgcaaagacaaactccgaccataaccaattctgggagatgtaggggaagattcagggccccaatttcggtatcttctcaatgaaccccatttaggtgtcataacatcaagttcatcatgtaacaagttagatccttttgatacctccggcatcctagctccgccagaacctccagtttcctttaaatctaggaagtcatcctcaagatctttcattatatatctttgagatcctgtcactttaattttgttcatatatttagggctgagaggagacagagaaagcggagagtgcgctaattttgcactagctgctagatgatcataataggatatataatccttgctcccaagtaaaggaccatcagtgaatgaattagaattgctcctagtaacatcccattctgggctccggctggagcacctagaggctggagtatcccgcgtttcaaaaaaattgatgcatcccgtgttggcttttttattatcttggaaaccagtactgtatagtttatcggctgaatcagaatgcctaaatctagaatcaccagaaggaaggttgagcatatcaccattgaactgtttaacgagcacatttttcaatggagagaacagtcttttccttgcttgaagttcatgctgatcaaatggcaaatgagaatttctgtcgaccaaagatgaatcgaccatatccgtttctgccccatcagaacctccaatacaaccagaatcaaagcccacaaccctccttgccggcatatggacagaaggcactaatttaggagaagaccaagaatttgtatttcttgaatcaatgtttagtccatggaggtctgcgggttcgccaaattcacatccgtctttagaatacccatttgattcattaggagcatctaatgtggcctttctatcaaaatcacatatcaatgggtacgaaagcacccttctgctagagcttcccgcaggaagcccatccaaatcacaggcactaactcctccagaatgtggagggcaagaaatagaggtgcgcagtgctgttggcgcatcatcctcgactgttgaaggttggggtaaacccatcgcagcctagtctgggatagcacctaagatgtactgattcaagcacctttgaagtccttcagaatccgtatttgagccccaccgaaacaccaaaaccgatgtccaagaatcatctaccgaactcaatcaatataggaagcgtggaacgacgctccggacgcctccggagaaaggacatcatcatctttgcgctgctaccgcggcaactggagatgaagcacagcttggaccccgagcaagcaaccagaaacctaggatgaaccatgcccatcagagtcctgacagaccaagcagagaaaccaaccgcatggccgccgaacggaaccgggtcttcgccgatgggactgcctcgatccgatggctagaaaaactcggccaggaagtcggcgcgcaacccagccgattcctgcttgccttgccttcccctcagcttattccccttcccgtccctccttgtcccctctccttgcgctctgctccacctcccccctatcttctcaaatggtggctatataattgtgcaacaggacacgggtcgctaattgagcccggcccggccggcttgtcaaagtcattttttttattttaattgtacagagactcggaatacaactcccaaaagtgggcaggcacagatgtgtaaatcagatcctgtaaatctttgcctttattgactgctgtgaggaactcccccacaacacacaacaacaaagaatcttttgtccatgttgcctagaaatccaggcagcagacagacatatgttcgaacatgaaccaaattattcgaagtaaaggtgcaaacaatggaaggggtaaaaaactaaaaataaaatgtcatttgtgtaatgcagtaaggggcaacgattgttgtgcaattagaccttaggtgcaagtgtgcaagcaagtctcctaatccattggtgcaattagaccttaggggtagatatgactgtggtttgttaggttttttataaggctacgtgagctggtgatgtacgggtctaagtgttaaatatggcatacggttggatcatgatctaacagaccaggagagtcgtttgaaccttagacctgattgcacagtagttgttgtctgtcgtaaggtacaagcaaaactaagcgatgcttttgagaaactgcctatagcaacactgagggaaggatatttatccaaaaaaaaagttcagtgttatccaagaactcagcagtgttgccttttttgacaacaagcagtcaaatcttcataaatttcatgcatcaagggac

SEQ ID NO: 126191 - DNA, 2494 bp, Zea mays
  Clone ID: MRT4577_46554C.1
gatcgtcccattatcccgggttcccatcgaaccgcatctgagtatctgaccacgtcacacgacaccaccaccagccctccccttcatcaattggagcacggcgcccgttcattcccctctgctccgctgcttgcctccggctccccaattccacgagatctccaattccaccgcgtcgtctctgcatccggaccccataccccgatcgatccctaaggcccatggttttctccgccgccgcgtcgcctctagtagccaccgctgctgactctgcttcctccctgcgtcgcccacctccgctgctgctgtcgcgttagttgctgccgttgttgaagacgcgtagctctttagggttcgcgatttctcgctgatcggttcgagaattggtaagctatggatctctcgcggcccacatcgtcggacctctcgctcgggctccactctcacggtcacgcccacgcccacgctcgcaggcacgcggtagccgcgccgctgcgcctgttcgacgacgcggaggagccgaagccggagcgcgtcggggccggagaggccgacgcggagagggatgacgaggacgggggcgaccagcacttctccctcctcgggcactccctctgcgtcaagcgcccgcgccgcgccggcaacggcggcgggggcgggttttcctttcaatgctagggggaccccataataatcatattgctgccttggctattactctgaagcaagtcgcaactcctgagtataaagcgtacattcaacaagtcaagaaaaatgctcaggctctggcatcagcgttgctcagaagaaaatgcagattggttactggtggcacagataatcacttaatactttgggatctcagaactcttggcttgactggtaagatctttgagaaggtctgtgaggcatgccacatatctatcaacaagacaccaatttatggggataatggctcaatatcccctggtggtgtgcggatcggaacacctgcaatgactactagaggttgcctagaagaggacttcgagtcgattgcagacttcctcataaggtctactcagattgctagcaatgttctgaaagaacatggcaaagtgcaaaaggagtttctaagaggcctaatgaacaataaggatgttatggaactccgaaatcaggttgaggcatttgcgtcacagtttgctatgccaggttttgatgtatgaatgtgcatatatactgtagtcagcaattatccagattcacagcaacattgtcatccgctcagttcctcgaatactagcaagtcttgctctcgactgcacaacgattaggagagtttttattaggttgtagagggtcttgactcttgattttgattcaaacaggaaagttgtttcttggcgatatggcacatatcagtgggcttgtcgcagcaaaggaatgccgtagccctttcgactactgtgatgttgttacgtcaactactcacaagaatcttaggggccctagaggtggtataatattcttcaggaaagggaaaaatttaaggaaacgagctggatctttttctcaaggagatgagaatgaatacgacttcgaggataggataaattttggtgttttcccttcaatgcaaggggggccccataataatcatattgctggcttggctattactctgaagcaggtagcaacttctgaatataaagcatacattcaacaagtcaagaaaaatgctcaggctttggcatcagctttgatcagaagaaaatgcagattggttacaggtggcacagataatcacttggtactttgggacctcagaactcttggcttgactggcaagatcttcgagaaggtttgtgaggcatgccacatatctgtcaacaagacaccaatttatggagataatggctcgatatcgccaggtggtgtgcggattggaacacctgcaatgactactagaggttgcttagaagaggacttcgaggtgattgcagacttcctcataagggctactcaaattgctaacaatgttctgaaagaacatggcaaagtgcaaaaggagtttctaagaggcctacagaacaataatgatgttatagaactccgaaatcaggttgaggcatttgcgtcacagtttgcgatgccaggttttgatgtatgaatgtgcatatatacgtagtcagcaactttcagattcacagcaacattgccatcccttccgttactccgatactagcaactattgctttcaactgcacaatgattagggagttttttttaatttgatggtagacggtctagatggttgattcaaacaattatgtacagcaagttgtgatgaattatgtatgcagtgaaccttggtatgacgggttcctataggagatattttcttgtcactacaacagaaccctttgttgccttttgacacctgtttgttgccgaggctgaataagctttaaaaaaaaaaaaaaaaaaaataaaaaaaaaaacacacccccac

SEQ ID NO: 126192 - DNA, 791 bp, Zea mays
  Clone ID: MRT4577_46555C.1
cctcgaggccggccggctgatttttcgagattgacccttcgtggaggcagcgtcggagccttcgccggaggaactggggccaccgaggtagttggtggtgggagcctgggagggcttgcaaggggcgaaggaggtctacgcagactacaaggtcgtcgggtagagggagatcgacgtcctcgcggcccggtgttgtcgctgcctgatcacctcgtcggtagcaccaagcgccacctagttatactataaaaccaaacttgtgtgcgcctttggaatgtgcacacccatgggtaatttttcttgatggtccactgctgacatgcacagacatctcttctacctctgccaattcaaaggccatgctgttataccaggagtagctgcaacgattcaactacttgtggcaaatttcggcacatccccaacactcgagagatcaagaaagcaaaggtgtgctaaccttcaaaatgaattgagaattttggaccttgcaccatccaagcatcatcatgaccaagaggaagttccgtcacatcaccgtcttatcaatggctgtatgggtgacatctcgggagtccaatcaagactgcacactatgcgtaggggtaaagagagctttgctaactcaaactcaaatcaaggacaggctaaacacggtaacattgtctcaaataatacctcggtttgcccctccataactacactcacaaaggaagacatgtttatgcaaattgtggagctacataggaggcgaacaatcagttcagaatgatccatttttggcatctgca

SEQ ID NO: 126193 - DNA, 456 bp, Zea mays
  Clone ID: MRT4577_46556C.1
actgcaagagattaggaacctcgtcgaccggagatggagaagatgagctcgtcggtgcagtcctgggtggaccagcacaagctcgccaccgtcggggcgatgtggacgacggcggttggcgcctcggtggcgtgcggccggcggcggggcaaggcggcggggttcacggtcgctgccgcgctcggcggagcggcgctggcgcaccactactacgccgcgaaacggagggaggaggaggcgaggtgcttcgagctggacttctactcgcagctgccggcggccaccggcgaagacggccaggagaacgagcggtggacctactagcagatcagacgttcagatcacggccggccggccggccgtggatcgaaacgagacgatgatgatgacgaccaattaggagtaccagttaattaatagcccatgacgtggcgcggctcatttgcctaatccatc

SEQ ID NO: 126194 - DNA, 2095 bp, Zea mays
  Clone ID: MRT4577_46557C.1
tgaccacgtcacacgacaccaccaccagccctccccttcatcaattggagcacggcgcccgttcattcccctctgctccgctgcttgcctccggctccccaattccacgagatctccaattccaccgcgtcgtctctgcatccggaccccataccccgatcgatccctaaggcccatggttttctccgccgccgcgtcgcctctagtagccaccgctgctgactctgcttcctcctgcgtcgcccacctccgctgctgctgtcgcgttagttgctgccgttgttgaagacgcgtagctctttagggttcgcgatttctcgctgatcggttcgagaattggcacgcggtagccgcgccgctgcgcctgttcgacgacgcggaggagccgaagccggagcgcgtcgtggccggagaggccgacgcggagagggatgacgaggacgggggcgaccagcacttctccctcctcgggcactccctcttcgtcaagcgcccgcgctgcgccggcaacggcggcgggggcggagagacgtcatcctgctcgtccacgtccgcggcgcttcgccctgccaagcgacaggcgacgggggagggcagcggcgcagatctggagacccgccgcgccgcggtccgcgcctggggcaatcagtcgctggcggaaaccgacaccgtctcgggctcgctgatggtccaggagctggcccgccaggtgcggggcatcgagctcatagcgtcggagaacttcgtctgccgcgcggtgctcgatgcgctcggcagccacctcaccaacaagtactctgagggggccccgggtgctcgctactacggcgggaatcagcacatcgatgccatcgagcggctctgccatgagcgcgccctcactgccttcggtctcgaccctgcctgctggggcgtcaacgtgcagccgtactcgtgcacgtctgccaatttggctgtctacactggtcttcttcaacccaaggaccgcatcatggggctggagccaccgtcgggcggccatgttagccatggttactacacgcccagtggcaagaaggtgtcaggtgcctctattttcttcgagagcatgtcgtacaaggtgaacccacagactgggtatattgattacgacaagctcgaggagagagcaatggatttccacccgaaaattctcatatgtggtgggagctcttaccccagagagtgggactttgctcggatgagattggttgctgataagtgtggtgcagtgcttctttgcgatatggcacatatcagtgggcttgttgcagcaaagctacccttgtgttcttatttccaaaggttagaaggcttttgttgccatttaggttatcatttcatgcaggaatgtcgtagccctttcgactactgtgatgttgttacgtcaactactcacaagaatcttaggggccctagaggtggtataatattcttcaggaaagggaaaaatttaaggaaacgagctggatctttttctcaaggagatgagaatgaatacgacttcgaggataggataaattttggtgtttttccttcaatgcaagggggaccccataataatcatattgctgccttggctattactctgaagcaagtcgcaactcctgagtataaagcgtacattcaacaagtcaagaaaaatgctcaggctctggcatcagcgttgctcagaagaaaatgcagattggttactggtggcacagataatcacttaatactttgggatctcagaactcttggcttgactggtaagatctttgagaaggtctgtgaggcatgccacatatctatcaacaagacaccaatttatggggataatggctcaatatcccctggtggtgtgcggatcggaacacctgcaatgactactagaggttgcctagaagaggacttcgagtcgattgcagacttcctcataaggtctactcagattgctagcaatgttctgaaagaacatggcaaagtgcaaaaggagtttctaagaggcctaatgaacaataaggatgttatggaactccgaaatcaggttgaggcatttgcgtcacagtttgctatgccaggttttgatgtatga

SEQ ID NO: 126195 - DNA, 601 bp, Zea mays
  unsure (1)..(601): unsure at all n locations
  Clone ID: MRT4577_46558C.1
ggggtacatatctacgttgaaccatttatttttatattatngttagttcattgtatcctgcttaacaatgtgcacaagagtaattggagtacctcttaggtcccattttgtgatcctactgttactatgactttatactgcttggcatctaacagaattgtacctcttagtgttgtatacttgtatgagtttggattgcacttaccagctacccttgtgttcttatttccaaaggttagaaggcttttgttgccatttaggttatattttcatgcaggaatgccgtagccctttcgactactgtgatgttgttacgtcaactactcacaagaatcttaggggccctagaggtggtataatattcttcaggaaagggaaaaatttaaggaaacgagctggatctttttctcaaggagatgagaatgaatacgactttgaggataggataaattttgggtgtgtttccttcaatgcaagggggaccccataataatcatattgctgccttggctattactctgaagcaagtcgcaactcctgagtataaagcgtacattcaacaagtcaagaaaatgctcaggctctggcatcagcgttgctc

SEQ ID NO: 126196 - DNA, 1769 bp, Zea mays
  Clone ID: MRT4577_46559C.1
cccacgcgtccgatcagcacatcgatgccatcgagcggctctgccatgagcgcgccctcactgccttcggtctcgaccctgcctgctggggcgtcaacgtgcagccgtactcgtgcacgtctgccaatttggctgtctacactggtcttcttcaacccaaggaccgcatcatggggctggagccaccgtcgggcggccatgttagccatggttactacacgcccagtggcaagaaggtgtcaggtgcctctattttcttcgagagcatgtcgtacaaggtgaacccacagactgggtatattgattacgacaagctcgaggagagagcaatggatttccacccgaaaattctcatatgtggtgggagctcttaccccagagagtgggactttgctcggatgagattggttgctgataagtgtggtgcagtgcttctttgcgatatggcacatatcagtgggcttgttgcagcaaaggaatgtcgtagccctttcgactactgtgatgttgttacgtcaactactcacaagaatcttaggggccctagaggtggtataatattcttcaggaaagggaaaaatttaaggaaacgagctggatctttttctcaaggagatgagaatgaatacgacttcgaggataggataaattttggtgtttttccttcaatgcaagggggaccccataataatcatattgctgccttggctattactctgaagcaagtcgcaactcctgagtataaagcgtacattcaacaagtcaagaaaaatgctcaggctctggcatcagcgttgctcagaagaaaatgcagattggttactggtggcacagataatcacttaatactttgggatctcagaactcttggcttgactggtaagatctttgagaaggtctgtgaggcatgccacatatctatcaacaagacaccaatttatggggataatggctcaatatcccctggtggtgtgcggatcggaacacctgcaatgactactagaggttgcctagaagaggacttcgagtcgattgcagacttcctcataaggtctactcagattgctagcaatgttctgaaagaacatggcaaagtgcaaaaggagtttctaagaggcctaatgaacaataaggatgttatggaactccgaaatcaggttgaggcatttgcgtcacagtttgctatgccaggttttgatgtatgaatgtgcatatatactgtagtcagcaattatccagattcacagcaacattgtcatccgctcagttcctcgaatactagcaagtcttgctctcgactgcacaacgattaggagagtttttattaggttgtagagggtcttgactcttgattttgattcaaacaggaaagttgtgatgagttatgtatgtcaaccttggtatcacgagttactatagtctataggagacctgttgtggccttcggagacctgttgctgccgagactgaataagcttaccatatgatttctggctaactattaggcgaagggatgaggttaattgtactggggcgtaccgtcagtttcgtatgtttgcaaacacatcaagaatcaggtgctcatggcttgttgcatcaactgtttagatttattaggcgaagtgatgctgcactgtttagatttatttttctgctttattgttgctttcatggccatgttggatgccccgccgactagcgcagggacgggatttgtactggtggtagagtttgatctttactgacgatgatttcattcgcttatcgaa

SEQ ID NO: 126197 - DNA, 415 bp, Zea mays
  Clone ID: MRT4577_4655C.1
ttgttttttttcatggatcggaacgactgcaccagggtatttgtgtagtgctgcgacagtgccttccccttacccacaatccgttgagactatcaccatgctttgactgctcttctaacgggctggataagaatactgctgaaaaaagatgaactggacacaacacgtaaagccggacgagagccatatgaagctattaattgagctctataaaaagagataccagcgactcattcgttgaagaactatcagggggcataactcgcaggtggtgaaacgtacattgctctacaagacccaacacatattcatgcggggttaccttaggggggctaggatccataaaataaagctcaggcccaaatacttccatgacagtagaggcttgaaggacttgcatcacgaacaggtctga

SEQ ID NO: 126198 - DNA, 856 bp, Zea mays
  unsure (1)..(856): unsure at all n locations
  Clone ID: MRT4577_46560C.1
ttggggtacacctccggccgggatctgaccacgtcacacgacaccaccaccagccctccccttcatcaattggagcacggcgcccgttcattcccctctgctccgctgcttgcctccggctccccaattccacgagatctccaattccaccgcgtcgtctctgcatccggaccccataccccgatcgatccctaaggcccatggttttctccgccgccgcgtcgcctctagtagccaccgctgctgactctgcttcctcctgcgtcgcccacctccgctgctgctgtcgcgttagttgctgccgttgttgaagacgcgtagctctttagggttcgcgatttctcgccgatcggttcgagaattggtaagctatggatctctcgcggcccacatcgtcggacctctcgctcgggctccactctcacggtcacgcccacgcccacgctcgcaggcacgcggtagccgcgccgctgcgcctgttcgacgacgcggaggagccgaagccggagcgcgtcgtggccggagaggccgacgcggagagggatgacgaggacgggggcgaccagcacttctccctcctcgggcactccctcttcgtcaagcgcccgcgccgcgccggcaacggcggcgggggcggagagacgtcatcctgctcgtccacgtccgcggcgcttcgccctgccaagcgacaggcgacgggggagggcagcggcgcagatctggagacccgccgcgccgcggtccgcgcctggggcaatcagtcgctggcggagcncgacccggacgtgcactcgctgatggaagcaggagttggaccgncaggtgcgaggcatcgagctcatagcgtcggaaaact

SEQ ID NO: 126199 - DNA, 289 bp, Zea mays
  Clone ID: MRT4577_46561C.1
ctcaataccatccggaatgcccagtcgacccacacatccaagaaattataaactctatatatatattaccattattaaaaactgggggaatattgacagtggtaggggggattactaattaataactaatcaaaatcctttactatttatttacattaagaaaattataattgaccgttcttaactaaatcacctgacatttaaaattaaatcttagatatcacattactctcctaaaactattaaaatatatatactttaaatttttatttataaaatatattgatat

SEQ ID NO: 126200 - DNA, 620 bp, Zea mays
  unsure (1)..(620): unsure at all n locations
  Clone ID: MRT4577_46562C.1
cattgggtacctcgaggccgcacggggtccattcgttcccgtctcgtcttccgctgcttgcctccaactccccccgcgtcgtctcgtgcttcccaatccccatagagccggttgatccccaaaggcccatggttttctccgacgccgcgtcgcctctcgtagccaccgccgctgactctgcttcctcctgcgtcgcccacctcccctgctgctgtcgcgttagttgttgccgttgttgttgaagacgcgtagctcgctagggttcgtgatttctcgccgatcggttcgggaactggtaagctatggatctctcgcggcccgcatcgtcagacctctcgctcgggctgcactcgcatgcccacgcccacgctcgcgtgcatgcggcagccgcgccgctgcgcctgttcgacgacgcgaagccggagcgcctcgtggccggtgaggccgacgcggagagggacgacggggacggtggcgaccagcacttctccctcctcgggcactccctctgcgtcaagcgcccgcgccgcgccgtcaacggcggtgggggtgggggcggagagacgtcatcctgctcgtncacgtncccggcgctgcgccccgccaagcggcaggcggcg

SEQ ID NO: 126201 - DNA, 436 bp, Zea mays
  Clone ID: MRT4577_46563C.1
aaaaagggcccgcccccaatcagtatcattgtcttccaaaatacattttttttttcagctccaaaaataagagggccgaaaaaaaaaagagttccaatgaaataaatttttcgataaaaaaaaaagagctttgatgaaaaaaaaaaagttccttttacccacttttttaatacagccttttttgttcatcaaaactttcagggacccaaatccgatccttttctggctgccaaatcatgtttacaaaaattccctggcgcaagattttcaggggcaacgtttccttgtgtccccatgaccctagaaaaaacatggtttttatcaccgtttggaccgtcctttgccaaaccgaaatcaaacagttttgcgttgtactccgagtcgaaaaggatattgggggtcttgaaaccggggtaaataactttggcctggtccc

SEQ ID NO: 126202 - DNA, 558 bp, Zea mays
  unsure (1)..(558): unsure at all n locations
  Clone ID: MRT4577_46564C.1
atcaccaacacgatactaatagctactagtaaatcagcaaacaacatacatactaggaagcactggctcgcatggagaccacggtgcagatgggcatgtgggtgacgaggcagattgagcggaacctgctgaagtgcaccgaccagctcctgcatctacacggcagctgaagcggagcctcaaggaaccgctccggcggctgaccgacgctgcccatgcaggaggccgcgttctacggcaacatcaactcggagaccctgaagatcaatgccttcttgctcgaccaacgagatgattaaataatccgacaccctgatctgcaaaaccacattaagctcgctctgggccagcaaaggccggttccggtacccggagatcacaacgccgagggctactacataccgcaggtagagnaccaattgcaaggtgtcaatgtgctgctgctcaataccacacaatcaaccacataggtaggacataccatctatagctatacctacgtatttcaacggagatgaattgaaacatcatagatctagacttttgcccatgcatgta

SEQ ID NO: 126203 - DNA, 210 bp, Zea mays
  Clone ID: MRT4577_46565C.1
aggctggacagcacgaggctcattggggaattaaagtatcgcaggtggctgcctatgctgagcgagaactaaaagcaccacatcttgatgttaatacgtgtcgggacggatgctttatatttttgtggataaaactacagctagacatagggtgaagcttaatacgggacatccagagaacgtatgccttgtttgaaacctgggcagaaa

SEQ ID NO: 126204 - DNA, 130 bp, Zea mays
  Clone ID: MRT4577_46566C.1
ctagttgccttaagctacgaatgaatgatactacgtagtatcttggcaactacggcaaaccaactggagttcgagttagcctacgttgccattatactacgtagtatcacatctttcagcagggtcccat

SEQ ID NO: 126205 - DNA, 441 bp, Zea mays
  Clone ID: MRT4577_46567C.1
tctatctcccccccccttttttttttttttttttttcacaaccatctaccaccaaggaccggctattccatttaacttatcaatgatcacaaagccgccacataccacaaacacaggaccattggcttaacccaaacactcattaatggatttttgaatttgcgtttactttcttatgctttgccttgttaaacacaccaacgaccccgactcctcaaaagtcgcacaagaaaaagaaacaagcgacccaaaatattccaagcatgcaaaaagctctcctcttttctttcttcttgcccttcctccttccaaggaaggagctataactttttcctccccatggttttgggttgcttggcactggtggtccattggtggcaaaaaaaatgctaggggagaagggacaataaactcaaaaccacacgccccacaccatgcagg

SEQ ID NO: 126206 - DNA, 2689 bp, Zea mays
  Clone ID: MRT4577_46568C.1
ccggccgggattcttctcgccggctaccttcccgtcctcgcaacggtatcgaacagccacgcttctgtgatccgaagagaaccggtccaggccagcgaggacacgactaagagaagggcctccaagagcaagagtttcaaagacgccgagaacttcgaagtcctcgtccttgagaagagctgcggttgcaagttcaagtctttgaggatcttgctcatagccatcatctccgcgacagtccttacccttgtaaccccgaccttatacgagcgccagttgcagtcagcctctcggtacgtggatgtcgggtggatgtgggacagagcgagttccgatccgcggtacgcatcttctgccgatgttgggtgggaggatgtgtacaaagcactggaaaacctaagaagcggtaaccgccagagtcatctcagagttgggctcttgaatttcaacagcaccgagtatggctcctggacgcagttgctcccagctgacagccacgttatctccactgtaaggctcgagcacgccaaggacagcgtcacctggcagacgctgtaccctgagtggatcgacgaggaggaagagacggagataccctcttgcccgtcgctgccggagccaaacgtgccaagaggtgcgcgctttgacgtcgtcgccgtgaagctcccatgcacccgtgtggcgggctggtcgagagacgtcgcgcggctccatctgcagctctcggcagccaaactggctgtggcgtcctcgaagcgcaaccacgacgtccatgttctcttcgtcactgactgcttcccgatcccgaacctcttcccttgcaagaaccttgtcacacgtgaaggcagcgcctggttgtacagtcctgactccaaggcgttgagggaaaagctcaggcttccagtcgggtcctgtgagcttgccgttccactcaaagccaaatcgaggcttttctcggtagatcgacgaagagaagcgtacgcgacgatactgcattcagcgagcgaatacgtctgcggcgcaatctcggcagcgcaaagcatccgccaggcaggatccaccagggacctggtcatccttgtggacgagaccataagcgaccaccaccggagaggcttggaggcggcggggtggaaggtcagagtgatccagaggatcaggaaccccaaggcggagcgcgacgcgtacaacgagtggaactacagcaagttcaggctgtggcagctcaccgactacgacaaggtcatcttcatagacgccgacctcctcatcctgaggaacgtcgacttcctgttcgccatgccggagatcgccgcgacgggcaacaacgccacgctcttcaactccggcgtcatggtcgtcgagccctccaactgcacgttccgcctgctcatggaccacatcgacgagatcacctcgtacaacggcggggaccaggggtacctcaacgagatattcacgtggtggcaccgcgtccccaggcacatgaacttcctcaagcacttctgggagggcgacagcgaggccatgaaggcgaagaagacccagctgttcggtgcggacccgccggtcctctacgtcctccactaccttggcctcaagccgtggctgtgcttcagagactacgactgcaactggaacaacgccgggatgcgcgagttcgccagcgacgtcgcgcatgcccggtggtggaaggtgcacgacaggatgccccggaagctccagtcctactgcctgctgaggtcgcggcagaaggccaggctggagtgggaccggaggcaggccgagaaggccaactctcaagatggccactggcgcctcaacgtcacggacaccaggctcaagacgtgctttgagaagttctgcttctgggagagcatgctctggcattggggcgagaacagtaacaggaccaagagcgtccccatggcagccacgacggcaaggtcgtgatctgtagatatacgaacaccccatccccatatggcaaccatacatgcatagcaatagcttgtataggtagctatgctttagttcttcgctatatatacagaatacaccactcgatccctgttgttgtcaaggctgcagctctatgtcgctgccggcctgccaccatggctaacgattcttttgggttggctgctgtaataagtttcaggtacatgtaaatttccctgctgaaattacgtgaccgcgtgtgagaaatgaatttgtacagggcgccagataataattggttggtgcatacaacatatgaccagtcttttgcagtatacatagcaacagctttgtaaaggtagctatgtagaacccttttccccccgaatgactatatttttgttcgccgtcacggctgcagcgccccctcctggtgtttcctgatggcggacaatttttttggtttttgccaataattcaccagtataggctgtttttccctttgggcggcttgaggtccgttttggggctgttgttttttcaaaccctcccggggttactgcttttgttgcggtaccccaccggtttaatgtatggtggttgaccagtttcagtgataaatttggagggatccaatatgggattgttgcccaccaacccctgcttcaaaaaaaaaaaaaaaaaaaaaaaaaaaaaaaaaaaaaaaaaaaaaaaaaaaaaataaaaaaaaaaaaaaaaaaggccccta

SEQ ID NO: 126207 - DNA, 307 bp, Zea mays
  Clone ID: MRT4577_46569C.1
gatttgttacggtgatggtgtcgaggtccaaaaggatgtgtttgagctgggccgcccaagaggactgaaaaactgttgcgactggtctgtggctggtcagggagaggtttttatttttactgcgtctaatttttttactggattaagtgtattcaagttcactgaccattcgttttagtgagtaattgggcataacccctctgtttttgctaaatgaccgtcaccttccataattattttatgatcttgttaatgatttataatttgatttattgatagggaactaaattgaactggtggaaggagg

SEQ ID NO: 126208 - DNA, 456 bp, Zea mays
  Clone ID: MRT4577_4656C.1
gcagtacacacctgcttctaacctgagaacatgtaccatttgctgcgtgcctgggcagaccttgcgccttctggtgatcctgcaaggaggattgctactggccagttttcaccctgccgagaatacctgctaacgcagcagcatccatcaccagcggtgcactactgcaagacatcgcacgcatggggatgaccaccagcttgaagatcttcaaatagggctgctgcttatattttgacacgctgcagtatctaacttgctaaatgcctgtgcataaacatggatgcaaatactgtgcgagttgacgagtatggccttggagaaagggaaagcttaggtgagctcgtaagctgctgatataagcatacttggtctgcagacttgtaaggggactgtcgtccacccaatatatataaggtctcacactctgctgctctctggtggatcattggcaac

SEQ ID NO: 126209 - DNA, 250 bp, Zea mays
  Clone ID: MRT4577_46570C.1
cacaggtggcgcagccgaccaggggaggttctcgaggaattacggggatttctccctgggccacaggaccgggctcgagacgctcagggacgccgagggcaagctgaacaacatcgcagtacaatagtgatgcaattaggaacgatgagaaagactccaaacctgctgctggccaaagttggcgagccccatacacatggagccaatgcggatatggtaacaggctgcagcctgaaccacaggtcgtgct

SEQ ID NO: 126210 - DNA, 533 bp, Zea mays
  Clone ID: MRT4577_46571C.1
ataagatgtttctaggagagaatttattgtttgccggggaaactggtaatatgctactggaaactacagatgatatcaacaatgaacagcatgatgatgcagctgtctctgagccccaatcggcagataatgatggaagtggaccttctggtgcatcatcactaccaccagagaaagatgcatacatgggatctaaagaggattctattaacgactatcatgatccttcagttgtctctgagttccaaattgctaataatgatgcaaaatgtgaaccttctattgcattcttgccagaaaaggataaagatttggaagctaataaaacgagcttggaaggtccagcaaaaacaggccaattgtcatctgaagctagtggcagcactttgatgatctcagagccacaagtattggttgtgtccccacaagatgggactctgtctttcatgaacaataatacgaacaaccaagagatgtgagggttcctgaatgtttcccctgataccatggataccgaaatgcagatggactct

SEQ ID NO: 126211 - DNA, 369 bp, Zea mays
  Clone ID: MRT4577_46572C.1
gagggacttccttatttctgccaagccacaaacatcaaacaaaaaactttattatcgaactataactgataagaaatctaaaagagggcaccaccacatgatgggttgctggtagaacactgctagggtggccaaagcaagatgcttgaatggcaacaagtgttgcgttgctgacggtgccacgctaggcataccgtgcaggcagaacggcaacagctgttgtctgcgcaagaaggcaggagggctcacatcaggtagctggctgaatggcattagtagttgctgctgtaaactagcagcataggtcaatgctggtagtttgatgaaaggaaaaaactgctgggcggatgcaccagctagctggctgaa

SEQ ID NO: 126212 - DNA, 195 bp, Zea mays
  Clone ID: MRT4577_46573C.1
acagagcggcagccagtcacgcagttatagctcctcccccaccaccaccaccttccctccctcctccgatcgcatctcctctcctccgtcctcccctcccgtcggcctcctcctccgccgagatcgctcgctctccttccacgatattatgtaggaaatggctgacggaaaggacatgcaagccgtgagcacgaa

SEQ ID NO: 126213 - DNA, 514 bp, Zea mays
  Clone ID: MRT4577_46574C.1
gcgggagataccgcaccactccgcggtacgcggtacctgaggacagacagcggcacgaggcgacgacggctgacgacagaggcggcacacatgacatcccagctctccgccgccgtgccccggtctccacggcctccggggaaacaccgcagcgaggtcccggctggcggcggtggcgcccgcgagggtgggcactaccacgtcaggccgcgcacggcatccgctgcgactacctcggctccgccaccagcctgatcatggtgacgacgacgacgctgatgctggtcgcggggcgcttccctctggtgtcgtgtgaaaccgcatcgcgactgcagtgctgaagctgcaggcgcgcgactccgaacagcatacgggtgaccgcgccggtctccgcagtcttcatcacgctggcctgcggcgccgtccatcacatcctcggaggcgtcatccttgtcggcctcgagaaagtcggcgcccgtctccagataatccgctagctccctaccatcgaccc

SEQ ID NO: 126214 - DNA, 487 bp, Zea mays
  Clone ID: MRT4577_46575C.1
gggcgcacctcagacgatttatatatctaggtcgcctccacattacgtctctatgatagctcttaactcgcgttgacatgtgcctaaccgctaaattttataggctttgcattcaattatgcctcatgtgtggctgaatccaatgcgaggcactgactgcagcaacggatacttaacatccagcgcaggactgctggaaagccctggaaccatgggctgggtacatgaagtaaaacgcacgatggaaggatgggtgaagccgagcttgcaaatggtacccggtgacccttatcgaaccctagcgacctagacaacacctggcactagctactatctcacgcaggagctaactacctttctaccccacgctggccgggctgttggcccattctacaccctgtccggcggcttgtatgccatgaatctgactcactgcacatgctatatgccaaaaaatccgaagacgcagcagcaggcatccgcatgg

SEQ ID NO: 126215 - DNA, 368 bp, Zea mays
  Clone ID: MRT4577_46576C.1
acgagcgcatgctgtctgttgctactggcgtgttcacgggttcctccggcgttaagatctcggggtaggtgtgcccggtccactggcactaccgcacccggtcccactcgtgagaactgacagcggggcactacgacatcacgtcgcactacctgtacgcgcgcatcgtgcgcatgctgacgcgccactgcgccgtgctcaactttacctgcgtctagatgctcgaccacgagcagccgtatgacgcgcagtgccatcccgaggcgcttgtgcagcaagtggccgtcgcggcgcgggaagtcggcgtcggtctggacggtgagaacgcgctgacgcgctactacgacacggtgcacgaccagttgggg

SEQ ID NO: 126216 - DNA, 1546 bp, Zea mays
  Clone ID: MRT4577_46577C.1
gtcagaacaagccgttcatttgattggttattaaaagattttgggcagtctgttcttacatagcaaaaatgtcttctctgtggtgcatcctgttgctcttgcactacaagtacaaatccttgtctgggtagtctgttctttacatagcaaaatgcgaagtctgcagggcgatttcagcgatgatggaagcatgcccgcccacctcttgactgcatgcgctggtcagctgcggcttattctacacatcttgcttgtctgtactagccttccttgctaaatatggctcgtctccgtgctccattttcgacccaacaacaagaacttgatcgaccccacccaccaccatgagtcgtcctcgtccatgaccaacgtagtttgtactcctttgggaacctctcagtgttgcagtgtactggccggccggccggcagcatcttcccatgctttcaggccgcgggttttttttttttttttttgccagaacaagccgttcatttgattggttattaaaagattttgggcagtctgttcttacatagcaaaaatgtcttgtctctgtctatggtgcatcctgttgcttttgcactacaactatacacatccttgtctgggtagtctgttctttacatagcaaaatgcgaagactgcagggtgatttcagcgatgatggaagcatgcccgcccacctcttgactgcatgcgctggtcagctgcggcttattctacacatcttgcttgtctgtactagcctttgcatcgtgccttcgtattatgcttttctcctttcatagtacttattgacctttgcggccatcatcatcattttcatgataggccaccttgcccaatcttgggtatggacttaaaccttccttgctaaatatggctcgtctccgtgctccattttcgacccaacaacaagaacttgatcgaccccacccaccaccatgagtcgtcctcgtccatgacctctcagtgttgcagtgtactggccggccggccggcagcatctccccatgctttcagctcccaaggcgaagggtaccactgcaagatgaaaaatttggggataggggaaaaaaactagtagtagcgccaatcatttactccggtactacaaggccaatagctagcttctcatgaccagcagcagcatcggtagcagtcccagccagcatgaatgctatgtcgttcgtcgcgccgtgtgctcactctcttctgtcaatctctcgagagcctctccgcatctacagaaacgccgccgtcgtcgtcgtcgtcgtcgtcgtctaaccagcgacaacacaaaatcagggttcagaagttgcggaaccaccaaagcgaagagggacaaaccaaccctccccgcacgaatgaagacagaagaacaagaaagagagagatagagggggcttcgttgttcttggatccggtgagcgctcgtcgccgtacagggaacgaaaggaggaggtgctgctgagactgtcctttctttctttctttctctccctccctccttccctgcctgtgcgtgcctcgtgccgaatat

SEQ ID NO: 126217 - DNA, 361 bp, Zea mays
  unsure (1)..(361): unsure at all n locations
  Clone ID: MRT4577_46578C.1
atttttcccctcttccttatatttttaaaaagggaaaacataaaaaaaaactgccccttttcccctnccctctcaaatccccattacaatatttttatttcactgaatcacccattcttttgttttggcaactttttttgaaccaaatcccaatatcccaacccaaacttcacatttccccccctttttaaaaaacctcattcactagcattgcgtcttatacaaccttatgatgccgtctccccaaccgacattcccaaatcagatcttccttccttcccaaaagataaaatgattccccctcttttactttaattgtccccctacccttccctcaagtttttttaaaaccaccttcttt

SEQ ID NO: 126218 - DNA, 687 bp, Zea mays
  Clone ID: MRT4577_46579C.1
cattggtacctcgagccggccagacctgcaacactgagaggtcccaaaggagtacaaactacgttggcgcgctccttctctctctctaccttctccctctctctctctgctagtttcaaggtttctttgttctttctgtgtgcaggtcatggacgaggacgactcatggtggtgggtggggtcgatcaagttcttgttgttgggtcgaaaatggagcacggagacgagccatatttagcaaggaaggtttaagtccatacccaagattgggcaaggtggcctatcatgaaaatgatgatgatggccgcaaaggtcaataagtactatgaaaggagaaaagcataatacgaaggcacgatgcaaaggctagtacagacaagcaagatgtgtagaataagccgcagctgaccagcgcatgcagtcaagaggtgggcgggcatgcttccatcatcgctgaaatcaccctgcagacttcgcattttgctatgtaaagaacagactacccagacaaggatgtgtatagttgtagtgcaaaagcaacaggatgcaccatagacagagacaagacatttttgctatgtaagaacagactgcccaaaatcttttaataaccaatcaaatgaacggcttgttctgacaaaaaaacacatggccagtttgaataaaaaaaaaaaaaaaaaagcggcc

SEQ ID NO: 126219 - DNA, 680 bp, Zea mays
  Clone ID: MRT4577_46580C.1
ccggccgggccgggactccgcgaagcatgtctccgcgccatcctcacctaggtagcaaagaggggggaaatgggtccgctcctcctcgctgtcatgaatcccgctgcaaacattactggaacaaattagacacactaggatcaccgaaattagcagagttctcgcgcaaacacccgtgggctatctctccgcaaaggaccaagctccagaatcacctgagaattctcgtaccaattcagaaagaaactcctccatcctcggaagacagacgaaaagacatccctgatgccatccaaagtactgaatcccatcatgtacaacaacatctgaaggcccaactgtggaaacttccttacggtgattatccatgtgacacctgagaacattatgatcatgctatactgcagccacaatcgaccgctgagcatacggaacaagaaaaagtctaaacttgctctcaatcctaaccagatcttaaacaatgacctaaaattactcgaggaaatgttgatgcaagaatataccttcacaatatcatgacccagaagactgccgaatgtaccctaatatggcatgataacatgcgtatgatgacaagtactactctacacgctctcaccttgttgcaatacaacggcatacactcctactctgcgatataccactgcatactacctcat

SEQ ID NO: 126220 - DNA, 655 bp, Zea mays
  Clone ID: MRT4577_46581C.1
agcatgactgaaaagccccagaaacaaaatagggaaaaaaaaccatgggtgtgaagatctaggagataaggaggcggcagtgtgtaaagcaggaaaaaaaagccacggccatggaggcatgccgcatgcatgctctgtctcttgtgataagaaaaaaaaaaggtactacaaattttgcgccccccatcaagactaagagactaagactaacaacggatctagacgggagataagccaccgagagaaagaggctgacagaaagagaagtgagcacgcggcgaggacggcatacatgctatgtcgttcgtcgcgccgtgtgctcactctcttctgtcaatctctcgagagcctctccgcatctacagaaacgccgccgtcgtcgtcgtcgtcgtcgtcgtctaaccagcgacaacacaaaatcagggttcagaagttgcggaaccaccaaagcgaagagggacaaaccaaccctccaagcacgaatgaagacagaagaacaagaaagagagagatagagggggcttcgttgttcttggatccggtgagcgctcgtcgccgtacagggaacgaaaggaggaggtgctgctgagactgtcctttctttctttctttctctccccgtcccgacttccctgcctgtgcgtgtgtgtgcgcc

SEQ ID NO: 126221 - DNA, 587 bp, Zea mays
  unsure (1)..(587): unsure at all n locations
  Clone ID: MRT4577_46582C.1
cccccccccccccccccccccccccnngccgcnnnccngcgattgcgtacctccgagcncggccgggaaaaaaaatacaaaaaaaaaaaaaaaaaaaagtccctagccaattcttttttgtatcaaaccctctttccccatctcagatccctctcccgtcccagctcgatcctgcccgatggccgccgtaccgtacgccgctgctgccggacgctgaacgaccaggacaaccacctccgacgtccccccgtgtatccacgagatggtcgcggaggcggcgccgtcctcctcggcggcgatctggtcgctccgccgcgacgagatcactttcgaccgcctccacaagttttggagtgccctgtcatctcgtgcacggtacgaactgctaagacttgataaacagacccttattgagcatgctcgcaagaatttgtactgttcaaggtgcaacgggctgcttttggaaagtttcacacaaataatgatgtatgggaagtcactgcatcctgaaggctcgcgtgagccaaggattcaggaagttgaagcagaagttcaggaccctccagttcatccttggggaggccttt

SEQ ID NO: 126222 - DNA, 1479 bp, Zea mays
  Clone ID: MRT4577_46583C.1
ggctccctgggccgaacaattccggactgggctaccgccgtccaccgcagccactttcgacccgcgtgcgttctttctctctctctcttccggcgactgggcagtgggctaccgccgccgccctacgccaggtgctgaggtcttcgtcgatctcgagctcccacaagggaagctgtccaggatgggatacaaccgccacaggcgtggccggggatcatcctcatcgtcttcgcgccgcaccaagcaagaagcctcgtgtgatgatggccttgggacatcacttccaaggcaagaagaaggcacagaagacgaactcaaaggttcaagaattcagcttgcaatgtgggactttggtcagtgtgatgtcaaaagatgcactggtcgtaaactttcaagatttgggcttttgaaggagttgagagtgaccaatggttttggtggtgttgttctcagccctgttggaacacagtgtgtatccaaggaagatcatcctattgtgcaaagaaaaggattggctgtggttgattgttcctgggcacgtttaagtgatgtcccttttgtgaaactacgttgcggtgctcctcgtctcttaccatggttggtagcagcaaatcctgtgaactatggccgcccatgtgaactgtcatgtgtggaagctttatcagcagccctcataatatgtggggaggaagatacagcacatttgctgcttgggaaatttaaatggggtcacgcattcttgtctctaaacagagatctcctgaaagcatactcccaatgtgaaaatggagctgagattatcaatgtgcagaagtcatggttatcaagtaactcgagtgttccaaagccacctgtaaacggggcagaggaatcacggcaaaacacggaggagggatctgaaggtgattcagacgatgacttgccccctctcgagaagaatatgaaccacctgaacctcgacgaagacgaagaaagcgaggaagagagtgaaagcgagtaaaattgtgggctgaaagtgctgccatggtaactttacgactgttttacaagtgaatttcagttgccttgcctgctacgaagcaaccgttgtaggtgcttcagtgtctaatagccagaataagcttcagtggccttttcgcccagatgttgaatgcatggttcgaaaagaaatccttgtacgcctttaatagtgtgtacctatagcactagctttgaagataaatgatgaattgaacacattgagatcatttttctttctaggagaatacacataccgctagctggctggttacatgatgaattgggctggtgtgttgcccgtacttggtttttattagtttgtttcatatatcagtccatgtagtatatgaaaatgacttgagaaacatcgatcatgaagatacatgcaattgtagaaggcttagtcttatcttaatctccagttctctacaatataaagcactagtttttacggttcat

SEQ ID NO: 126223 - DNA, 494 bp, Zea mays
  Clone ID: MRT4577_46584C.1
cggacgcactttttttggtaacagaaggaaaaaaccccatcaacatgaactctatgtcttcaagtcttgcaagaaccggtcaatgggttttttctcaagatattccgaccgatgttgttgttgaagtcggagaagccaatttctctcttcataagttcatgttagtggctaagagtaactacataaggaagctaataatggaatccaaagatagcgacgtgacaagaatcaatctctcggatatacccggaggtcctgagatatttgagaaagctgccaagttctgttacggtgttaacttcgagatcaccgttcagaacgtggcggctcttcattgcgcagccgagttttttcagatgaccgataagtactgcgacaacaaccttgctggtcggacacaagacttcctttctcaagtagctctctctagcctctctggagctaatcgtgtcctcaagtcttgcgagattctccttcctatttctcgtgatctt

SEQ ID NO: 126224 - DNA, 381 bp, Zea mays
  Clone ID: MRT4577_46585C.1
ggactagaaaagtgcctcagaacatgaaagagttgccgaagataacgaagccggacgagccagatttctcagctgaacccgaagactaaagttgtctttgcttatgctattatgtacagtggtcatagctgactattgtgaattgctagtcctatttggttcgtgatggaggttacgagtcacaactaggtatggtgaattgaacttgggttgacggtgccatctgtggatgtgaggaaggtagcttgaatctcaatcagagcccatctgtggatgttgctacgttcatgttgtatattcagacatctctgggcctatagatttcttgaaaaaaaaaggaaagaaaaaacaagaatacatcattacatagactgtaatctt

SEQ ID NO: 126225 - DNA, 720 bp, Zea mays
  Clone ID: MRT4577_46586C.1
ccggccgggaagcctcgcgccgctcacctccccaacgccatggccagggacctcactctctgcgtgtagcagcaaccccctggctcgcgcccacctggctacaaatggaaatcgaagtcgcgcccgcctctgctcttgcgcgtcccggccatactcgccctcggtgtgccgtcgtgtgaggactgggtaaaagggggaaaacatggccaccgttatcgaccgtggttctcaaccacaccgcgtcctcggagggtggtcgcataaccttttcggtgctcctcgtccgtggtcgcagtcggttcaggcgggaattggccaccggtgctcaggatttattgctgacggtgggggagcgccgctgtttcttccccaatccatggacagacaacttcatcgccttatagccgtgaggtcacgaggatctgaagaatcaccctggtaactggaatctcaagtgccaggtcaagaacaggtaccactggatgaggcgcatggtggatgttgcgctgtgttcgtgagaggtctaggtcgtcgtctcccagttgacttgcgccaaggatgatccttagtccgttctatatttatcctttattttgtgagactttcgctatgtaataaatactctgattatattgtgacatttatgtatatacactctgttattacatatgttgtcttctttggcgcatgtatgagatgcacccgactttgtccgcaaaa

SEQ ID NO: 126226 - DNA, 701 bp, Zea mays
  unsure (1)..(701): unsure at all n locations
  Clone ID: MRT4577_46587C.1
ccggccgggactgccctgtcccatggttagctctgctgtttagtttcgccgtcgatccgtctgctaggccacgtgctataaagcgagaggttgccagaggcccagcggatctactccagcatccacggccatgccctgcgtcggcgatcgcgacggaggaggaccgagtccgaaatggagggcgcgttcgattcgatccgccagccttcggtccagttcggtactcgtcctagtcaagggcgatgcgccaccaggcaggcaggcaccccgcacccccgtgcgccggcaggcattgacatccccgcgccccgggcaagtggcgggccagggatcacaagtacggtacggtcgggtcggttgagctgagcgtcgtcgtccgttgcctgttgccgcgtgccatgccatgcggatgcggccatcgtcatatctatctccccagaccgatcggatcacccgcaggccgcaccgacgcgggattcgctatcctgccggcgtcccgggtggggggccgaacctggcgttcctctccagcgccgacgcccgatttcctccgncaatcttccggtgcgaccgggacccgacgacccagcactgtgccgtgcccgccgcggtttcatttagccgcagancagagtccattatgtatgctgggccccctattattcgcatcgcgtgggccgtctattcgcgtcgcgtcgcgt

SEQ ID NO: 126227 - DNA, 2232 bp, Zea mays
  Clone ID: MRT4577_46588C.1
gccgggagccccacttctgtatcggaacagacacccgtttcgccgtcggtgttacattcttcagatcgattgcggatttattgtatgtcctgcacatcgtaataaagttcagaacagcatatatcaatccaagctcgactctgagggtgtttggaagaggggatcttgtcacaaatcccaaggaaattgcgtggaaatatatcagatctgacttagctgttgatgtggcagctgctttgcctttgccacagattattgtctggtttgtgataccagctataaagtattcctctgctgagcacaacaataacattctggtgctcatagttcttgctcagtatcttccaagattgtatctcatattccccttaacttatgaaattgtcaaagctactggagttgttgcaaagactgcttgggaaggagctgcatacaacatggtgctctatctgatagctagtcatgtgctaggtgcactgtggtatttgctatctgttgatcgccagacattctgctggaagacgaactgcctgaatgaaactggttgtgatcttaagtacctagattgtgacacgacaccaaatgctacatgggcgaatacgactgctgtcttcagtaattgtaatgctagcgataccaatataagttttgattttggcatgttcgagcctgcattgtctaatcaagcccctgctcaaagttttgcgatgaagtatttctattccctctggtggggattgcagaatttaagctgctacggtcagactcttactgtgagcacctatcttggcgagacgctgtattgtatattcttggcggtacttggtcttgtcttgtttgcgcatttgattggaaatgtgcagacctacctgcaatctattactgtgagggttgaggaatggagattaaagcaaagagatactgaggaatggatgagacatcgtcagcttccttgtgaactgcgggaaagggtgagacgatttatccagtacaagtggcttgcaacaagaggagtgaacgaagagtcaatattgcatgctctgcctgcagaccttcgacgtgacattaagcgccacctttgcctgggtcttgttcgacgggttccttttttctcccagatggatgatcagcttcttgatgccatctgtgagcgtcttgtatcatcactgtgcacaaaaggcacatacattgtccgtgagggtgatccggtgacagagatgctcttcatcatccgtggaaaactggaaagctccacaacaaatggtggccgcactggcttcttcaattcaatcaccctgaaacccggtgatttctgtggcgaggagcttcttggatgggctcttgtccccaggcctactacaaatttgccatcatccactcggacagtgaaggcactgatagaagtagaggcctttgcgctccaggcggaggatctcaagtttgttgccagccagttcaggcggctgcacagcaagaaactgcagcacactttccggtactactcgcaccactggaggacgtgggcctcatgcttcatccaagctgcctggagacggtacaagcgaaggaagatggcaaaggacctgagtatgagggagtcattcaactccgttagattagacgaagtggataacgaagatgacgattctccgcccaagaatagccttgctctaaaattcatagctaggactagaaaagtgcctcagaacatgaaagagttgccgaagataacgaagccagacgagccagatttctcagctgaacccgaagactaaagttgtctttgcttatgctattatgtacagtggtcatagctgactattgtgaattgctagtcctatttggttcgtgatggaggttacaagtcacaactaggtatggtgaattgaacttgggttgacggtgccatctgtggatgtgaggaaggtagcttgaatctcaatcagagcccatctgtggatgtgaggaaggaaaactcagaatatcaatgaaagcgtaatgaagcttctgactggtatatagactgaatggctgtaagttaactagttgctacgttcatgttgtatattcagacatctctgtgggcctatagatttcttgaaaaaaaaaggaaagaaaaaacaagaatacatcattacatagactgtaatcttaaacatctgacattgaagggtgtggctacgttgtccgtggccgtggaggactcaaaaaaaaaaaaaaaaaaggccccta

SEQ ID NO: 126228 - DNA, 305 bp, Zea mays
  Clone ID: MRT4577_46589C.1
ataagattcatgtaaatttctgatgtctatatttacaaaaatgattttaatgttttgttacactgacttgtgtttgtactcgttctcagtgtctattgcataatttcctaattttcttatgctatttttctgaaatgagatgtgctaattttatttttgtatccttttacttatggttgatcaagttttagtacctgtttgagccatggaatgtgcaaatttcttttggaaccgcagtggagtttccaccctttaatttatcatagcaaacgtgtctacactgttctactatggcgaagggtgct

SEQ ID NO: 126229 - DNA, 441 bp, Zea mays
  Clone ID: MRT4577_4658C.1
ccgacgaaaagtttctttaaaggatctgccaggccttcaaaaagggctttttattatctcccccttcaactaactaatatatggaaaaagcaatttttgggtatcctgccgacaaaacccatgaaaataacacaaatatgaacgggtatcaaacatcgttcaaaaatttgaggcatttgcccagggctccaggcggtcttttggattaaaaactgtcatagccgtcactcataagaaaacgggccacaaatcaaccatcacattagtcgaatggaaaaaggtccaataacagcagcaactttttgagccttctgcgtttttgattaatacaggcctttgagcttttttttcgctttccgggcttctcttttttcttttttaacgggtgcctttctggccttcttctcctttttggttcccttctcagctccttttttaaat

SEQ ID NO: 126230 - DNA, 555 bp, Zea mays
  Clone ID: MRT4577_46590C.1
ccggggagaaattcttctgtcataatggaggtgtttcccgtagtgcttttgctttaaaaaatggtaacttctgttgcacattgcattgcattgcatttttgacctcttatttgttctatatcaaactgtggatatctcatgttcttgtacttatttaatgttcgttttggcccctgttatgatcagagttgacgattttacatgaaaatatgtcacctatcatcctatactgtagattttttaaacagaatgcctatgctaagcccacatccaaccatgacaatatgtttactttgacatctggtttgaatatctttacttgagaccaataatgtacaggtcgttggttgcgtatgtgctgcctatgaccccatgtctcctttacggtctttactatggtggattccttatccagttcctgattgaaaagaatggcatgatgggatctcttccaaaaccatatggatattttgtgcctgatgttattgttggagctgtagttggattagtggttggttggtttttttggtcctctatcacctgttgctagtcgtt

SEQ ID NO: 126231 - DNA, 228 bp, Zea mays
  Clone ID: MRT4577_46591C.1
cgggcattaatttctcccgtctgccctcctcctcttcttctcccagctgcgtcgtcgcccacacgatccaccagcaccagcacctccccctcccctccccctcctcgccgtctcccaccgatcccaacccgaggtagctcttcgttgggttcagcatgggcccggtgaaggagggcgccgacatggaagagggaaccctggagatcggaatagagaacaggacagaaa

SEQ ID NO: 126232 - DNA, 232 bp, Zea mays
  Clone ID: MRT4577_46592C.1
aaaaaaaaaaaaaaaaaaaaaaaaaaaaaaaaaaaaaactaaaaaacgccattaacctttatctccggctattctcccactttgccatattttgaaaaaaagaagaccaagacagtccaagacgtaccagaagaaaaaaagaggaaacaggcccacccgcgacacgagactagttgccccggcccctctgttgcaacggctctgctaacctcggtcggaatgacccacaaat

SEQ ID NO: 126233 - DNA, 857 bp, Zea mays
  Clone ID: MRT4577_46593C.1
ttgggaccctcgaggccggccgggagggagaagagaagggagggcgaggccactggctgtgtaggcagcagccagccacacagacacagcttcgttcccatctcttctcgttcttcatcacctacttgcctactatatctactagccacgctagctagactagccttagacgtagctagctcactagctgcttgctaggtgtgtaccgatcgtccgaggtaggagacacagcacgcagcaggggtatggggaggccaccgtgctgcgacaacggcgtcggcgtcaagaaagggccttggacgccggaggaggacatcgtcctcgtctcctacatccagcagcacggccccgggaactggcggtccgtgccagagaacacagggttgatgaggtgcagcaagagctgcaggctgcggtggaccaactacctgaggcctgggatcaagcgtggaaacttcactcctcatgaggaagggatcatcatccacctccaggcgttgcttggcaacaagtgggcagccatagcctcctacctccctcaaaggaccgacaacgacatcaagaactactggaacacacacctcaagaagaaggtgaagaggctgcaacagccggcagccgactccttccagacaactgcctccaatgcagtcacctgcagcccaaactactacagccccagcagcagtcaccacagcctccaaggaatgcagccgatgagcagctacccccacaccacctgcagcggcggagccccaagcaacaatgaggcgacgactggatactactaccggcgtcgtctcccactctccccagcatggatgagggcatcaccagcagcagcgacagctaactgc

SEQ ID NO: 126234 - DNA, 359 bp, Zea mays
  Clone ID: MRT4577_46594C.1
ctgggcattggctgctgtattcgttgcatcgttcggtgttgcatgtttcaatcccagagctcttggtaccacagcaagaacatgccttccctttctgctcgctgccactgtgctgggatacatggttggttctgggttaccatctggtgtcaagaaagtgttacatccaatcatcacctgcgcactttctgcagatttggcggctgtagcttttgggtacctctccgggtctggacttgacgctgtgctaggtgattacctcacaaaggcgccctctaatcctggagctggtgacctactaatgggttcccttggctctgtgatcatatcatttgcattctcaatgttcaaacagagaa

SEQ ID NO: 126235 - DNA, 668 bp, Zea mays
  Clone ID: MRT4577_46595C.1
aaacgaattaaattatatttacttaatatattgaattactgaatacaattatacctcttccttggcaaagataggtttccgaaagatgcgattacaattatcagaatgcgtgtacagtaaaggaatactgttcactatttataggcacaggacacggcccgtgaggaattacaattatgcccttcataaaagtttacaacattgactcagacctttatggactaaaaggtcattctatctttaagtcggtttgtaataccgaagcttcatgaagaggaaccttcggccatctcacacaagcagcttcagctgaaagccgcttcttcctagaagacgtggggaggtgtcaggcgtgacaagggcgatgccgttggcggcggcggcgcgcccttcatgatgaaattctcgtcggtacaggtgaggcccgagagccagtacagcacggatatgttggacgccggggacgggggcaggtagatggagaaggtcattgcgcagccgagggtggcgctctggtggcggaaacggaggttgaagccgtcgaacattttgctgctgctcagttgctccaacgccgccgccatcgctcgatccgcgcggcgcctcggcttcgccttccgagttccgatgcggtgggaccgtggtccgtgggaggtgcccggaggccg

SEQ ID NO: 126236 - DNA, 4179 bp, Zea mays
  Clone ID: MRT4577_46596C.1
gcacgaggagagatagtctcgagttttttttttttttttttttacgtgaatgtaaagaacatttttattcctaatgggaacataaaacgtacaacaaaattgcattccagatttccttctcaaacaacaatctcggcgtcacctcgctaaacaagggataaaaatcaactaggatggatgcctggccatgatttgagaagggggaggggagaagatcgagtcagtcatgttggaaggacagctataaaaactctggccatccacattgaccgcggtaatccaatccaatccaattatatttcggaagatcaggacatgctctctctgcactgcactgctgtgtcataccgcgattcaactgtctgtcagcacctcacaaagcaatgcctgctccacgtaatgctccatacaatccagtaagcagctatgcactcttatgcagtattcagggcctgttgcagctgagcaaacgaagatggatggatcctgccgatggcagcgttgaatgctgcatccccatggaaaacagcacatgcttttaagttctctcttaacaccatctctagcgatgtttgtttgataggatctgaatcctttacctggcgctttctcagctctttgcttgaagtgttggaataacctgaaccatcgttgcctatccatgaagagcttgtgatatcgccgctagtatcgtcatcagtctttacttcacggcttcctataatgacagtagtgcagacactcagtatgtcatcaagtttgtcaatgacctgaggtacctgtaatgtcaggattacagaaagtgccattgcgtattccttctgctgtatagcatttgcgtcatctaccttgtcgatccacatatcaaccaaagaaaaaagcagattattgttcacagaaatccctgcttgttggatgcttgccaaaagagcaggctctgataatagttgtgccgaaaagtttgtattcatcaccagaagcctagcaagaatcgccccagaggatgctcggacagttgtcctagacgggttttggccatcatcttgactcaacgaaatgaaggtaagtttctgaagagcactggatatcaatggtggagcttccagaggaaatatctgaataagaagatcaacaataggaagtgcagtgagaagtcctttatcattgacatttccaacaatagtatcaatgatgttagctaggcttgcaccatggcttttcaaaaattctgaaccgccaaaaataatgtaatcctcaattattttcattgtgacctccagatggtcaaagcttctattcatgatgcccacaaggtaagggaataaatccagaagttgaggtacaatggaaggggcatttgaaagggttgcttcccacaacaaaacactgtcctcaagaagattaagagcatcagggctgtcaatattgataccactttgcagtataggaataagcatgtggtaagaaagaggtgactggaatccaagcgaagaaacaaaagttctaagtgctgttagtaattgtatctgtagcaagctttcacccgcagattcattccatatcatctgaaaaaattgtgatagctgacatgcaaatggaataaccttgtcccccgcatgttcaagaagaactgaaatgaagttcaacacttgcacctacaaagaaataggtaaagccgagttggttaggtggtctgagtagcactcctcaggtcctaggttcgactttccgtgggagcgaatttcagctgtggttaaaaaatcccctcgtctgtccaacgccaaagcacaggtctaaggtccagcccggtcgtggtcgttctcacatgggcttcgatgtcactgtgtatgggtgggccagggattcgggggttttctcgacggtcttcttaatataatgctcggaggctgtcttaccccccgcaggtagagttttaggagagaggacaaacctgaaaattcaaaaatgtagatgtacaagagttgttgcgcaaaaaaaaacacacaatactaactagatcctgccaaacataaccattcactgctttctgactaacttttactcggcatgttattgactaatagtacaatatgaagtttcaatgcctacaggggcatcaggttaaacagaaggagaataggaattgcggttttgagatgcaaacctttgaatcaaattcttgtacatcttctatcaacttgaaactcattgtccaacatgtaggaagacactcaaacaaatctaattcagaaaagcaagattcttggaaaagataacagagagaagagcatgctgctagcctaacagctatatcattatcctgcagcaacccaaccaaagcgcggtataccaatttccgagtgtcgcccttgatctcagaaatccaatgcccaagtagcaatgcgatttttctacgaatgatacgcatattggggtgatgatttgaaatttcaatagatagagatccatggaaccattcattaaaactgagatagttcgaaagttcataataaacatgcccggcagctgtataggaagcatcctttaaaagcattcctgcagtaacctctgtttcttgtggtggagaaatagccatagcttcacgaagaacagaaacaacaactggagctagaagctgaagcgacacgtgatcatgtgagcattagagcattgaatatactcacagccacaatgaaaacttaaatgttcacacctctcggtacttctcgaagataacaatgaagagggcttcagcacatggccgttttttctcggtccactgaaccaaattctgctcatggtggaaggactcaggattctctgaccactcttccaaatcctttgctgtgaaaatgaagtacctccttactaaaatgttgcaaagcagcacaactcgatcaccagacaaaatgaccttcagcatgtcactagccactgctgcgaagtttttcttcctttgctccagacttaaaggctcattttcattgatcacacgtcccatgggacttggtctgtattctttgcactccagtactgatttaaccaaaaccatgctttgtataaggaactcctcaaaagttgtgccagtctgttcaggatttgtaatcatattcaaacagaagtcaactgtagctgaaagcacagtttcgtgaacaaaagaatatggatgtctgccttgtagagtaacgaggactttcatcaacttagtgcatgccctttttgcaaagtcacatagtttagcatgcttgtctttgaaggtgtcgtaatatggaagaagggatttaatggcagtcaaaactgttggacaaacttccctgacctgccagacctcctgtgcagttcttgaatcactagcataacctgaaaaaattagtagccggacaatcattaggcagagcaaccaccggtcgcaaatcaaagcaaggtcattggattgctcaaaaacggaatctatgtcattccgctgtgagagcatagaaagattctgcaatatagtctgcacatcactcttccaaaggttccaggtatactcaaacaaatggccagtgatctctgcatagttcttctgatccacagcaagccgtttagttgacagctcctttaatgttcgaaacaggaccataaacacgcgatgtgaagcaagaacgtcagcggactgcagctgttgtgccaatacagacagaagctctggccactcttttgggtaatccaatcgtgcaatcttggagattaatacagctagctgcagtgcaatctggctattttcctcacgcatgtttagcaaaagatttttccgaaggtggtccttctcctcgttgctaattccatacgaatcgcgacgatgccgccagtagcggttgatactgttcttaaaatacaccgtggcgagcaggcggacatcctcccgacaagccaatcccctggccgagatgatctccaggaggcaggagcagaagcccgggcgggtctcgcactgcgcgagagctgcctccgccgggcgccgcgccgcctcgtcggcgctgagcgaattgacgaggacggtgtacatggtgggcacatcgctggcggagagcgccatttcgcaacgcccaaaacggtggcgcgggagagagacagtgggtggtggcggcgacagaaggaagtggtggtggcggcgacggcggtacgggatgatcgaag

SEQ ID NO: 126237 - DNA, 385 bp, Zea mays
  Clone ID: MRT4577_46597C.1
ggaaccaaattccggttcttaaaagacaacgggtcccagggaggggaaaatttccgcaaaaaaaacacagcggaaaggggttttaaaaacccccagctaaacccaaaaaaccctaaaacaagaaaccggggtattacggccccggaatgggacgaaagacagggggctaacaggaaaacaatggggccaggttatgtgaggcgggaaacaagaggtttctagggtgcccaaacggcatttcgggggcatttttggcccccaattgggggggtaagggttatgacccggggggggaaattggaagggggggccccgacaatatggaaggggccagtgaaccggacttgacagggggccccggacccagaaatccaagaatggggct

SEQ ID NO: 126238 - DNA, 215 bp, Zea mays
  Clone ID: MRT4577_46598C.1
tttccacccagacacaggccaagcgggcccattgttgtccaagaccctggaatcaccgagcaggagtcctctctgtttctgactctctccttagggggaagaagaacaggacgaggcctatgccgaatagccaccccaagcaccagagcgtgatgctacacggggactgagccctggaggctctctcgagtgcagaggccatcgaccgtgtcccg

SEQ ID NO: 126239 - DNA, 948 bp, Zea mays
  Clone ID: MRT4577_46599C.1
catggatgcattatctaaactttatcttaacctagaagttcttgacaatgtgggccgttgaaaatgatatctttgaaatggaaaattatcttctctcatagtgagcgcattgtatgcattgctcaatgatgtagcacaatggatttacggtgatgctgagtgccctaattcaacaataggttttcaatttctgggcactgtagtgaaatacttgtggctattttctgctgacaagtattgggaggattgatgttgtttcagattataaaatgaggctgaggcttcctgcttcttgtctctgccactgaatcaacaaagagcttcttcatgccttgagttgcttaaatccatgcagctggtttttcaaatcccactccaattcaagctcaaacatggcctgttgcgctgcaaaaccgggacatagtagctattgctaagacagggtctggaaagacgctggggtacctaatccctgcttttatacatctgaggagatgccacaataatccgatgctgggccctacagtattggttttggcccctactcgtgaacttgcttcacaaatacaagccgaagtagttaagtttggtcaatcatctagagtttcttgcacatgcctatatggtggaacttcaaaggtccctcagctaagagaacttgagcgtggagcagatattgtggtagcaacaccagggcgtcttaatgatatcctggagatgaagaggattaacctccatcaggtttcattacttgtgcttgatgaagcagaccgcatgcttgacatggggtttgaaccgcaaatacggaagattgtggatgagcttcctaatgctaggcagactctaatgtacactgccacttggccaaaggaggttacaaaaatagctggggatttactgagagatcctgtccaggtgaacattggcagtatcgatgaacttgttgct

SEQ ID NO: 126240 - DNA, 1955 bp, Zea mays
  Clone ID: MRT4577_4659C.1
agagagaggccgcggaaacgtgtgagcacgctcaacacaaaactgcgtctcacaagcccaagaccggtgctagagtcccgggtgtgtctgtgtgtgggggattgcaaccaattgccatcaatccaggcatccatccatccacccgccccgctgacggcggcaatggcccggctcgtgctctccgagtgctgcggcctcgcgccgctccgccgcctgcgcgccggccggggcgccattgcggcgccgtcaccccccgcgctctccgcggcgccgcgccgtcgtcccgcgtccgcgtccatccaccgcgactgggcgctccgcgtctccgcgcccacccgcctcgcctccgccgccgtcgaggaggacaagccgagcgccgcgccggggcaggaggagggcgcggcggccggcggggagttcgacccgggggcgccgccgccgttcgggctggcggagatccgcgccgccatccccaagcactgctgggtcaaggacccctggcgctccatgagctacgtgctgcgcgacgtcgccgtcgtcctgggcctcgccgcagcggccgcgcgcctcgacagctggctcgtctggccgctctactgggccgcgcagggcaccatgttctgggcgctcttcgtcctcggccacgactgtggacacgggagcttctcgaacaaccccaagttaaacagcgtcgtcggccacatactccattcctccattcttgtgccataccacggatggaggattagccacaggacgcaccatcaaaaccacggtcacgttgagaaggacgagtcctggcacccgctaccagagaggctgtacaaaagcctggactttatgactaggaaactgcggttcaccatgccgttccccttgctcgcgttcccgttatacttgtttgcgaggagtccagggaagtcaggatcacacttcaacccaggcagtgatctgttccaacctactgaaaagaatgacatcataacatcgacggcgtcctggctggccatggttggtgttctggccggtctcacctttctgatgggtcctgttccgatgctaaagctctacggagtcccatacttggtatttgttgcttggctggatatggtcacatacttgcaccatcatggccacgaagacaagcttccctggtaccgtggaaaggagtggagttatctgcgtggaggactgacgacgctcgaccgggactacggatggatcaacaacatccatcacgacatcggaactcatgtcatccatcacctcttccctcagatcccgcattaccatctcatcgaggcgaccgaggcagcaaagccggttcttggcaagtactacaaagagccgaagaagtcgggtgctctgccgtggcacctattccgggtgctggcacagagcttgaagcaagaccactatgtcagtgataccggagatgtggtctactaccaagctgagtcgaaaacgagcacctctgcacaaaaatccgattgacagggagtatagagcgtagcgtgttcttcatttttctcggggaggggctgtgcctgaagacctgaccagcctccacctctgattagcgtgagtggggtacgtcgactcaagaatgtaagctggcgaagtagtaccatgtatgtatggagagggttaaatgtaattctttccaatggtccaaggcggatgctgcttccgatgtagcagcatgcgattctttggacaagaggtatactattacagtgaagagtgaaaaaaagagagagttagctacatagaaagctttctgagctctatacgtactacctccgttctcagatatttttgtcgtcagctcggtcatttttgaactaaacggcgataaataaataaaagaaacggaggagtatatcttattaataaaaaaaaaaaaaaaaaaaaaaaaaaagcggccgcgtggcgatctagaacgctcaggaggg

SEQ ID NO: 126241 - DNA, 829 bp, Zea mays
  Clone ID: MRT4577_465C.1
cttgttgcgattgtttttttttttcttttttttcgcaaatgatatagcccacacgcaaggtattgacacgctaagcgtctttctgcatgctcttatgcatattaaaaataataaagaatctgtcgaaatatagcttcttgacgggaaggtaaaaaaaaaacagaaagggagtggagcatttggccaagtaaatagatgcttccactatcctgtagtaacgggctgctataaatacatgcgtctcaacttctgccagcgagcctttgctgatgcaggtgttggttttggcctccccactgctgaaaggctgacgccgtctccttcaactcctgaaaggcgcgcatcgtatcgacgtcgaaaccgcctgcaaactggtgcactctgaaggcaaatcggactccttgaagcaccagctcctcttcgtcagggccgacctgtatggcctgaatctctgaggaaaccctcctcaggtacttcattgccagcttcactgattgcagtttgatctgactaacaattccagtgtcctgcatccactcccatggaatctgatatccacggtaccggctcatcgcgccgtctcgcacacgcacaaggctgtacactccatgctccaacttctcgaagacggcctgcatcttcttgagagcagaagagcagggctgccgggggtcatcgcagaaggacgacgcctctgactcgaccttcttcaggtcgcggtacccgaacgcggcctcacgcagcgcgtccgccttcccctccggccagtcgaagtgcttcagcaccgccctctcgtccaccaggcgtgagagctcgacccacgaatccg

SEQ ID NO: 126242 - DNA, 194 bp, Zea mays
  unsure (1)..(194): unsure at all n locations
  Clone ID: MRT4577_46600C.1
ccccaaaggncanaaacaagacagncgagggaaggcnacnagagccgnaggagagagcngcngnngaagncccagaggagnccangggancagnngnngagcnnnnagggaaaaggcgnggacaganggnngacanggaagcnaacgggacggagggaacaacanngcngaaanacaagannccnaccagaggc

SEQ ID NO: 126243 - DNA, 621 bp, Zea mays
  Clone ID: MRT4577_46601C.1
ggggctttcaatatacatccgggtctcaagtcgaagaggttaatcccctcccgttccactgttgcccaagtccaaccaccagcgagatggcggggaccgtgaccgcgaccgcaaccacggccaccaccgaggtcgggaccacagtgaccgcagccacctccgagatggaggccaccgcgaccgcagccacctccgagctggaggccaccgcgaccgcagccgccatcgggccgccttcagccatccccggctactgtctgtgtccagtgcaccaacatcttcctctgctgcaattattacctatactccaggtgtggtttaggaatctgacttgggactctagtacctaatttggcttgcaaatatcacttgtatccaagttagtaaaagttttcagaactcaggtgtctggataacagtaacacttacaggtactatgtgtctcatctgatcttttgagctaaccaatttgataaccaactagacatctagcagcattttgttcctcctaccaactccatctggccgcaatatgcagatcacaaagtttgatctttttagtagtgtgtttttaaataaaacatgtcttttgaactattgttctttaatatgttcttatgt

SEQ ID NO: 126244 - DNA, 539 bp, Zea mays
  Clone ID: MRT4577_46602C.1
cccacgcgtccggtgagcagcagatagaaatagctgagcaggagctcattgaaggtaagttgtgcccttgaccactttttacccaataatgttctttaatatcacttattcatgcataggttaattttgatggtgttggggcgaaggcgaagacgctacccttcgctctagccttcgtctatctcgttgcgccaacgggagcagaagaaccggcaaggtccacccttcgccttgcacactacgagacgaaggcctacgacgacgtcgccccatctcacatcctcactcgacctagaggcccacgtgggattcagcccattgtaacaggccccgcacggagaagtgtgttacgggcccgatttgtaataacttttctgtaatgacagtatgtaaccctcctttgtaggaatattccggggatagtctagctgcctgagggtacatgcgtccttacattgagacgttgggcactcaggcacctataaatacccccgtacagtgcccttgagaggctagattaacagagctattgccatctc

SEQ ID NO: 126245 - DNA, 834 bp, Zea mays
  unsure (1)..(834): unsure at all n locations
  Clone ID: MRT4577_46603C.1
acccttctccgtcctcctcctcgcgccgtccctccagtccctcttcgtgcccccgcgccgccgaccaccgagcagccatggcgaatccaccggcggcgggagggaagtcgttcctgcaggccatgtcgacggtcaccgaagaggcggcggtgccgctccgcgtcgtccagatggagggactggctgtcctgaagatcattaagcactgtgaggagtttgcgcctgctctggttacaggtcaactgcttggtttggatgttggtagtgttctggaagtgaccaactgttttcctttccctataagagaggacgacgaggaagcagatgcagatggtgcgaactatcagcttgagatgatgaggtgcttgagggaggttaatgtcgacaataacactgttggatggtatcagtcctgcttgcttggatcttttcaaaccgttgagctgattgaaacatttatgaactatcaggagaacatccggagatgcgtgtgtattgtgtatgacccatctaggtctagtcaaggagtgctagctcttaaagccctgaagctcacagactcttttatggatctgtaccgcaacaatggtttaactggagagaagctaagggaaaagaaattgtcatgggttgatattttcgaggagataccgattanagtgtccaactcggcgcttgtcagtgccttcatgaaggagctggaacctgagtcacctgtttcacagtgtgacttttgacgtcttaaattgtcgactgcgccctttatggaaaggaacctagaatttatgattgggtgcatggatgggcctttctcagagcaaaacaagttcccat

SEQ ID NO: 126246 - DNA, 354 bp, Zea mays
  Clone ID: MRT4577_46604C.1
gggtgggggtttttttacaaaggacataattttttttttgtctaaaaaaccgggccccaaaaaaaaaattttttatggggggaaaataaggaacaactttgggggaatacagggccggaaaaaatgggaccactcagggggttttaaactaaaaaagggggggaaacaccaacacgattatttggggggttaaggagaaggagacgggattagtttccaaaaaatatacccggataagacgcccttgtaccaattggggttcgggggaaaggaaaatccccattgggggaacaggttaagggaattggaagccttaaaaacatggggcccgaggttcctttaagggggtggggg

SEQ ID NO: 126247 - DNA, 227 bp, Zea mays
  Clone ID: MRT4577_46605C.1
cctttctttttttttttacgtgtttacaaatgctactaggcattgttattgtggctagcataaatacatgactactacactatacactctccataaatctagtacatgggtgacaatcgaatcatgtagataaaaaaataacgccgactaggatagctaaatactcaagttgacggtcataaactggatcttaaactacacgaaacacttagtgacctatactcact

SEQ ID NO: 126248 - DNA, 365 bp, Zea mays
  Clone ID: MRT4577_46606C.1
atatgtacaaacctaacctgtgtttcggagatgccatttttcttcttgttcggctgaacctgaatgacgttcagaactggtgcaccaatgcaccccatgttcccatttccttgccatttcaatatttgtcaccactcaccagtgatgctggaatttcctttctggtaaatctacgcacctcatgtccaaattattcttacttgtgcatgttttcatatgatttactccttcagatatgcacaactatttacaagccaacataaaatatttgattttagagtataatatacatgagtagtttagaattagatagtgtgagttgcattttggactggattatttgaacaaaggcattaaatgtggca

SEQ ID NO: 126249 - DNA, 417 bp, Zea mays
  Clone ID: MRT4577_46607C.1
ttacgtagcgagcggccgtcctttttttttttttttttttttttttttaagacattaaaccatttactgtgatccaaatattacccggaaggtcaacctccaatagcgggagaactaagatctcggctcctactaaggatttttagtacgggcaacaaaatacgctgtacggaaaccctgcctcttaataaacagttttctttaccctcatccccaaatgggggggctgtattacacaaacgggttgcaatttacaactagccgcccgtttgctttgaacccacacccctgaacaacttgaaacaacactaaacggatctggttgcggaatcacaggaacaccacacctggaaactccggcacgttttcgcctaaaccttttatgatttgggccggccgccgggacccctggggctt

SEQ ID NO: 126250 - DNA, 320 bp, Zea mays
  Clone ID: MRT4577_46608C.1
aatcagacgacgcagggcgtttttaacaagaaatttgggtttccaataccaaggagtaaaagttactctacccaaccggaaagcatcgagcgaaccgtagaaaggaaggttgaacatagcattaatcagtgcacagccgctagttctcagcgcaaatatgccatatactatttaacagatgaaaagctgccgtgcggccattacaatcatgagcgttaaaagaccagcaaacttgacaggattgccatgagaatgcgctctattaatattgccaaataattgcgccatgcaaacgcaatgatctacaggggcaaccaggt

SEQ ID NO: 126251 - DNA, 202 bp, Zea mays
  Clone ID: MRT4577_46609C.1
gacgcgctggcttctcttcaccctcctgttccttgtacggatcatgaggtactccgaggtccggttaccgggtcacccgatcgagactcaatcctgagatgttgaataccgatgcttctgacgctgactcaattgctccaatggcgaccaatagctccacaacgcctgcatcacctactgataggtacatgcatgcaatatc

SEQ ID NO: 126252 - DNA, 774 bp, Zea mays
  Clone ID: MRT4577_4660C.1
cctcgaggccggccgggatacttcttccttcatcggttcatcgccttcgcagacatctgctgcctacctcttctggctgctccatgtccatatcgtctcgtcagacgctatcaccagatagaaaaccaaccatgaccctaggacaaggtgctcgccgtggctgttccctagtccccacgaccacttacatcgcctcttcgcttcaccagaaaccgcctccaacagttcccctactgtgctgatcttgctgctcgacagaaagacagtgtcctccctctcctgctggcccctgtgcgacttgcctgcaacgagtgcttgaccaacgcttgaagacactgtactttccagcttaggggctcctgtcaccctacccctgtcatccgcctcctcgagatgatcccgcgcgctcgggctgataggatcccaactgcaatgtcgagggcctgtcaacactctcccgctgcctggactacggcgcacactgcccactccctcatttccatgcgatgctcggacaacaatgctgcccatgcctctgagctctgcgtactgataactgcaagatccctgttcgccaacagatcttcttctagcatagagtgggcctatcaccatgtacatgcgcgctgactactctgaatgacgagaccgagggctgaattgtccctgatggtgtcaacgctcagctgctctacatccacaacagacttgtagaacatgctcctgagatagctttcctcgatgccgttgcttaagtgcggatgcgaatcctga

SEQ ID NO: 126253 - DNA, 392 bp, Zea mays
  Clone ID: MRT4577_46610C.1
atgcgtagcaaattttctgcttgtatctatcatcgaaactgttcattcagcaactaaagcggttcaccgggatttattaagttagatgaagacattttatcccctctagcagtaaagaatgaactgtacacataccaaacacttgatttctgggaacatatcacaaccccagagatgtcttaatgaactctggagtatatctctctcagtattcccatacctattctcatcttttagactcatgacatggcataaaaactagcactatttgtggcgatgtctatatgcattcatttgacaaagtgcatcctacttcaaagaatggtcccaatgtctctatatcagccaatgcacgctttgtatcttgtgccaggcttattaaattgcataat

SEQ ID NO: 126254 - DNA, 625 bp, Zea mays
  Clone ID: MRT4577_46611C.1
ttcgagaatatgcaaccgcaccccagcgcatcgcaactcgatcgtcggagcaagcaagttaagctagcacccttccttccttccttccttcgcgaggcagccggcagggctagtatcaagctcgatcaaccaaccgatacatatggctgagaggacaagcgcgatggcggcgccgcggccgctcctgcgccggatgctctcgttccgggagccactcctgctcctcccgtgcttgctcagcgtcctgggcgccgcggcctcgcgcgctggcccgcagccacgcgtcgctgctgcactcgctggccagatcgctcgtccggcccgcgcccgcagccgtcaacgacaacatgaagcacgccgccgcgcacgcccgtcgtccgccgccgccgccgcaacgcgcccggacgacggcgaggacgcgtccgggcgctggagcaaggcggaggtggaggcggtcatggcggcgatcgggctggcggcgtccgggcgcggcgagggcctggctgccgccgtgggccgcggcgacgtcgccgggctcttcgacgccgacgagcccagcttcgcggaggtgcggggcgccttcgcggtgttcgacgccgaccgcgacggattcatcggcgccgag

SEQ ID NO: 126255 - DNA, 268 bp, Zea mays
  Clone ID: MRT4577_46612C.1
ttttactcttttttttttggtatcaacaccatatatgtagtgcccgctacttaacctggcgagatatgcccgaccccgagaaaggtgtgacctattgacaccctatgtcaagacaaatgaaaatactttgttgaaactataatggtcatttgcacacatatttagtttatggcatccagccttgatcctggcatataaaacaaccacacagaccgcatttaggatgcctgctcttggattcattatgcaactggatttggtccactta

SEQ ID NO: 126256 - DNA, 603 bp, Zea mays
  Clone ID: MRT4577_46613C.1
attcatacaagttactattacgaagattaaacaagcaataataatgcgattaattctatcgcagcagcgcaatgatccgccacactcgcagggtgcatgcagacacgaaacacagatgttagctttctagacacgcagcctgtgaagccaaatcaccaataaacaagagagagagagaggcagggaggacatggagtaatagctagagagacggagctcgtggccggcccgtcgttaagatctaaccgcggctttaatcaagcgatcgcgataggtaactaaacaagcacgtacgctagggtaggtacaagctcgggtcctggacgtccgcccacggcagctcccggcgctccagtacgccgcggctgacgcggcgtcgccgagctcgaatatcccagcggcgtccagggatgcgaacggcgccatgatgtcctcggagaccgacgacgacggcgccgcctgtgcggcgaggtgttgctgcagctccgaattggtgggcgcttcctcctccttcggctgcgccgccgcgaagctgaacaccgggagcggcggcggagggggaggcgcgaagagggacgccagcgccgccgcctgcccggccgg

SEQ ID NO: 126257 - DNA, 2051 bp, Zea mays
  Clone ID: MRT4577_46614C.1
ctcgaggccggccgggccggggtcgaatttctcactccgatgtgctaacctagtgggatttctttctcctcaaatcacacgctgccgccggctgatcagatccagcgcctaacccggcggctccggcgacggtgagtcgccggcgtccatgacaccggccgcggcgtggtgcgcgcagcaccgcctccggttcctcctaccgtccctcttcctcgcgcccgtcctcttcttcctcctgtcgccgccgtcctctccgcccttcgtcagcctccccgcctccggagagctgcctcctttaagctcgcggctcatatgggcgcagcggcggttggtggagtggcgcccctgcgggtggtggcggacggcgccattgcaagctccgtccaggaggaacgggtacatccgaatagattgctacggcggtctcaaccaactgcgacgcgatttatgtgacggaattggggttgcacgacttctgaacgcaacaatggttctacccaagtttgaggttgccgcctattggaatgaatctagtggctttgcagatgtttttgatgttgattacttcattgagcagactagaggatatgttgaagttgttaaggacttgcctgcagagatagcatccagagaaccatttaaggttgactgcagtaaacggaaaggacattttgattacgttgaaacggtacttccagcgctcttggagcatcaatacatctcattgacacctgccatgaatcaaagaagggatagaaaccccgcatatgcaaaagcttcatactgtcaaagctgttacagcgctctcaggttgaataagaatgtggaatccaaagctgttgagctcctccaagccataccaaaacccttcttatcccttcacctgagattcgaaccagatatggtcgcttacagtcggtgttcatacactggcctttcttccaaatcaatggactccattgaagctgcacgcagggagggtaggaaggtattgaccggtgacgctgcccgcctgtggaggaaccgtggcaagtgccctctgacaccaagcgaaacagcattcatcctccaggcgctaggcattcctacaaacacaaacatttatttagctgctggtgacgggctaatggaactcgagggtttcacgtccgtttacaagaacacgtacaccaaatcgtctctcctgacccatgaagctttcgagaacatgcatggcaacacaaaggctgctctcgactactatgtttcggtcaacagcgacgcctatgtcgccacattctttggaaatatggacaagatggtaactgcgacgagaacaatgcaaggtctccagaggacactggtcttgagcaggagggccttcgcaaactacactgccgctgggctagcagggcagcaactggctaaggctatgtgggacgctcatcgagaggagtatgtcagaggcagggggtcggctctgcccgagtactgcttttgtgagttcaaattgtagcgctagtggctaagtgatatgaggtttacctagacggacacctgttggcttggcgcaactgttagatctcgctgtgattgtgtagacatgaatgagctgttactgcaaacgagatttcagtcagatgagcttgaactgggtacagctgagagacattgatgtgttatgacctggccttctgtgcgagtcagctgcgctgtagtatctagaccaagtggaaatgctcttgtcatatcccataacagagatgcagttcaggtgctgccggacgtgaaacagtagtgtgtgtctgtgagctacaacacgcgggaaggttcgagtatgatgatccatcagccgagctaagaggaaaggggtacttaactggtttggaggacaagcgggcgacagttttggaaattctgttactcttctctaacaaactgtattcttctcccttccagtctcttcatctgttttcgttgtaattctgtatgctgttgaacttgtggagaaagaagaggaacaattttcttctgagattaaaaaaaaaaaaaaaaaaaaactcgaggggggg

SEQ ID NO: 126258 - DNA, 1361 bp, Zea mays
  Clone ID: MRT4577_46615C.1
taaataagaattgctgacctcgaggccggccggggcgacacctcccaataaaaacgttcctccccgtcccactcgccggagcctggccgacgggatgcctcgagattcgcgcccagccgggatgcgcctcttcggcgtcaccatcgcgccggcgccggaggcggatccaccggtacgggatccgagccccaacccgcccgtggcggccagggaggacgtgatgcgtaagtgcaagagcatgggcaacctcgccgcccttggcgctgtcgtggacggtggaggaggtggtgcggacggcggaggcgccggcgacggctacctctccgatggcgggctgatgcagtcgtccgggaagcggcggagggcgcaggagaggaagaaagctgttccttggactgaagaagagcataggacatttcttgctggtcttgaaaagctagggaagggagactggaggggcatagcaaaaaattttgttaccaccagaacaccaactcaagttgcaagtcatgctcagaaatattttcttaggcaaactaatccaaacaagaagaagcgcagatctagtctttttgacatgatgccaagagagctgtcaccagcaccaaattgccccatattaccaccatcgatggcaaaagtacacgatgtggtagctatgacgaaacaacttcagaatagcaacttggaaggaacctcctcttcaaatgcagcatctcaagttggaagagatctccccccagttccatcttttaaggcaacaaatatggatccaagtttcagcaaatttagccacatggagcgcgtctggagaactccctacccattcggaccagttcccagagcccctgaagggacgccttcaccaacggctgctgctgctgctgctgctgctgcggctgccaatgcagctgttccggtctctcaagctaacctgacgactgcctgtactagtaacacattcttgagccagccaaagccaagtgatactccgtcactgcctccgaagggaggtcctccatcagaggaggacggtttggaactgactgttgccccaccctcccaacagaacatgacgaacatgtcttcccagaatgcggtaggcgtgatccaagtcatctaagctaatatattttattttattttatttctctctctctctctctttctctctagaagttactgtggctgttgacagttattgaccgaataaatattaacattgtattagcaatactacatgaataagaagagcatgaggtataagcccatcatttgccagtaaaaaaaaaaaaaaaaaaaaaaaaaaaaaaaaaaaaaaaaaaaaaaaaaaaaaaaaaagagggggggcgccgtgtacc

SEQ ID NO: 126259 - DNA, 682 bp, Zea mays
  Clone ID: MRT4577_46616C.1
ccgggtttaacttcttagagtgtataacaaggacttcagggctctcagaatattgggtgcattgaacgcgaaagatgccaagagcaagaatgacagcagtggcggatctgtggctattcacaggacagggtatgatctaaccactagctctggaagttttcaggctcctattgtggtcatgaagcctgcaagaaccactgagaaacatggggtttcacttgcttcggttgctcccatagctggcctgagaagcctcagaaagttgccggcgggtagatattcatctttcactggcacaaatgacaagatgcagcttcggatgtcaagagatcaatcgaagtctgaggaaactgtcagcagtgccagctcaccaaggcctacaagctcatcaagccccagaaatgtgttaaagaaggcagaacctgaaaggaggtctcgtccacctgtctcaccaaaatctccaagcaagaagtcgaatgaagccgtctccccaaaaggaagaacaagatcgaagcctcctcaggtgaaatgccaccgtgatgaggtcttgcagatcacagggaacagaataagcttggcaaaacaggttgatgtcagcattatggattgcccaaagcctttgggtggtaactcaaccttcgttccagaaagcaatactgctgcaacagcaagccaaaaggct

SEQ ID NO: 126260 - DNA, 236 bp, Zea mays
  unsure (1)..(236): unsure at all n locations
  Clone ID: MRT4577_46617C.1
ccggccgggtcgagggaatacgaacgtcgtaccgagaaaccctttctccctcctccacctttctcctttttcttggccacggcaaaaccacctttcgcccggccgagaagcatggncggaagggcgtaacccggggtcctggggaggccacccccggggggtccgccaaaagagcccccaaaaaaaggggggggttttttttccccgggacctggaattttaacccgggggggttt

SEQ ID NO: 126261 - DNA, 403 bp, Zea mays
  Clone ID: MRT4577_46618C.1
cccacgcgtccgcaaggaggtgcgcgaggaggtcgacaagtacaaggttggggctcctgctcgcgttggtctggtagctactgatgatgctgtcaagccatctggcaacactgaactggatccctaccagacatattacttccatgtgcttaacatacgcaccaagattaacaagggtactgaggaaattatcacccctgtggagctgatcaagaagggtgagaaggaggactcgtacgagtctgacctgctagacaagctggacatgcaaactttctcgtacggtctacaggctaccatgattctactaggatgggtctgcgatcagccctgatgcgcttgacctttctgaggaggacctaatcgagaagtaaaccactggtgtatacatggacggttctgt

SEQ ID NO: 126262 - DNA, 820 bp, Zea mays
  Clone ID: MRT4577_46619C.1
gcaaccatcagtatcatgcagacttcgatatatgccatgatttgcatgggctcatcattgaatagcacttgtcacacctgccggtagaagttccctcgtacattatcagtcatcagatacccaccaccatacacgcttgcttaaacaaaaaagcaagtgtatgtgtttgcgaagagaattaaaggcaggccggcacaaaagctaccccgacgatgacgagtggtcattgccgtcggtcctcctttgcgtcacctctggtgccaagatgacgccatagtccttgatatagtagtcgtcgaacgtgcacgacatggcgagtactgatgactcttggctgggctgccaaacgaagtccaccccgggctcatcagcgaggtagtacacctagtcgttgcaccaccggatgtgctactcctgtgggaggttgagcttcaggtggatgatgagctggacggtgtgacgacgccgttgtcggatgcggtgcctagaacaacccgagagtcgccggcgttggcgacgaccatgaggtccccctatttgaagatggacaacgcggtgcagccgctctggaccgcgtccaagcgacggctgcgccggagcttgccgaacacagtgacgcatgtggccacgtagtactgcttccagaggtcgaactggcagtcgccaagcttcttttcgtcgtcgatgagcgacgccaacgcgagcgtctccttcttctaaatgataaggttcaatggacttctcgcgacgtcgggggcggcgaactgcccccgtcgccgcgatccgaacacttcaccccacgcgtccgcggacgcgtggg

SEQ ID NO: 126263 - DNA, 539 bp, Zea mays
  Clone ID: MRT4577_4661C.1
tacaagctttttttttttttttttttttttttttttttattttttttttttttttttttttttttttttttttttttttttttttttttttttttttttttttttttttttttttttttttttttttttttttaaattttttttaaataaattttataaaagggtaccttttattatgggtaaaaggaaaaaaattggtggggttggaaaagcaggggggtaaaaagggaaaaattgggggggtggggagggggggaaaaaaaaaaggggggggggcggaaaaaagggggtgtgcggggggaaaacctagaggggcaggggaaaaaaggggttgggcggccaaatggtagaggttgtttgtgggtgggaccctcttgagagtaaaatgttgctaactggctaaaccggggattttcctgaggggaagagcggtggtccctcacccaaggggggttggcggtggtcccaagtgtggggggaataaaaagggggaaaaatatgtgagccaaaggacataaaaagaacaaaaactcggaaaa

SEQ ID NO: 126264 - DNA, 417 bp, Zea mays
  Clone ID: MRT4577_46620C.1
ccctggcggtggtctgtgggaggctaaacagataaggccatacacagccacggccgaccacgtcggtctaatcggaactcacatcacttaagactaagacaacgatgcacgtagcctgattctcttatacaccctgacgaaaagaactctctctcgactgcataaccttgaacaccacgacgccggacgcagatctaacggcacatatgtaacgaacggctatgggggatatcagaccattcggtggcctcactgagattagcctcctgtcaaccgatctgctcaagggctgtccagagctcatgatctgcacagtgcgcgactagcattgcggctaccacttccatcaaggacatatgcgggttgatagcgggcacaacaacgacaggcctacacaccaagacgccttcccagata

SEQ ID NO: 126265 - DNA, 169 bp, Zea mays
  Clone ID: MRT4577_46621C.1
acaaaatattcatgtgttttatgttaaatgattctaatcaataaattaggggaggaatagacaccaacgcttgggcaaaacgcccggtgcgcacactgcacactggcccaggctttaagggatgacaacctaaactatgaaggatttgttaagaaccgatggaaaaggg

SEQ ID NO: 126266 - DNA, 741 bp, Zea mays
  unsure (1)..(741): unsure at all n locations
  Clone ID: MRT4577_46622C.1
ctacattgcaaccatcagtatcatgcagacttcgatatatgccacgatttgcatggtctcatcattgaagagcacgtaccacagcttgatatagtagtcgtcgaacgcgcacgacatggcgagtaccgatgactcttggttaggttgtcaaacaaagtgcaccccgggctcatcagcgaggtagtacacctagccgttgcaccatcggatgtgctactcctctacatacatcttgttcgaggacactcacagaacgtcagcaacgaccgtcgtcccagcgcacaagaattcatggtcggtcagtagtgacttacgtggcaggttgagcttcaggtggattatgagctagacagtgtgacggcgccgttgtcggatgcggtgcccaaaacaacccgagagttgccggcgttggcaacgaccatgaggtctccctgtttgaagatggacagcgcagtgtagccgctccggaccgcgtccaagcgacggctgcgccggagcttgccgaacacagcgatgcatgcgaccacgtagtattgcttccagaggtcgaactggcagtcgccaagcttcttctcgtcgtcgatgagcgatgccaacgcgagcgccttctgtcagtggtgtttgttcggngttcccaagtaagaaacatggattcatttttggcgttggtttatgaaaatgactcacgagtaagatccatggaaaaaattacggagaataaatgtcacacatataaaaaga

SEQ ID NO: 126267 - DNA, 1196 bp, Zea mays
  Clone ID: MRT4577_46623C.1
tgcactcgcaccgatttgtttttcagtaaacttgaacattcgatgtatgctatacataatactaagtgcgcaatgtgcctctgcgcactctatagaagataaatttcagtacatgcatcatttacaacaacggagctagaattgctttccttccttttccttggtagcagcaattaagtacgttgcgtacatatatgcgtcgcgtcgtatagtggggcctacttgatgtgccgacgtacccacacacgtacacttgcgaagtcaacatgtagatggtatggagatttcctgagacgacgacgacttcgatcaccggcgcacgcatggaccagcttcgggtggtaggagaaggcatcgacatccggtgcctcgtcaattcgctgcgcaagaaggtctgccgctccgccagcatcgtcgtggtggaggaagtcaaggacaaggcgaaggtggaggaggagaagaagaagaaggaagaggaggagaagaagaagaaggccaaggagttgcaagaagcgatccagaagcactgcccgccgccgccgttctacggcggcccgccgtttctctgcgaggaacagccaacaggctgccacatcatgtgaaaaaaatggattctggcccgccgtttaaatatatacgtatactagtgcgttgcaacgggaacatataataccatgataacttatatacaaaatgtgtcttatattgttataagaaaatatttcataatccatttgtgatcctagccacacataaattttgttattttaatttagctgtttcactactacattacaaccatcagtatcatgcagacttcgatatatgccacgatttgcatggtctcatcattgaagagcacgtgccacacctgccggtagaagttccctcgtacattatcagtcatcaggtaggcaccaccatacacgcttgcttaaacaaaaaaagcaagtgtatgtgtttgcgaagagaattaaaggcacgccggcacaaaagctaccccgacgatgacgagtggtcattgctgtcggtcctccgctgcgtcacctctggcgccaagatgacgccatagtccttgatatagtagtcgtcgaacgcgcacgacatgacgagtaccgatgactcttggttgggctgccaaacgaagtgcaccccagactcatcagcgaggtaatacacctagccgtgcacttccc

SEQ ID NO: 126268 - DNA, 348 bp, Zea mays
  Clone ID: MRT4577_46624C.1
ttgccatccacttatccggagagtttttatttttttgggtcgtttagcaaaaggaaaaaaccaccttattatctatagctacaggctaatgcgaccaggccacatagttttacaaccttccttttaccctaatgacggccctgccgcatattaaaacggtagcgctaaaactctatatgggccccccccttaaacgttcttccccttttcgtaaaaaaatttaggaaaaaacaccccccaaaacctttgcctccgccttttttatatttctccacccgtgacgggaacagacccaaaaactcctttttggtccagggcttttattccactgaaaccacaaacctttaa

SEQ ID NO: 126269 - DNA, 1444 bp, Zea mays
  Clone ID: MRT4577_46625C.1
gccttgtctcttaattttccatatggtgatatggtcctagtcattgtctagaagaactgcttcatcttagatctggagtttttgtgcttaaattaagaatcctaagacaatttttgtctatgatagaaggaaaactgctcaaacaaacaactcagcagatttttggacctggagctctgccaaacccttactccattttcaagattcttgcccttaatggccttacaggttagcacttaacaaccattcttctgatttaacagagagacacatataatagccagtaaatattcagacgccttgaaggcttcaaccacgcaaaaaactgtcatgtactcaatgatctctaaaatctaaacaaaattgcaaacataagtaaacatgtaagcatctgaaaatattaacctgaatagtgctgaatcatccgttgtggttccttagttatcttcttaaaaaaaaccaggtgagtgcccgtgcgttgcaacggaaacatataataacatagtaacttatatacaaaatgtgtcttatattgttataaaaaatatttcataatccatttgtaatcctagcaatatataaattttgttattttaatttactgtttcactactacattgcaaccatcagtatcatgcagatttcgatatatgccacgatttgcatggtctcatcattgaaaagcatatgccacacctgccggtagaagttccctcgtacattatcagtcatcaggtacgcactaccatacacgcttacttaaacaaaaaagcaagtgtatgtgtttgcgaagagaattaaaggcagaacggcacaaaagctacccagacgatggcgagtggtcattgttgtcggtcctcctctgcgtcacctctggcgccaagatgacgtcatagtccttgatatagtagtcgtcaaacacgcacgacatgacgagtaccgatgactcttggctgggctgccaaacgaagtgcaccccgagctcatcaacgaggtagtacacctagtcgttgcaccaccggatgtgctactcccagtgttattaaaactacgtcaaaactctaattagaggttgaaaccacgttttagcgttttggcgttctaaactgtaaaacgcagtgttttatgcattttagaccattagctacttttgggcctagtctattagttacttttgaggttcaatccagctcatgggtgaagttttggtaagccactagcctctctattttgatatttaactttatattattgtatgaaattataatgtattggtatttttcctatgttgtttaaaactacgtttaaacaaagtttaaacgtttaaaagtcaaaatttcaaccatgagcgttccaacgttttatcgttttaataaccttggctactcctctacatacatcttgttcgaggacactcacacaacgtcagcaacggccgtcgtcc

SEQ ID NO: 126270 - DNA, 292 bp, Zea mays
  Clone ID: MRT4577_46626C.1
agaagagacgcctcgccggcacgggaccggaacggaagggccgggccgacccacgcgttcgatgtttgtggggcgtctccgcggccatatattcctctttttgggcggcttactcgacaccgcccccctagttgtagtacacaggtgcctagccagcgcggggggagaaccactcgatggaatcggactaaatggatggggagggcacaacgctggatgaacaaacacaaaattcagattgctgagagggactccctcaatgtaacaaaggtggaggagagactggggacca

SEQ ID NO: 126271 - DNA, 668 bp, Zea mays
  Clone ID: MRT4577_46627C.1
aaagcaagtgtatgtgtttgcgaagagaattaaaggcaggccggcacaaaagctaccccgacgatgacgagtggtcattgccgtcggtcctcctctgcgtcacctccggtgccaagatgacgccatagtcctcgatatagtagtcgtcgaacgtgcgcgacatggcgagtactgatgactcttggctgggctgccaaacgaagtccaccccgggctcatcagcgaggtagtacacctagtcgttgcaccaccggatgtgctactcctctacatacatcatgttcgaggacactcacacaacgtcagcaacgaccgtcgtcccagcgcacaagaattcatggccggtcagtagttacttacgtgggaggttgagcttcaggtggatgatgagctggacggtgtgacgacgccgttgtcggatgcggtgcctagaacaacccgagagtcgccggcgttggcgacgaccatgaggtccccctatttgaagatggacaacgcggtgcagccgctctggaccgcgtccaagcgacggctgcgccggagcttgccgaacacagtgacgcatgtggccacgtagtactgcttccagaggtcgaactggcagtcgccaagttcttttcgtcgtcgatgagcgacgccaacgcgagcgtctcctgtcatggtgtttg

SEQ ID NO: 126272 - DNA, 178 bp, Zea mays
  Clone ID: MRT4577_46628C.1
catacaaaaataggccgcttggttgcttcgggatgcaggcttgcagcttggcaacctggccgaatttggccagtttcttcatgcctcttttatcaagttgttggtggaaaggtgcgtggaacacccttggattttgtgggaaccagatgcctaaggctggttaagccgggttcataat

SEQ ID NO: 126273 - DNA, 118 bp, Zea mays
  unsure (1)..(118): unsure at all n locations
  Clone ID: MRT4577_46629C.1
gccattctcggagcacgcctcgagctacgcatgaaggtcgtcgcttgggaacggcatatnggagttgcacatatacattcagaagtggcacggctcagcgatagcaatgtgaagtcaa

SEQ ID NO: 126274 - DNA, 1666 bp, Zea mays
  unsure (1)..(1666): unsure at all n locations
  Clone ID: MRT4577_4662C.1
atggcgcggctcgtgctctccgagtgctgcggcctcgcgccgctgcgcctgcgcgccggccggggcgccattgcggcgccgtcgccccccgcgctctccgcagcggcggcgccgggccgccccgcgcccgcggccatccaccgcgactnctgggcgctccgcgtctccgcgcccacccgcctcacctccgccgtcgaggaggacaagaggagctccccccttggggagggggacgagcacgtggcggccagcggcgccgcgggcggggagttcgacccgggggcgccgccgccgttcgggctggcggagatccgcgcggccatccccaagcactgctgggtcaaggacccctggcgctccatggcctacgtgctgcgcgacgtcgccgtcgtcctgggcctcgccgcggccgccgcgcgcctcgacagctggctcgtctggccgctctactgggccgcgcagggcaccatgttctgggcgctcttcgtcctcggccacgactgtggacacgggagcttctcgaacaaccccaagctgaacagcgtggtcggccacatactccattcctccattcttgtcccctaccacggatggaggattagccacaggacgcaccatcaaaaccacggccacgttgagaaggacgagtcctggcacccgctaccagagaggctgtacaaaagcctggactttatgactaggaaattgcggttcaccatgccgttccccttgctcgcattcccgttatacttgttcgcaaggagtccagggaagtcaggatcacacttcaacccaagcagtgatttgttccaacctaatgaaaagaaggacatcataacatcaacggcatcctggctggccatggttggtgttctggctggtctcacctttctgatgggtcctgttacgatgctaaagctctacggagtcccatactttgtatttgttgcttggctgcctgccgggacatacttgcaccatcatggccacgaagacaagcttccctggtaccgtggacaggaatggagttatctgcgtggaggactgacgacgctcgaccgggactatggactgattaacaatatccaccatgacattggaactcatgtcatccatcaccttttccctcaaatcccgcattaccatctcattgaggcgaccgaggcagcaaaaccggttcttggcaagtactacaaagaaccaaagaagtcgggtcctctcccgtggcacctgtttggggtgctagcacaaagcttgaagcaagaccactatgttagcgacaccggagacgtagtgtactaccaaactgactcgaaaacgaacacctctgcacaaaaatctgattgacacagactatagaacgtagcgtattcttcatttttctcaggcgggctgtgcctgaagacctggccagcctcctgagacctctcgattggtgtgtgtgtgtgtccgtgtgtgtgtgtgacccgggttcgtcaattcaagaatgtaaggtggcgaagtattatcatgtatgcgagtgagggtataattctttcgaatgatcgaagtcggatgctgcttccgatgtaacgaactgtgattctttgcacaagaggtgtactattacagtaaagagtgaaaaaaagagagttagctacacaaaaaaaaaaaaaaaaaagcggcc

SEQ ID NO: 126275 - DNA, 278 bp, Zea mays
  Clone ID: MRT4577_46630C.1
gtgcatgctggtggttttatgaggacgaaagtggcgatcgaattataagatgctggacaagctgtgggacgacgtggggggcgggcctcggccggagacgggccttgagaagcttcgcaagggcaccaccgcccgttcggttggcaataacaaagacgcggacgggggtaggtttaagcgggcgcagatgatgtgcgttaccccgacgacgccggtgacgccgtcgtcgttgtttgttgaaacgacaccgtgcggggccgggaaagtgtggggcaatg

SEQ ID NO: 126276 - DNA, 292 bp, Zea mays
  unsure (1)..(292): unsure at all n locations
  Clone ID: MRT4577_46631C.1
cgagccggccgggccgggacttcgccgagtacanagcctacgagctgattcatgccagatggagccatgctcgtgatagccgctgccgctggcactcccattagagcagtcgtcaatcgatgttcattgcctaactgtggatcgccgaggccgcacagtatctggaccagaagtcctgctccgtggacgtgaacacccgtcactatttcggcatacagcatccccatcaacctggtggacgccgagaacgcggaagactatgcagcctttgcggcaagattttatcctaaca

SEQ ID NO: 126277 - DNA, 2372 bp, Zea mays
  Clone ID: MRT4577_46632C.1
gggaccctcgaggccggccgggactcacctttgctacgctcggtgcggcccttagcagctgctggagagcggatcaatggcgctcactctcctccgcctggggacagcatttctggtgctcctcctcttctcttgtgccgcagaggcgggcgaggtaggtgtgaactatggaatggtggcgaacgacctgccgaaccctgcgtcggtggtgcagctgctcaagcagaacggcatcaccatggtgaagatatatgacgccaacgcaaacgtgctgacgtcgctggccaacacgggcatcaaggcgatggtgatgatgcccaaccagaacctggcccacgcggccagggacccggtgtacgcggcgcagtgggtgcaggacaacgtgaagaagtacttacccaggacgcagatcaacgccgtcgccgtcgggaacgaggtgttcgacgacccgaacgtggacaagatgaccctcgtccccgccatgaacaacgtgcagaaggcgctggcgaatctgggcctcgccaacgccgtcaaggtgtccacgccgatcgccttctcggccgtcagggattcgttcccgccgtccggctcctggttccgggacgacatcgcgcagccggtgatgaagcccatgctgcagctcctgcagcggaccggctcgttcctcaccgtcaacatctacccgtgcttgacccaaatgcagcagccggacgacatcccccctggactacgccctggggaacgcccagcacgccgtgctcgacggcagcaacaagtactacagcctcctggacgcccagctcgacgccacgcactacgccatggaggccctcgggttcggcaacgtggaggccgttctcggggagaccgggtgccccaacaaagggaagataggaaagcacagaccaccccggcgtggcgtcggaagcagcaggcgccgtctgttggatgacggaggctcagagcctgaggcctcggtcgccaacgcgcgagcgtacaacaactacgtcatcaaccgcgtgctgtccggcaacacgggcaccccgcaccgccctcgcgccgacatgcacgtctacatcttcgcgctcttcaacgagaacaacaagagcgccgatccggacgacgtggagaacaacttcggcttgttctaccccaacatgcagaagatctacgacttcaacttccgcggcggcggcggcggcggcggccaaccgccggcaggcccggcggcggcgagctggtgcgtggcgaacgcggccgtcggggacgacaggctgcagcaggcgctggactacgcgtgcggccacggggcggactgcagcgccatccagcccagcgggtcgtgcttcgagccggacaccaagctcgcgcacgcctcgtatgcgttcgacagctactaccagcggaacggccgggccaccagcgcgtgcgatttcagcggcgcggcctccatcgtctaccaggcaccagccgtcacttgcagcagcgcgaagccaagctggtgcgtcgccaagccaggggccgggggcgcacagctgcagcaggcgctggactacgcgtgcggccacggcgcggactgcagcgccatccagtccggcggctcctgcttccagcccgacaccgtggccgcgcacgcctcgtacgcgttcaacagctactaccagcggaacggccgggctagagtggcgtgcgacttctccggcgccggctctattgtttaccagcaacccagcttctgcgccgcgacggcaagctggtgcgtggcgaacccgggtgtcggggacgcgcggctgcaaacggcgctggactacgcgtgcggccatggcgcggactgccgcgccatccagcccgggggagcgtgcttccagccggacaacaaggcctcccatgcctcgtacgcgttcaacggctactaccagcgcaacaaccgggctagagtggcgtgcgacttctccggcgccggctctattgtttaccagcaacccaaggtgggaaactgtgtgcttccatcgaacgccggctgatcaactcgagaaacaaaactacatcacatttagcttgcttgaggcgacgatatgaagatgctaacatatatctcgatcagtatttctgggatgggaataaattttccatcgttctgcgtggcaaactattatctaataaattattaataaaatcctgcgcctgcaaatcgactgtgccgggtgctccctcccctcaaatctttgcaatagtacgtgtaataccacatgtcaacgtgttgtcttcactgctaataatgcatgctattggtacttctgtacaatctcttgatgaaaaataatatgaaataacctttaagtctctataaaaaaaaaaaaacatcttatttc

SEQ ID NO: 126278 - DNA, 439 bp, Zea mays
  Clone ID: MRT4577_46633C.1
gttcaagaagaaacaaagaaggatattacagataaagatgttcaaatgggctttgacatttctcacagaaaacacaagggacagtatgcactccgcaaactgtaccatgagagtccacgactcatttgtgttctatacacttctcccacatgtggtccttgcagaaccttaaaaccaattttgagcaaggactgtatcgggtgtgaaaaggaagaaggaatatcgggagtttatcgaggcgaacaaatgagttgagcacgcagtggaccccctcaaggttttttgaagtcagtagttcttttggcgctattttgacgccaccccgtcccccggtggccaatttttcatcagattttaagacgagcctggtctagtgccatgccaaaggaaactagccgatccctcatattggattatacagctcaaaatatattcaaaa

SEQ ID NO: 126279 - DNA, 2068 bp, Zea mays
  Clone ID: MRT4577_46634C.1
cattgggtccctcgcgtccgggcgggccatcctcccctccgcccaccaacgcagcagcagccagcagccccgccacttcccccctcgccgcttgcgatggcggtcacgcgcgtcgccgtggccgccgccctctcggcggccccgctctcctcccgccgccaccgggttgccctcccctccgcctgccgccttctccccgcctcggccacctgctgcaacagccgcgcgccgatgtcgctgcaggccgccgccgccgcacctgccgccggcgcggtcgacgaggagactcctgcctcctcccctccgtcagatgctagcaagggggtggagaacctggtgatcatcggctctggaccagccggttacaccgctgccatctacgccgcccgggcgaacctgaagcctgtcgtgtttgaagggtgccagatggggggtgtccccggcgggcagctgatgaccactaccgaggtggagaatttccctggcttcccggacggtataaccgggcctgatctcatggacagaatgcgcaagcaagcggaacgctggggcgcagagctttaccaagaggatgttgagtttgtgaatgtaaagagcagcccgtttgttattcgtagcagcgaccgtgaggtgaaatgtcatagtctaatcattgcaactggagctacggctaagcgcctccgtctgcctcgtgaagatgaattttggagtagaggcatcagcgcatgtgcaatatgtgatggagcttcaccgcttttcaagggccaggttcttgcagttgttgggggtggtgatgtagctacagaggaagcagtatatttgacaaaatatgctcgacatgttcatttactagttagaaaggatcagctacgggcttccaaagctatgcaggacaggttgattatggcgaatgtttcagagtactcaacaaccccaacataacagtacatttcaatacagaagccatggatgttgttagcaatgacaaagggcagatgtctggcgttcatctgaagagaagagatacaggagaagaatcagttcttactgtgaaaggtctattttatggcataggacatactccaaacagtcagctgttgcagggccaaatcgaacttgatagtgctggctatattttagttaaagagggctcagccaaaacttcagttgatggtgtattcgctgctggtgatgttcaggatcatgaatggagacaagctattactgcagctggatctggatgcatagctgctttgtcagttgaaagatacttagttgccaatgatcttcttgtcgaatttcaccagcctgttcaagaagaaacaaagaaggatattacagataaagatgttcaaatgggctttgacatttctcacagaaaacacaagggacagtatgcactccgcaaactataccatgagagtccacgactcatttgtgttctatacacttctcccacatgtggtccttgcagaaccttaaaaccaattttgagcaaggtcatagacgagtacggcgagtttgttcatcttgttgaaattgacatcgaggaggatcctgaaatagcagaagctgcaggcatcatgggaacaccttgtgttcaattttttaagaacaaagaaatgctcaggactgtatcgggtgtgaaaaggaagaaggaatatcgggagtttatcgaggcgaacaaatgagttgagcacgcagtggaccccctcaaggttttttgaagtcagtagttcttttggcgctattttgacgccaccccgtcccccggtggccaatttttcatcagattttaagacgagcctggtctagtgccatgccaaaggaaactagccgatccctcatattggattatacagctcaaaatatattctttgctgtgtgtgtacaacatacatggagttgaccccccaccccctgctgatcaatcatcattgcggcattgccttgacactgccaatgtgcaaactatttccacggattagcatacattaatctgaagtatatatatactcggcaatgctgaatccattttgatcaaggaagcgactggaaatttgtttgt

SEQ ID NO: 126280 - DNA, 2111 bp, Zea mays
  Clone ID: MRT4577_46635C.1
cccccccgcccgccgccccgccgcgcgcccgcggccgccgttttgcctcgccgttctgccgcgccatcgcatcgatccgccctccctctcagcgttcttccccccggtaccgggccccgttttcttttcgcccacatccgccgttttgcctcgccgttctgccgcgccatcgcatcgtccgcgctccctttctcatcgttcttcccccggtacggctcgacggcgggcgtgggcgctggagttgcggctcggaggccgaggcgccgggtggtgcgttgggtgcgctcggttcgggagatcccggactttgctgctcgcgcggtcagacagggagcgccggaggaggaggaggctgtgcaagtgcaagctgtgctgaactaagggttctggcttcggactctgtgtacgcgccgcggcaggagggagctggagatgtacgggccgccgtcccgaggcggcgggggagccggcgctgccggagagcagccgagggtttaccaagtttggcgaggaagcaacgagtttttcttgcaaggccggttcatatttggacctgatgtgagatccttgtttctcaccatattccttattcttgcaccagtggtggtcttctgcatatttgtggccagacatcttatcaatgactttcctgatcattggggagtttcagtcatggtcatagtgattgtcttcacaatatacgatttgacactgctccttcttacctctggtagagatcctggtatagtgcctcgtaacacccatcctcctgaacctgaagctattgatatgaacaatgatgctggaaatggtcagacaccacaacagttgcggttgccacggacaaaggatgttatcgtaaatgggaccattgtgaaagtcaagtactgtgacacctgcatgctgtacagaccacctcgatgctcacactgttctatctgtaataactgtgtggagcactttgatcaccactgcccttgggttgggcagtgcataggattgcgcaattatcggttcttctatatgtttgtattctctacaacattactgtgtctctatgtatttggcttctgctttgtgtacattgtcaagattaaagacgcagaacagtcgtcgatctggaaagcaatgttgaagactccagcatcaattgttctgatcatatactgcttcatctgtgtgtggtttgtgggtggtctgtctgttttccatttctatctcatgagcaccaaccagacaacctatgagaacttcagatatcgctatgatcggcgggccaacccgtacaacatagggatcttgaacaacttcatggagatattctgcaccgcagtccctccttccaagaacaacttccgagccagggtcccagtagagcaaggtttacagcaatcgcgtgcgccagcaaggggtttcatgagtctaaacatggataaacctgttggggacttcgaattgagtaggaagccagtatcatgggatgaacctcggtcagcagctgatatcagggacttggaggttggtctagggggtctactggacgagaaagaaggcaggatagcccatgcgtccccggacctgagcagagatgcccttcctgagcttgtggaagggagggctggtatgcattcgaggcgatcaagctggggtcacagaagcgggacctcggcctccatggacagcattgctgtgcaaatggggaccggagattctcactggggctccattagcagtgcccatggcacaaccagtggagctcactagcaagctacgccacgtctttgacgcatcttcttgtgtaaacctgcctgataccaccaacgaagaagcgacctttgggcgctctctgtgcacatgtgctttcactccactccacctaggatatacgtctgcagtgctttcttactcagtgtcctgagagcgcatcagttctgatggtttgcttcccgtttggtgttttaagcaaaaataacagaagtgccccttaactccccctgttgtttggaccatccactgtatatatatatatattattgcaaattggaattgcctgcagagaagatttgtcatgtttggctttcgcccttaaaaaaaaaaaaaaaaaagcggcc

SEQ ID NO: 126281 - DNA, 299 bp, Zea mays
  Clone ID: MRT4577_46636C.1
attcggctcgaggagcaccgaaacagtggttctttgcggcaggaacagaatacatggctgggcgagctcactgactcataaaacgctgactctggatgtgatgtccacgaacacgatgcaccatgtgaagatcaagatcctgactatggatgctatactacaggacatgaggaagtaaagggcacatgtcgagcaacatactgaaggtctgaccatcgaagacaacaccatatagatggtgagctctatcatctagcgggacgagctactgggatgcagcaccacataccaaaggctga

SEQ ID NO: 126282 - DNA, 951 bp, Zea mays
  Clone ID: MRT4577_46637C.1
ctcgaggccggccggggcgtatcacagccgcacagcgcccgctgctacgcacgccgccgtctacccccactcccccagcacgtgcgtgcacgcgcaggtgctcgaggacttctcccccgtttccgcccacatccgccgacctgcctcgccattccgccgcgccttcgcatcgtccgcgcgcccggcccttctcgttctaccccggtacgactcgacggtggtcgtgggcgccgaaggtgcggctccgaggcgccaggtggttcgtttgctgtttgcgcgatcgccggaggagtctgtgcaagctgtgctggctaagggtttgggggttcggattcagtggaggggctgcggcaggagggagctagagatgtacggaccgccgtcccgaggcggcgggggagctggcactgccggagagcagcctagggtttaccaagtttggcgaggaagcaacgagtttttcttgcaaggccggttcatatttggacctgatgtgagatcattgtttctcaccatattcctcattcttgcgccaatggtggtcttctgtatatttgtggccagacatcttatcaatgactttcctgatcattggggagtttcagttatggtcatagtgattgtcttcactgtatacgatttaacattgctgcttcttacctctggtagagatcctggtatagtgcctcgtaacacccatcctcctgaaactgacgctattgaaatgaacaatgatgctggaaatggtcagacaccacaacaattgcggttgccacggacaaaggatgttattgtaaatggggtcattgtgaaggtcaagtactgtgacacctgcatgctgtacagaccacctcgatgctcacactgctctatctgtaataactgtgtggagcgctttgaccaccactgcccttgggttggccatgcataggattgcgcaattatcgggtc

SEQ ID NO: 126283 - DNA, 311 bp, Zea mays
  Clone ID: MRT4577_46638C.1
ttttggttttttacatatacttgtttacatatgtgtttgcaaaaaataatgagtttttaattaaatttctgaatacctttttttgcatccagacatgcatgtatgaccgccctaaaaaggaggacataggggccaacgaccatcgcattcttacattttttacaacatagtgcaagcacaccatgcataaaaaaaagaaccctgtattataaaaggctccacccaaaacaggccacccctttttccgcccacaccaagggggaaaggtgcatatcggccgttaaacttaacaaaggatgcttgtccaaaaa

SEQ ID NO: 126284 - DNA, 450 bp, Zea mays
  Clone ID: MRT4577_46639C.1
cccctttataggaaaacagccccggatagatatttaaggactgagccaaacgatacagggacaaaatcccacacactggcgcaaaaaggatcccagatttcatggggggaaactatttcatacgataacaaaaacggacacatgcccaactggaccggccccaagaattcattgtttgccagccaggggcagaccaaaccaggggtccctcccttattttaggggccccacccgccccaaaggcccagaaaaaaaaaaggttaacatgcaggcatgccgcaatttttgggccccgcccggattttgggtggcctgctcgaacccctcctggggagagggggcttgttttcctgggcatcttttcctcaagggggcccacaatatgcataggccgcctcctcgcatttcaattatttccatgtctgtcactttggattaaggccttggggg

SEQ ID NO: 126285 - DNA, 207 bp, Zea mays
  Clone ID: MRT4577_4663C.1
tcctctatattggacgctcgcgtccgtctgacgcctctatctgccggccattcacttcacacggctctgtgggcgtccgaattggccctatcaaaatgtgcacattgtagctagagcgagctataagaatgcactggtcgctggagagcttcctgttcacctcagagtccctcaaccaggcgcacccagacacgctgagcgaccagg

SEQ ID NO: 126286 - DNA, 561 bp, Zea mays
  Clone ID: MRT4577_46640C.1
gaaaaaaaaacgggggaacccctgttcttcctaaaacgggaaaaaatccttggagggggcccccccccggcattttaaaataacaggttcccttcccttaaaaacaaaaccccccggaaatagtaccaatttactactacccggtttccccaacccagaaaagggaaaataataatagccggggccaaaaaaaaaaaccctccctttggggcccccccccaaaggggggggaaagcccccctttcgttggttgggaaaacaggcaggaccaaaaccaggggggcaaaaaaatttgcggacggccgggggcctacaagaacggttgttgggccaccccctggttgaaaagctgaaattaactcaaccttcccccacgaaagtcaacctttttttttaaacaacccccgtttttttttttcgcccttgaccttccccaggcataaaaaaaaaaaacccccccccatccaaaaaaacatttttttgactttcccggcaaaattcaggccccccgggtcccagggattctgaaggttttgctttacccctgaaagaacaaaaggc

SEQ ID NO: 126287 - DNA, 272 bp, Zea mays
  Clone ID: MRT4577_46641C.1
gtcgcccacgcgcgcggttgcgcggcgctcgtccccttctcaggcttgccgcgaaaggccagcgccacagtgaagttgtgtgctacctgtgtgcctgtggactcagcccttgcgggactgcagcatctggagtagtggtgtgggggcatgaaagaggactcctctgccaactggcggaaggacataccagccatgtgtggcagggagaagtgctcagccagtggcgggggcgggggctgtgcggcactgcctgctgtgggcggctctgagct

SEQ ID NO: 126288 - DNA, 365 bp, Zea mays
  Clone ID: MRT4577_46642C.1
accacgcgtacgtccatgccatgacaatacccagcacagcccatacctggggagggcccaaatttcttttcatggacaccgtagacctacacttactctggctgtggcatccgatctgatactcgctccatcccttgctcctctacatagacccccacaccgatgcctagctgtcccatggccatcctggatatccatggtcgaattttacccctgcatgatcccgacacaatgacgctctgtcatttatccataggatgaaaacacctatgcacttaacaccatatgatgatggtacacatttctcaatacatggatccaatgactacattctgatgcccttgtaagttgttttaaaaccgtca

SEQ ID NO: 126289 - DNA, 555 bp, Zea mays
  Clone ID: MRT4577_46643C.1
gtggtatctcgaaaatctccacgccacgtcaatcatcgaccagcagcagccaaccaaaatgttctgcgagtgcggcacgggcagcttcaatcacgtcgacgaggacccggaggatctcggctgcacgggcggatcgcccagggagaggaggaagcacggcggcaaggtcaaccccttcgcggagcgcgggctggacaggttctccatcgtgctctcggagctcgagacacggcgagccaagatcctgcgccgcgtcggctccgacgacaccaccggcctcgtcttcgtccgcttcgtccagtccaacggcggctggacgcccgtcatcgtcaagctccccgaggagccaccgtccaagaaggccgccgccaccaagaggccgagggcggcagcgtcgaccgctgcgcctttgccaccaccgggtcctgcttcaccccgcagtccgctggaccaggccaccagcccgaggaagagggactgcgccagcaccagctccaccgccaagttcgtcgtcgccaccaaggtgccggcgaggaaggcatcattctcgtgggg

SEQ ID NO: 126290 - DNA, 477 bp, Zea mays
  Clone ID: MRT4577_46644C.1
atcgggaaaaacaaaagggccataaccgcccagaattccctggaaacaacccaatgggaagcccccaagcggggggggggcggcccgggaatctgggatacaagggcgtttttaaaacccccccccgggggtgggaaacccctaataacccccagtaaattcagcccggccaagaccctgcagtttgcccccggggtggcccgtggcaaattgtaaaaaggcaagcccccctgggtgggagggactggggcaactctaaaaccgggtcaagaggcccttggtccaggccaggacacccctctcctttttttaaaaatttgcctggtttttggccccctcggcgtggcgggggatttgggggaaaaaacgggaaccgggtccatggccggggccggggcccaacctcctcctcatgaaccccttcctgaacccccgggccattttttccacttggtcaacccccccggggggggtggc

SEQ ID NO: 126291 - DNA, 216 bp, Zea mays
  Clone ID: MRT4577_46645C.1
aaacgcagctaacatcaacggtggagatgatgattccatcggcttctggctgcaaccgagtacggatggcgaacgagctggtagccggtagcgcgaggaggccaagttcgccatctacaacgtggtgccacctactgcatcatcgggtccgtgctgttcgagctgatcctcctctttcgcggagcctcgcctacatattcaccgacagccagtgct

SEQ ID NO: 126292 - DNA, 146 bp, Zea mays
  Clone ID: MRT4577_46646C.1
gcgctccatgcattcaccgtcgacgatgacacgagcaaccttgctccccttcgaaggcctccggcttacatcgtccgtcctctccgctctttggctggttgacacttacccgtcgtggggggaggtttctcctgggttctactgac

SEQ ID NO: 126293 - DNA, 154 bp, Zea mays
  Clone ID: MRT4577_46647C.1
tccacgcgtccgtccacgcgtccttccactcgttcttcaactcgttcttcggggcttgcggataaatgctaggcgagaaacattcttgtgtgtagttaatacgtcactctgatgtttttgttgttgttgacataatagcagtgcatgttgttct

SEQ ID NO: 126294 - DNA, 406 bp, Zea mays
  Clone ID: MRT4577_46648C.1
gcttggaacctttgggctgatttatgtgcttgttgatgtgcggatctcaacatcgcctcgtaccacccccacggtattcgccgttgccaaagacttacggatatgcatagcattaacatacgaactcctatagcctatacaaaacaacctcgtcgatccgcgaataaagtaaatacaacaacctaacccggaaatacgcaactcgatcaagacacagccggactataaggatacggcttacgacagcgttacttatcatcacggtaagtgttccgctatcgctctcctagatcccattgcgaagactgctaataccggcgtcgtaaacgttttacttcaggcatccctaatgtcaagcggttatcacggcttcgcgcggtgcgccgtccgcatttacgtaaagcac

SEQ ID NO: 126295 - DNA, 390 bp, Zea mays
  unsure (1)..(390): unsure at all n locations
  Clone ID: MRT4577_46649C.1
ctccctacggagtagccccacgaacaaccagggatgtactcactacctggcacccgcctctagcgtacctttttcggcactctgttactactccaactcaagccgccgagcgtgatnaacagggggttgccaaggtggatgataaacggcaggaagctatcggaggggtggatgttgtaaaaagagctactggttgtgacgcgcgttaacttaaggtgctagagttcaaggaacctatgtttggaggagaccctggtagactcttccgtgtagacccgttgaactcgtgtttccgatgaaacacgcccgacggtaggtcccacgatcaccagggtctcagctcgcggaactccctggaaaggtttcgattaaactgacccgtcggtaacg

SEQ ID NO: 126296 - DNA, 519 bp, Zea mays
  Clone ID: MRT4577_4664C.1
gcatccgacaaggggagctggaacacacctcactggcctccccgtgattcatatggaacaggctggagtcagtttctgctgtgccactcactgtttaccttaagactattacctgtgttgttgccctttgctcgttagggctgataacataggtaataatcttaactgcaatttgctcgagaggattttatcaggagtatgctttgctttgaccgatatgggagttgagtgagctattgtgggttttattggcaagtggcgtcgctctagctgcggctgtgacgatgatgtgaccatgtgacacgaggcactacctacgatgggggatggtgttgctggccttaatgacggaggatgccctgcaaatggggtgtgtgcggatgtagcgcgctgcaaagggagcgttgaccaccgtagtgctcatggaggtgacatacacctgcatcgggcacaagtgaatcacgcactcgatgaccatgatgtttgtcgtgtctagctacaagaatacttacctctctg

SEQ ID NO: 126297 - DNA, 234 bp, Zea mays
  Clone ID: MRT4577_46650C.1
agaacacgctaacaagacaacaaggatcatggggcgcgggcgcggccacctcctgctgccggcagcagccgactgcctgtgggcgctgtcgtgcgcgctgctgctgcacgcgtcccctcacggcgccggcgccagcggactgctgagggtcgagctcagcaggcgccgcggtggactcgaccagcgcgcgctggcggcggtcaatgccgcgaggcagcacgaggcaagccgtct

SEQ ID NO: 126298 - DNA, 818 bp, Zea mays
  unsure (1)..(818): unsure at all n locations
  Clone ID: MRT4577_46651C.1
ggccgggtttacactcacaatatagcaacagcaagcatcaagatgacaagatggtgacttacctttgtgtttgctgtccataactccccattccttgtccaaatctccatgttgctgatttgctgctaaaataacacataattgaagtaaataagtacaaaagtaactgtaaaaataggtgtaaactaaaaagtgactaccagcagttagcataaagccattaggaaaacataacagaacagctgaacaacatacatatccaagcaatattgagggagaggacagaggagtgctgcacagggtcagggtaggccggtagtgcgccaggaaggttgctgtcgggagggggatgacaactccggctatgtcttggtcggggacggcggacaggctcctagcggctccctggtcgtacgccggtgtctccaggtggatgcgtgcgtgtgcctgtgtgggactagacactggagggtntgtgcggttgtgcctgtgctgtttagtctcaaccctagaaagcccacaaaggcacaaagcaatggcccagttacaacccaactgcaaaagcccatcaacaagtacaggtctaaactagtcgtcgactaattggacgaccagcattctagtctgtctagtcaccttggtgacactagtcgttactagtccaccgattagtccgactcgcgattagccggacgacttgaaaacactgcatctgtgttggtcaccctagaaagttccttttttcttttaatgttatagtttagcctttttcttagctaatctaatatgcattgtggtagtgcttatgctgccttttg

SEQ ID NO: 126299 - DNA, 547 bp, Zea mays
  Clone ID: MRT4577_46652C.1
cattgggtacctcgaggccggccgggctcccagtctacccatctctgtctgtgtcgcccctcctcctcgcctattacccaggatggcctccacgcctcctagcgcgtctcgctgaaaccgtcttgcccatcgtcgtaggctattccctacccgctagaaatcgcaatatcctacgaggcacgtggggggaaaccacctcttctcccagatcaacgaaggtaattatatgagccacgaatcgtcctatgtgacccatctgagctgaatacggaagcgacaatgggacataatgacgggggtgttgtcatcagcgacatcacaaatctgatagcgacggggctacaaaatcacgatcaatcgacttcacaaggtcttattatgacttgctctcctctagcactggacgaactcctgaaatcgtctaacctatctctcattgaacaagcactctacaatgtctactgatcatagtgaaacgcagatagctactggagatgactgcaacaaatatgatcctatatggagacatcgttgactattagaagct

SEQ ID NO: 126300 - DNA, 336 bp, Zea mays
  Clone ID: MRT4577_46653C.1
gagaaaactgcaatgtgtgtaacagtgcttcagatgctcatgctaggcagcggttattggcttgttactaggcctggaaagggcctgcattgtccacagcttgttctcactttgaccagattcctacatattgcatcattctatgatacgattggcgtctatgacagtgctgaccttgttcaaatctatgcagttactagccgaatcttctaataggcggttgtagattttgcaggcgacgaactactgcatattgcgacaactgtaaaagttacacatgatcatctcgatcgcgctctagaggacaccaactcatgagttcttattaacttgata

SEQ ID NO: 126301 - DNA, 1937 bp, Zea mays
  Clone ID: MRT4577_46654C.1
gtaccctccagacccccaaaaggcaatgcggccctcgatgctcgccgggctgcctcgtccggtcctctcggctctcggtgtgggaagggaaccaaaccgagacggaggcggagtacgacgcctgccttccctcttccgccgagcgcccgctgcgtcattctcgtccctcctcttcatcttcatcggccaaccgattgccgctgaccccggccatcggcgactgtcccccggtttttctttaacgatttccgattcgattccatggccggctggaccgattccaccggcagcggcggccgaggatcaggaggaagaggcttcacgacaccccgctatactactaattccaccaatgacatgatccatggaggtaccagcggcggaggcggaggtagcggcaggtggagaggaggcaggtcaagggggtggccgcccccgcagcctcaccatcgctaccgccgtgtggatgccgttcatcgtgactccgcgcctgtctctctatcggagctacaggcggcctcctccacatccagccgccaccggtaccttactcgttccatctcagcggacaagtcttccgcctcgggaaccgcgggttcaacagataccaaggagcctgacgacaaggctaaccgcagcgctgccaactttgagtgcaacgtctgctttgacatggccgctgaacctgtggtcaccaggtgcggccatctcttctgctgggagtgcctctatcagtggctccatgtccattctcaccaccgtgagtgccctgtctgcaagggtcaggtagctgatgatgctatcatacccatctatgggcgtggtggatccgcagcctctgtggacaacgctcccccaaggcccactggagccagagtagagagcacaaggcagcaacaacaacagctgccaattttccatcctcccaatgtttttgaattcataggccttggcttggccgctgcagccagaggagagcactccaccgagcagctgctgctgccaactttctcccaccccacggtgtttgatgatgacgacgggcatgaatgggacatggatcttgtgaacaacggcattgatcctttggacctcataactcccggcacccaagacttggacatggatgattatgatggcactattgatttcgatgatgatgattatgaatatgactaccatttggcgggtgctacgttgtttgcttctgctgggactgaggccagcaatcccagctcttcacaagcacatgctggtatgatcaatattagggacaacattcttggcactgccaccagcatctatcatcagcaagagtttggctactctggcgtgagacctcataataacaggggacggcgccggcaccgtaatcgcgcaagggcatcagcaaatcactcaggcgctgatgaaatggtgatcgaggataccagtcatttctaccttcagaacggtggcagttctaacattagtgcaggcgctgcttttcggcccaacggtggctggactgggagaagaggaagaagcaacctgaactcgaattcaggtggtggaagcaacctgaactcaaactcaggtggtggaagcaacatgaactcgaattcaggtggtggaagaggagggattcagggtaccagaagacagaggacaaattacaactgatagtgatgttgggacatgcttcgaaataggagcgataactgatgagataaacaaacttaatcctttgtcttccattttttttctttgtttctctcgtattattaatccttttgtagcctgtggctattggcaccttgtcaaacatcttctctccgtttcccctgaattgttatgcctggttaatgttacttatttttagtaccaccatccacaaaaaatctaaggaatataggatcctggttaagttgcggaaaaaaaaaaaaaaaaaagcggcc

SEQ ID NO: 126302 - DNA, 184 bp, Zea mays
  Clone ID: MRT4577_46655C.1
ctcattggtcaaaagacaagccaataaaccaagataaatgtcaaacaaattaaaatccaaagttcaggttttctttaacacatccagcggccggtccattgataaacccctggggcatctttttttgaaacaaaaaaaaagtttacgacttgttttacaaccaaaagcgcccaataagtaagtg

SEQ ID NO: 126303 - DNA, 555 bp, Zea mays
  Clone ID: MRT4577_46656C.1
ggggggggggggtttttttttttttttttttttttttttttttttttttttttttttttttttggcaagcggagggattcatgtatcaaaaggaagttcacatcatacccctatggaaaggggggtagccccctaccatatggaccctggggggggggaactatttttttagggggcaaaaagaacaaattgggggaaaaagccccaaattacccggggcacattcaggacagccccaacatgaatatcacctttcactcttaaaaaaacacgaagatccccacaaaccttggggggaaaatatacagggcaatcaatcatattgggggagggcatctaaacaaaaaccaagggggacgggtttttacatttactgaaacccagcccccattttggggtaaaacccttccataaaaaacccctggatctaaattggatgccctggaggggttgaccccatgcctcccccaaatgagggattgcccaggatacccccccaactttgaggggcacattcatgaacaaccttgggcaggatattcaagaacaaccttt

SEQ ID NO: 126304 - DNA, 822 bp, Zea mays
  unsure (1)..(822): unsure at all n locations
  Clone ID: MRT4577_46657C.1
ctgcctcgtccggtcctctcggctctcggtgtgggaagggaaccaaaccgagacggaggcggagtacgacgcctgccttccctcttccgccgagcgcccgctgcgtcattctcgtccctcctcttcatcttcatcggccaaccgattgccgctgaccccggccatcggcgactgtcccccggttcgtaccttctcctccttgatccccttttcttttattgctcctcgattccaaaaatctaatttagtacccccaatctccgaaccctaatcccccgcatccctcctcctcgatcaccacgtaagcaggcagatggatggaggatacgtatacgcgcagattacaccacaacataatttcctttttaggcttagatgtttcgtgttcacctcagctcagctctaacgaatcttgtttctcttccctaggtttttctttaacgatttccgattcgattccatggccggctggaccgattccaccggcagcggcggccgaggatcaggaggaagaggcttcacgacaccccgctatactactaattccaccaatgacatgatccatggaggtaccagcggcggaggcggaggtagcggcaggtggagaggaggcaggtcaagggggtggccgcccccgcagcctcaccatcgctaccgccgtgtggatgccgttcatcgtgactccgcgcctgtctctctatcggagctacaggcggcctcctccacatccagccgccaccggtaccttactcgttccatctcagcggacaagtcttcccgctcggggaaccgcgggttcaacagataccagngagcctgacg

SEQ ID NO: 126305 - DNA, 120 bp, Zea mays
  Clone ID: MRT4577_46658C.1
cagactcgctctcgctcaccggaaacagaccatggacgcggcgcaagccagcggttgaactatgggtgggttcaccgtgaagagcttacaaggagctcaagatcttgtaaaagaactttg

SEQ ID NO: 126306 - DNA, 289 bp, Zea mays
  Clone ID: MRT4577_46659C.1
cgtcctattagctcttctgcaccgtacatggtgataaggcaaactcaaaggacaaccattcaaaagcgtccgggccctgtgggtccttcgacatcaccaagttgggcgcctctgtcaatggcaacaccgttagcacgaaggctgtgcacgaggcgtgtgcatcggcgtgcggcggcaccgggaaccacacgatcctcatccccaaaggcgacttcctcgtcggactactcaacttcacacgcccatgcaaaggcgacgtgaccatccaggtgaatggcaatctgctggc

SEQ ID NO: 126307 - DNA, 409 bp, Zea mays
  Clone ID: MRT4577_4665C.1
cgtaaaaaaaaaaggggtttttaacccaaaattgcccccaggggggtttcttcctttttgcccagaccctttttgccaaaaaaagattgttggcccccccaacaactgaattaaatgccttttgggccggcttttttaacctacacatggtttcccaccctccaaccacattaggtcccttccagcccatttttcctttttttgagcaaggggaaccagggttccttttgggccccccccctggaaaacctcatggaggcctgcgggccccttttgcccaaaaaggggaacgggtgccccttcaggggggacagctccctaaagggggtccccggcggggggtccccggggaaccatttttttctttcggcccttaaccttgggggacaaaaaaggccttttttttggg

SEQ ID NO: 126308 - DNA, 382 bp, Zea mays
  Clone ID: MRT4577_46660C.1
gtactctactacctactaagtagttcagactttggagataacattccttgcacaatattatggttttggcttgttgtcctcttgacaactgttttttgtagatccattccaagaaaagaaactggttagagcataaaaggttaaataagttcgcctattgtagctacaaccggaaaatgcaaaacaggtttaaaaaaattaaagagcttggttccaagagaaaggaatgcaatccactgttgcttgaagaaatttgatggaaaaatggatgggttgattcaaataataaacttgtacacaaagtttattgaaatacttttactcaggctgttgtggattaaattgttggtgcaactcaagacctattagggcgtcactttct

SEQ ID NO: 126309 - DNA, 1978 bp, Zea mays
  Clone ID: MRT4577_46661C.1
gaacttctccaagatagcagtaaatttggtagaggacgctttgatgaagtataaacattgggaagaagagattgataagtggcagaccccggttctccaagatgagaggcttccagaatggtacaagattacactctttaatgagctgtacttcctagttgctggtgtccgcgtttggattgatagtggatctttggtgtctgatgctgataacaagtcgaatccagaggaaagtaatttgtcacatgagatcgatgacaaagaaaatgttgggaaatttttgtaccttgaaggaatagaatacttcatgtggtgcacctatgatgtacacttctatgcctcctttgctcttttggatctgtttcctaagattgaattgagcattcaacgtgattttgcgggagctgttttgcgggaagataacagaagagtcagatttcttgctgatggtacctggggtattcgtaaagtaatcggtgctgtcgcccatgatcttggagcacatgatccttggcatgaattgaatgcttacaacatacatgacacaagtagatggaaagatcttaatcccaagttcgtgcttcagatttacagggattttgctgcaacaggtgacaagtcatttggcaaggatgtctggcctgcagtctgtactgctatggaatacatggaacaattcgatcatgatggtgatggtatgattgaaaatgatggatttcctgatcaaacttacgatgcttggacagttcaaggagtaagtgcatattgtggttgcctctggcttgctgcccttcaagctgcggcagcactggccggaagccttggacatgatgactatgctgagaggtgcatgacaagatttgtgaaagctaaaactgtatttgaagccaggttatggaatggttcacacttcaattatgacagtggtacaagttatagtagccgttccatccaggcagatcagctggctggacaatggtatactgcatcgtcaggtttgcctcctctatttgatgaggataggataaaatgcacgcttcagaaaatatttgactacaatgtgatgagggtgaaaggaggacgtatgggagccgtgaatggtatgcatccaaatgggaaggtagatgaaacctgtatgcagtcaagagaaatctggacaggagtaacatatagtttagcagcaacgatgctgctccatggaatggagcatcaggccttcactactgcagaaggcatttatactgcaggatggtctgaagagggctatgggtactggttccaaactccagaagcatggacaattgatggccattacaggtcactaatttatatgcgcccccttgcaatctgggcaatgcagtgggccttgtcgcctccaaggtcgatactggaggcgccgaaggtaaatacaatggacagagctcacatttctccaggcaccttccaatttctccaggatagcgttagaaagatgacaccaaaaaacggttgttttggaaacactgtaattaacttggattgctgatgtgacggtagcacttgtatctcgcactgtccaatgtatgtttacggagcacctcatgtagaaaatgttgagtgtggaacgggtgctatattctgttcagcctttgcagttatgtggtgtacctctctgatggtagcacttgcatctcacagtgagccggactttgtaaattgttgtacagaaaacgtacatatgatgatgccgtgttaccctgatattcatgacaccgttgtttaccacataaaaaaaaaaaaaaaaaaaaaaaaaaaaaaaaaaaaaaaaaaaaaaaaaaaaaaaaaagtggggaagaaaattaaaaaataaaaaaataataaaaggggggaaaacttaataaaattaaaataaaaagagggggggccttattaagggatttttttttacttcgccccaaatgcaagtttaaactttttttttgggggccctaaaattaaa

SEQ ID NO: 126310 - DNA, 904 bp, Zea mays
  Clone ID: MRT4577_46662C.1
cagacgcgtgggttttaatatttgatctttgttcgttttgttgttcaattttttttttttttaagatcaaatcaactaaacaaccaaacgaacagagttcaatacagaagtgagaatacatcataagcttcagcaactcaatgaaccgaagcataaatgtcctatccattatttgtcgatgcgacacgcaaaattaaaatttcaagcaaagaaagtgcgcatgagaccaactgaaggcagcctcatcccaactctgaaatatgaaggcgtgtgggactccatcttatgaggacagtacgaccaccgcatcccacgcattcaaggtcatcatcaggctttgatggtcacgctgcacaggcaagaacccgtcggcttcagcttcgacgtgcaccactcggaccccatcggagctgcagggtcatacatcagcgtttggtacccgggctcttcctccagagggaagagcagcagcttgtcctcgtgcaccacgagggagaaacgagtgcttgagctgccggtgagcggcacggggaccttctgccaggagtcgtcagctgggttgaagattgctagagacctctggttcttccattcgatgcagaagagcctcttgccgaggaccgcatgagccgtgaccatcacgcagccgttcttgacctggccccaggcgtggctgttagggttgtacaacagaacgggagttaccgattgtgaagcttgagtatcattctcaccccacccgttcgagggacatctctgctacgacgacgagtgcatgctgctgatggccacgtacgctgccatccaacgagcgagcctacctcctctatggttccatcgatcagttgatcttggtgcagtcgacggtgggtctgcccgcgtactctgcgttgttaccactgct

SEQ ID NO: 126311 - DNA, 167 bp, Zea mays
  unsure (1)..(167): unsure at all n locations
  Clone ID: MRT4577_46663C.1
gctgcgatgatgcttcgtctcctcttggcgtcccttgtgtgctgctggtgcttctcgnangccgcgncgggcgggttcttgatgctccagattgtggtcggcgtgggcttgtcggttttcggccttgncgggggcgtttctgggccctgtgtgagttgggtggaacc

SEQ ID NO: 126312 - DNA, 737 bp, Zea mays
  Clone ID: MRT4577_46664C.1
aaaaaatttcaaaaaaaaaaaaaaaaaaaaaaaaaaaaaaaaaaaaaaaaaaaaatccgactaccgcccacagctcgccatggttctgcccatcaagcttctcttcgtccctgccaccgtgttcgtctcggccctcatcattttgtcctacttcaccagcgtgccgtacctgagctactccgacctcccctactacgggtcctacttctcgcggatcccgaagtgcgacatcttccagggcgagtgggtcccggacgcggacacgccgccgcactacaccaacgaaacgtgctcctacatccaggagcaccagaactgcatgaagtacggccggccggacttggagttcctgaggtggcggtggcagccgagccggtgcgacctcccgcggtttgacgccgacaagttcttccggctcgtcgggaacaagacgctcgcgttcgcaggggactcactcgccaggaaccacatgcagtccctactctgcctcttgtccaaggtggcgtcgccgaaggagttgaccgagaggacagaccccatcaagataatgcactacgagcgctacaacttcaccgtaaaaatcatctggtctccgttcttggtgaggacggaggagccggacaacaactccggtgtgttcaagctctacctcgacgagcccgacggcaggtggttgtccggcgtggccgggttcgactacgtgatcctctcgggagccaactggttcacgcgccagt

SEQ ID NO: 126313 - DNA, 211 bp, Zea mays
  Clone ID: MRT4577_46665C.1
acgctcgggcaagagggccatcttatacagacccatcacaaacgggcaaaatctccgattctacggcgccaagctaacctcatgccgtgacgatacaacgaaaagaaacaacagggtactcagttgacatgtagctcacacaaccgactcgacaggagctcgcgcagacaaatatatcctggcctggagctagcagctcgggttgatatca

SEQ ID NO: 126314 - DNA, 121 bp, Zea mays
  Clone ID: MRT4577_46666C.1
aaagcgaaccaagccttcgggccggtccttccttcgattcgaacatttgggggggctcaacggggtccttcctggaggccgaaataaaacttgcccttgccgagctggctcccggcgttcc

SEQ ID NO: 126315 - DNA, 364 bp, Zea mays
  Clone ID: MRT4577_46667C.1
ttttatatttttttttaattaactgcatgctgggggggtgccggccagaacgggggggattaccacaaaacatatgatccaaaaatgagtaaactttgcctttcctgtaaatctagaattatgtactaaacacccaagaaatgtagggggagcggagcggacagactagacaaatcccaaaacgttttcctattttctgtcctacagcctttgcatcgcatgacaatggaggccctgcgagcccgacactgttgtccaacccttgcatgtgaagcaagaggaatttggcggcccagctgctcgttcttgttgcaggcgaagaacactttcgggacggaggcccggtaaaagcccatccctttaa

SEQ ID NO: 126316 - DNA, 1807 bp, Zea mays
  Clone ID: MRT4577_46668C.1
attttttagaaatgcgcggcacacgacaggaattttgatccgccttcctatgttggccgggcgcaaactcgtaggataacgcctactatacggaaccccgtcgggaattaatgcgcccgtcctcgccagtcgccacgaccgcagcaatccgccgcccttggccgtgccccgtgctgccgtactcgtaatccgtgaggggaagcgtccgcgctccgccgctccgggccccgccacccatagttccttcaagggagcgatgagcgcgcggtcgatggagacggtggaggaggacgtggaggagtacagctggcgggaggtggtgctcgggcacatcgcgcgcatggccgtgccgcacctcgtccccgtggttcccggcgcgcaaccggagctcgagcgggagaccggggagcggcgccgcggcagggacctcctcgtcgccgtcgacttcggcccgaactccaagcacgcctttgactgggcgctcgggcacatcgcgcgcatggccgacacggtccacctcgtccacgccgtctccagtgtgcaaaatgagattgtgtatgataaaagtcgggagctcatggaggatttagctgtcgaggcattcaagacgttactggtccggaccaaggccagaattgttgaaggagacgctggaaaagttatttgccgagaagcagatcgactgaagcctgccgctgtcattcttggtacacgtggtagaggccttattcaaagtgtgttgcagggaagtgtcagtgagtattgcttccacaactgtaaagcagccccaattatcattgtgcctgggaaagaagctggtgaacagtctgtgctttgaaggaagatgagtaggagagttgttcctgttcgttgtactgtcagtttaggtgataaagtgttgtatattggtgctggttttgttgtgggaacatgttcttaagcgctttgctttgcttgtaatctgaagttctgaaccctctgtctggcttggttatgaaggaatgcttagaaaccgggagagtagcagacaaacatataacacaagaaatgtacttgtattgccattgctgacagaatacttcattagtacagttgatatgaataaagaatcttcagccacaagtttttttccccgtggttaaaactccagcaatgaggattaattcttctcacatttccattttgaggttgtctagcaagcagccactttctaccgactgaaattgtgcatcaaatccgctgaacaaattctgggagccaatatcccaggcagcagttccattcacgttgaggcacggctcgatggtcgacggtccggcggccaccgaaaccgacggggcagccgacacagggcagctcgcggcggcgggcgcgtacaggttgctgaggaccatttccagcccaaagccagtggagcctgccgctgcagacgggtgcactacctgctgcatggggctcatgctcatctgaaggcaggacggctccagctggccggccgccgggccgcacgcatgcttcagctggcggccgaagaggtcctcgacgatgtcgaagctcaccaccgggttggaagcggcgatcttcatggacaagaactcgacttgcttctgcagggactggacgtagttgatgatctcgtcgagcatgccggccttgcccgtgaccttgctgcacccgggcaccagctcctgcaggtaccgcatccgctcgctgatcctctccctcctcacctgcacgccaatccacccggccatgagttctgacttctgacgcacgcggcagggtcgtcggtgcccacgaactagca

SEQ ID NO: 126317 - DNA, 635 bp, Zea mays
  Clone ID: MRT4577_46669C.1
gaatgaccaggggaacgctccccgagtcgcgaccccgggcaagtttcccacgggcggggcgacgaatcgagggctccgaccgcgacgaatcgagggcctcccaccgccaccgcgatgaaccgagtggagcacgtcgtctccacaccaccatccagctcagatccatcatctgcgcaccacgccatcaaccagcttggatccatcatccagctctgctccgacgtccagctctgctcgcgagcaggacatcaccgctcgtcgtccaccatccctggcttgctgtcctccgcgcgtcatctccatccctggcttgagtgtgttaagtggaagcaacaaatgaagcggacatggagaaggaagctggcatgacactaaaacgcataaggttgtctccagcaatgtcctctatattcatcatctatattcgtcctttatagtctcttctaaaagatttcatcctctatatctctttcctctccaacaatgtcctctaaatcacgttctctatactcaaatatctatattagagacatttttatttttattttttgtacatacgtatttgtcgcactatcaaatgtattgtacatattttagttttgcgaaaaaaaaaaaaaaaaaaggcccctagggcc

SEQ ID NO: 126318 - DNA, 325 bp, Zea mays
  unsure (1)..(325): unsure at all n locations
  Clone ID: MRT4577_4666C.1
ggcgagaacccgtacattcggagggggatcaaggggttcgtggatttccccagggccgagcgcctgcgcgtgcgcccgcgcccgcgcgaggagcgtggggatctggtgttcaacctagagtgccagcagacgcaactgcgcgtgctcatgcggaagcatagacccgccgccgacatggacctcatagaagcaggataaaacctggaacagtagggcactgaatactaactgatagctcatgatgatcgaggcggaccgtnactctggatctacatttgatccacttcatattatggtgacattcacattgtgctactgcacagaa

SEQ ID NO: 126319 - DNA, 369 bp, Zea mays
  Clone ID: MRT4577_46670C.1
cgccccggggcccggaaacggggacctatttccgggggggaaccccccggtgccctcagttgggggcccaaacccccccgggtggggcaacatacccgggggggaccccgcctaccgttacgggggggtgctaactgggcttttccaactccggccgggtccttaccaccttcgccgaggggatcctggtcccgggccccggaatcctccccaagttctccccggccatggcccgccgaaccatttcctccctttgccgaatcctgggccaagtaaccgggccggccccaaaaagcgtcaagggcctggcttccaaaaccccaccggggccgacacccaccgtccacgcccaccacctggcccttacgg

SEQ ID NO: 126320 - DNA, 468 bp, Zea mays
  Clone ID: MRT4577_46671C.1
ctcataaacatggaaccgactcgtgccggccggtgtcttcccgttcacacgatcgaaaatattaacttattcatgtaccagctagtacgtaacactccgggggcggcaatggtaccagtcggtcacaaggagatgctgttggggaagcccaaggcagtaaaccctgcaaaagggccacatgtggtaaaaggtgctgggataaagcaccatgtaggggaactaggcggcgccgttcctgttcctcaactgcgggtcggggctctcacccaccaccttgccctcggtcttaaccagagcctcgctgaacctcttgaacgccatcaacgcccgaacgtcggagagccactacaaaggtgaggggctggccaaagtacacctcttgagaggagtgcttggagaggatctcgatgagcgaaatgccgatgatggtctggatcaggctcaagatagtgtagatgaagccacgct

SEQ ID NO: 126321 - DNA, 187 bp, Zea mays
  Clone ID: MRT4577_46672C.1
tgctcgcgcccggcgagctctcactcgggagggctcctcgagaaacgtagcctttccccccatcgcggcctgctgctgatgaatacgaaaacgttcaacaagacggctcgcgttctcaacacccttcggaagggcaacctgtatgggtaaaagagcgccgatgaccagtcccgccttgctgttgacg

SEQ ID NO: 126322 - DNA, 310 bp, Zea mays
  Clone ID: MRT4577_46673C.1
cctgccgggccgcacggacaacgaggtcaagaactactggaggacgcgggtgcagaagcacgccaagcagctgcactgcgacgtcggcagccgcaggttccacgacgccatgaggaacctctggatgccgcgcctgatcgagaggatccacgccgacgactcagccgccgtcgccgctaatgccaccggcgacgtctcccacttctactccgcgagcccatcgcatgagctgtcgtcgtcctcccagccggcgccggcgtaccgaaacgctgcgcccaacggcagctgcgcgcgtgcgccgtccccggac

SEQ ID NO: 126323 - DNA, 479 bp, Zea mays
  Clone ID: MRT4577_46674C.1
agttccctgccgtgcctaattcaccttcccatccttggcactagcggattcgtagcctccagtccttcagcctctccatccgatttggcgcagatgcctccagggaggaaggggcaacgatgcacaagggaaaccccaggccagagccacgtattcaagctgctaagtttgcatgagagggtggtattcatgttttgtaagttcttattccttgttttttctctgcaatttcttttttgtaagcctgcaactggtttttaaatttcttgctctcttcatagtttgtctttctcttcaaagctttctcctgtcggaagcagttatcaagcttgatttcaaggtctgtgcactctccgaacaactttaataagaggacagcacaccaaaactgaatttatattgaaaatagtggccacatatatgtatgaaaaatgtttgtattatgtcttgcttgttaaatttgttggtctgttatgtcg

SEQ ID NO: 126324 - DNA, 431 bp, Zea mays
  Clone ID: MRT4577_46675C.1
aaatgatcaagatgatggatttgatcaggcagatagatcacccgatgattctgttcacaagcaaaatctgattaatggaagtaccactctgagttccctagaaggtagaagttgcaaaagatacaggtatacaaagactccacgctcaggtgatgttggtgctacactagaatacctgcaaaaggtgtgaatcatcataagcagacagttatctttggtgctgcaattatatatgatgaaagtaaagaagctttccaatggttattagatactttcaagatggcaatgaacggaacacatcccaagacattgttaactgatagatctgttgccttaagtgaagctgttgcagccacgttgcctgctacagcccatcgttattgtgtgtggcaaatttatcaaaatgctctgcagcagctgagtcaagcttt

SEQ ID NO: 126325 - DNA, 348 bp, Zea mays
  Clone ID: MRT4577_46676C.1
ggggccccaaaaaccctttattaaaaaaagcttaaagcaaaacggggttttttgggttttatttcccaacaaggttttaaccatttaaaaaattttcatctggaaattaaaagcgtgccctttttaaaaaaatattttttaaaaaaaaaaacctcaaaggggggccccttgggggttttaagaacaaaatttggggtacaaaaacctccaaatgggggaaaatttcgacttttggtttggggctgaaaaaacctggaaaacctaaccacttttggggggattaaaaaaagggaccccccaagggtgtttacttccacacctcccctattgggagcccccaaaggggcc

SEQ ID NO: 126326 - DNA, 682 bp, Zea mays
  Clone ID: MRT4577_46677C.1
gagccatcctcactccactccggcggctccacgattggcgtggccgccccggcgccggcccccctcctccctcctccacgacttcctcggctccggtgaccctcgctccccactcctcgttccccataaagccgtcctcactctctcacggccgcggcccgcggccgcgcctgactccaaactcggcgacctccgagcacgagcagtctcttcgtcttgtccactgccgccggcgagctccagccggtgacgtcctgttggccggaacgcgacagaatttgaagtacaactttctgcttctttattctgcgctcttgatcacttgggatctgcggtgcctgcccggacttgcatttaagacctaaaatttgatgagaagaagattggcagaacatttatcttacattcccagatctctttccttgatacaactcaaggaaatgtcctcagtttctgctggtcatggacgccggccaaagaagaagctttatcaccgtgagcctggcctcgacaaggccatggacctccaaaagaagcccgctctcctccttcgtctccgtgagctcatcttggcccaaaagaaaggatcactacttgtacgtgaccttgaaaaggaggttggctttgtccaaaaatggaactttgtttcacttatcgagcgccaccccaatatcttccatgt

SEQ ID NO: 126327 - DNA, 275 bp, Zea mays
  Clone ID: MRT4577_46678C.1
attggcgtcacgtcctcgcctctggggcaacctggggttcactcgaaaggaatgaggaaacaggtatgcaactccctcacaattcgttctatcgatttgcccttctccacctccccgttcatgtctcgggatatcacgcgcgaggacgctggattcacttatatccaacagggtaatcagcacggggcatgctctgcacccattcccgcacacggttgggctagttatccgttcagataataaactgggcgtgtggatccaaaaggtttgatccc

SEQ ID NO: 126328 - DNA, 716 bp, Zea mays
  Clone ID: MRT4577_46679C.1
gtttcctgtcctgttgccaacgcacccttgttccccgcctgcgacggcaaggcagcaaacgcgattacgcaagcttaggtttcgtctctccctcctctgtcccctccccacctcgtgccccaccctacctccggcgcgcgacgagcgcgagcaagagcccttggtagatagatcccgatggcctcgcgacgccgcacgctcctcaaggtcatcatcctcggcgacagcggggtcgggaagacgtccttgatgaaccaatatgtgaacaagaagttcagtaaccagtacaaggccaccatcggcgcggatttcctcacgaaggaggtgcaatacgaggacaggctcttcactctgcagatatgggatactgctggacaggaaaggtttcagagtcttggtgttgcattctaccgtggagcagactgttgcgttctagtttatgatgtcaattcaatgaaatcatttgataatctgaacaactggcgcgaagaatttctgatccaggctagtccgtctgatcctgataacttcccttttgttctgctgggaaacaaagttgatattgatggtggcaacagccgcgtggtctctgagaagaaggcaaaggcttggtgcgcctcaaaaggcaacatcccatactttgagacatctgcgaaagaaggaacaaatgtagaagacgcttttcagtgcattgtaaaggatgctctgaagaatga

SEQ ID NO: 126329 - DNA, 286 bp, Zea mays
  Clone ID: MRT4577_4667C.1
cccacgcgttcgcagacgcctcagtctgcatgctagtggggagagccgctaggccgggggtgaggaagacctactttacttggcgggttaccacgtacgtactcatagttagactcaactgctacattgcatggattgagcagatattctctagcaggagtcatgaacaagtctccatccacttatatattattcacaaccgagagtcccattgtatatgacgaaggaaaattttgtgacgaaccctaccggagctttgagatgagggcgaacactggaggcctga

SEQ ID NO: 126330 - DNA, 367 bp, Zea mays
  Clone ID: MRT4577_46680C.1
ctatttttgtatttttttttttttttttttattagtgggaggatttagtatttgttttgagcttccccgaacaataggaatttgcgaggacatatataagaaccagggcatcacctacacaactaaggaaaaacacagaaaccggaaaaaaactccacaacccaaaggccattggagagtcgaatgaccatgcaatacacgcaaaagcaaaatggtcgcgccaaccccaaaagcaaagcgaacttattcaggcgagccaccaactcgctagacatcctacggactggaggaaaacaccccccagcaaatacgccgggaggaaggcccttccccgccgcaccaactatcggaggcggaactttaaaac

SEQ ID NO: 126331 - DNA, 349 bp, Zea mays
  Clone ID: MRT4577_46681C.1
gcacgcctctacagggcatcttgtcatggcgcaaggtggcgcccgctcctatggagccggtggcggacgggaccgccgcgctgacgtcaacgaccggctcgtgtagcgtcaagtatgactggcaaggttcgtggccagccgtcaacaagttcatggccgacgccgacgtcacgctggcctataagcccgtcaggaccagagcgatcgcgcgctcaatcagcagcatgatcgacatcacggggacctacagcatcgatctcaccgaagttgctcaacatgacatacggaaccatgatgcttatgttcagtggcctcatcgacgccactaccgcctagcacatcattgatc

SEQ ID NO: 126332 - DNA, 677 bp, Zea mays
  unsure (1)..(677): unsure at all n locations
  Clone ID: MRT4577_46682C.1
naaatacaaaaaaagggggaaaaaaaaaaaaaaaataacaaaaaaaaaaaaaaaaaaaaaaaaaaaaaaaaaaaaaaaaaaaaaaaaaaaaaaccctcgcctcgccgcccgcccagggtctaatccgattcaaacgccccgtttcctcgggtccaaattaacccccaatcccgtcaccaccgccgttggggctcggcgcgatggcccaaaaggaccccgccaagggaaagggggccaccacgggcccgcggcccattccctcccccatccgtttctccaagtttttccgggccaacttggggatcctggtcaccgggggagttggtttcttcggttcgcacctcgtcgacaagttcttggaaaacaaaaaaaacgaggccattgtggttgacaattttttcacggggtcaaaaaacaacctgaaaaaggggatcggacaccctaaatttgaattcttccgccaggatgtcaccaaaccactgttcggggaggttgaccaaatctaccaccttgttggtccggcctcaccaattttctacaagcacaaccttgtcaagaccttcaagacgaatgtctttgaaaccttgaacttgttgggacttgcaaaaaaagttggagctagaatattgttgacttcaacctctgaagtttatggggacccccttgagcatcctcaa

SEQ ID NO: 126333 - DNA, 176 bp, Zea mays
  Clone ID: MRT4577_46683C.1
ccggccgggacttaaattctcgtataccatcggaaccggactacaaccctcttcgtgctacatcacgcaaacgttagtcgtgatcaaagcaccacagactcgaaatgaacgccagggaccggcgcaccgctctaggacttcaggcgtctatgtcgatgaagaccaaggcagagaaa

SEQ ID NO: 126334 - DNA, 167 bp, Zea mays
  Clone ID: MRT4577_46684C.1
gggcgaccgacgcgttcgctacccctattagctagccttttttacttttatgcggcggagatggcgccttgagcactttttcgtgtttggggctgctcttcttttgctgctgctcacgccgctcgccttggctgcagacaagatgtcttattcgtttctactgcgag

SEQ ID NO: 126335 - DNA, 270 bp, Zea mays
  Clone ID: MRT4577_46685C.1
cggtgacccggattatcatttccgcttcccaaacccccaaacaatggcgggggcgaatttaccccggtgcttcctaaagattgcttaacttagttggggaaaattagcctggcctgaaactttgctaacccatctgagagttttggcccggtcaaaaattaccccctgattccccgttgtattggttagattaactgctgatttttatggatgccactgcccccattctccaagccctagaaaaattaattgccgtagtggcccaactgc

SEQ ID NO: 126336 - DNA, 200 bp, Zea mays
  Clone ID: MRT4577_46686C.1
ggaagggaaaaatctgtttaaaatatgggccaattccattcaatggcctaactgggccggttccccctctccttatggctccctcccagccaacaaaagcatgcccccctcccaaccccccaaaaaaatcccccagcaccaattaattcgatttttgcaccccaataattggaaagctaagggaaaaaattgcggccccc

SEQ ID NO: 126337 - DNA, 360 bp, Zea mays
  Clone ID: MRT4577_46687C.1
gtcacaacatagcgaataccgggggggggggaacgccaacaaaacccaacacgaggcatacttctccatctgcctctatcaacagcggttgatacgcttaccttgagacaggaacgcgaacagcaagacctattcccattggcagccgcgggcggggaaaccccaaacgtaacagcaagcaccggtccaacaagaaccaggcccttcaatccactcgggggaagacccagccacgaacagcaacaatagcccttcacctgcgaccgccaaacgaaaacaagcggtatcagtaaactactcccaggtcatccacaacaactacagaaacaggcagcacgaagcacaattgctaaagcggac

SEQ ID NO: 126338 - DNA, 1510 bp, Zea mays
  Clone ID: MRT4577_46688C.1
aatcctcccgtagatgcctagcagagatcaccaacccatgcggtgcaggacgtgacggcgatggcgaggcggcagctgtgccggaccaagcgtaccaaccgtccccgtcggccgtcgggaactccccacccccgcattttctccgcgttttgtcagcgtcacgcctcgcccgccgtcctttcctcacccacagtcccacccccaccccgctttctctgcacggcggggctccactcgtccgccactccaccgcttctacaagatcctacaccacgtcaaaccagacccggccgcggagaaagctagctgtagctacctacccggtccggtctccgcttctcccgcacgcgcagcctgctgcatcctccttcctgcgaccgcccgcttcgttcgcggaacataaaggtgagccggaccggaccggcgacccagccgagagggagcaagaggtgctgagctatcggcgccgcaggtcttgctccggtcagccacggcggcatcggcatcggcatggcggggcggatggtgcggagctgcgtgcagacggcgctcaaggcggccaactccgtcgtggggctcgccggcatggccgtcatcctctacgcgctctggatgctccgcgcatggtacagggagatcgccggcctcggccaacgccccccggccccctggttcatctacacatttcttggcctggggatctttctctgcatactgacttgctctgggcatattgctgctgaaactgcaaatggtcactgcctctactgttacatgaccatcgtatttatgcttattatactggaaggcgcaatcactttggatgtatttctgaatagcaactgggaagagggtttccctcctgacccatcaggcaagtttggggatttcaagcactttgtgagatcaaattccgagatatgtgaatgggtaggcctctcagtggtggctgctcaggtgctatcaatcgttcttgggatggtgctcaggacccttgggcctgaccgtgagaccgactatgacagtgaagacgacacagccgtgcccgcaaggctgcctctcctgagaaaccagtcccagcatggatcttgggactacgctgaagctaccacgtctcgtcagggacttccgttattacattctaaatgtgttcagcgttaataaaagccttgcgacgttccattgcaggtgaagaacaacagacccttcaggatggtcatagattatatctttttcttcttcttatatggagagagtattcctatgttagaatagcagaagcagcagcagcagcggtagagtagttttgaaatctggacgccattcagcatgctcagatatttgagtagcatgtgaactgacccttataaccccgcatactggggaaggaagagatgaggccacgattggtgccttcactgaccaaaaaaaaaaaaaaaaaaaaaaaaaaaaaaaaaaagaaaaaaaaaaaaaaaaaaaaaaaaactcgagagagggccgcgtgtaccca

SEQ ID NO: 126339 - DNA, 507 bp, Zea mays
  Clone ID: MRT4577_46689C.1
aaaaccagaaagcggccgctgcagaaccgggacgaataagggccgaccagcgtcgtccgaaggtgctcccctactgcgatcgttaatacacacccaattagtgacgagaggctctacccagcgctgagtcattgctctccaacgagcgcgagggccgaggactatgaaaacccagcgcaagcgcgaacgccatgagtgggggatgactcgggaacatacagcctggccggaataaataatcgactcgtgatacacacgttgataaagcatgggaaaagggaacggagagatactctcagtatcctcaagctaaaccaccgaacacctggcaccaatcagtgcaaatcctcacaggtcatgggtcttaataacagcctacacaatgactgatgatatcatctcttacataaacagatttaaccattaattaaacatgcgatacaacgcaacaaatacaaacgtggacaaaactatgttgaataaaacggcaggcacatccagcatata

SEQ ID NO: 126340 - DNA, 243 bp, Zea mays
  unsure (1)..(243): unsure at all n locations
  Clone ID: MRT4577_4668C.1
attaatcacccaccctaccacacgaagttaccaccagcagcttgcatcaacagtagaagagagcgagccgaggaccgcgtcaccgnagccctcgtcggcggcccagcaccaccaggcggcggcggccgggcaggcgcacgcgcgcgcggacccgacgcacgacaaccgcgtgaagaacaagaaggcgacggcgcagaaccagtgcagccacgacgtgacgctgacgcaggagccgctggccaa

SEQ ID NO: 126341 - DNA, 502 bp, Zea mays
  unsure (1)..(502): unsure at all n locations
  Clone ID: MRT4577_46690C.1
cgcgggggcgagaagcccaacaggacagggggcggccttaccgttgacggcgacgccaacgggagaggggcnggggcaagggcgagaaccacgacgcccacacgcacggcgcgaacggcgacggcaacagcccaaacaacaacgaggaggaccgggcacccaccggcgacgccaacgacgggggaaccacagggccacagaacagggcacgcacccacgcagggaaccacggcggcggcgcccgcctcggagacaacaccagcgccctccccggctaaggaaatccaaagcaggcgccacaggcgaaacgccacggaaaaacacgggggcgggggagaagcgagcccccatggaagctcaacctccggcacgcaacaataatcaagggccaccctgcaagacaaaatggggatgccaaaaagagataccccaacccaccccaaaaaaaaaaaaaaaagggcgggccggtcaagagaacccagcttacgaacgcgggcaagcg

SEQ ID NO: 126342 - DNA, 178 bp, Zea mays
  Clone ID: MRT4577_46691C.1
tcgagaaggtggacgtgcaagactggcacgggggttgaggctacccgggtcaccggggggggggttaatgctggtaccctcactcccaaatgtacatctgtaaccgtgggttccatggcgtgctgacggggctaatcccaccctgaccagataccaaagcccatgtaccagactgagc

SEQ ID NO: 126343 - DNA, 378 bp, Zea mays
  unsure (1)..(378): unsure at all n locations
  Clone ID: MRT4577_46692C.1
ccgcaagctgcccttccagcgcctgggccgcgagatcgcgccggactggaagaaagannanggttccagtcctccgccgtcgccgcgctgcaggaggccgccgaggcctacctcgtcggcctgttcgaggacaccaacctgtgcgccatccacgccaagcgcgtgaccatcatgcccaaggacattcagcttgcccggcgcattcgcggggagcgcgcctaaggggcccggcggataagccgtgggccggggggcaaggtctttttgggaggttggactacagggcggggccggggggaagagggggggtcttgtaaaaaagggtcaaaacaagggaaaatctttggtgggataaagggaaaagcgactttgtgtggt

SEQ ID NO: 126344 - DNA, 347 bp, Zea mays
  Clone ID: MRT4577_46693C.1
cgcgatgctgggctggcgcttaatgtctattgtcttcattgacggttaacatgtatggaggaggaaccttgtatgccagttgaaggtacttgttactttatcacacctcttaattcacccaactatatggaccgctatgcagaaatctttgctttctacattgaaacctatacataaatgttcaacactaagacttgcctgagctttgctttacgcatcttgtaccatattgatgcaaatttgcggttttaatcgtctcaagtctttaacaatgtgaatttgttgtaagggaagccaactgtgtacctataactaactgatttcacgaattatctaaacagattgct

SEQ ID NO: 126345 - DNA, 338 bp, Zea mays
  Clone ID: MRT4577_46694C.1
aactagcaacatacatagtgaagacactattttttcttatcaccaatgggagccaagatgttggccctccttgccctccttgctctatcatcaagcgctgctacctcgacttttattccacaatgctcacaacaatacctttattcggcgacagttgtgttattttaattcccaactatacaatcctacatggtacaagaggccattcaagcaagcatattacggcctatatcataaaccctccaacaaccatatgctttattgcaacagacatccttagtgcatctgtatctccaaagaatcttggcacatcattctacatcaacagttgctaccat

SEQ ID NO: 126346 - DNA, 346 bp, Zea mays
  Clone ID: MRT4577_46695C.1
cgcacgcttgggcggacgcgttttttttaacaaaatagagctcgttagggggtgtgaaacggtcactgagcgtcttctggaagcgcagactttcaacagttgtggtgaagctcaattttttatagaccttaacgaggctttgacgtacatccaacaaggtcatgtgcgccacccaccaaatgcagtcacggacccataattttttgcgaccagaaacatggaggacttcatcacagttgtgtattcctcaaatatcaacaggaaggttattggagaacaatgctgcataagcataatttttaccccatcgtctaagaaatacattctcgcgaaattttatcttgcc

SEQ ID NO: 126347 - DNA, 265 bp, Zea mays
  Clone ID: MRT4577_46696C.1
aatgcacgtgcggggctggctaccgaccagcatcccgtgagggatgaagacagaccgggaggccgagacacggagcggctgagctcttcagtgcactcctgggtggaggaacacaagctctcgtccatcgcagccgcgttagccactgtggtggtcgcgttcttatcgtacagcctgagatcgacgccggagcggccctcgaacctgcgcttcattcagaccaggatgcactcacaagcgctcacgctcgccgagctaagaagag

SEQ ID NO: 126348 - DNA, 209 bp, Zea mays
  Clone ID: MRT4577_46697C.1
gtccctggccagacggatgtcatctcaccagctgcccgcgcatgcaattactctcggtggacggttgcaagacatatcaggtgagacctccagagggaatgggatcaacgacagtggcccctacatgattagccagcggactgctgcttctgctgctgggcccatagacgtagctatatgaagtacatggctgacgagggggggggcga

SEQ ID NO: 126349 - DNA, 578 bp, Zea mays
  Clone ID: MRT4577_46698C.1
attgggtacctcgaggccggccgggcttttgtatcttcatttcgccgtcgtcgttccccggtctctcctctgcttgcgtactgcgtgaagcaccagcgtcgcgcagtgtctatgatcagctccctccccaaacacgagaggcttggggtcatctaccgggtgcgctcctggaggaggccgtggaatagcaagccaggcggcaagtatctgcttgatatgatggtttctgtctcgacttggctccgttatgccgcacacaagtttgattactgcatctccctctccgataacatacatataatgtgagacaaatcaccagcacgcatgtaactgatgtgatattcctatagatttcttccatggaacagactctacctacgtagtgtcagactgctacagaagatagctcgatggctcccatcgtatctccgactgcaggatcctgccttgtacagaacatatctattctttgagccccacatacactgttttatccgttcacgttgtcttgtgaagagacccactgaagtctgcctctcgtgatattcgacgactgattgcactgccctgtgtatgag

SEQ ID NO: 126350 - DNA, 2339 bp, Zea mays
  Clone ID: MRT4577_46699C.1
ttcaaatccgggcctcgcgactgactcagcgagatagctacgaacaagaaggactgcatagattttatcaatcgtcctttgtttggtgccaatgattttccatgcatgggtaccctcggggccggccgggaaaaattcccgaatcccaccgccagcctccgcaaaattccccaatcccaccgccagcctccgcactcgcctcggaacctagccccgtcgactccttcagatccggcgggatcgccggctcctaccctcggtcgccacgttccggcatctcggctccccggcgtcctctacccggcttctacacctgccatcttccccaggcggcgtaccgacgaatcgcttggtcgacaggctacatcaccaccaagccagcatcgacgactcgaaggattcgtgtcgtcgtcgatcgccgatagccggtcgccggtcgccggtcgcctcttcgtagatcgaattcgttctgtgattattctggttgcagttcgctgtatttcatctgagatctgaaaaaaagttcgggccatctcgtgatagagaggcctttatatatacgtgaaaaaggagacatactcgccatccgtcatgggtgttgtgtattaccaatataagagtgaaaaggaaatctgttctatgccaaaaaaaaaaaaaaaaaagcggccatctgaactcaagcagcttatcatgacgagcggtaggcacggccgtggtcgaatccgcggtcgtgccacagaggatattgtcatctccaacgcccaaactggcgaagaatatgcagatgaaagagcatccataccacagaacacaactgtgttggtccgcagaatttccattgctgggcaactgtcagagaagattgttttgtcccctaggccgaaagtcacagaagaatgttctgtaccttgcaagtcggtggttactgactcaagctcaaagtcatgttcttccacagtagtgcaagatgaagatgctgcaattgcagcagtaattgatgctgctgaactcaaatgggaacagctcccctctaaaaaaggacaaggcagtggaaggtttacgtcaggacgtaactatgggtcattggaaggggaggcacctccaccaggctatgtctgtcgctcttgcggtgttccaggccatttcattcaacactgctcacaggaaaacaagatgcctccacctggatacatttgctacagatgccgaattccagggcattttatccatcgttgcccaagcattggtgatcccaagtgcgacaacaataaaatgctttgttctcttgtcccagtagttacacctgtcaatggcattttggattcacttgtcccggcttcccccgttagtgctgttgatgacttgccagcagagctccactgcaggctatgtaaaaaagtgatgagagatgcagtattgacaagcaagtgctgttttgatagtttttgtgatagatgcattcgggattatattattaaagagtcgaagtgcatttgtggagtcaagacactagcagatgacctcattcccaatcaaacacttcggagcacaatcagcaatatgttgggaacacagactagcagtggtggaagtggtataacaagacacagaagttcgtcaggcagcaaccctgaccccaaaatacagagccacactgcctcagcaagggaggtgaagcaatctagagaccaccagctaccagcagcatctgcacctgatgatgtgctccaggttgccacagaaggtgctctagtgaaccagcctcgggagaaattggcacccagtgctgaaatccttggtaaagatggaggcaattctgcacaagtgtcagcagagaagactgtagcaaatgctgaagccctcaaagtaaaggatggaactgaatcgacttcaaaggccaccactgtttcagggtcccgagaatatgatgtcacaaggacagatcaaccaaagaagaagcggaagaaggcagacttaaccaagaacgttcagcctaacaatgttggctatggttacaatgtttcatttgaccctgcatattacaatcccttcatcaatggacatccttgggcaactgaaccctacatgtatagctcaatggggatgccgtacgctggttatccgatggatccatattgtgcaaatccacttggatccatattgaaaagaaggcatgagcatgcaagtattgacacagcttgctgaggctgaactttttgtgatagatgtaagtggttttcatatactccatttgtatgtgccttcgaagtctgtgttttggtttcagtgagtgcattatctaaaaatacccaagttttgttttacaccaaaaaaaagaa

SEQ ID NO: 126351 - DNA, 819 bp, Zea mays
  unsure (1)..(819): unsure at all n locations
  Clone ID: MRT4577_4669C.1
aattcaaatcgcatcgccagagccccggggtacgacacatcgtgggcgatcctttgaagccccccacatgcgacagccaagctccgccgcggtctgcgcttccgatcgaatccgaggcttcctctaaatttcaaaaacatggttgttgcaaacggcaatgtcgacatggaggaaggaacccttgaaatcgggattgagtacaggacagtttctggagttgctggtcctcttgtgattcttgacaaagtgaagggtcctaaataccaagaaatcgtcaacatacgattgggagatggcacaactaggcgtggtcaggtgcttgaagttgatggagagaaagctgtggttcaggtttttgagggaacttctggtattgacaacaaatatacaactgtgcaattcactggtgaggttctaaaaactccagtatcactggatatgcttggccgcattttcaatggttctgggaaacctatagataatggcccaccaattttaccagaggcgtacctggatatttccggaagttctatcaatcccagcgaacggacataccctgaagaaatgattcagactggcatatctacaattgatgtgatgaattctatagctcgtggtcagaagatacctctgttctccgctgcaggtctgccacacaatgaaattgctgctcagatttgtcgtcaggctgggctggtaaagcgtaaagagaagactgacaatatcttggagaatgccgaggaagacnattttgctattgtctttgcagctatgggagtaacatggaaacagcacaatttttcaagcgtgattttgagg

SEQ ID NO: 126352 - DNA, 846 bp, Zea mays
  Clone ID: MRT4577_466C.1
tgtcttgagcaaagtgaacaaataatctgggtgctggaaagggaaaaatggatcaagattttagagagaagaacccaggatattaataaggaggctgatgagctaaacaagaagttggcgttaataccaagccggcaaaggatgcatgtgcctcggagagtacaactgtatgaggcgcactgtgttgaggcaagtaacttgcacataaatctgaggctggttcttgaagctttagagaactttgctgccaattcactgcaagctttccaggatgtggcaaaaagtgctgaagggacaagactgccaagagataatgtgagaagagagcaccgtagttcggaaagaagttcaaactacaaaactagctagttagatttgaatcatattcgtatctaggtgggatgaaaatataatgtaagatgcagatctagtagcgttcaggtgtggtggcttcctgtgcagatgaaacttggatggggttcttgtgccacagataaaacaactttttggtgggtttgagctgttgaagatctgacattgaagacgtttgggggtgagtgatagaaatttttttggggggcaagaattaaaagaaatcctatcagaaagagcgtttgggcagtgttcaggttcgttgtttgccttggttcagggatgtgtatatacccctcgtggcctcgttgaacaaccgcggggttatactgggtgcgaagaccgagcagaaatatgcggtacggctgtcgcttctacagatggtcctctcaaaaatcaaagcagttggattttggttaaatgtgcattcctgaacgatcttttgcaacacgaacttgtacatatttatggtgt

SEQ ID NO: 126353 - DNA, 461 bp, Zea mays
  unsure (1)..(461): unsure at all n locations
  Clone ID: MRT4577_46700C.1
agcagtggtaacaacgcagagtacttttttttttttttttttttttttttttttttttttttttttttttttttttttttttttttttttaaaaacccagggattttattcgggggtagggacaaggaaattaattagtaccccggccttaagaacacaaaacctcgaacaaaaaaaatttggaacattttttgttttaacaggaaaaaccgcccaccccggttttaattaaaaagggaaaaaggacaagtttaaggcatagcagcataggggcaacactaaaatattaccccaacccataaagcgggcttcagcttaaaataataaggcgggaaaacttccaaaagggaccccggggggggaaaagacttgattcagncagtctaaagagcaggggggggggggaaccattaagggaataaaccccccggggactttggggggtaaccactggttagggg

SEQ ID NO: 126354 - DNA, 403 bp, Zea mays
  Clone ID: MRT4577_46701C.1
ctctccctttttttttttttttttttttttttttttttttctttttagggggggggtttttttttttttttaaaaaaagccccccaaatgggactttttggtgctccttccttactaaacaaacaagcggggggattttcaaataccaacccctctgactgaatccccccctgacaaaacccatgcttttaagggtggtcaaacccaccctgatggcatttttggttcccgggaacgaacaacaaaccccctttttactttcttttgaaagccccccaaactgggtaaataaagtccaaaaaccccgtccccttgaaaaggcccctgcccgttaaaagcctttaacccttcaaccggaggaagccctttttgggggtgttttttaaaaaaaacgggcccgtgg

SEQ ID NO: 126355 - DNA, 703 bp, Zea mays
  Clone ID: MRT4577_46702C.1
cattgggtacctcgaggccggccgggataccccatcctatatcgccttctatcgacataggactactcgacatcacatcacattccaccgaactctgcaacatgcgagatatgttgtgtagcagggattcgctagacgatttccgcgctgagtgaaggagggcacttgaaagagcctcgatcagattaggcgagatagatacgatagatatggtgtgagagctattttgctattaactagattgatgtatcttgacaagttattgagctagactcttatcacatgctctgtactgtctatatattctaccgtggtgcgccgctgcacgtgttccaacagaccctcgagcaagcactccaagaagatgacagcagaggtaatactgctcccactcctcgcggagcatcaagttcagactgctctggaccttaccatgaacagtctggatttcctacttcctgatcgtcacacatctcgtaacctgctacactgacctcaaaggaaaagactcctatcgaaccagatgcgccgatgccaccaccccgctcacttgtatctttaccgtcgtacaacaacacgccgctgataactcccccatactcacctccaaggctgtacgcaacattgtctccgccgaggttgcttcactctccctaacatcgatgaacatgcacaatgacacgtcctcatctactactagaca

SEQ ID NO: 126356 - DNA, 219 bp, Zea mays
  Clone ID: MRT4577_46703C.1
ctgcgctccagatgcactccatcctggggcaaaaattctgctgcgagctccgatccgaggcgactactaacccacgccaaagattgcgtccgaacagaccctgcgggggtcgaagtaaggggaagcgcgattctccggttggctgtcactcggaccatcggaggagagggaaaaggagcccctattctttcggcccgatgtccgaccgaccgatggact

SEQ ID NO: 126357 - DNA, 616 bp, Zea mays
  Clone ID: MRT4577_46704C.1
attggtacctcgagccggcgggaattgtagaagtctttctggtgtcttcccctactgccatttgtctctcgggacctgccattgaatcggaagatagtaaccctatccagtaatcgctaaagaagggccaactggtccggcgttgtactgcaactagtatgctaatcgaggctcgactccttggacgcgaagagtattctgggacatgaagaccgcatctgactagctgagggaaatagagtcccgattactcacgcgcgcatctcgcgagaccagtgaactgctgacatgaacggtattcacttacagaggagcatccatctggatccagcatcagtaagcacgtccctcgtctcaatcgacgtcgacaggaagttcagcctgcgcggatagtctgccacagaccgtctctggaagcctgatatggaacatataattgtgtgcgacaataagaagcatgatgatgatctcctcgattacatccagttggttggaaccttgctcaagagtgacaacgatggctctgacgcatgatatcatactatctagcaatgtctggttatgaacatgttgtgccacctataacattactgttgaagtactagtagatcttgtt

SEQ ID NO: 126358 - DNA, 315 bp, Zea mays
  Clone ID: MRT4577_46705C.1
gccggccggtccggggaatctctcaaatcactgtatcctcatacacaaatctataactttacgtctgtcatcatggcttgcgattgtggatctacctgcggctgcagtggagcgagctcctgctcctgtggccagagctgttcttgcaagaactgcggcaagtaaccaactcgttctaaggaacaaagatggtgggtgcatggaggagttgccggggctatggatgtcaatggttttgtagttctttgataacattctatcaatacaagcctgaatgaggtgttattcgaaaaaaaaaaaaaaaaaaggccccta

SEQ ID NO: 126359 - DNA, 537 bp, Zea mays
  unsure (1)..(537): unsure at all n locations
  Clone ID: MRT4577_46706C.1
tttctcgttgcggncgacgacaaaacgcgtttgtttttcttttggatggccgcagaccgcgggcaaggatggacataaaaacccttctgaagaggagccgggtatttcaggaggaagatgaaagaaaattcctgctcatatgaataatttgacactacacagatcagctattttggatagatccaaggatataaaaaataggagtgattcactagccaagtccagcatatctctgggtgaagctgaacggtctgcacccaagaaagcatcagcaagtcgaaaaggagttctatccagtgagcatatggttcccggtacagctacaccatctcaacataaatctctgaactctgatagaagaaagatgcattcaattgttgcacagaaggctccaacaaatctaaggtgttcaaatggagttccaaaaattgataaaaaagaaacaacaccagccaagggggctatatttcttgcgaaattgaagttaccggagaagaccttgctggagaaatctagaaatgtggataggatcacaat

SEQ ID NO: 126360 - DNA, 185 bp, Zea mays
  Clone ID: MRT4577_46707C.1
cccacgcgttcgtccacgcatgcacttaatttcgtgttgcagttcgctacgcgcaatatgggctggaactgtatgtaaacggtcttgcacatactactcatacatgttctcttgctgttactattcgttctctgagcagcctttgtgccaagagcgactcatgatgcagcattctatcttgtatc

SEQ ID NO: 126361 - DNA, 335 bp, Zea mays
  Clone ID: MRT4577_46708C.1
ccattggcgacccgcccagggggccccccaaaagggacaaacccagcacacagggggcccaaaccagggaccccgggcaaagaaccaaccggggaaaaatcaagacaaaaacagatcccggggcaaaagggtaacccgcccacaaccccacaaaaaaaaaaaaccgaaagcaaaagggggaaacccaggggccccaaaggagggagcaaacccacattaacgggggggggcacaaggcccccatcccagggggaaaaccgggtggcccaacggccaaaaagaaacggccaaccccaggggaaaggggggctgggaatggggcccccttccagccc

SEQ ID NO: 126362 - DNA, 255 bp, Zea mays
  Clone ID: MRT4577_46709C.1
cccagcgtccgcggaagcgtgggctgacgcgtgggcggacgcgtgggcggacgcgtggatcaagccacgattcctagtcccatacaagcagtcgttcaagatttccctaagacagtcacattccacataaacacaatattttcaaatattcaagtctaattcgacatttatttatatgtttaacactagattcaaaaaaaacttctatcctttgcaccaactaatttttccaccaaaccacaaaaaaattattcg

SEQ ID NO: 126363 - DNA, 399 bp, Zea mays
  Clone ID: MRT4577_4670C.1
cggcccacacaccccaaatttgaatttataaggggccttcaaccaaccacaaaattgcattatatcggcggggacaaaaaaaatgcaggggcccctgaaaaaaaaatctcccacagatttcttgaaaaaaaacccctttggggtaggcttaaaataaccctactgccgggcacataaatttctgcagaaagattttttaaaaacaggggatctaaatcagtgaaggcagcattggaccacaaaaccttccttttgtgctttgaggaacccccccaggggaaaaatccctcaatgcttcagggaacaaaaaaggcgggaggcggtactgaatctggaccaacacccccatgccccggttgaatacaagaaacaccctccttaaggggctttggaaaattg

SEQ ID NO: 126364 - DNA, 928 bp, Zea mays
  Clone ID: MRT4577_46710C.1
ccggccgggaaaaaacctagaggatggccgggccggttcctctgctgtatgttcagtgcctgcctggtttctctccccttccctcctcgacctctcttccagcttccaacgcagctcatcaccagacaccactacttccccagttcccctcaccgtccctgcgctccatcgtctttggtgtccatagctttaaatacgaccacgaagccggtgcggcgactcggcgatctctccatcactgctgcggtgctgcctagctaccttctcggcctcgggtgggggcggcattgtcggtccagactccagagcgcgctgcttccggagctggccgcttgcgctgagccctctgccggaggcaatgaggagcggccgtgcctgctccgctctcgcgtcgctcctgctgctgtggctgggcgtcgccgccgcgcagaaggcctcgtcctggaagacattgagcggcaaggctccagcaatcgtagccaagggtggattctccgggttattccctgattcaagcgaatacgcttatcaatttgcgctgctcgctagctcgccggatacgatactgtactgcgatgtgcggctgaccaaggatgagattggcatttgcctgccggacatcaagatggataactgcacgaacattccagatttctatgcgcagggtcagaagagctacctcgtcaatggcgtgcctacttcgggatggttctcggtggactacaatggcactgagcttgaacaagtgactctcaagcaatcaatcaattctcggacacccagatttgattcaagtttctttccactacttgctgttgaagatgtgcagtccaaattcaaaccttctggaatttggctcaatgttcagcatgacagtttctacagccaggtcaatctaagcatgaggaattatatcatttctggatct

SEQ ID NO: 126365 - DNA, 1280 bp, Zea mays
  Clone ID: MRT4577_46711C.1
cccacgcgtccgaaaaaaaaacatcgggtgtacatgtgtacacccgtgccgtttactgggtcggcagtcggccggcagcccggcacctggcccaagggttgagcatggagatcacgaacgagatgcttaagagactgccgagactacaatggcagaatttgttctatggactttcacagcaaggctaccaactatctcgtgacagctagcgatgatgaatcaatccgtttatacgatacccaagatgcagtggttgtctgcatcgcactttgctctggaaaagaaaattttctctcatgttcgcttgatcgtaccattctcttatgggaccatcgggctgaaaaaccgcagggcttactgcgcgcgcaaaggaggcctacagtttcgtacgacgcccagggcatggtatttgctgtcgcctatggtggccgcataaagatgtttgatattcggaaattcggaatggggccttttgcgaccttctctgtcggcactgatgattcggaagcccatgtcgtacagttcagcggtgatggcaggcggattctgttaaccactaaagctgggcgtgttcatgtgctagattcttttgaaggcaacagcattgcatcgtttcgcgcgaagccaatattaaccaattcgacactggaggcatcgttctgtcccgagggaaaccatatcgtttctggctccggtgatggtagtgtctatgcttggaacgttgagagcggaaaggtgcagaggaagaacatgtgatattgataccgaagcagcgtatatattattatgatgatgttatataccacacatctgtttggctgaggtatggtcactttttgggtcatcaggttgcatgctgggaaagcacagatgtgaaaccgccgcgggtaaggtggtctccaggatccttgatgttcgtgacaggaacgtcggagctgtcctgctgggtgccggatttgtccaagctggagtccttcaccatcagccacaccaacaccaggtccagctcgtccctgtaggcttggaccgatttgcatgccgtgtggctggttgacgcgactccatcaagagcaggaggaacaagaaagcatagcggagcatcttgtacgaatgagttgtgatggttggattctgttcctgatggggcccggtaagctactcttgcaacgattgtggtcttgcggcaacgctgcgcgttgtttctgtagtgaacatgaactgggcagttaattggttactttttcaaagaaagatataaagaaaatacagctctcttattt

SEQ ID NO: 126366 - DNA, 342 bp, Zea mays
  Clone ID: MRT4577_46712C.1
ggaaacaccccgggcaaatttcacacgaaagggaacagcctgcccctacaaaagagtagagcaatgcttggtccaggggtcccaccaccatgggccagacctacaagggaagcccggaccgatgcttggccccacccatacaagctcatgaaagttccacgggctgttagcagtgggaacaaaattaaaccattcaaggggggggctgcccgacaaaaaatgccaaagaaaccaatttacgctgctgggggcctcccaacttaaaaattactaaaggatgtttgatccaacaaaggtagaagaccccaggggggcatccagttctcaggaactggggcccgg

SEQ ID NO: 126367 - DNA, 461 bp, Zea mays
  Clone ID: MRT4577_46713C.1
gtttgatattcggaaattcggaatggggccttttgcgaccttctctgtcggcactgatgattcggaagcccatgtcgtacagttcagcggtgatggcaggcggattctgttaaccactaaagctgggcgtgttcatgtgctagattcttttgaaggcaacaggttgcatgctgggaaagcacagatgtgaaaccgccgcgggtaaggtggtctccaggatccttgatgttcgtgacaggaacgtcggagctgtcctgctgggtgccggatttgtccaagctggagtccttcaccatcagccacaccaacgccaggtccagctcgtccctgtaggcttggaccgatttgcatgccgtgtggctggttgacgcgactccatcaagagcaggaggaacaagaaagcatagcggagcatcttgtacgaatgagttgtgatggttggattcttttcctgatggccc

SEQ ID NO: 126368 - DNA, 1270 bp, Zea mays
  unsure (1)..(1270): unsure at all n locations
  Clone ID: MRT4577_46714C.1
atgaaaagacggctcaggaaaaaaatggcggacagcccgcctccaccgccgtggcgcccttcaccccgccccgcgttctctctccctcggtgacggctcgacgaccgccgcgccggcctacgctccagccttcttgtgcttcgcggggcccttcgccgtcgactaacacaccaccaccagcatagggttctcttcccttcctgctctacgaagcctagcaccaaaccctaactgtttgttttattcggatttgttccaactacaaatgtggtgtatgtagtattgtgtcaactaactttgctctttttcccctttttttctttttgcaaaaaaaaaacatcgggtgtacatgtgtacacccgtgccgtttactgggtcggcagtcggccggcagcccggcacctggcccaagggttgagcatggagatcacgaacgagatgcttaagagactgccgagactacaatggcagaatttgttctatggactttcacagcaaggctaccaactatctcgtgacagctagcgatgatgaatcaatccgtttatacgatacccaagatgcagtgtgtttgaatactattaatagcaaaaaatatggggtntggacttgtgtgcttcactgataacccatctattgtcttatattcatcgaacaatggctgggatgaatctctgcgcctgctctcaatgaggatcctcgattcagcgggtattataaaggtcaccttgatagggttgtctgcatcgcactttgctctggaaaagaaaattttctctcatgttcgcttgatcgtaccattctcttatgggaccatcgggctgaaaaaccgcagggcttactgcgcgcgcaaaggaggcctacagtttcgtacgacgcccagggcatggtatttgctgtcgcctatggtggccgcataaagatgtttgatattcggaaattcggaatggtagttgtgattgaacgctggcgtgggttggttacttggtttggcctttatctgacttgttatgtgcgtaggggccttttgcgaccttctctgtcggcactgatgattcggaagcccatgtcgtacagttcagcggtgatggcaggcggattctgttaaccactaaagctgggcgtgttcatgtgctaggttcttttgaaggcaacagcgtaagcatacttacagccgaccagtttgtatcatgctcatgcacatactagttgtagtaaaatgtggtccttatgttttttgttcaagaaaaaaaaaaaaaaaaaagcggcc

SEQ ID NO: 126369 - DNA, 1808 bp, Zea mays
  Clone ID: MRT4577_46715C.1
ggctcaggaaaaacaacggcggacagcccgcctccaccgccgtggcgccgttcaccccgccccgcgttctctctccctcggcgacggctcgacgaccgccgcgccgccctacgctccagcctccatgtgcttcgcggggcccttcgccgtcgactaacacaccaccaccaccatgtacgaccgccccatctcttcccttcctgctctacgaagcctagcaccaaaccctaactgtttgttttattcggatttgttccaaactacaaatgtggtgtatgtagtattgtgtccactaactttgctctcttttttttccctttttctttttgcaaaaaaacatcgggtgtacatgtgttcacccgtgccgtttactgggtcggcagtcggccggcacctggcccaagggttgagcatggagatcacgaacgagatgcttaagagactgccgagactacaatggcagaatttgttctatggactttcacagcaaggctaccaactatctcgtgacagctagcgatgatgaatcaatccgtttatacgatacccaagatgcagtgtgtttgaatactattaatagcaaaaaatatggggttggacttgtgtgcttcactgataacccatctattgtcttatattcatcgaacaatggctgggatgaatctctgcgtctgctctcaatgaatgataaccggtttattagatattataaaggtcaccttgatagggttgtctgcatcgcactttgctctggaaaagaaaactttctctcatgttcgcttgatcgtaccattctcttatgggaccatcgggctgaaaaaccgcagggcttactgcgcgcgcaaaggaggcctacagtttcgtacgacgcccagggcatggtatttgctgtcgcctatggtggccgcataaagatgtttgatattcggaaattcggaatggggccttttgcgaccttctctgtcggcactgatgattcggaagcccatgtcgtacagttcagcggtgatggcaggcggattctgttaaccactaaagctgggcgtgttcatgtgctagattcttttgaaggcaacagcattgcatcgtttcgcgcgaagccaatattaaccaattcgacactggaggcatcgttctgtcccgagggaaaccatatcgtatctggctccggtgatggtagtgtctatgcttggaacgttgagagcggaaaggttgcatgctgggaaagcacagatgtgaaaccgccgcgggtaaggtggtctccaggatccttgatgttcgtgacaggaacgtcggagctgtcctgctgggtgccggatttgtccaagctggagtccttcaccatcagccacaccaacaccaggtccagctcgtccctgtaggcttggaccgatttgcatgccgtgtggccggttgacgcgaaggaggaacaagaaagcatagcggagcatcttgtaccaattgagtttgtgatctgttcctgatggcccggtaagctactcttgcaacgattgtggtcttgcggcaacgctgcgcgttgtttctgtagtgaacatgaactgtgcagttaattggttactttttcaaagaaagatataaagaaaatacagctctcttataaccggagcatcgttgtgggaaatgagttgtgatggttggattcttttcctgatggcccggtaaagctactcttgcaacgatcgtggtcttgcggcaacgctgcgcgttgtttctgtagtgaacatgaactgggcagttaattggttacttttcaaagacagatataaagaaaatacagcctcctattt

SEQ ID NO: 126370 - DNA, 578 bp, Zea mays
  Clone ID: MRT4577_46716C.1
tgggtacctcgaggccggccgggaccgcgctgtctcaatttccccttaacacagcacatatgaagaacgcggaggccatggcctgtcgccagaagcctgtctcggagcctagatgagatccgcgtcctctgtctgtcaaacctcaccgatgcagagccgctgcccgtagcattctcccgctacgagcgcagactatggagcacatcaaggcctgcaatccctccctccccttccttgtaagctagtgctcctgtgtacaggcccagctctgttcgtcctatcatatgtctgggaagagatgatggaaattgaatggcctgacggaatcgcagattgataataagctgctggagcttgacatggcctgaaaatctctataaaaacaaataagattggaactctatcctgacgtggttaactatccccaacaagtgataggcatgatgagagagataatgttactctatctgtttctgcagtcgtgtctgaaatcaagcctgtaattagctcaactatgtgagataatcactactcttttacttgccaagttgcaaaaagaaatagaaaataggacctcg

SEQ ID NO: 126371 - DNA, 1838 bp, Zea mays
  Clone ID: MRT4577_46717C.1
ttcggggtagaaaatgcaccaaactagaaaaagagttgcgtggagaaaggaagggccatgaaaagcacggctcaggaaaaacaacggcggacagcccgcctccaccgccgtggcgccgttcaccccgccccgcgttctctctccctcggtgacggctcgacgatcgccgcgccggcctacgctccagccttcatgtgcttcgcggggcccttcgccgtcgactaacacaccaccaccagcatagggttctcttcccttcctgctctacgaagcctagcaccaaaccctaactgtttgttttattcggatttgttccaactacaaatgtggtgtatgtagtattgtgtcaactaactttgctctttttccccttttttctttttgcaaaaaaaaacatcgggtgtacatgtgtacacccgtgccgtttactgggtcggcagtcggccggcagcccggcacctggcccaagggttgagcatggagatcacgaacgagatgcttaagagactgccgagactacgttcttcagttgccaaggccatatccctggtacctgattgactagtcgctgcttattgtcataaagctttttggagggtttgctggttgctgccatgacaagtccacctagggtgagcatggagatcactgatgaggtggtcaagagcatgaagatagggttggtctttcaaggctataatggcagaatttgttctatggactttcacagcaaggctaccaactatctcgtgacagctagcgatgatgaatcaatccgtttatacgatacccaagatgcagtgtgtttgaatactattaatagcaaaaaatatggggttggacttgtgtgcttcactgataacccatctattgtcttatattcatcgaacaatggctgggatgaatctctgcgtctgctctcaatgaatgataaccggtttattagatattataaaggtcaccttgatagggttgtctgcatcgcactttgctctggaaaagaaaattttctctcatgttcgcttgatcgtaccattctcttatgggaccatcgggctgaaaaaccgcagggcttactgcgcgcgcaaaggaggcctacagtttcgtacgacgcccagggcatggtatttgctgtcgcctatggtggccgcataaagatgtttgatattcggaaattcggaatgcccatgtcgtacagttcagcggtgatggcaggcggattctgttaaccactaaagctgggcgtgttcatgtgctagattcttttgaaggcaacagcattgcatcgtttcgcgcgaagccaatattaaccaattcgacactggaggcatcgttctgtcccgagggaaaccatatcgtatctggctccggtgatggtagtgtctatgcttggaacgttgagagcggaaaggttgcatgctgggaaagcacagatgtgaaaccgccgcgggtaaggtggtctccaggatccttgatgttcgtgacaggaacgtcggagctgtcctgctgggtgccggatttgtccaagctggagtccttcaccatcagccacaccaacgccaggtccagctcgtccctgtaggcttggaccgatttgcatgccgtgtggctggttgacgcgactccatcaagagcaggaggaacaagaaagcatagcggagcatcttgtacgaatgagttgtgatggttggattcttttcctgatggcccggtaaagctactcttgcaacgatcgtggtcttgcggcaacgctgcgcgttgtttctgtagtgaacatgaactgggcagttaattggttactttttcaaagaaagatataaagaaaatacagctctctt

SEQ ID NO: 126372 - DNA, 406 bp, Zea mays
  Clone ID: MRT4577_46718C.1
aaaaatggaaagttttgatttgacccattcaaatgggattgggtgccagtaaaggtacacaaaattgtccaaacagcaaatagggggggggagggaaatgacaaccattttgcaacaccattaggggggttcagccttcttcttgagcttgggcacgtaaggggagagcaccgcaacaacatttttggttggggcctgcaggggggggacaagggacgtagggggtccctgcagcgccccaagcaaggtggggtacacctttgggcgggtgggcatagtttcgagcgccttgaagtcgccgggcccgtaaaacttggcctaaaagacggggccgacaaaatccttggttttcttgacacgcttctccttttggaaggggcggtagggtttgagcgcggcgggtacc

SEQ ID NO: 126373 - DNA, 462 bp, Zea mays
  unsure (1)..(462): unsure at all n locations
  Clone ID: MRT4577_46719C.1
cctgaaccccctaacccgatncacttcgccttgcttgcaagccaactggcgaacccttcccgcggcggcctcttccaaccgggccgccaaattcccaccccagcttctcccggtccccgcgccttcgcttgggcaaggccggtgaaaggggctttggccctgagcaatgggcccgcgagccccgcccagcgggagcattgcgtgccaggcggcgagcagcaatctccgccgaacccgtccccgacatggagaagcggaagctgatgaacctcctcctcctcggcgccatctcgttgccccaccgtcggcatgggtcgtcccctacggcgccttcttcgtcctggcgcttcgggaacgccggcggcgggacctacgccaaggacaagctgngcaacgacatcacggtggaagggcgtggctcaacacgcacggtcccaaacgatcgcacgctcgcgcaggggc

SEQ ID NO: 126374 - DNA, 281 bp, Zea mays
  unsure (1)..(281): unsure at all n locations
  Clone ID: MRT4577_4671C.1
ctactcttcctcgnncncgngccgacatccggcagcgtgcgcnctccntcccctggccgctcatggccgaagggccccctctacgtcgccgggncctgggnccnnnncctcgagntgggccgncccggcccccgccccccaccccgacctgctgcaccacgcctgctcgcctgactacgcctccccggncacggtgcacgccatcccgcgcacggcgaacttttcggcggccgacttcttctcccacccgatgaggaacccggccaacaccaccaccctcg

SEQ ID NO: 126375 - DNA, 186 bp, Zea mays
  Clone ID: MRT4577_46720C.1
atcacgaatcagattaagtcggacgctatcaccacggccacaacagatgccctcgctggcagttctctcctcggaagcacgcatgtcaccgtggaccatgctccaccagtggagtctgacagcaaaacgaaccatcagcaatgtgatctctctgatcgttcttgaggaggtttcccacagaactgg

SEQ ID NO: 126376 - DNA, 222 bp, Zea mays
  Clone ID: MRT4577_46721C.1
gacccgcttgctgatcgttggattgatatagcactactttgatggggactaagtttactaggcgacctcatagttgtaattactgccattgaaagagttgatttagaacgctgcttttaatgaggcgtgatgtttgtgtggtcatatgttaagctttttgttgttgtactgtattatcaggaacactgctgctgtgctaattcttgttatgtgctttacaca

SEQ ID NO: 126377 - DNA, 130 bp, Zea mays
  Clone ID: MRT4577_46722C.1
atcaagaattgcagggtattatttagaatggaaccttacatcttcaaatccttggcgaactatcttagactggaaggattcgctacagatacaagtatcaaagttgaggaaatacttgggctcttcctat

SEQ ID NO: 126378 - DNA, 217 bp, Zea mays
  Clone ID: MRT4577_46723C.1
gttatgcttcatggttatctgactagagaataggccattttgttatacgccgacgatcacatccaaagcgctagaaaaatattgagagggatgggggccgacaagtaccacgcaagatattctacggtgaaaaaaaagggcacgtgccagccttaggctactgtgacggtcggaccatcatagctcacaaagtggctttcttgaccgaggtgatggt

SEQ ID NO: 126379 - DNA, 1246 bp, Zea mays
  Clone ID: MRT4577_46724C.1
aattcggcacgagggcagtagcagtagtaggaggagctagcgtttctccatctgtacgtcctgcagtagcgattgggcaggctgggcatcgtcatcgatcgatcgccatgaggctccgcggcgtgctgctcgtcctcgtgctcctcctcgccgccaccgccgtcgtgccggtgctgctccttagcgagaacgacgacgacggcgtcgcacctgcgccgccgttcaactcctcgcgtgtcaaggccgtctcgtggcatccaaggatcttcgtgtacaaggggttcctctccgacgccgagtgcgaccacctcgtgactctggcgaagaagaagatccagcggtccatggtggcggacaacgagtccggcaagagcgtcatgagcgaggtgcgcaccagctccggcatgttcctcgacaagcgccaggacccggtggtgagtcggatcgaggagagggtcgcggcatggacgtttcttcctcaagagaacgccgagaacatgcaggtgctgcgctacgagccggggcagaagtacgagccgcacttcgactacttccacgacagggtcaaccaggcccggggcggccaccgctacgccaccgtgctcatgtacctgtccaccgtccgcgagggaggcgagaccgtgttccccaacgccaagggttgggagtcccagcccaaggacggcactttctccgagtgtgcacacaaaggattggcagtgaaaccggtgaaaggcgacgccgtgctcttcttcagcctgcacgccgacggcacgccggacccgctcagcctccacgggagctgcccggtgatccggggcgagaagtggtcggcgcccaagtggatccacgtcaggtcgtacgaggacgaaccccaggcagtactcgtgctccccgaggaaaccgacggcggggtgcgccgacaggagcgagcgctgcgcggagtgggccgcggcgggggagtgcgccaggaacccggcgtacatgctcggcgccggcgatgagggggcgcctgggcagtgccgcaggagctgcggagtctgcgattcgtaggcgcgtccttgccttttctttctttctttcttttctttgtttgttttgggatgcagtattcagataactagtggctgttttctgtacttgatgatgatgtgtacatagctagtaaaagttttattcagatgatgatggtgaaagttttcttcagatggtgatgatgatgatgatatgagtcggcaatcaatag

SEQ ID NO: 126380 - DNA, 1448 bp, Zea mays
  Clone ID: MRT4577_46725C.1
gcgccgcagaagtaggagctctcgtttctccatcagtagtgattgggcagcatcgtcatcgatcgatcgccatgaggctccgcggcttgctgcgcctcgtcctcgcgctcctcctcgccgccaccgccatcgtgccggtgctgctccttagcgagaacggcggcggcggcgtcgcacctgcgccgccgttcaactcctcgcgtgtcaaggccgtctcgtggcatccaaggatcttcgtgtacaaggggttcctctccgacgccgagtgcgaccacctcgtgactctggcgaagaagaagatccagcggtccatggtggcggacaacgagtccggcaagagcgtcaagagcgaggtgcgcaccagctccggcatgttccgctcggtcggtcgcgcaggacccggtggtgagtcggatcgaggagaggatcgcggcatggacgtttcttcctcaagagaacgccgagaacatgcaggtgctgcgctacgagccggggcagaagtacgagccgcacttcgactacttccacgacagggtcaaccaggcccgcggcggccaccgctacgccaccgtgctcatgtacctgtccaccgtccgcgagggaggcgagaccgtgttccccaacgccaaggtaggtgtaggtagctagctaggtgctctcgatcaaggctgctttgcttgcttgctcgcagtcgcagtcgcagtcgcagatcgagattctcttccatgttcgttcttgacactggcagcccaatccgatgcagggttgggagtcccagcccaaggacgccactttctccgagtgtgcacacaaaggattggcaggtaattaatctcccacccaagagaatggtgcaccaggccaggccatgctatgccatgtctgtcttcaagaacggcaggagaaaggcgagaagcttcggacgacgacgctgacagattcgcttattgcttgcttgccgcgcgcgtgcagtgaaaccggtgaaaggcgacgccgtgctcttcttcagcctgcacgccgacggcacgccggacccgctcagcctccacgggagctgcccggtgatccggggcgagaagtggtcggcgcccaagtggatccacgtcaggtcgtacgaggacgaaccccaggcagtactcgtgctccccgaggaaaccgacggcgcgcgggtgcgccgataggagcgagcgctgcgcgaagtgggccgcggcgggtgagtgcgcctggaacccggcgtacatgctcggcgccggcgatgagggggcgcctgggcagtgccgcaggagctgcggagtctgcgattcgtaggcgcgtccctgccttttctttctttcttcctttctttgtttgttttgggatgcagtattcagataactagtggctgtttttctgtacttgatgatgatgtgtacatagctagtgaaagctttcttcagatgatgatgacg

SEQ ID NO: 126381 - DNA, 107 bp, Zea mays
  Clone ID: MRT4577_46726C.1
gggagctccgtattccttttctttaaacctcccatcagcctctccctctttaaacatcaaccatctcccctcacacatcaatcacaatggcctcttctcgtgtcttc

SEQ ID NO: 126382 - DNA, 460 bp, Zea mays
  Clone ID: MRT4577_46727C.1
gtacaaattatttcttctacatatattaaagtttatgagggcatgatcggtcagatgatagcgtgctgtgctccatttgccgtgattcataacaaaacaagcaaatggcccttaactgatgtatatcctacgcggacacacgcttaggggaccgcggtatttaccgcgaccacaaacacccaccgccgtggaggtggaggcccctagaactataatacgggcccgctgtggtacctgtttctgggcctgggcccagaatattgccccctctaccagggttactccccgggccccaccttagggacaaacgcaagcggggtcgtggtgacctttgggagcaacacaaccttgcctctgattgttgcgcgcgtggccccagccacggagcgggactagaggccgcccaggcccgttgtcccctatttgatcccgcgctggggcaggggggaaccaagtgggg

SEQ ID NO: 126383 - DNA, 617 bp, Zea mays
  Clone ID: MRT4577_46728C.1
ggccgggccggggtcgagtgacaaggacgagccacagccaccccgcgtctcgtgctcctctgctcgctgcccaacgaacgccgcgtgtcgtgatcctaatccagcgccggaatgcccgaggtggcagcacccccgccgctaccgccgctgttggcggtggcgagctccccggcgtctgctgcgctgccgcgggcgaggcggcggcagcagcggagggggtggcggcgcccgcgcgggttgctggtctggggcgccctcgtggccttcttcctcatcatgaactggtggatgttctctcgacttcaggacccctcggcgcgcccgcactttcggctgaggcgccatgttccccgcgcgtccgccactgccaattccgcgctcttgacactctggaagaggtggctcgtgctgctaaggggaagggggcacatacggttatgctcacccagttgctcgctttggcaagccatgctttggcagaggcagaaaccaggcctgaacctaaggatctgtgggaagagccgataaacgctactatgtggagaccgtgttctgatcaaagggattgtaaagcctcatagggaaaccatgtatacatcatgatcagtgcgaatggt

SEQ ID NO: 126384 - DNA, 967 bp, Zea mays
  Clone ID: MRT4577_46729C.1
gcggaacgtcttgaggcaagatcagcagataaagattgaggaactgctccagctgcagagagaaaaggaggaacttatgaagataagtgatgaattcttggaagaggtggaggctcgtaaccacaaagtggatgagctaaaggctgaggcaaagttcttggttgtaagcccacgcgaactgcaagagtctaggaggtcattgcaaagcgagatcaccaagctattacaatcgaactcttttctatcaaatgaactaaatgattccattgaaaaacagaagaggtttgaacatgatttcagcaatcttgttagtgaagcagttagtaaagatatcctcagtgtgatctttagaagccttcatgaagagaggacattgcagctgaagtctttgcataataactttggctgtcttcaaacagcaggcggtgagctttatcaggagatcaagatgatgaacaagaggcttggagacatagaaatggagaacaagtaccttggcaaagaactaagtagaactatgagtgtttatggtggatctattgtgcaaacagcaacaggaaaaggaaatccagggcgaagagatgccaaccttctgaattcaaacaggaaaatccaacaagattgtcatgtaaatctggaggtggaacaagaggaagtttgcaatgctgattttcaggagtcaaatgaaacactacaggatgaggtccgtaagttaaggagcgaagtggaaatgcttaggagcaaggagaaggctgtgttcaacatcaaatcctgtgatgaagagatcatgaaattgctggctaacatgcaaatggctatcatgaatgcagctctgttcaaagagaaggttcttgagctcatcataacatgcgagagttttgagataagtgccatggtacagaaggaggttctgaaggaagaaatcatacaaagaaattcatatgtagatgagctgaaggaccaacta

SEQ ID NO: 126385 - DNA, 430 bp, Zea mays
  unsure (1)..(430): unsure at all n locations
  Clone ID: MRT4577_4672C.1
tttgggctggtttatgtgcttgtttatgtgcttgtgttcgcgtccggtacgtgcgaagtcgacactagaaacaagacgaccgtcttattctcgctaaattccgaaggcccaacgctaccagatgatcccgatgacgtcgaaggtggtcttaagtcggaatgacctctatgggagatgtcggacttactaccgctacggaaggatgcggagcggtctaagcttactattagttcgttgacctcgtctaagggtactgctattgtggaagatgtgaggaaggttgcggaggtgggggtggttggtccgactgcgcttaattatggtgtttggtagtcggatcacgtgttggttattactctggtgtctgaagaggcggccaaggtggcggtggnggtcgcgttggcgtcggcggatggtggtgcttggtgtg

SEQ ID NO: 126386 - DNA, 551 bp, Zea mays
  Clone ID: MRT4577_46730C.1
gggccctctctcgagtttttttttttttttttttttttttttttttttttttttttttttttttttttttttttttttaggaaccttggacgggggacgctttttaaattgggttttaaaactacgggaacgagatttttcccacgttccaaaaatgaggaacggggccaaattccacttttcccggtttaaagcctagggaccaagtacttacctatttaaactgaagcttttgcagggtctaacagtttggacttcagggaggacttggaaatagagggcattttttttttgggctgccagcatacatggcccattcccactacgcgacgttttcaacccgcgagggggggggggggaaaacctcacgctttaccatgtcccaactgtcgaatatgctatttggcacgccaccatgctttaccagcttaccaatgtacaggctcttgtctgaggttatgaggagggtgtccaaagggctgggcataaaggctgggtgcatgctggccataaaactggtggccgatgatatgggagaacttgccttccaa

SEQ ID NO: 126387 - DNA, 380 bp, Zea mays
  Clone ID: MRT4577_46731C.1
cggagaggttccggattttcggggtggggtttgggagatgcctcccgtgaagaagtacaagaaggggaagcgtaaatacaacgatggcaagctcaatattgtcagggtacgacgcgcgcctgactcgctggcaacggagctccgtgccctagacactgagtgatgacacgctttactgaacatgctaaaagagctagatcatgctgtgccttcatatgagggcgaagcattgaggctcttcttcatgacttcatcgaagacttttgactacatctgctccattggtatgcgaagatatgatctcaatggcacctgctggactgatcaacattgaggggcggcttctcaatgtggataatcatgtggcaattgtcatgatg

SEQ ID NO: 126388 - DNA, 599 bp, Zea mays
  unsure (1)..(599): unsure at all n locations
  Clone ID: MRT4577_46732C.1
gtcagtgtgagcaatgacctgaatgaacaattgaaatgaaaagaaaaaagtattgttccaaaaaaaaaaaaaaaaaaaaaaaaaaaaaaaaaaaaaaaaaaaaaaaaaaaaaaaaaaaaaaaaaaaaaaaaaaaaaaaaaaaaaaaaaaaaaaaataaaaattttgttccctaaccccccaaaaaccctaaggcggaaaacctccaaaaatacatgcaccccgttgggccctttaaatcaggagtttaaaaggcccccttatacccctttagaaaaaaaatttaactgtccaattgccttaaaatttcccaaccttgaaaaatttaaaaaaccttcccattttaaactttttgcgacttatacaaatttccctttttgacaaatgctttaaaaggcaaaagcccttcccctttcccattttcccaacaatcctaaatcccaaatggaaattgcctgccccctgttattaaccattaagccggtggtttttaaaggtaactaaaacggtaacctttacatttcccaaccccctantcctcgggtttttttctttttccttttcattacttacaacgtttttcccctttaagctttaaatt

SEQ ID NO: 126389 - DNA, 1001 bp, Zea mays
  Clone ID: MRT4577_46733C.1
ctggaatatctaaacacgagaaacaaccactgtggggactgctggcaaaacacacttcgtaagatggttgatattataagaaccaaaccctttttgtgagcatgatatgcgcaagcgcaagaagccatgaacctgtgcgaagtcaaggtaagaggttcggcactattgtgttctgattttatacactgtactcattggaagtccgttgtttcgtttttcttggtgttatccttgtattacgattttcttcatttttttaaatggtttctcgaatattttcatccttgttgccgaggatcccgtttgggacgatagttggtttccatattgccagctggtgccagtatggttaccgtgaaatctctgagtgagagcacaccgtccgcatcttccatcagctggcacatcgcaaaattgtatactgttttgctcttgggtgttgcattgcatgtatagttttagcttgagcggttgattggccattcgcatacggtgacaaggcaggtaggcattaggtatcgtttcccgtgcttctaagtttgagtaggctgcgttgcttcttttttctagccttgctttcttcgcaagcctccacatacttatttctttttcaggtcagcattcattgtacacgttccatctcgtgtacattgtacttattactcccccctgtccccgaagaatctcgtgtactttggattgaccttaacatgagcaagatgaagttggtttatttaccggccgttacaccaacgtttcacttacattcgcgtggtgtgcagtcagtatatcggatgaggagttgaggacatcaacttttttttgcggcaggtacgtatgtagttggtaatacagattacagtgactcagttaatgtcgatgtaccggatcatgtgttccttacttttgcaatagtgctcgatcgttccgatcaacttttgcgtgcaaaaaaaaaaaaaaaatgaacaaaaaagaaagggcggccgccgactagagagctc

SEQ ID NO: 126390 - DNA, 504 bp, Zea mays
  Clone ID: MRT4577_46734C.1
aaaggccaacccccaacccccataggggtccccccccccccgcggcggggggggttggggccccccccaggggcccccacagggcccttaaacccaccaaccccccccccccattcaggccccccaaccccccggggttttttagccccccccccccctttagggggccccccgggggcccccaaccccccaaatcccccgggcccgcagcagcttaaaagaaccctggcttaccgccccccccgggggcggaccccccgggggggagggccccccctccggaagttgaaacccgctagggggcggcccccccccaactgcttgccaacaaaaaacaaacccccctggtctggggggaacccccctttgccccggaaccttgccctccccttggccaggggggccgaccccccaacccccaggggtatgggcctccccgccaagggcctcacaaaaaactggataccaccccgaaagcggagcccccgggggggggggcccccc

SEQ ID NO: 126391 - DNA, 721 bp, Zea mays
  Clone ID: MRT4577_46735C.1
gagtacctcgcgccgcgttcctacggccctccaccggcgccgccaccccatccctgcctctccgcctccggctccccgccgccgctcagtcgacctccgcgaccgcagttcgaccccaattttgcctggcatcaagcaaagccactgcctccttgctgtgtcaaggcgagggctgcagcacctgaatctgaggcgaagtgccatgccactgtggtatcgggatggttcacggaaacccgctcacgatgtggtaaagcgagcaaactgcagtattataataatccaatgtggccaggagagacccattccttgaaagtggataagatcctgtaccaggggaagtcaccataccaagaagtcttgatttttgagtcgttaacctatggaaaagtccttgtgcttgatggtattgtacaattgactgataaggatgaatgtgcctaccaggaaatgattactcatctcccactctgttcaattccttctcctaagaaggttttggttattggaggtggagatggtggtgtacttcgagagatagccagacatggttcagtggagtctattgatatatgtgaaattgaccagctagttattgatgtttgtaaagatttcttcccagacttatctgttggatttgaggatcctcgtgttcgacttcatgttggtgatgctgtggagttcctaagaaattctcctgaagggacatatgatgctatta

SEQ ID NO: 126392 - DNA, 167 bp, Zea mays
  Clone ID: MRT4577_46736C.1
gacccacgcgtgcgagtcactcccgcagactatgtcattaccttcgcgccgtcaccgtatcctcagtgagaggcgttcttaaaccataccactctactaacgcccgaccaggtacactttctctcacccgctttttttcctttttttttccatccacaaaatacttt

SEQ ID NO: 126393 - DNA, 284 bp, Zea mays
  Clone ID: MRT4577_46738C.1
cgtgccgtcgtgctccctgacgacgcgtccattctcaagtacatccgcttctaccggggcttgctgctcgtactcaacaaggcgctcgccgacgacgaccgcgtcaagacctgcacatctccaatcgtcagcaactacatctccttctaaccacgcaaatcgctacacacatgatgagctcactcttgtcccaaaactaatagccgaggcacatctttcagaagtccagagccaactatagatgatccagactggccttaactatccaaaggctatcggacatg

SEQ ID NO: 126394 - DNA, 139 bp, Zea mays
  unsure (1)..(139): unsure at all n locations
  Clone ID: MRT4577_46739C.1
ccccccctaatattttttctttcagaaacccaaaacccgggaaattggncatacnntatacattttttcaccccaaaacaccagctttacacacccacaggtgacaactcctaaactgattggtcagaagacttaacac

SEQ ID NO: 126395 - DNA, 730 bp, Zea mays
  unsure (1)..(730): unsure at all n locations
  Clone ID: MRT4577_4673C.1
cctcgaggccggccgggtcgtcctgtccgccgtccgctcgtgattcgtctgcgcccaccgcccagccagtcgaccaggcgtccattccagccgtccggcctccggcggtccggccgtccgctcttgctcgttcgcgccggccagacttttctccccgccccgccgtccgaccgtgcgtccagtactccagcagccgcgtctagaggccaaagcggcagagcctcccctccccgtccggcaagctagccggcgtcaagcaagccagccgctagcccggcgtccagcaaggcaaccgctagctcgctagccaggcgtccagcaagccaaaccaataatgtctgtttaaattcacgtgctaacgttgatgaagttattagaggcggggaaggaccaaatcatctctaattagaacggcccgggacgttaattttatagagctccgccactgctcgttgcgccacatgctcctgttgatgcgcccggtgaagattcagccagcgctatgcctgggggttcaagcggcaaactgtggtcgttgtgcaaaactgctgctaacgaggaccgcctgccccaccgaccggcaacggtgcatgccaccagcaggccgcgatcatgcacggcggagaccggaggctggaggggggacgtcgtcacgcgactcacgccaccgncttcccgcatgtatcgttctcctcatcctcgnctggatccacgccgaggcaccatcgaa

SEQ ID NO: 126396 - DNA, 328 bp, Zea mays
  unsure (1)..(328): unsure at all n locations
  Clone ID: MRT4577_46741C.1
nttggtggacctgcggcgccactgagtccggggaaactttctagacgctcaacgcaacggccgcgcacgccaggtatgctgacaagtcgtacgggcagcaatcggagaagactggagcgacgggctactacaacaacctggcaaagccgacgagcaaagacccaagttatggatcctgcaggagaccaagattgtcggggtggccttgaaggggtgcagagcaggcgagacgacagcatacgggtactgattaagtgaaaccagacgactggggacctagagaagtggggagcaacgtagatgtgctgacgtacacagcaggctctgc

SEQ ID NO: 126397 - DNA, 278 bp, Zea mays
  unsure (1)..(278): unsure at all n locations
  Clone ID: MRT4577_46742C.1
gtcgcgatctagagaggattagatttcgttcgaagtgatctgtatggtgccggtgacaaacancaaatagatgagaggtgccatcagcttatacaatcaattgacacaagcacttgcttatccgacaattaaaatgtccaataacttttatctaacttaacttttgcaactcacttgctgtgctaatatttttaagcttcttggttgtaatcaacaaaggtaactcctatcacttagttatatttctttccttcacattaaacttttttaccatttag

SEQ ID NO: 126398 - DNA, 658 bp, Zea mays
  unsure (1)..(658): unsure at all n locations
  Clone ID: MRT4577_46743C.1
ggtccggaattcccgggtcgacccacgcgtccgggcggcgctcgcaatgcggagtggctatctcctgcggctctctgtggctctgagtcccaggtcccgcagctaccgtgcgcccccgcccccgcgccgccgccccgggccccactcgccagacccggagaacctgctgaccccgcgatggcagctaacgccccgctatgtggccaagcagttcggacgacacggcgccatctccggggtgcccccggcctccctgtggcccaccccagagcagctgcgcgagttggaggccgaggagcaagaatggtacccgagcttagcgaccatgcaagagtcgctgcgcttgcagcagcaggccttggaggcaaggcgccaagccagggagcagcgtatcgcaaagtgcatggccaagatgccacaaatgattgaaaactggcgaaagcagaancgagaacgctgggagaaaattcaggctgacaaggagcggagggcccggttacaggctgaggcccaggaacgcctgggctaccacgtggacccaaggagtgctcgcttccaggaactattacaggacctagacaagcagcaacgaaagcgcctagaggaagaaagacaacgacacgagaaggacgcacgaattgctgctatgtcctctgct

SEQ ID NO: 126399 - DNA, 351 bp, Zea mays
  Clone ID: MRT4577_46744C.1
agctacaaatttttgggtttatatatatgcgtgcagagaatcgaaaaccaccccacctgtgttattaaagaaaataaggcctgctagtagcagggcaccagttttgaaggttggcccttgccaaatgataataattgcagggaggtcattagtaattggcagtttgccacaaaaccatttccgtgctacattgctaactgaaggggccaatatgtttgcaagcttgtaagctaaagacgctgtgactggaatcccacccatgacttgagaattcggtttaaccttacataaggcgcacggttggggccagggctcctagttgattagagcttgagccccatcccgccgggg

SEQ ID NO: 126400 - DNA, 588 bp, Zea mays
  Clone ID: MRT4577_46745C.1
gacgttatcgcgcacatctcctgatcctcgttcctctccgccccgcttgctggcgcgcctccgcccccgtctcctgagagatcagatccggtgccacgcggatatgactacttcgaggtgacttgctgacaggatagagagcaaagatgcataagaacatccactagagaggggttctgcgcctgagaccacggcagaaacagacgaatgactaccctgatggacctataggtcttggattcttcatttttgtggtcatgtggatcatccattgtgccagataatcaggacagcgacaagagcccgggatgacctgagttcactgagctcaaaaccgagaaatttgatctgtctcagtgagctgttgaggcagtatctgtgctgcgtagcaaacttgctcatggatatgcacagcgaatgccactactgctctgtctgcatcatcaaaagagtttaaactgatgctgaaaacatgccaaggctgaaaatatttatagagaatgctagagagcttaatctcaagaatagagtctctgcaattctagactcttagaaaataagggcccaaggttcctcgagctccatctt

SEQ ID NO: 126401 - DNA, 785 bp, Zea mays
  unsure (1)..(785): unsure at all n locations
  Clone ID: MRT4577_46746C.1
tccttgtcctgaaagctgaaacctaaggcgagagaggccacgggagagcgccatggttctcctgctcctgggctgctctcctgcatcgtcgcgcccagactgctctccagcttccaggtactggagagtgccagcgttatggttgcttttccttgctgatgcctgtcggctgggtcaggctgaggagggtggtggttgttgacaaatggggaggggactgacggtgaaggtttgagatgctgttagaatctcaagcgtgtttaggtggtcccagttccacactgagtctgttggtttcggcttggcaggagaagatgcagcaccgccggacagaaaatggtcaggtgctctctgaatgaagaaacgcagctgaacaaacatggactagtatccaagcagttaatttcatgccttgctgcttcgcttgtgttcgtctctccacctagtcaggtacctatgacatgttccatcatcttattaggtcgacttgaccacttctaccatatcactatcagntacagcacaaaaagcttagagaccacaaagaggattctttccgctgcatgtagctgtttagtgtctgcacatgcgtatcaccaaagatcaaaggnttcgagaccaccatagagctcaactttgntcttcaaaataaacatgattccattcaactnaggaaaggngtangaggaattgnccncatgattcnttccacttagccnaaaaaaaaaaagaggtncaatggtgggtttcaggggatactacgcccaaggaataatggggggaat

SEQ ID NO: 126402 - DNA, 866 bp, Zea mays
  Clone ID: MRT4577_46747C.1
gcccgctccgagccggccgggccgggacggatttgttgatcctgtgaagtgagagatcagttctcgatttcgattccggttccgctcagagaattccccaggcgagcgagcgagatggcgaccgccgggaaggtgatcaagtgcaaagccgcggtggcgtgggaggcggggaagccgctgtccatggaggaggtggaggtggcgccgccgcaggccatggaggtgcgcgtcaagatcctcttcacctccctctgccacaccgacgtctacttctgggaggccaaggggcagacccccatgttccctcggatcttcggtcatgaagctggaggcatagtggagagtgttggagagggtgtgactgagcttgcccctggtgaccatgtcctccctgtgttcactggggagtgtaaggaatgcccacattgcaagtctgcggagagcaacatgtgtgatctgctcaggatcaacaccgacagaggtgtcatgatcggggatggcaagtcacgcttctctattgacgggaagccgatttaccatttcgtagggacttccaccttcagtgagtatactgtcatgcatgttggttgtgttgccaagatcaaccctgaggctccccttgacaaagtctgtgttcttagctgtggtatttccactggtcttggcgcatccattaatgttgcaaaaccaccaaagggttcgacagtggcgatatttgggctaggagctgttggccttgctgctgcagaaggtgcaaggattgcaggtgcatcaagggatcattggtgttgacttgaacgcccagcagatttgaagaagctagaaaatttggctgcacggaatttgtgaacccgaaagacacagca

SEQ ID NO: 126403 - DNA, 199 bp, Zea mays
  Clone ID: MRT4577_46748C.1
gccagcgccatggtcacgtcgactaccgccgacgccgtgctgtacccgacgtccgtggtcgggcttcgcctgaagccatttaccggggcgccccaagccgttccgcccgaaaacgggcgcggcggtccgtggcggagcgcgcggaactgagcccttcgctggtgatcagcctgagcacgggcgtgtcgatcttcctggg

SEQ ID NO: 126404 - DNA, 537 bp, Zea mays
  Clone ID: MRT4577_46749C.1
tcgagcggtcgtccggtcaggtacaagcttttttttttttttttttttttttttattctttttttttttttttttttttttttttttttttttttttttttttttttttttttttttttattccacacttttttatgttgggggggttaactccttttttcatttttgggttgatggagatggcttgagccgattccccacttagggggaattccaacccagtgggggtggttactgagagaccccaggtgggggccacgcttcccgtaataatcgtaatccgtgcctcccgtggggaaattttctcccccctgggggcccccacttttggatccgaactctttaccaagtttgccttgggggggtaattagcgggctcccgtgcaaaaattgtgttggccccaatgtcccctttcaaaccgggaaaactgttaaagcggttacctttgggaacctaacaagccccctaaccaaccttttttggtttggggcccctttccgctttccagtttaataacctgttgggccaggtgcatt

SEQ ID NO: 126405 - DNA, 681 bp, Zea mays
  unsure (1)..(681): unsure at all n locations
  Clone ID: MRT4577_4674C.1
actacaaaggccggccgggaagttattgtgttatcaaacaatcgtttcattggtttaagtggtatatttttatactcacttatacatttttgcattcattagttatattgtcacgttttatctctcattttatataaatatttaacttgcaatgtttaggtttaaattcacgtgctaacgttgatgaagttattagaggcggggaaggaccaaatcatctctaattaggtacttttatatttttaatcaagtttattgtatttttagatgttaaattgaagtaaatattattttagtctatgtttgtggtatattttgttttaacggtatatttagccgtacaatatattaggagctgtttaaagtaatcttcaaattttatagaacggcccgggacgttaattttatagagctccgccactgctcgttgcgccacatgctcctgttgatgcgcccggtgaagattcagccagcgctatgcctgggggttcaagcggcaaactgtggtcgttgtgcaaaactgctgctaacgaggaccgcctgccccacccgacggcaacggtgcatgccaccagcaggccgcgatcatgcacggcggaagaccggaggctggagggggacgtcgtcacgcgactcacgccaccgcctccccgnatgtatcgttctcctcatcctcccctg

SEQ ID NO: 126406 - DNA, 293 bp, Zea mays
  unsure (1)..(293): unsure at all n locations
  Clone ID: MRT4577_46750C.1
ggccgctgggggggggggggcgggctcataaacctcgagccgggggcgcatggactcctgcgctcccgccccttccgccagttcttccgccccgacaatttcttctcctgccattccccccccggcaacaactgggcctaagtgccactacaccaacggtcggttatgttaggggctccntgctcnccctcncgcgcatggagcccgagaactgggactgcctccaacggctacaggtctgactctctctatccggaggtgctacttcaggatgggcactctgttcatcttca

SEQ ID NO: 126407 - DNA, 435 bp, Zea mays
  unsure (1)..(435): unsure at all n locations
  Clone ID: MRT4577_46751C.1
tccccctcaagtttcaaaangcaagtcccaatctcggcgtcaccacccccaatccagtaaatgcaaacctcatatcgccgccgccgccgccgccgccgcgatgtctcgacgatatgacagccgaactacgatcttctcgacggaggggagtctctaccaggtggagtacgcgatggaggcgatcggcaacgccgggtcagccctcggcatcctactcttcgacggtgtggtcctcgtcgtcgagaagaaggagaactccaagctcctacagacctcgcgatccgccgagaagatgtaccagatcgactcccacctggcgcgcgccgtggccgggatcatgtccgacgccaacattctcatcacacccgaccgcctacccgcccccccgcccaccccgctccccctacccagcaacccctcccccgaccagcaccc

SEQ ID NO: 126408 - DNA, 318 bp, Zea mays
  Clone ID: MRT4577_46752C.1
tcccactcgttctcccactcgttctcccactcgttctcccactcgtccgaaaaaaaaaaaaaaaaagagaaaattaaaaaaagaaaaaaaagaaaaaaaaaaaaaagacaaacaatctaaaggctccaattttaacatatcctgccttctacctcatagctccaatattatatcccttaatattaatcccctaacactaattttacaacctccttactacaaaaaccttaccgttaaaaaacttaatctccttaaataaaatcccttttttcccatcttgctttataccgatgaggtcctaaccaatagcccttccca

SEQ ID NO: 126409 - DNA, 275 bp, Zea mays
  Clone ID: MRT4577_46753C.1
agagggaaacaccccatttattgggccaatattacgggaggcataagggacaaactcataaacctaaggctggagattcccacgagtgcacttttcaagggaaaaacacgggcaggatcacatgtacatacttaggctggggggaaactaaaaccaaggggggggctttggttcggcgccaaatgattcttacaagaatggggcgcccccaaaataattatacttaaaaataggctgaaaatgggtgcgatcctaatccactcccaaaatctcac

SEQ ID NO: 126410 - DNA, 479 bp, Zea mays
  Clone ID: MRT4577_46754C.1
atagcattattaaaaactttatagccctaccgggcatacgggggtttggccgggaaaacgtcaagctagcccgggggggggggcccaaagcaacgggggcctgggccttgggcaaaaccgcccatgcgactcaaaagctccaataccccaaggggggccctcagcaaaaaaggttccctatggaagcctgggttggggcgggatgacaaaatggggggggacttggtttcaacccaagggaggggggcaagggaacgttttaactggccctaggttaaatggggaaaggattactccaaaccaccacagggggggatctgcgctgaaccacaaagggcttgcccgaaacgggggagtccaaacatgctccaaagccttcatcggggggttgatctcttcaagggtttcgggcttttaaaatggaaaaaatgatcttcaacctcttcatcgggatctcccacatttttccgctttttggg

SEQ ID NO: 126411 - DNA, 444 bp, Zea mays
  Clone ID: MRT4577_46755C.1
ccccaccccgccgccgccatcgcacgcccgcagccgcatccgctatgggtgcgtacaagtacgtctcggagctatggcggaggaagcagtccgatgtgatgcggttcgtgcagcgcgtgcgctgctgggagtacaggcagcagccggccatcgtccgcctcacaaggcccactcgccctgacaaggcgcgccgcctcggctacaaggccaagcaggtagatctcctccagtgcagatcccattggcgcgcgcgaactttgacggtgatggatttatgggtaggggaaggtcgggggtggtgcagccgcgcagggattgccattgtcatttaggcttgtaatttctcgaggtgatacaataatatgctgtttgtttttaagattcctgcaagccagggcgtgcaggtgtagtttttctggtgattaatgccaatcttcctgggcg

SEQ ID NO: 126412 - DNA, 392 bp, Zea mays
  Clone ID: MRT4577_46756C.1
cagaaacacacctagcgaagtttactttctacaacctaacaacaatggcgtacaagacattattcatcgttgcgcttcatgccctttccgtgagtgctacaaatgcgtacatcatcccacaatgcttacttgctccgagtgccattattccacaatgcctgagtccagtaacttcaataggcttataacacctagctgtgcaagcctataagctacatcaagcgcttgcggcgagcgtgacagaacaaccaattgcccaattacaacaacaattcttggtacatgtaaccatacaaaccatcgtaacgcatgatcaacaaacactgagccacctagccattgtgaaccctatcgactacttgcaacaacagctgcttgcatccaacccactt

SEQ ID NO: 126413 - DNA, 296 bp, Zea mays
  unsure (1)..(296): unsure at all n locations
  Clone ID: MRT4577_46757C.1
gtanttccattaaccctcatactacaactataataagtttggcgcgagctgaccacactggagagtgcgcgcataacacaagcacactcaaggccccagatctcaccagccgaagaagccaatgttaatgggcaacacattgcaggctactcctcctggcacggcccggcgtgaggagaaacccacggcaacgttcatcacgcaagcattgacaggaggccagatcacactaacatccacattaggaatcctctacactattacactagaacagtgttcgctgggggagggcactc

SEQ ID NO: 126414 - DNA, 228 bp, Zea mays
  Clone ID: MRT4577_46758C.1
ccaacaggaacacacgtacatgactcctctccctcctatccctctgctcctaatccagccatatcggccatgccgccggcgatagggaagctgccgctgctggatccacaactctgcttcttccctagtgttaatccccaatttccctccatggatttatatcacaaactctctaatccccccctgtgtgttttcttttcttgacttgcaggtcaaaccctattgggg

SEQ ID NO: 126415 - DNA, 283 bp, Zea mays
  Clone ID: MRT4577_46759C.1
ggggggaaactgcctaaaaaatatttaacaaaccattttaccaattccggccaatctttcctttggagagtgtgccaatttttgagtggaccaacctttaatctcctccccaaccagttttttaatcacctaaccaacctgcttcaccatcccttctctttccaaaccttccccaacttcccatttaaaaccttaaaaaaaattccaaggtttataccaattccggtgattcctcccaaaaggaaacccttaataaaccttagccaccccaaaaacccttttt

SEQ ID NO: 126416 - DNA, 256 bp, Zea mays
  Clone ID: MRT4577_4675C.1
cattaaccctcgttcctgtcgcgcgccacgacctccacttcacatctcccccgacggcggcgcggtcaattgaacaatagcggactccaaggccacctcggcgatcaccctccgcacccgcaagttcatgaccaaccgcctcctggcccgcaagcacttcgtacttgaggtgatccaccacggccgcgccaacgtctccaaggcagagttgaaggcgaggcttgccaaggcgtacgaagtgaaggacccaaacacc

SEQ ID NO: 126417 - DNA, 265 bp, Zea mays
  Clone ID: MRT4577_46760C.1
aagcagtggtaacaacgcagagtacgcggggggctctcagaattgttctctcttgctgtgccagttccccaggccacaacattaatgagtatgagttagccttacacatagctctttgtacatttgcttctatcagatgattttttgatccaaaaaaaaaaaaaaaaaaaaaaaaggaaaaaaaaaaaatttttttttttaaaaaaaaaaaaaaaaaaaaaaaaaaaaaaaaaaagggctttggggtgttccccccccttaaggg

SEQ ID NO: 126418 - DNA, 230 bp, Zea mays
  Clone ID: MRT4577_46761C.1
attctgacttttctaaccatatcccctatccctagctcaagatgctcttgttataaatcaagaccctctcttatgcataaaatcctcctaacaacgatcgtatcaaattaaaaaacatctactcggcctagattatcctcaaaaactcttatatcttttcaactctttaaaaacacaaactcgcgtttcacaactttgctttcctctcttctacaattgctagctcttca

SEQ ID NO: 126419 - DNA, 398 bp, Zea mays
  Clone ID: MRT4577_46762C.1
ggacaatgtgtgattttttctcctttatgccatgttttggaatttttgtagctgcctaggccgtgaggtaatgcgctgctgtggtggctcattagcatgaagaggaagacgctgctggcgctgagtctttgtctttattagtattctgcttaaaactatgtatgaccgaatggtggtatttattcgtgtcatccttgactctcattgtgctgcacaacctcaatacccacaatcaccctatacgcaacaatattggttatgttacacctcatacttgatatttacgggcgcccgttctagagaatccaagcttatgtacgcctccgtgcgaagttttaacttttatataggggcgcttaatttcaattcactggccctcgttttacaatcgtctttac

SEQ ID NO: 126420 - DNA, 392 bp, Zea mays
  Clone ID: MRT4577_46763C.1
tattcggcacgaggtttagcaaaacgacaattgctgctacatctatatgttgtttttagtcaaaggcagtgctttatttcatcaagtgaattacaaccagtcatcaactgcagctttggaccattttgtttctttgatttagatactgaagcattactgaatatattcataagacaatgccgtctgaaaacataacatggcctttgtttaaattttgattttgaccatttcatatggaatattggtttgatcacaaatacatgatcttcgcataactcctctaagaatgtgatcttcacgtggaaactgctatcgccatgacttggcagagattgtcgatcttccttcagccatgcttggtgttagaagcgacaaacagaccaggttgttca

SEQ ID NO: 126421 - DNA, 154 bp, Zea mays
  Clone ID: MRT4577_46764C.1
cttggcgatacggaggcgcttttctgttatcatgtagcttactggtatttaaggtataggaattttagcaagacctaccactcaaatggccttttctgtatatattggtttcgaggctcgcattttcaattgaatggcttgaggttttcacaat

SEQ ID NO: 126422 - DNA, 224 bp, Zea mays
  Clone ID: MRT4577_46765C.1
aaacttcttcccctccccaagagacaaaaactaataccatcccccgtgaattaccgatctccagcgacggtcgcacatggccatccagcgccagaatatagggggctgcgcacgtctcgcgctgctcctcctgtgactctctgctcttcctctctcaccccggcggcgctgcgcggcctccgcctcgacctcgactcctaccacagcgatggacgtctccgacg

SEQ ID NO: 126423 - DNA, 309 bp, Zea mays
  unsure (1)..(309): unsure at all n locations
  Clone ID: MRT4577_46766C.1
cannagnaacgggcggccgngngcnggaanncggcacgaggacacagcaactgaaaaccttattaccaagaacaaacaactacaagaggctttgcaagttcacagagtctttaatggctgttaaatctacagctagtttgtccgaagaagtctaatttcaatttaataaataagttatatgcaaggggcagctgttcactgcgaatgaacaaccagaggaagcctggagactggaactgcaagaactgccagcatctcaacttcagccgccgtgactactgccagcgttgccgngatcaacccctgact

SEQ ID NO: 126424 - DNA, 1102 bp, Zea mays
  Clone ID: MRT4577_46767C.1
aattcggcacgaggcgcggccgcgcggtaccgcgcggccgtcggcctgcaggtcgaggccttctggcggcgcaactacatgatcctcgtcggcgcgggggcagtcgtcgtctgcgtcgcgctgtggaggatcatgttcggcatcgccagcaccttcgtcggcctctccgagggcatggccaagtacggcttcctcgccctagccaccgcccttgtcgcctttgccggtatgtatgcccgggcaaggttaaccataaaccctgacaaggtttaccggctggctatgacaaaactcaatacatctgctgccatccttgaagttatgggtgcgcccctaactggtactgatgtcagagcatatgttatgtctggaggaggcccgaaactgaaggacttcaaatttaagcttggcagtaaacggtgcttcctcattttccccatcaaaggatcagaaagaaggggccttgtaagtgttgagttcaagaagaaaaatggacagtatgacatgaaactactagctgttgacataccaatggcatcaggtcctgaccagcggctgttcctcgtcggtgatgaacaagagtacaaggtgggcgggggcttgatatctgagctgcgagacccgatcgtaaaagctatggctgcagagaaggagtttgattatcttgatgaaagagaggacgaggaggacgagcggagggagcgtgaggaggcggagcaagaggaagcggaagcgttgaggcgcgaggaggaaagattgcgtcagcaggctgaagaacggaggcggcgggaggaggctgagagcctggagaaagcttcgtgacatgatttaactgcatcggttttccaccttgtgcattgttttatacttctctccccctcccgacccggagtgtagcagtcagcgtttccacagcaagagaagattgcttctgagttcggttgagttccaggtggtcgattcggcgtcaccagtctcaagatgttgaggagaaaggaataattttgcatgttccgcaacagaacacttcgcccaagcaatgtaacttagtggttgatcaaaaaaaaaaaaaaaaaacaaaaaaaaaaaaaaaaaagcggcc

SEQ ID NO: 126425 - DNA, 151 bp, Zea mays
  Clone ID: MRT4577_46768C.1
ctcgagccgctcgagccgaatcggctcgagcggatctcgctcggcgctcgagactgtacactgacgagacggagacgagaacagcggcttcatcaacgccaggcgtcaggtcatagtgtgttaagacaagatggtggcgaatggcgacgca

SEQ ID NO: 126426 - DNA, 760 bp, Zea mays
  Clone ID: MRT4577_46769C.1
agcagtggtaacaacgcagagtactttttttttttttttttttttttgcacaaggatattcatttaattttgataaagtatttgatcattccgcaacgcaggaacacgtatttacagaaatatctcaactcgtccaaagcgcactagatggctatcaggtgcagcattagaatgactgtaacttagattacctttgcaaaccctagaaacaataatttttggtttatttttccaatatctagttacttaggatgcaactgaaaaatgataaaccatttagttttgtatatttgcctatgggcaaactggttctggtaaacatatacaatgatgggcaaccctgagttacaagaacaaaaaggaatgataccacgatctctagaggcgccgagccacgcatagacactgctgccacactttaaccacagggcagacaattgtggtacattacacttttcagtattctcatgtttgcatgcccatacacatccatagggtacttgtcggtgtttttggactaacggtcctaaccaacaagtgaaatgatgtcgtgtgcccagaatctagatggtttgcgagttcacacaaatgatttatccaagttcgagcaatgcaaggctctacttccaacagaggggggatgaagcttatattacacgcaccgatatgcctgcagtagggattacaagcacggcgggagaaggaaaacccccaagtccctgggactgattcccgcgccctctggttgttaccactggct

SEQ ID NO: 126427 - DNA, 380 bp, Zea mays
  Clone ID: MRT4577_4676C.1
cgcgcctctccatggggctgagctccctcacgctcagatctctcccttgctcctgcagctcgccctctcttcctcaagctcatccccatggtgcccggccctagctcggtctccctcggctgtgctccctctagccgcgggcaccatcgagctcagggccttgctcgccttttgtccgtgcgtccgtccggccacctggaagatccgagctcgcccatgccaagcttcctcagcgtctctcccatggccgcctccttcccctggttgcccatggtcgtgctctctactcctccaagccggcgtcgacctcccgtcacccatcttcttcaagctgctggacaccgctcgcccctcgccacgtttccctctcgctggacgca

SEQ ID NO: 126428 - DNA, 294 bp, Zea mays
  unsure (1)..(294): unsure at all n locations
  Clone ID: MRT4577_46770C.1
gtccggccatcatttagccacctagnccggaagaggaggctgtcgaaaacttacaacaacanctgcttgcatccaacccacttgctttggcaaacgtagctgcataccaacaacaacaacagttgcaacagtttctgccagcgctcaatcaactagccatggngaaccctatcttttacctacaaagttgcaactnctntcatctatcccnctcaatataaacaatncacctacatacctncaacaacanntnttncaacaacanttnctncaacaaattttaccanctcttac

SEQ ID NO: 126429 - DNA, 537 bp, Zea mays
  Clone ID: MRT4577_46771C.1
agattagaatcgcatgggcaaatagtgctactgtcattctgtctccatttttgactctgtgcctccgtctccaacgagccagagccgtgccagaattgtgcacgtattctcgttcttattcgagcttctacagcgattttttttctcacttccccgatgcaagcagcatattttgcaaagcagtcagcacatgattcgctccaatccgaccgatcgatcccctacgttacttacaccgctttccatagattgtattacagctgcaagctgtgaagctgcagggcgatgcgtttccgccggatccatcagtacggcatgacatggatggtgcggctgtcgtaggcggcggccatgcccttcttctcatgctccatccgcaccgctcgcagcagctctccggccatccgcgaggtggtcggggcgcagtccccctgcatcaccaccagcagcttccccaccgactcgggcgcggaagccacggcctcccgcatcctccggtcgccggcgcccgcgcagcagcacagtgcacagcgccac

SEQ ID NO: 126430 - DNA, 376 bp, Zea mays
  unsure (1)..(376): unsure at all n locations
  Clone ID: MRT4577_46772C.1
cttcttcgcgggtggggcatgttgaagaaacctaccctgaggcgcaaacatttttgtcccggggtttatgcggacaaccaacaagcagaggacgaggaaaaaaaaatatctactagcaaaaaaaaaaacattttgggggggggggggncccnccctttttagtccaaactttnntnatttccttccccctggcggccgctcgggcatgcctctnaaggccccacttccccctttggggagcccgggttgccagttactggcctgctttctccaccggcgggcccggggaacccctggcgttgcccagcttattcgccttggggcgcgtccccttttcgccccctggcgggtggcgaaaaggcccggcccgggcgcc

SEQ ID NO: 126431 - DNA, 270 bp, Zea mays
  Clone ID: MRT4577_46773C.1
cgttctactgctagcaccagaccgctggcttcttgagcacattgaggtcttcggatttcttcgggggtggtcgcgcgcagcaccggcaatgtcgtcatgcaagcggtacttgccgagcttgatattgttgttgctgcacggaggacgaggtgcggtggccgcgaaggtgtcggcaatcgtcgtgttcggcgactcttccgtggacacggggaacaacaatttcatcccgaccatcgcgcggagcaacttctggccgtacggccgcgacta

SEQ ID NO: 126432 - DNA, 151 bp, Zea mays
  Clone ID: MRT4577_46774C.1
agcaatagctgtataatcaatcgcatctgcaatgaagcgctttgaagcatgcaacgtatgtagtatctgtaggtgattgtatttatggtagtaacaataattctacctgaattttggataatacaagctacttcgcagtagtttctgatgt

SEQ ID NO: 126433 - DNA, 465 bp, Zea mays
  Clone ID: MRT4577_46775C.1
ccacgcgtccgaccgcacaaacaccacaccttatacctactccttttgtttattcaacccatccaacgaagacagagccgggggccatcgatgcagctcatacccaccaacactctgcctgcctcgtgcgaccctgcacggaccctgcccttcccccggccatggggcactaattcatcgcgctctactaccacgaagacctcgcagactacgacatcctggaccgcctgcttgacacaccgcctgggctcgcaccacatgtccatcgccaacctgaatcataatcttaatgaagtgcatacccacatgctacctttccacaatcatctacaccaccaaactacaggagagcgatgtactggctgccaatacactacttggcctaccatacgcactatgagatataaagtcacaatacctcggagctacggagcaatgacaaccatggacttaggggtgtcaaca

SEQ ID NO: 126434 - DNA, 297 bp, Zea mays
  Clone ID: MRT4577_46776C.1
gcccgcataacccccttaaagggggggggcttgttgtatgaaaaatccaactgtcttgatcgctatggccgcctgggaaaaccaaaaaataatgtgtgggggccggattttcccggatccacaggaaaagagctttttggcggggccttgggtgttcacatgtccgcgggggaaccccccagatttagccctagccccatttatcttttcttttcgcggttctaatgcggaggtttttgccgctttttcttgagccgtgaatctgaccccagaaacctccttctgatgagaacttga

SEQ ID NO: 126435 - DNA, 1454 bp, Zea mays
  unsure (1)..(1454): unsure at all n locations
  Clone ID: MRT4577_46777C.1
ccacactcgagagccatctcccagcacacgagcgggatggcttccaccaccaccaccttcctcgccgtcttgctggtcgtggccgcgtccgcggcgccggcacggtcctgctcaccgcgcgacatccacgcgctgctgagcgtgaagcaggcgctgggcaacccggcgtcgctgtcgacgtggacgccggcgtcgcccaactgctgcgcgtgggaccacctccgatgcaacgacgccgggcgcgtgaacaacgtcttcatcgacggcgcggacgacgtgcgcggccagatcccgtcggcggtgggcgggctgacggagctcatgtcgctgacgctgttccggctgccggggctgacgggcgccatcccggcctgcctcacggcgctgtcgaacctccagttcctcaccgtctcccacaccaacgtgtccggcgccatcccggagtcgctggcgcggctgcgcggcctcgactccgtggacctctccagcaaccggctgacgggcggcatcccggcggcgttcgccgacctgcccagcctccggtcgctggacctccggcacaaccagctgacgggccccatcccggcggggctggtgcaggggcagttccggtcgctggtcctgtcctacaaccagctcacgggccccatcccgcgcgacgacgcgcgcgacgagatcaacaccgtcgacctctcccacaacaggctcaccggcgacccctcccacctgttcgccgccggccggcccatcggcaaggtggacctgtcgtggaactacctcaacttcgacctcagcaggctggtgttcccgccggagctcacgtacctggacctgtcccacaacctcatccgcggcaccgtgccgctgtcgctggagcgcctgtccacgctgcagaagctggacctcagctacaaccgcctgtgcggcccgctccccaagggccacggcgtcatcaagcacgggtgcaagccgtacgcgcacaaccagtgcagcaaagggaccccgctcgtgggatgccaggacctggagtgagtgagccggtggccatggttttctatactctgctatgctctccctcgccggcgttcttttcgtgtcccaatctggaaggacgacggacggtacggtggctggtttagctatagacaaaaaaaaaaaaaggtacggccgcgtggtggcggtgctaatatgcttagccacgcgcggttgatctttgagaagttaagcgtgtacgaaatgacagctttgtacgtgtactgtctgctggagtgtgctgtgtatctggtctggatccgatcggcctaatgtatgaaaaaaaggatgtttacgtactaaatggaaaatcattttttcccaaaaaaaaaaaaanaaaaaaaaaaaaaaaaaaaaaaaaaaaaaaagggggggggcgtttttggaggatccaaggttacttgcgcggtgtttgcgacggg

SEQ ID NO: 126436 - DNA, 1442 bp, Zea mays
  Clone ID: MRT4577_46778C.1
actccgcactcccaagtccaagtcccacatacactcgagagcctctcccagcacacgagcgcgatggattccaccaccaccaccttcctcgccatcttgctggtcgtggcagcgtccgcggcgccggcacggtcctgctccccgcgcgacctccacgcgctgctgagcgtgaagcaggcgctgggcaacccggcgtcgctgtcgacgtggacgccggcgtcgcccaactgctgcgcgtgggaccacctccgatgcaacgacgccgggcgcgtgaacaacgtcttcatcgacggcgcggacgacgtgcgcggccagatcccgtcggcggtgggcgggctgacggagctcatgtcgctgacgctgttccggctgccggggctgacgggcgccatcccgccctgcctcacggcgctgtcgaacctccagttcctcaccgtctcccacaccaacgtgtccggcgccatcccggagtcgctggcgcggctgcgcggcctcgactccgtggacctctccagcaaccggctgacgggcggcatcccggcggcgttcgccgacctgcccagcctccggtcgctggacctccggcacaaccagctgacgggccccatcccggcggggctggtgcaggggcagttccggtcgctggtcctgtcctacaaccagctcacgggccccatcccgcgcgacgacgcgcgcgacgagatcaacaccgtcgacctctcccacaacaggctcaccggcgacccctcccacctgttcgccgccggccggcccatcggcaaggtggacctgtcgtggaactacctcgacttcgacctcagcaggctggtgttcccgccggagctcacgtacctggacctgtcccacaacctcatccgcggcaccgtgccgctgtcgctggagcgcctgtccacgctgcagaagctggacctcagctacaaccgcctgtgcggcccgctccccaaggggcacggcgtcatcaagcacgggtgcaagccgtacgcgcacaaccagtgcagcaaagggaccccgctcgcgggatgccaggacctggagtgagtgagtgagccggtggccatggttttctatactctgctatgctctccctcgccggcgttccaatcgtgggtgtgtgtgaaggacgacggtacggtgcctggtttagttatagacaaaaaaggtacggccgcgtggtggcggtgctaatatgcttagccacgcgcggttgatctttgagcagttaagcgtgtacgaaatgacagctgtgtacgtgtactgtctgctggagtgtgctgtgtatctggtctggatccgatcggcctaatgtatgaaaaaaaggatgtttacgtataaatggaaaatcattttttccaaaaaaaaaaaaaaaaaaaaaaaaaaaaaaaaaaaaaaaaaaaaaactcgaggggggggcccgggtaccc

SEQ ID NO: 126437 - DNA, 3211 bp, Zea mays
  Clone ID: MRT4577_46779C.1
acctacctgaatacgtcatccctaagtgttccgcttcctctgtcgtccggcctccaactccatcgaaggggctagggagaggagggaacccgaaccacagcaggccggcgcaatggcggcgccgccaaaggcgtggaaggcggagtatgccaagtctgggcgggcctcgtgcaagtcatgccggtcccctatcgccaaggaccagctccgtcttggcaagatggttcaggcgtcacagttcgacggcttcatgccgatgtggaaccatgccagcgttgacgatgttgaagggatagatgcacttagatgggatgatcaagagaagatacgaaactacgttgggagtgcctcagctggtacaagttctacagctgctcctcctgagaaatgtacaattgagattgctccatctgcccgtacttcatgtagacgatgcagtgaaaagattacaaaaggatcggtccgtctttcagctaagcttgagagtgaaggtcccaagggtataccatggtatcatgccaactgtttctttgaggtatccccgtctgcaactgttgagaagttctcaggctgggatactttgtccgatgaggataagagaaccatgctcgatcttgttaaaaaagatgttggcaacaatgaacaaaataagggttccaagcgcaagaaaagtgaaaatgatattgatagctacaaatccgccaggttagatgaaagtacatctgaaggtacagtgcgaaacaaagggcaacttgtagacccacgtggttccaatactagttcagctgatatccaactaaagcttaaggagcaaagtgacacactttggaagttaaaggatggacttaagactcatgtatcggctgctgaattaagggatatgcttgaggctaatgggcaggatacatcaggaccagaaaggcacctattggatcgctgtgcggatggaatgatatttggagcgctgggtccttgcccagtctgtgctaatggcatgtactattataatggtcagtaccaatgcagtggtaatgtgtcagagtggtccaagtgtacatactctgccacagaacctgtccgcgttaagaagaagtggcaaattccacatggaacaaagaatgattaccttatgaagtggttcaaatctcaaaaggttaagaaaccagagagggttcttccaccaatgtcacctgagaaatctggaagtaaagcaactcagagaacatcattgctgtcttctaaagggttggataaattaaggttttctgttgtaggacaatcaaaagaagcagcaaatgagtggattgagaagctcaaacttgctggtgccaacttctatgccagggttgtcaaagatattgattgtttaattgcatgtggtgagctcgacaatgaaaatgctgaagtcaggaaagcaaggaggctgaagataccaattgtaagggagggttacattggagaatgtgttaaaaagaacaaaatgctgccatttgatttgtataaactagagaatgccttagagtcctcaaaaggcagtactgtcactgttaaagttaagggccgaagtgctgttcatgagtcctctggtttgcaagatactgctcacattcttgaagatgggaaaagcatatacaatgcaaccttaaacatgtctgacctggcactaggtgtgaacagctactatgtactccagatcattgaacaggatgatgggtctgagtgctacgtatttcgtaagtggggacgggttgggagtgagaaaattggagggcaaaaactggaggagatgtcaaaaactgaggcaatcaaggaattcaaaagattatttcttgagaagactggaaactcatgggaagcttgggaatgtaaaaccaattttcggaagcagcctgggagattttacccacttgatgttgattatggtgttaagaaagcaccaaaacggaaagatatcagtgaaatgaaaagttctcttgctcctcaattgctagaactcatgaagatgcttttcaatgtggagacatatagagctgctatgatggaatttgaaattaatatgtcagaaatgcctcttgggaagctaagcaaggaaaatattgagaaaggatttgaagcattaactgagatacagaatttattgaaggacaccgctgatcaagcactggctgttagagaaagcttaattgttgctgcgagcaatcgctttttcactcttatcccttctattcatcctcatattatacgggatgaggatgatttgatgatcaaagcgaaaatgcttgaagctctgcaggatattgaaattgcttcaaagatagttggcttcgatagcgacagtgatgaatctcttgatgataaatatatgaaacttcactgtgacatcaccccgctggctcacgatagtgaagattacaagttaattgagcagtatctcctcaacacacatgctcctactcacaaggactggtcgctggaactggaggaagttttttcacttgatcgagatggagaacttaataagtactcaagatataaaaataatctgcataacaagatgctattatggcacggttcaaggttgacgaattttgtgggaattcttagtcaagggctaagaattgcacctcctgaggcacctgttactggctatatgttcggcaaaggcctctactttgcagatctagtaagcaagagcgcacaatactgttatgtggataggaataatcctgtaggtttgatgcttctttctgaggttgctttaggagacatgtatgaactaaagaaagccacgtccatggacaaacctccaagagggaagcattcgaccaagggattaggcaaaaccgtgccactggagtcagagtttgtgaagtggagggatgatgtcgtagttccctgcggcaagccggtgccatcatcaattaggagctctgaactcatgtacaatgagtacatcgtctacaacacatcccaggtgaagatgcagttcttgctgaaggtgcgtttccatcacaagaggtagctgggagactaggcaagtagagttggaaggtagagaagcagagttaggcgatgcctcttttggtattattagtaagcctggcatgtatttatgggtgctcgcgcttgatccattttggtaagtgttgcttgggcatcagcgcgaatagcaccaatcacacacttttacctaatgacgttttactgtata

SEQ ID NO: 126438 - DNA, 546 bp, Zea mays
  Clone ID: MRT4577_4677C.1
cactcccaaccacatgccaccaagccccacccacatacaggtcaggcatctctctataacctagacgtacaacgggcctctaccggcggcccccttgctgctctacgggggccggaaacatctccactaggcgggaacaatgcgccgtcaccatgccccaaggtcaggagtgcgggtgaggcggcagatgccgtgccagatcatgttcgacctgatacgaccactccatcctacgaccacgcaaatctcgaacatgtacctagatcaacctctacaaaatcatctgtctaggaaatcaacctacctcaatacaaaagcacctcggcccgtataaatacgcgcagaagcggaacccataattgaagccctagaaaactttttgaagcacacgcgtactgtgtgcttataatgggaaagcagaaattgttgtgaacatctttaaataacaacagcgccgctggccaatcttaaccgaaaagctcaaccgacattacatcacgccttggaagacagcgtgtcttttatagacaccagccaccgaccaaa

SEQ ID NO: 126439 - DNA, 1436 bp, Zea mays
  Clone ID: MRT4577_46780C.1
aattcggcacgaggcactcgagagccatctcccagcacacgagcgcgatggcttccaccaccaccaccttcctcgccatcttgctggtcgtggcagcgtccgcggcgccggcacggtcctgctcaccgcgcgacatccacgcgctgctgagcgtgaagcaggcgctgggcaacccggcgtcgctgtcgacgtggacgccggcgtcgcccaactgctgcgcgtgggaccacctccgatgcaacgacgccgggcgcgtgaacaacgtcttcatcgacggcgcggacgacgtgcgcggccagatcccgtcggcggtgggcgggctgacggagctcatgtcgctgacgctgttccggctgccggggctgacgggcgccatcccggcctgcctcacggcgctgtcgaacctccagttcctcaccatctcccacaccaacgtgtccggcgccatcccggagtcgctggcgcggctgcgcggcctcgactccgtcgacctctccagcaaccggctgacgggcggcatcccggcggcgttcgccgacctgcccagcctccggtcgctggacctccggcacaaccagctgacggggcccatcccggcggggctggtgcaggggcagttccggtcgctggtcctgtcctacaaccagctgacgggccccatcccgcgcgacgacgcgcgcgacgagatcaacaccgtcgacctctcccacaacaggctcaccggcgacccctcccacctgttcgccgccggccggcccatcggcaaggtggacctgtcgtggaactacctcaacttcgacctcagcaggctggtgttcccgccggagctcacgtacctggacctgtcccacaacctcatccgcggcaccgtgccgctgtcgctggagcgcctgtccacgctgcagaagctggacctcagctacaaccgcctgtgcggcccgctccccaagggccacggcgtcatcaagcacgggtgcaagccgtacgcgcacaaccagtgcagcaaagggaccccgctcgcgggatgccaggacctggagtgagtgagccggtggccatggttttctatactctgctctgctccctctccctcgccggcgttcttttcgtgtcccaatcttgaaggacgacggtacggtgcctggtttagctatagacaaaaaaaggtacggccgcgtggtggcggtgctaatatgcttagccacgcccacgcgcggttgatctttgagcagttaagcgtgtacgaaatgacagctgtgtacgtgtactgtctggtggagtgtgctgtgtatctggtctggatccgatcggcctaatgtatgaaaaaaaaaggatgtttacgtactaaaaatggaaaatcattttttccctcaaaaaaaaaaaaaaaaaaaaaaaaaaaaaaaaaaaaaagaaaaaaaaaaaaaaaacccgcggcc

SEQ ID NO: 126440 - DNA, 372 bp, Zea mays
  Clone ID: MRT4577_46781C.1
cgatgctctgcgattaagcccagctaaactcgcgcggtttggctttggcgcagcgctggagctctcgagacgctcgcttggcgccgaagcggacgaggagcagttgtcggcgtccgctgccgtgtcctcagctccgccatctccttctccagctcgacgatcctctgcttcctgctcgtgaactccagcgcggcagcgtcgagctcggcgcacagccacccgttctcggcttccacccgctctgcggtgtccctgcacctctggagctcggtcttcttggccgcgagctcggcctccaggactgcgccaaagccaaactgctactgttacaactccgccgtgctctccatggaagcttctgcgcctagatca

SEQ ID NO: 126441 - DNA, 146 bp, Zea mays
  Clone ID: MRT4577_46782C.1
agtcttccacggaatactagaagaattttttgcgtgccaaacgaacaatgaaaagacgtgtccggggaagcacacaaagaaattttgagggggggacaaataaaaaacaggggcctggtcgaccctaaatgcgcaggactaaccga

SEQ ID NO: 126442 - DNA, 3327 bp, Zea mays
  Clone ID: MRT4577_46783C.1
ccacgcgtccgccaccttcggcttcctctgtcgtccggcctccaactccatcgaaggggctagggagaggagggaacccgaaccacagcaggccggcgcaatggcggcgccgccaaaggcgtggaaggcggagtatgccaagtctgggcgggcctcgtgcaagtcatgccggtcccctatcgccaaggaccagctccgtcttggcaagatggttcaggcgtcacagttcgacggcttcatgccgatgtggaaccatgccaggtgcatcttcagcaagaagaaccagataaaatccgttgacgatgttgaagggatagatgcacttagatgggatgatcaagagaagatacgaaactacgttgggagtgcctcagctggtacaagttctacagctgctcctcctgagaaatgtacaattgagattgctccatctgcccgtacttcatgtagacgatgcagtgaaaagattacaaaaggatcggtccgtctttcagctaagcttgagagtgaaggtcccaagggtataccatggtatcatgccaactgtttctttgaggtatccccgtctgcaactgttgagaagttctcaggctgggatactttgtccgatgaggataagagaaccatgctcgatcttgttaaaaaagatgttggcaacaatgaacaaaataagggttccaagcgcaagaaaagtgaaaatgatattgatagctacaaatccgccaggttagatgaaagtacatctgaaggtacagtgcgaaacaaagggcaacttgtagacccacgtggttccaatactagttcagctgatatccaactaaagcttaaggagcaaagtgacacactttggaagttaaaggatggacttaagactcatgtatcggctgctgaattaagggatatgcttgaggctaatgggcaggatacatcaggaccagaaaggcacctattggatcgctgtgcggatggaatgctatttggagcgctgggtccttgcccagtctgtgctaatggcatgtactattataatggtcagtaccaatgcagtggtaatgtgtcagagtggtccaagtgtacatactctgccacagaacctgtccgcgttaagaagaagtggcaaattccacatggaacaaagaatgattaccttatgaagtggttcaaatctcaaaaggttaagaaaccagagagggttcttccaccaatgtcacctgagaaatctggaagtaaagcaactcagagaacatcattgctgtcttctaaagggttggataaattaaggttttctgttgtaggacaatcaaaagaagcagcaaatgagtggattgagaagctcaaacttgctggtgccaacttctatgccagggttgtcaaagatattgattgtttaattgcatgtggtgagctcgacaatgaaaatgctgaagtcaggaaagcaaggaggctgaagataccaattgtaagggagggttacattggagaatgtgttaaaaagaacaaaatgctgccatttgatttgtataaactagagaatgccttagagtcctcaaaaggcagtactgtcactgttaaagttaagggccgaagtgctgttcatgagtcctctggtttgcaagatactgctcacattcttgaagatgggaaaagcatatacaatgcaaccttaaacatgtctgacctggcactaggtgtgaacagctactatgtactccagatcattgaacaggatgatgggtctgagtgctacgtatttcgtaagtggggacgggttgggagtgagaaaattggagggcaaaaactggaggagatgtcaaaaactgaggcaatcaaggaattcaaaagattatttcttgagaagactggaaactcatgggaagcttgggaatgtaaaaccaattttcggaagcagcctgggagattttacccacttgatgttgattatggtgttaagaaagcaccaaaacggaaagatatcagtgaaatgaaaagttctcttgctcctcaattgctagaactcatgaagatgcttttcaatgtggagacatatagagctgctatgatggaatttgaaattaatatgtcagaaatgcctcttgggaagctaagcaaggaaaatattgagaaaggatttgaagcattaactgagatacagaatttattgaaggacaccgctgatcaagcactggctgttagagaaagcttaattgttgctgcgagcaatcgctttttcactcttatcccttctattcatcctcatattatacgggatgaggatgatttgatgatcaaagcgaaaatgcttgaagctctgcaggatattgaaattgcttcaaagatagttggcttcgatagcgacagtgatgaatctcttgatgataaatatatgaaacttcactgtgacatcaccccgctggctcacgatagtgaagattacaagttaattgagcagtatctcctcaacacacatgctcctactcacaaggactggtcgctggaactggaggaagttttttcacttgatcgagatggagaacttaataagtactcaagatataaaaataatctgcataacaagatgctattatggcacggttcaaggttgacgaattttgtgggaattcttagtcaagggctaagaattgcacctcctgaggcacctgttactggctatatgttcggcaaaggcctctactttgcagatctagtaagcaagagcgcacaatactgttatgtggataggaataatcctgtaggtttgatgcttctttctgaggttgctttaggagacatgtatgaactaaagaaagccacgtccatggacaaacctccaagagggaagcattcgaccaagggattaggcaaaaccgtgccactggagtcagagtttgtgaagtggagggatgatgtcgtagttccctgcggcaagccggtgccatcatcaattaggagctctgaactcatgtacaatgagtacatcgtctacaacacatcccaggtgaagatgcagttcttgctgaaggtgcgtttccatcacaagaggtagctgggagactaggcaagtagagttggaaggtagagaagcagagttaggcgatgcctcttttggtattattagtaagcctggcatgtatttatgggtgctcgcgcttgatccattttggtaagtgttgcttgggcatcagcgcgaatagcaccaatcacacacttttacctaatgacgttttactgtataaatctaccaggagtgagtaatttatatattagcgggactggacctcttggtcgcgtgctatttttacagtgaagtttcatatatttcgacgcgaa

SEQ ID NO: 126443 - DNA, 354 bp, Zea mays
  Clone ID: MRT4577_46784C.1
acgcgtccactactcttcagacgatatttttaaatcaggtataataaaatccgttttgtacaaatgctggactaacttctcgctttttctatggactcttttatttttttgtgtttgttttttgggtacttagttttttttttgttcttgtctcggagtttggtgtccctttgatgaacgaagactatgtccacgggcactcagatcacatgcctcatggaatacaactcccgcttttgcctcagtcggagtctacatcggagtttcagcctctggaatattaggaagttgaatattttttcgcttcggacgcttctttttttttttttttattcatattcgagtcattttctt

SEQ ID NO: 126444 - DNA, 307 bp, Zea mays
  Clone ID: MRT4577_46785C.1
ggaccctcgaggccggcgggaacgcgcctcctcactttcttagtacgttaggtctgtcaaatcgacgatcttgaggatgtgcaacccatagcgcgctccattgccagggaagaagtaagttgtggcgaggctcctctatggtgagctccgacatggttacatgccgcacccaaggagggcccccggagctacgacctgccggtgatgggcgccgtgggcgaccgactcgacttcactatttgcacgccccggcgcaagcgcttcgagtcccaggtggagggctacggctccaccgcggggggcatga

SEQ ID NO: 126445 - DNA, 786 bp, Zea mays
  unsure (1)..(786): unsure at all n locations
  Clone ID: MRT4577_46786C.1
aataacgatatcgtctagaacggtgtttcccgaaagcgccaactgtttcccgcgagcgattacgcaaaccctagttttcgctcgcgcacccggttccccagatctcgagtttgcccggcgatccggcgcgcgcatattgacgaagatgtcaccgatcatggcggcgcgcgggcaggggctgggccagggccagggccatcaggtgcagcaagatttcgacttcttcttggtggtggacttcgaggcgacatgcgagaaggacgcgcggatctacccgcaagagatcatcgagttcctggccgtgctcgtcgacggcgccaccggcctcatcgcatccgcgttccgcaggtacgttcgccccagacaccggcctgtgctgacccagttttgcagggacctcaccggcatccggcaggaggacgtagacggcggcgtggatctcggcgaggcgctctggctacacgacgcttggctgaaggcggcgacggcgggggcggggaacaagggacgcgtccgcttggccgtcgtgacctggggggactgggattgccgcaccatgctcgaattcgagtgtcgattcaaggggatcgagaagccctcctactttgatcgctgggtcaacctgagggtccccttccaggcggcgctcggcgncggagcgcgggtcaacctgcaggaggcggtgcgggcggcgggactggactgggagggccgcttgcactgcggactcgacgacgcgacnacacggcgcggctgcttgctgagacatgcggcgcggggtcagat

SEQ ID NO: 126446 - DNA, 305 bp, Zea mays
  Clone ID: MRT4577_46787C.1
tcggggttttgtaatgctcttgcagtcagcataagacactgcacttgacattgtgggtgctgggagtgaacttggtggggtggctagctatgacagtgattgattaattattaattccgctcaatttggatgaaatcagcattaatctttggccgaacagtagtggtatgcaaactgtccaaatggcgtcgtctttactgtgagctcgccattttggtgagggtgttctggtgggcttgggcgtgggcacttgatgggctgttgaatatactaaggtgaagattattaagctattggagggatac

SEQ ID NO: 126447 - DNA, 347 bp, Zea mays
  Clone ID: MRT4577_46788C.1
aagggtcttatagtttggaatatatgtcaaaagttttctagtacacatcttcaaactcaaatatgacacatgtcctgatccatcaaagctcattttccacttctcaaggatcatctcattcttataaaatcacaagctgaaagcttctatacaaactaccaaaattttattcacccaaaataaggcaactcccacttctttcttaaataatctcccacttgagtactaacattcaaacgcttccaatcattgatagccaacccccaatctatttttatgacctatttgtaattttgattctgaaatcaataaactcctctatcctaatctgacgcagaatttcgttt

SEQ ID NO: 126448 - DNA, 219 bp, Zea mays
  Clone ID: MRT4577_46789C.1
cttcacacggaatttgtggacacttttgatattgtacttgggagttccctctatatcacatgggtgttctgagcacatgattggggtcttctcacatgcactcatgtaacgaataaagtcttttgtttaaaaaaaattggcatgtgcatcgtgacaactcttttcccctggcatatcgctatccataaaaccacccctacctgatagcctcctataggg

SEQ ID NO: 126449 - DNA, 815 bp, Zea mays
  unsure (1)..(815): unsure at all n locations
  Clone ID: MRT4577_4678C.1
ctgcaccgaaccgcaacgccgcccgcagctccctcctgccgtcgctcccctcgcgcccgcaagccgcgtcgcccgcgacccacacctccgccacgccccgctgccggcgaccttcaccgccggacctccggccgctccaacgcctcgcccctctcccttctcctccttcctctcggtctcctctcacctctctccctctttctcgccgaacatggacctccaagagggccatggcgccaccggccctcaatcttgccggatccggccgcctccgcgccaaatccgccataaatggatccaccccggccagatccgaccggtccccgccgtcgccgccaccggagcgccgccccgctcgacctgcagcgccgccgctgcctgtcccagcccacgtctgcacgaggacgacgctcgtcccgctcgctcgcagcacttgctccaggccgccgccccagccggcccggcatcaagccaaggcccagttcaagccgcatcttctgccgctttgtcaccgcccgcccgtggcaccaccttgagatcagccccgacgccaccaccgagctcccctgtgctcgtcgggcacccgcggtcctaaatttggctggttcaaattaagttggaagaaaaggaaggggagacgcgcaggcagagctcgccggcggcagcgcttaccccgggcgcgggggtgatcagccgatgcggtggtggccatgggcgccggtggctggaagaggtacagaggagaaggggcgcaagagggagagagatgataggaaggggagggctagcgngcttgtgaaggtcgacggcggcga

SEQ ID NO: 126450 - DNA, 298 bp, Zea mays
  Clone ID: MRT4577_46790C.1
gtgttgctgaaggacaggcgcgcaactacgggcgggtgccgggctctcttgtctcgctacgccgtgcgtttctccccgccatggagtactgggagcgattcacccctgcgaagaacctgcatggaactgcgacgcgaactttcccactcatcccgatagtggtggagcagacgggtcgaggcgaacgcgcttacgacatatactcgaggctgttgcgggaacgcatcgtgtgcgtcatgagcccgattgatgacagcgtggccagcctggtcatcgcccagctgttgttcttacagtc

SEQ ID NO: 126451 - DNA, 378 bp, Zea mays
  Clone ID: MRT4577_46791C.1
atgtaaggtgctggttttacattactggaagtctggactccaagggcgacacttataataggacaagcttattgcccgtaactaatggatatattacacaaacccacgctaagcgaaccgcgctattaacggactaaaaacacccaactccgagcgggtggggaggcccctaaaattatactaggaacgggtgtggtaaatggcctgggcctgggcctagatctcgtgaacgctaaccctgttataacccaggcccgaccttattgacgagcgcgcgcgcgatctttgtgacctgccccaacataagcaccataaccatgttggtatggcgcgttacggaatgtcacttccgaactcagaagccgcatacgatatgct

SEQ ID NO: 126452 - DNA, 568 bp, Zea mays
  Clone ID: MRT4577_46792C.1
tttttttttttttttttttttttttttttttttttttttttttttttttttttttttttttttttttttttttttttttttttttttttttttttttttttttttttttttttaaaaaaacttggaattggattaaaaaatacccattgggggtttaaaaggtttaaaaaaggggttaaaatgcccaaaaaaatttttaaaccaaccgccccttttttttaaaaaaaactggactttaaaaatttggaaaacctggggcttaaaaccttattaaaaaaagtttttttgatttttaaaccccttaaaaaaagggccaaggggtgtgttgtgccctggggagggccaaacccaaaaccatttatttggaaaatttggtttggaaaaactttgaaaaaacttgtttgttctttgaaaaccttgaactggtggggggggagtcttcgggaaaaaccccttgggggttttttttaaaggaaaaaaaattggtcccttgccttttttttcctcccaaaaaaaggggtgagaggggcaaattgaaaattcttaagggggggggttctgggggggg

SEQ ID NO: 126453 - DNA, 393 bp, Zea mays
  Clone ID: MRT4577_46793C.1
cttatcctcgttgtgctcagtttcgcgtttaactttgtcgaggtgtttattggtgcctgccccgtgggccactacaccggctaccgcgactgggccgacgcctaaatggaccacctgcccccgccaagatatccatggaccccaaaggaagagactcgccaacgggggaaaacccgccgcccaagacggcccacgacggaaacggacacgcctgaccaacacacacgccgtcggaccggggaacgggaaggaacactgctggagcgcgcaaaggaaaggcgtccaaagaataacagggaaaaaagatggctgaccggtttccaaaggaaaaaaagattcccccgcccgccccggtaagaaaggggaacaagatcgaagaaacaatcccctcct

SEQ ID NO: 126454 - DNA, 253 bp, Zea mays
  Clone ID: MRT4577_46794C.1
cacgtacgctcgctcctactaccacccctacggcatctttacgcccgaccacctcgccacggggcggggcagcaacattaagaacgtgccaaacatcattagtgatcacctcgacgcgtagaccgtgctgccgatacatgaacccggagctcgacggtaacaagatgctctgttatgccaacttcaccaacggccgcgtgtagattctatatgacaacaaaagccacatttccaacattattcatatttacaa

SEQ ID NO: 126455 - DNA, 368 bp, Zea mays
  Clone ID: MRT4577_46796C.1
gacagtatggtatgctcttttatctgtctagagcgagacccacatagtattgattatatctatagagttaggaataattctcttgcagcattggctgatgatgggaagtttctacttgctgcacgcaagtgtcgtaagcccacctgcacagactacctaatttctcttgataaggttgatatgtcaaagggaagcagcacctatattggcaagctaaggtcagcttttgagatatgatgtcggaatactttaaagctactatttttgctagcttttattatgatacacataaccaatgcccttagtctacaggttgtttcagctaaaatgtcaactgtcaacagtgtttttttgtcacatttcattct

SEQ ID NO: 126456 - DNA, 196 bp, Zea mays
  unsure (1)..(196): unsure at all n locations
  Clone ID: MRT4577_46797C.1
atgggttagnnanngttagtggattaagtaantgttgtngttgntgtnggtangnagnagaatttganaaagtnagttggttgaatggaagtagttgttggaggtaggnagnaaggtttgnaattttttgttgagtaagagttggnaaaatttgtnggagnaattgttgttgnaataantgttgntgnaggtatgt

SEQ ID NO: 126457 - DNA, 603 bp, Zea mays
  unsure (1)..(603): unsure at all n locations
  Clone ID: MRT4577_46798C.1
gggttctggcacctggngtaccttttccttgtgctaagaggctgagatggtgagaggtagagaagagagggaagttagtggctgtctatatcaggtgtattagaggggatagatagcttctgatgttgtttataacctttttgcagaactggaagaaagaactagaaaaacacagggagaaattattaagtggaagtgagagctcatccaaaaaaagacagagaaagaaaaaagaaaagaagaaatctggtagggtgagcaaaagttttccattcttctaaatgttacaattaagagcctacaagaaaatattcatcttcttcttcatcaagctctgattcttccagcagttcttcggattctgacgatgaggataaaaaacaagggaaaaggaaaaagaaaaagaagaaccgttcacataagtcttctgaaagctccatgtcagaaactgaatcggacagtaaggatagtttaaaaaagaaaaagaagtcaaaggatgcaaatgagaaagaaaaggacattaaaggactcagcaaaaaaagaaagatgtatcctgaagataaaccattatcatnctgagtccttatcagaatcagattatat

SEQ ID NO: 126458 - DNA, 461 bp, Zea mays
  Clone ID: MRT4577_46799C.1
cggacgcgtgggcggacgcgtgggcggacgcgtgggaagaaaacaatcaccatcaaattggaatgcggcaaaaccaagagagatttggatttgaaccaggaccagagttcacactacagatgtttcagaagtatgcagatgacttcagtgatcagtattttatgaaagataaatgcagagattcaccaccatcagtggaagatattgaaggcgagtattggcgcatagttgaaagaccgacagaggagatagaggtaatatatggtgccgatttggagactggaacttttggcagtgggtttccaaagttatgtcctgaaatgaaatctgatgtggaggataaatatgcacaatctgggtggaatctaaataacctgcctagactacaagcatgttgaagatcatcatttgtactcactgaactacatgcattggggtgctccaaagatgtggtatggagt

SEQ ID NO: 126459 - DNA, 420 bp, Zea mays
  Clone ID: MRT4577_4679C.1
gctgttacgataattgaccatacctattgttgtaaacaaattctgggaaaaatctatagattgacaacatgcacaagataaacaatgagaagtggttaaaaaaaaggtgaactaagtggtgcaccttgatccaacttcattactggctttcttctggtcctcaagaggagtgcctttattaatagggacactctctgagtgtgtaggcaaggtggcaagtgtatgcaacaatcctatccggtcctttgcttcaccgagaccaataattgcatctgatcttgatgaggaactcgtgggcttcttgcacgacccgcgcaaggccatccactgctgacacgaggatgatggcctcgagaagcaccaccgcgaggagtgccaaggcgacgccatgggttcccatggtcacaatctgcagcaacc

SEQ ID NO: 126460 - DNA, 417 bp, Zea mays
  Clone ID: MRT4577_467C.1
cccacgcgtccgccgacgcgtgcggtttttgaacgcacgccctggcacccgtgcttggtggtgggccgaccgtgagcagctccccggcctccgacgagctcagcagcatgtaatctatgtcggagcagttactgacacgccctgctgctcctagtgctctccagatcaagcctagcgtggtcgatttgcgcagttcatgttccgcaattggtttaccatccgacaaactcctatttaccgtgacgccaagcttctcaaacactgacccactccgtagtacctattccgtgcgctcacttatatgtcaggtcctacatgacatgtgctactagagttcgcgccgactaaaggatcctaagagaatgtggaaaaacacgtcccacgtggatgcctcagatactcggctaatagtctgta

SEQ ID NO: 126461 - DNA, 1876 bp, Zea mays
  Clone ID: MRT4577_46800C.1
cattgggtacctcgaggccggccgggacagcgctcacttggattcggcgaccaccggagcgcggaggaggacaggcgccgatctaaagacgatggccgccgcgggctcctcgccgtccttctcctcctcgagtaagcggtgcgtgccctgcttctttcttcaattttcccccgatccatggctcgtgcgtgggttccctgctcctagctccactcccccgtccatggcttgcatctatgctgcacagctcggttgctgttgcagttcaacctacttgttactccaaaaagaaggcgggcttatccaagatattgatcaaaatttccaccttttcgcgtcgaagggcgatgaattgaaggatccacccaggccaagcactggtgctctgtgcttatcttttagcgagcgaagtggtcatttccccctctcttctttatgggaggaaaataggaaatggtgtgccaagtgtatcctcaaccattctactgttccaaacgtgcagtatacatcggcatacagtcgatccagttgcaacaccatagtacagtgctgctccatctccatccagtagctgtgcctgtgtttttgtccttcagatttgatgcgcacgaggccaaatgcccggtgcgctgtcgtttactgggccacgtgcgacagctcctccacccagattttgacaacgccttcccaacttgctcgctcccgcaacgacagcgcgcacttggattcggcgaccaccggagcgcggaggaggcacaggcgccgatctaaagacgatggccgccgcgggctcctcgccgtccttctcctcctcgagtaagcggctggaagggaaggtggccctcgtcactggtggcgccaccggcatcggcgaggccatcgttcgcctcttcatggagcacggcgccaaggtctgcatcgcggacatccaggatgaggccgggcagcagctgcgcgacgccctgggaggtgacgcgcagggcgccatgttcgtccactgcgacgtgacgtcggaggaggacgtgagccgcgccgtggacgctgcggcggagcggttcggcgcactggacgtgatggtgaacaacgccggcgtgacgggcgccaaggtgacggacatccgcgccgtggacttcgcggaggcgcgcagggtgctcgacgtcaacgtgcacggcgtgttcctggggatgaagcacgcggcgcgcgctatgatcccgcggaagcggggctccatcgtgtcgctggccagcgtggccagcgccatcgggcgggacgggcccgcacgtctacacggcgtccaagcacgcccgtggtcgggctcaccaagagcgtcgccgcggagctcggccgccacggggtgcgcgtcaactgcgtgtccccctatgccgtgcccacggcgctgtcgatgccgcacctgccccagggcgcgcgcgcagatgacgcgctcaaggacttcctggcctttgtcggcggcgaggccaacctcaagggcgtcgacgccatgcccgaggacgtcgcccaggcggtgctctacctggccagcgacgaggcgaggtacgtcagcgcggtcaacctcatggtggacggaggcttcacagccgtaaacaataacctcagggcgtttgaggattagttgaggcatttatgccagctctgggattgggagggagtattaccgctatttcttctgctgttgtgacaagtgtgtgcaagactaataaaccgcagcatgttcatgtagccaacagatgattgaacattccaagtatcattgctgaattcacgcatatagttgctcttcaaatagatcaaaaaaaatttcgtcctaaaaaaaaactgctgtgcctaaaaaaaaaaaaaaaaaaaaaaaaaaaaaaaa

SEQ ID NO: 126462 - DNA, 488 bp, Zea mays
  Clone ID: MRT4577_46801C.1
tccacgcgtccggatttctctctactcctctatcggcgcccacctccatggccggctgtagctcccagccatggcgtgcccaagctcctggcgtttcctcttccccgcgcgcagctccttcgagcccatctccctgctggccatgatgcccctgcgccggtcgagtccctgcgctcgcctggctcgtcgcgcgccctagcatccgctcacccctacgcgcgcttctcccccatggtgagctcgcccaccctctgctcctccgtgcgcatggcagcctcctctgcctccaatccactgcaccatggtggagctcgccggcgctcctccccagcgtccctcgccgagtccccttccccacgcgcgagctctttcgctagccgctgctgcccgacttctctggtgcgcgcgcccatcctccatcacagcgcacctcccaattgcttcgatccatggcgtgttcctgctcggcgcccatctcccggtgctcc

SEQ ID NO: 126463 - DNA, 479 bp, Zea mays
  Clone ID: MRT4577_46802C.1
ggggggggggtttttttttttttttttttttttttttttttttttttttttttttttttttttttttttttttttttttttttttttttttttttaaataaaaaggccaattgcctccaatggtttaggcccaaaaaaaatgcccaattggggggggggggggttttttttaaaggaaacaaaacttaaaactttcactcctttaaaaaacaaaagaatccccccccacggaaaacaaaattcccaatgctttctgacctttttaaaaaactgccccttttaaaactttgggctcgggtagcttttttccaccccccacccatgaagaaacatcatgttgaacaacaatttcaccccctttttgggggaaacccccctaggaaaagggaccccaacagccaaaaccccttccgaaaaaagagcgggggaaaacaaaacctaacctggaaacccaaataattttaacctttgccacctgg

SEQ ID NO: 126464 - DNA, 585 bp, Zea mays
  Clone ID: MRT4577_46803C.1
ccttctcctccctttctcccccctctcttttttccttttttcttttttttttttttttttttttttttttttttttaaaaaaaaaataaggggacccggccttgctggggggaaaaccaaaatagttaaacaaaaattttgggcactttttttggggcccccccggaatttttacttttgggaaaccccagggggaaaccccccccctgggtaaacaacaaaaattatgaggggggtttttgggaaaaccttggaagggccttggggagtcaacctatccgttgtttttggggggggccccccccccccttataaaatggccccagaaggggcctttgggccttaaaaacgttttccttttttttttgggcccgttggccgggttggcccccgcccttggttttttttttgccccaagggttttgggccccccccagggaatgggccattttttccaaaatccccccctggggttttttttttttttttttgggagcttgaacaggggttttggggttcgggttaaaaaaaggggcccccggggggggtttatccaggaaagcaggcccccccttttaaggtttt

SEQ ID NO: 126465 - DNA, 411 bp, Zea mays
  Clone ID: MRT4577_46804C.1
aaaaacaatcgtcttatatttattttaagcttacatacttccaaataaacttcttttgaacaaaatttgcatgtgccataggtccctagccactccaaatgtaaataaacagaaatgttccaaacgagaaagcaatgtagtagttggcattagtttatctttgagtaatcattgtcagatgtccagaaaactgacaactccattagaatatcaacagtaaggttcttaaatagcacctgaaatcccaaaagaacatttagcatggccatgggtagctagggcagatacaaagtcaataaagaaactatcaaaaaaggaatgttgaggacctcaatatcaaatttcagattcatcttgaggtttggaagattataaatttcagcaagtagacttagaattcccatggtctaa

SEQ ID NO: 126466 - DNA, 190 bp, Zea mays
  Clone ID: MRT4577_46805C.1
gacgacaatatcctctgcccccagtgggcagctgtgggtgagtgtgccaagaaccctaactacatggtggggaccaggaagctcctggcttctgcggaagagctgcaagtatgcgcagataaggtatacctgctgtctatattgtcatggcgtttcgtatagtctgctgttgtacgatgatatagcatgt

SEQ ID NO: 126467 - DNA, 437 bp, Zea mays
  Clone ID: MRT4577_46806C.1
ccctcaccactcgtgcgccgattctgtaccagtcacagacgactcaagtccagcactacacggggtatggcatgatactacagtaaggtctcgttgttcgctgcaagcttcagtaattacctgttaatcttctcggcgttcgcagcatgcaattgttgcatatgatggcaagaacactatgtcactgggcatgttgcgcgcaatacacgcatgaaagaaatgtagaagttgctataatctgtatttccattccgtaattaggggatcattggttttcctttttgtgaaaaagttcttgcaatgactttttgtcattcatgaataagaaaaaagaagtatccttctctgcatcgacaagaaaaataccttgttcccgacgaactcacggcgggacatttagagtacccaattttacaaacgcatcacatctcaacgcc

SEQ ID NO: 126468 - DNA, 241 bp, Zea mays
  Clone ID: MRT4577_46807C.1
tgtttaattttgggctacaaacacaaggcaggggttttccacggccgtacaaacaaattgactttttatgactttggttcccaggggggatttttgatccatacgttgctacatactggtcctcccaccaaaaaattttttgcactttgggaggtatttttttaaagcttaaaaaaaacctgaaaattgttcaagtggacaaaggcccagttagatttattggggggggccatagggtaaa

SEQ ID NO: 126469 - DNA, 592 bp, Zea mays
  Clone ID: MRT4577_46808C.1
cccagcgtccggttcaataatgaagttttttggaagatgttctgtggcgtcccagaaaataagaaagtacatttctaaaaaaaaaaaaaaaaaaaaaaaaaaaaaaaaaaaaaaaaaaaaaaaaaaaaaaaaaaaaaaaaaaaaaaaaaaaattaaaaaaaaaaaaaaaaaaaaaaaaaaaaaaaaaaaaaaaaaaaaaaaggggggggcccgttttaaaaaaaccaaatttaacgaccgggggaggggaaaagaaaaatttttttaaaggggcaccaaaaataaaattacggggcgggggtttaaaaaggggggaaggggaaaaaccggggggtaaccaaattaaagggcttggaaaaaaacccccttttcccaagggggggaaaaagaaaaaaggcccgaccgaatgccctttccaaaaattggccaaccctaaagggaaaagggaaccccccttgaaggggccaataaagggggggggggggggggggtaaccccaaggggaaccgtaaatttggcaagggcctaaggccccgttcttttggttttttccctttctttttccccaaggttggcgggttttcccggaaaa

SEQ ID NO: 126470 - DNA, 411 bp, Zea mays
  Clone ID: MRT4577_46809C.1
agaatccataatagcaaattttattcataatattacacaggtacagcaatctaagatatcatattaagtgctcgttcggccaaaaaaaaaaaagaaaagtgttggagtggataaaagccccgggatttgggaggaaggaaatttaatcaacattaattgggataaaggcaaaacacgaccccccaagccctaaaaagggtaagggtcctttaaaaataaacaagggaagcagaaaaccccattctggagctttgctttgagcttgaggcaaacacaaagagaatgagaaaaccttaagcgctagcagggtctcaaacaggcttgaaaaaatgaaaatccttgaaaaaatcccatgggttagccccctccggagggaaaaatagctaattgactaagccattctttactggg

SEQ ID NO: 126471 - DNA, 428 bp, Zea mays
  Clone ID: MRT4577_4680C.1
acaggggcccggcacaaatacatttacacgggcttactacatccacataggggaaaaggggggggcaacctttaggccccgggaacaactcgaacagaccccggaagattttttacagggctttcatagttcacgaaacccatgaaccaaaacccggagttggcgactgaaaccacctgaatggccccttttggaggggtttgctgacttggtgggggagtaactggtcccaggggatgaagggggaaaacaaccttataaaagggggacccaattttgggggtctcaggcacatatttaaaaggggtggcgctaccgaatgcaattttgacaggcgaaaaatacaggacccccatgattggtccatgccaccttgatagggaacacacatatgccttggggagctttttataaggggagccctcaaa

SEQ ID NO: 126472 - DNA, 648 bp, Zea mays
  Clone ID: MRT4577_46810C.1
cattaaattgaaatccacctcacaaaagggcaaattgggcccttaaaatgaagcctgaaccgcccgcaattgtaatgaaaatttcaaaaattcgcccttaaccagtggtaccacccaaaagaccttttttttttttttttttttttttggagaaacaatttctaggctcaaattcgccaaacatttcgagcattgcaaggtctacaaaactttcaccaatattcaagtggcgaacacacaacactcatcagaaagaaactgtaccatacgcaaacgctctttctggatgtggcgcagttaaccacttaacctcatttggacatgagtagtgtatcaggcttccgctgtttgcttggtgtgtttggtttcgaacttggcctagagcttgatccgttgcttccgcgatgtccaactgggacaatttgcccaaaagctaccactgccgctgcctttgcagcctttcgggtactcttgtcaagctcgatcaagcttcgggctgctaaaattgcctgtggcacaaggtcgtggcacgcacgagcataaacaaccctcactgcttctgctgcagcatcatgcacctcggccaggttcaacggtgcaagcaagcagtggccaaaaaccctcatcactggctggagcaggtcccaa

SEQ ID NO: 126473 - DNA, 274 bp, Zea mays
  Clone ID: MRT4577_46811C.1
gcggccatcagaagccttcctcctggaattcctgtgcactttcttctctaccctattcatcgtgccggatcatccagaacacggagtcctatttctggttcgagaacttctcaacgttatccaggactatacctgggaggacagtagtgacgacataattcggatctacacctctatcctgcacctgctgtctgccatgagtcaggacacctatctttaccacatagacaaagttgactccaatgacagcctgtacgggggagactccaggttc

SEQ ID NO: 126474 - DNA, 390 bp, Zea mays
  Clone ID: MRT4577_46812C.1
aagaggaactacacttagacaattaacaaaagatacaaaacagaaccgcctccaaacagatctatatcagataccaatagattgtatgcagattactgataagaacacaatcacaaggttcaccgaccatgtctttaaatgataaataagcaacaaaacactagtcttcatgcattagaagatccaacatactaagagaacatttcaacttttgtgcttctgcccaacaaaaataccagcatccaccacagcccaatcacatgaacaggttcggcctcgtcgccttgtaggtggtcttcagcttcctggttggtggcctgaccttttggtacacaagggggaacttgatcttggagttgtggaactgcttggtgttgtctctcttgcata

SEQ ID NO: 126475 - DNA, 202 bp, Zea mays
  Clone ID: MRT4577_46813C.1
attcggctcgagatcgtgttctccgtcttgtagcacatcgaaggcacgtccaacagggggggctgtaggaccccgaccgctgaattaagaagctagagcacaaaccccagtccacaggcgtcctggactgcaacaccatgtagcacgaccgatcctgactcctgttgctccgccaatatgcccgctgactgcatccggacaa

SEQ ID NO: 126476 - DNA, 730 bp, Zea mays
  Clone ID: MRT4577_46814C.1
ctgtgcggcgctcgatgcggccctcgaggccggccgggaggcttcggccatggccagtaaccagcaccaccacctcctccttgctctattcctcatggctgctgccggcaccaccacagccaccacctcatcatcaggcaactcgacgacgccgacggcgtacgagatgctggagcggtacgatttcccgcgcggcatcctcccggagggcgtgcagcggtacgagctccgccccgacggctccttcgaggtgttcctctcgggtcgtagctgcgagttccgcgtcggcgaccgctacctgctccggtacgaccgccgcatcaccgggacggcgcgggaaggctccatccgggcgctgcagggcgtgagcgtgaaggtgctgttcgtgtggctcggcatcaccgaggtggaccgctccggggaccagctcagcttcctcgtcggcccgctcgccgcgtcgttcccgtcgcgaaacttcgccgagagcccgcgctgccagtgtgggcttcgactgcgcctacggcgcctgggacgacgccgccgccgccgccgtcgcggcgtcctgataccaagccacctcatgagacatgcctcctgctgctgctgctcgtcagttgtcacagttactgttgctgaattcgttcatgacttcatgatcatattattgttggttcgtatacggagctcatcaagaaatgctctcaagaaaaaaaaaaaaaaaaaagcggcc

SEQ ID NO: 126477 - DNA, 938 bp, Zea mays
  Clone ID: MRT4577_46816C.1
gccggccggtttttgggtgactcgagaccggccgggccgggaaaaaaacgcaggcttgggccatggccagtaaccagcaccaccacctcctccttgctctattcctcatggctgctgccggcaccaccacagccaccacctcatcatcaggcaactcgacgacgccgacggcgtacgagatgctggagcggtacgatttcccgcgcggcatcctcccggagggcgtgcagcggtacgagctccgccccgacggctccttcgaggtgttcctctcgggtcgtagctgcgagttccgcgtcggcgaccgctacctgctccggtacgaccgccgcatcaccgggacggcgcgggaaggctccatccgggcgctgcagggcgtgagcgtgaaggtgctgttcgtgtggctcggcatcaccgaggtggaccgctccggggaccagctcagcttcctcgtcggcccgctcgccgcgtcgttcccgtcgcgaaacttcgccgagagcccgcgctgccagtgtggcttcgactgcgcctacggcgcctgggacgccgccgccgccgccgcgtcctgataccaagcttcctcatgagacatacctcctgctgctgctgctgctactgctactgctgctcgtcagttgtcacagttactgttgctgaattcgttcatgacttcatgtatcatattattgttggttcgtatacggatcaatcaaagaaatgctctcaatagatcgaacagtactatcaatcagaaaatagattgctgcactcgttcttgggagattgagcaattccatgtgtatttgatgccgcccacagatcgtcgcacggcgaatccgtgattcatttatggagcaattatgttcatgcccgggttaatttaattaaggcattggaaagcttgggctcgctttttgtaatagagttatagatcgaga

SEQ ID NO: 126478 - DNA, 368 bp, Zea mays
  unsure (1)..(368): unsure at all n locations
  Clone ID: MRT4577_46817C.1
ctcgagccaaattatctcgaccgggcccctagtcatttctaggtatacatcaacaattnnctcaccccaataccacaaatgtgaacatctaactcccaaagtcttaactctatactcacaaatgttgctactacaccgaaaatctcagcattctcttgaccatatccccttactgattccaacaaactgcaacacactcgtcacactcaaatccttgatgtcaccaacctcaacactctcgtggacactgaatacgtggatctcaacatactcaacgcgcttatgctcaacgagattgtcggtcagcacgacctcgctgcccttatgctactcgacaatggtggaacactagactcagctgacgatct

SEQ ID NO: 126479 - DNA, 480 bp, Zea mays
  Clone ID: MRT4577_46818C.1
gagagcttttttttttttttttttttttctttttttttttttttttttttttttttttttttttctttctttgaaaaaccgagaaagtaactcttaatttttggggggccacatacatcatccaaaaaactttattattgaattgccggcaataagccctctaaaagagggccccccccaagatttgccattggaaggaggctgctcggttttccaaaacaagggggacaaagggcaccaattgccaaatttgcaaaaggggccccggggtatccccaaaccgccggaaaaaaggccacaactgttcctttgtcaaaaaagaaccacgctttcttccagacacctggacaaatggtggcaatattccctgcggcaaaaaatacacgggggtcactgcggccaattcgttaaatggaaaactttgtccaacttgactatgaccaacccaccagctctgctaaaaacaaaaaattattggtg

SEQ ID NO: 126480 - DNA, 651 bp, Zea mays
  Clone ID: MRT4577_46819C.1
cccatttcggtctcaaaaccatggtgaccatgcaaatttgacttatgggcatattaagcctggtaaagggaatataccaaataaggaccagaaaacaaatccacatctgcagtcaaaggaagcaagcagcagccatccttaaacaatgcatcaaatggtgatgcctcttacaaggcaaggcaaatagaaaaggctgttattgaaaatttggacacgaggaagcacatcactctcaatggtgatgcttcaaatctaacaagtgcatctgttctactgaaggaagctcgagatttgaagcacttgtctaaacgtcttaagcaggaaaaaggggatgactttgagagtacaagcatgtgctttgaggcgggtctgaaatttctccatgttgcttctctgtgggagaccccaaacattgatagctccaatcaaggggtttctatacaagctatgaaactgtattccgaaacaggaatcctctttggattctgcgctcacgaatttgagcgactcaagaaaatggcgaatgctgctctggcatataaatgtgtggaagtggcatatatgaaggctgctttctttagaagtcctggtgtaattaaagatagacatgcattgcatgcagcatctttgatggttgctccagctgagtct

SEQ ID NO: 126481 - DNA, 663 bp, Zea mays
  Clone ID: MRT4577_4681C.1
cctatgggcgattgggtccctcgaggccggccggggcgtcgccacgaattgaggagacgagcgtacgtcgtgtacaccgttgccgagagaatccaggagggagggagagaagaccacgtcgcagggagaagcgtgcgtcgtcgttgtcgaggagtgccgctgcggaccactcgccgttactctaaataccaagcactggatcgctgggtgggcgttacaccggcaaggaggccaccgtgggctggagcgccgccgggctcgctcgacgtcgaaggttgacgaatcacggtggccgaccgatccgagcgaacgacaccgattggaggagccgggtcatcaccgcggttcgcacctccatcgtgggacggaacgtctacgctgcgattgctggtgagacgagcaagtgactgaggaacccgaagcaccgcaggttgaagattctgagcaggagctcgcagaaggtgaagagcaggtaccaccagaggaggattactacgacgagttcgatgagatctaggcgtcgtctcccagtcaactatggcgttgtggagatagttattttggttcgatctattttattatcagttattttgtaagacattatcgttatataataaaagttatgacattcgtctcaaaaaaaaaaaaaaaaaatttccggcc

SEQ ID NO: 126482 - DNA, 1195 bp, Zea mays
  unsure (1)..(1195): unsure at all n locations
  Clone ID: MRT4577_46820C.1
acactctactaggcaaaactggtgtgagtggtttttactatggggggcataaacagttgaatatggagagtcggctgagtttaggacaaaaagacaaggcgtagtcttttgagtctgatcagtctagtgttgcctatgttgggtaggaaataaaagaatcaaagccctcgacgttagcagttcttagcgggactcgacgttcctaacagctgttgagctctcgaagtatgagatcctgaatgcatcctctttctttccacttcatcttgggaatctggaatggttgtttatggctgggtgtgacagatcagactgagtttagaatcagactttctatctatctatctagctgtattgccactccaacggttctttttctttgattatgccccgtatctctctgagcctatttgatctatttgctatatctaagttcgagtgtgaagttcgctccggttgaagtgtagggcttcctaattcctgcttcgtcctcctatgaatgcaactagtatagaaggttggcccgtcaccgtataccatcgtaagatgaactggaaattcgtagtttcaaccagttacacaacaaccagttacacanaataggcaagttgaggtttgttcagcgtgtgttgcctccaactataacgaggccctttgacttgaggcacgatcttacctcttaacgcgctttcctgctagaagaagtgagggtgatgtccaatgacctgttgaagaagcttgctgtgtagataggtttcgtgaacctaatgtagaacctgtaaacgaaagattagagtcccggaaccgctgccattcaaaaagctatcaatctgattcgaaataccaaggttcgaagacctctggctttgattgtgtgccctttcttgttcctaaggatttctaaccagaccttaccttaggcggacgtatactcaattatcaataagactaaatcgtgatcgacccgccatcatctcttgcctgaactgacttaccagtcacagggccgagaacacatgatcgagggaaatttctttcatcactacgaaaactggttttgctgattgacaaaacggatctcttccctgtgagccgcctttaggaaaactgcaccaaagatgtgtctttgttcggttcagatcaacaaagcatttgctaataccagtctgaaggcaacgctatgcagctcccccgc

SEQ ID NO: 126483 - DNA, 339 bp, Zea mays
  unsure (1)..(339): unsure at all n locations
  Clone ID: MRT4577_46821C.1
gtgttttttggtggttgtaagaaaacatggttgtccacagctatntcaatcaattgacaatgcgtgtggtactagcacatacctaaagnaccgaatcataacgcatactatcacgcttatatatatatacatgcggttatgcaaccacgcgacgaccgcgcctactcgtggggggggggggggggcgctccacccggctcagcaccacatccgacggcgaccccaaatgaccacgagcacgctcatggccggcaggggatcctgaagatctcggcgagggtgttcatgtgggctccgaacgccccgtcggcccggttgatgaccgcgaacctggacaac

SEQ ID NO: 126484 - DNA, 246 bp, Zea mays
  Clone ID: MRT4577_46822C.1
agcgacagtaatagcacactcaaattaactccacagaacaccttctatttaaacgaagtcggatctcacaagaacggaaatcgtttccagaggggacccgaacatgacagatctcagttacgttcctgccgcaacgttccaactggaaacctgtacacccacgagagaactcgcaactccaccagccatcggacctccctcctctcctgggggccataagaaaaaaaacccttccggcccacaaag

SEQ ID NO: 126485 - DNA, 539 bp, Zea mays
  unsure (1)..(539): unsure at all n locations
  Clone ID: MRT4577_46823C.1
ggcggggtttttttttttttttttttttttttttttttttttttttttttttttttttttttttttttttttttttttttttttttttttttggcacccaaaaaaccgcttcttggaggaaaaaacaaatttacaaacaaaaatctgcccagggggggggcaaatccggaaaaacaaaaaaaaagtgggccccccctggttaaaaaccaaatggaaagctttttttccccggccctccccgcaaaaggggggcatcattgcattggggccctggggcattaaaccctattaagagaataaaaagaaaaagtttccaacggggggttaccgggggccggccaggcggataaaccaagcgttggggaactggaacccaaaaggggccccaaaaacctgcccccccccaagggaaaagtgggtgaaaaacccggcccaaaagcccccccggaagggggaaagaacttaaaaaaacgcgggcttaatggggngggccggaaacaaaagaccccaaaccggccccgcccccctcaagggggggg

SEQ ID NO: 126486 - DNA, 202 bp, Zea mays
  Clone ID: MRT4577_46824C.1
gcgccccccacaccaaaaaaaccctctgttttaaacgggaacagtttggaagttttacatatctgagaaaaaagaggggactgtggcttttatgagcgcggttactaaaactcttcacagagaatatgggtctgtcatagaggtatttttaatcacccgatgcccccccagcggggtgtcaacgaggggggggcccccccgc

SEQ ID NO: 126487 - DNA, 342 bp, Zea mays
  Clone ID: MRT4577_46825C.1
ccacgcgttcggggaaacgtgctgacaaacgtcacgcttagagactgccacgctgtcctccggcatttgcactgacctctccatcgcctacgacgccgcctacgaccgcacgcaccgtccttactccgctctagactacgacggtgagtacaaccgcccgtaccgcaactaggttgtgccctacatagacatcatcatcaacatgatcgccaagccgcccgcgaggtcgtctaagacggtctccaacagaggcggaggctcaggggtgggcttgacatcatgcttgagcgatacgcacttgcagaggctgagatctacggccagctcttcggcttactcaac

SEQ ID NO: 126488 - DNA, 624 bp, Zea mays
  Clone ID: MRT4577_46826C.1
gcacgagccgagatgcacccggacgactcgcacatcgtgctcaacagccacggcgtgtggcggatcaaggggatcatccaggtgtccaggtccatcggcgatgtgtacctcaagaagcctgacatctgcaggggcaacccggtgctgcagcagtccatctgcccgttcccgctgcgccgccccgtcatgaccgccgtgccgtccatcaccacgcgggagctgcgccccggcgaccgcttcatcatcttcgcgtcggacgggctgtgggagcagctcagcgacgacgccgcggtggacgtcgtggcgagcagcccgaggaagggcgtggccatgcgcctggtgcgggccgcccagctggaggcggcgcgcaagaaggaggtcaagtacgacaagatccggaccatcgagaagggccagcgccggcacttccacgacgacatcaccgtcgtcgtgctcttcctcgacaagtgcaggggagctgccaggtccagccccgaggacatcgacggcacctacgcgccggtggacgtgttctcctgcagccccgccgccggcggcgatcacgaggacccgacgaagcccgtcctgcgtcgttgatacggatcgcttggtgttccgcgtgct

SEQ ID NO: 126489 - DNA, 1840 bp, Zea mays
  Clone ID: MRT4577_46827C.1
cctacatgacctacaaatacacgatgggccctcgagccggccgggaaatctcttgctactccgctttctagctacacccttccttataaaatacgcaagagtgcagctgcgcagccgccgtcgcgcagccagccatggccatcaaagatgagccgcagccgctgcacatcctcttcttcccgttcctcgcgccggggcacctcatcccgatcgccgacatggccgcgctcttcgctgcccgaggcgtcaggtgcaccatcctcaccacaccggtgaacgcccaactcatccgctcggcggtagaccgcgccaacgacgcctcccgcggaaccgagggcgccctggccatcgacatcgcggtcgtgcctttccccgacgtcggcctgccccccggcgtcgagtgcgccccggcgcttaacaccatggacgaccgcgaaaagttcttccacggggcccagttactccgcgagccgttcgaccggttcttggcggagaaccgcccggacgccgccgtgaccgacagcttcttcgactggtccgccgacgccgccgcggagcacggcgtcccgcggatagcgttcctcggcagcagcttgttctcgcgggcctgcagcgagtctacgctgcgcaacaaccccgtggaggccgcccccgacgacccggacgcgctcgtgctgcttccggggctgccgcgccgcgtcgagctgaggcgcagccagatgatggagcccaagaagcggccggagcgctgggccttcttccagcgcatgaacgctgcggaccagaggagctacggcgaggtgttcaacagcttccacgagctggagccggacttcatggagcactacaccacgacgctggggcgccgcgcatggctcgtcgggccggtggcgctcgccagcaaggacgtggcgacgaggggcgccaacaacgggctctcgcgggacgcgggcgcctgccagcagtggctggacgcgaaaccagagggctcggtgagtcggtggtgttacgtgtccttcggcacgctgacccatttctcgccgcccgagatgcgcgagctcgcgcgcggcctcgacctgtccggcaagaacttcgtctgggtcgtcggcggcgcggacacccgaggagtcggaatggatgcccgatgggttcgcggagctggtggcgcgcggcgaccgcggctttatcatccggggctgggcgccgcagatgctcatcttgacccacccggcggtgggcgggttcgtcacgcactgcgggtggaactccacgctggaggccgtgagcgccggcgtgcctatggtgacgtggccgcggtacgccgaccagttctacaacgagaagctggtagtggagctgctcaaggtcggtgtcgccgtgggatccacggactacgcgtccatgctggagacccggcgcgccgtgatcggtggtgaggtgatcgcgaaggccatcgggagagtgatgggcgacggcgaggacgcggaggcaatacgggagatggccaaggagctcggggagaaggccaggcgcgcggtggccaacggtgggtcatcttacgatgatgtcggacgcttagtggacgagctgatggctcgtaggagatccgtcaaagtctgattgcagcatgttcgtcttcgtgtgcatcgtatacacaaatttaatctcgatcttttgtgcaacatccttagtgtcgatgatttttttttaaatatgcagctcgaccatgaagacgaacatgaaaaaatatattttgtaaacacattagccaaaagatgatatactatgagtctagattaattttatgtatatacacacacaatattttagagtgttccat

SEQ ID NO: 126490 - DNA, 438 bp, Zea mays
  Clone ID: MRT4577_46828C.1
tggctcggaacctttgggctgatttagtgcttgtttgcgcctattaaggctgattagtctaccctgggtatcaatgggtatatttctattgggggggctgctagtgttatttctgcgttgggttgtgtgtgtttgggtgtatttgttggtggtctgctttgtgtgttgtgtactgttgagcgttccgctggggatgagattggtgctactgcacctattgcttgtaatgattaagccgacccgtcgaagtttgacgttatggcgactccgtgtaacgttaaaactgatacgcctaaaggactaacgaggtccgtagcggataaacgggggtggaccgaggtcatagagttagttagtcccatagcgaaggaagataataatccgctttccgcagagcacgaaccggccaatgcggtcgaacaattgctgaagtgccct

SEQ ID NO: 126491 - DNA, 257 bp, Zea mays
  Clone ID: MRT4577_46829C.1
tacgctcagcgtattcggtactcttgccattgctctatcactgactcctttcgctttgttgctttgctttctcgagccgtttcacctctttcaaaggcaagctttaaattatccactgaatttagggataacatttaaaacaacatgtgaccataaagccaaaaaatgtcattaaaccggaaaaagacgtattgctgcatttttttcatagactccttccccctctttagacattacaaaaatacgactctttaata

SEQ ID NO: 126492 - DNA, 498 bp, Zea mays
  Clone ID: MRT4577_4682C.1
tataccgtgtcaaaatttcacgtggggggggtggtttcctccaactctccgtggtacgttcacgcagccacgcggctcagccgggagtcttgagcgtcgatggtcacttccggcaaacaatcagctggaggccgctctgcggcgagggctttcaacctgcagtacccactgcattctgcgagcggggggaaggcgcatctcatttcccctgagactgatgctccacccaccatctgtgctccgctaccgtcaaaaccatcttcacatgtcagcgcgagcatgtgcccaaaccttactctgaaggataattctgtcaaacccacagcaaggcactcaatacccaccaagccaggagctatagcaaggccaacaccttctgcaactgtgactccagcatcatgaggcacgcccaaaaaggcccgaaagccagagaagggttgataccccctcatcacaagtgtccatgcccatcttaaggcgcaaggtcaccacgctttc

SEQ ID NO: 126493 - DNA, 450 bp, Zea mays
  unsure (1)..(450): unsure at all n locations
  Clone ID: MRT4577_46830C.1
gggttaggcaggcggaggccagcggtgagtgcgctgcgaaggaggaggggctcgtncatgacgggggaaggcgaacccgcatcaacgcacattgattgagatcggcggcgaatatcgatcggcgacaacgaaccggagcggaggcgaggccgggcaggcggaccgtgtgcggcacgacaagggcgggcacgctaagctggctttgccccctatgccgcacccctgcgtccgacatgaagtccatgcagattcaccatgaggcgcgccacccctagctccccttccgagccgacataagctcctcaacctgcacttctacgtgcccgctgctgctgccgccgtgctccgccactgtcgagtgcaccttctccaagctgatgtccggcgtccgcggcagcctcaagaagtacgcttgctggattggctggttcgaccgcctgcatggggcac

SEQ ID NO: 126494 - DNA, 239 bp, Zea mays
  unsure (1)..(239): unsure at all n locations
  Clone ID: MRT4577_46831C.1
cgagaaccatcgccagcaaaaagcccgagaaagaaagtttaccccgagacacaganggcggctgccgcgaaggcgccgcggatggcggcgacgagcgccgcggccggggaggcgctccaggaccacgccggcccgcgccgctgcgaccccgcgctgcgctccgtacaccgcgccgccaaggaaaacgctcccagaatcgcgcagcgaaacgaagacgccgccgcccgccgcgaaccagg

SEQ ID NO: 126495 - DNA, 389 bp, Zea mays
  Clone ID: MRT4577_46832C.1
tatcatgatagtgcttggtggtgatagctctgaactgaggtctgaaatatagataataggactctgttctctccgtactgaaggcgtcatgccctagtgatcactgtgctacatgactcctttcccaagaaaccagtacctttttttgtgggagggggtcccaacagaacgcatttagcatatcactaagaaaccttatacagcggcatgtaacactggaccaggtatataaatatatccatgatgagcagccactcttatggttcaaccagattactatccaccaaggaatatcatactaccttatcaacctgctagtctactgtcacagcgatctggtttatatcctacagagggatagactaatgatatcacctacatctgcaagc

SEQ ID NO: 126496 - DNA, 246 bp, Zea mays
  Clone ID: MRT4577_46833C.1
gctcgctatggccaatgcacctacatacctgacacaacagctgctgcaccaacaggcgcctctacatatcgtactacctcagactcacctagctgtggcgacacctgcatcctactacccacaactactaccattcaaccaacagcatgcaaccaactctgctatatacctacaacaacgacaacagctacttcatccacaatcagtattataacaaatgctctctgtcaactacagcacaacaaa

SEQ ID NO: 126497 - DNA, 548 bp, Zea mays
  Clone ID: MRT4577_46834C.1
attaaacgagatctattatgcctatattaagactccacatgactcaaactaaggccaacatacattgcatgcaagattttgcctataagtgtcatcagaggggttactaatcataagctactatcaccaaacatcggacagctcaatataacaagttccacaactaaccggtggccaactttccaagtggcatgatctactaacgctggtcctagaagatcggtactagagcatcctgcaaaatcattggaccacacattgccataatactggggacacacactcgctgtacctggccgccgcgggacaacacacgatccagaagacctggttgttcgaacagacacatcaatggaaacaggacccttactagaaaacatgccacaacattgcacacaaccaacatctaactgcataaacttgggcaaaaaccaccaaggcaccgcgcgctcaagaacctgtcctgaactggcgctctctaacataccttcattcggtgacctcataatctgggtcactgagatccttttgaccatccttggacacag

SEQ ID NO: 126498 - DNA, 2892 bp, Zea mays
  Clone ID: MRT4577_46835C.1
gtgaaggaggcctagaattggcaatgctgatcttccatgtgagctaggaagtggtagtggcggttctgctttgtcagcagataacactgccggtgggggattaattgttattggatccatgaaatggccactttcaaggttgctagtttatggctcgctgaactctgacggggaaagccatagaggcacatcgggaaattcaaatgggacttttaaaggtggagttggtggtggttctggaggatcaattcttttatttcttcaatggtttctgctagagaaaaactcatcattatcggcatctggtggcaatggaggtgtatacggtggtggtggaggtggtggtggtagaatacatttccattggtcatatattgctactggagatgaatatgttcacattgcttctgtcaatggcacaatagtatcaagtggtggatctggtaagaatgatggacattgtggagaagatggaacagtaacaggaaagaaatgccccaagggcctatatggaacattttgcactgaatgcccagttggtacatataaaaacgttgttgggtccaattcatctctgtgcagcccgtgttctgtggatagtcttccaaaccgtgctgaattcatatatataagaggtggtgttaccgagctgccatgcccgtataggtgcatatctgataagtacaagatgccaaactgttacacaccacttgaggaacttatgtatacttttggtggtccttggtctttttcaatcatcctttctttaacagttattcttttggcacttgtcttaagtgctctaagaattaagattggtgagagtgatatcacctaccgggcaactaatgcaatccacaatgatggttgttctttcccctttttgctttctttggccgaggtaccaggggcaagcagggcagaagaaactcagagccatgtccacagaatgtacttcatgggacctaatactttccgagagccctggcatctcccctactcacctcctgatgcgataattggaattgtttatgaagatgctttcaaccgttttattgatgagatcaatttggtggctgcatatgagtggtgggaaggatctatacatagtatactttctgttcttgcgtatccttgtgcctggtcttggaagcaatggcgcagaaggaaaaaaaaccatcgtcttcaagagtatgttaaatctgaatatgatcattcatgtctccgctcctgcaggtcacgggctctctataaaggcttgaaggttggttcaactccagacttgatggttgcgtacatagatttctttctcgggggtgatgagaaacgacttgatgtagcatccaccattcagaagaggtttcccatgtgtctaatttttggtggtgatggaagctatatgtccccatactatctacatagtgatacattgctatcaaatcttcttggccagtatgtatctactgcgatctggaatagattagtcgctggtttgaatgctcaattaaggacagtaagacaaggaagtgtccgttctactttgggccctgttgtttcttggatcaacagtcatgggaatccccaacttgagagacatggtgttcgagtggagttagggtggttccagtccactgcttctgcatattaccagcttggtattatcgtagctgtgaatgagaacttctacaagaatctccgccaccatgagcatgccacagaattttgtgaacgctcaaggaagaacgttgcagttccacttcaggatttcaatcaggcaaatctggatcagccttgcacaagctatgctgtttctagaaagcgattgacaggtggagtcaatggtgggatcataaatgagggaacgctcaagtcactgcactataaaagagactatctctttccattctcattgttattgcgtaattccaggcctctaggctatgcggaaacattgcaattgctcatttgtattgtacttctgggtgatttctccatcaccctgcttatgcttgtacagtactattggatatctgtcggagcttttcttgccatactgctcatcccccctcttgctttgctttcaccttttcttgctggtctcaatgcactttttagccgaggactaaaacgatcttcagtgacccgcatttttgcactttggaacattacttctgttgtaaacattattgtagcaatcatatacggctctttgtatttttggctctcttctttggcggtgtcctcagttcatcaagtatacaacacaaaaagcttcaagagtagagaagacaatgaatggtggatactgcctactatcctttttctcatcaaatcactgcaagctggactagttaactggcacgttgccaatttggaaatccaggactactcgttatttagcccggacccagatagattctgggcaatgtagtcgcctgcagcaaactaagaattgcagaaagcatggtttagtgatcgcaagaatggcaagtattaattattggatgctgaatatttgcgttttgtcccttgcaacgtcatcagcccaatacaatctctgaatctgaaggggtctaacacgctggctggaacttccttctatttatgggaagcgctcctgcgtagtgcactagtgcagatatgttcattttctttttctcagtttttttttcccgtcttggtcgtgtgcctagaataggtctgtcgctcggtggggattagatttgtgcattttctttggttcaaattaaaccgttgattcgagtgtacagcaagaaactattgtgattgtcgctctagatgtacatcactgtaagtataatagtagaaccatttcaactgtatacaatcctcaaaggaaagtatgtttctttctattttctttttcctaac

SEQ ID NO: 126499 - DNA, 278 bp, Zea mays
  Clone ID: MRT4577_46836C.1
aggagacagagaactttagttggactacagtttgtaaaaaaaactaattttattaagacagaactttttttccttccaaattgtaaatctgtctataaatgtaacgcatgtggttgtgtaagacattgtttaataggaaaagttgtaccgcatcttcatattattgagaaaattttttccagcatgggcacttagaaaaagcacatggcaaatggctctttgtaaatcacagatattatttcagtagaacctggcattctcctttcaccttaaaagat

SEQ ID NO: 126500 - DNA, 241 bp, Zea mays
  Clone ID: MRT4577_46837C.1
gatatgggtttgcttttttatataaataggttcaaatgaaattttcgggggccaattaatatatggttacagcagacccatttggttcaaccaacattcattttgacacacgttcacgagcacaaagactggtgccaaacatgttttgtgagatttgaaactgaataactttggttttttctttcttacacaatcaccatacaatacccttttatggaagtcaggtcgtgcttgcttattt

SEQ ID NO: 126501 - DNA, 1088 bp, Zea mays
  unsure (1)..(1088): unsure at all n locations
  Clone ID: MRT4577_46838C.1
agattcagnctggtgccattggtgggacctactacagttctcgctttcacaagttacaaccacttcattttcaacttcccatgacaattgcttttgttatttttaacaacatttagccagttcgttgcaaagagctaacacagaaagctatacattttaatttcgtctcaaacctttgcccaagagtacactgcaacggtatctactgtaggttccatgccgttctctgttttcgtagctctatagtttcacaccatgtaaggtctgacaatgtaggtaaaagattacctgactagcttagcgagttcatttttcagagtatcagtcctctttatctctgataaaccttctcggtagtctactgatcacattctcatcaactatcttgtaatgcctcgaaatgttccggtagaccatcccagcatacctatcaacaggcctctggtacttgttgtacaatgcaggcattgtgaccaaagcaacggttcctatgtaagcaagagtgatagacgagcagaaatttccaatgacagataacagccacaagacaatcacgacctggaaaaatagcctgaagtccttgccaagagtaatgtcatgcgctatcatcagcatgctgttcactttcacacggaatgaagccgcagcattgctaaccatctcctctgataaaactaactcaggtagtggcctaggctgcctatctagcagtccagctattttaacccttatgaactgcagaactatcaagatgagaagtatatcagagcagatagttaataatgatagtccagacttctcaaacaaccaccatgccagagtagcaccaaatataacaccaaatgtattttttttttttttttttttttttttttttttttttttcaatgcaacggaagcatgttggacagttattatgtacccgcaaaacatagtttcgctgtttaggtcggcgaagccccaacagccgccgttggcggcggcctccaccccgccggcagcgtccatgcgggagcctgggtccgcgggcggaatcggatagagaggagacgacgcgatacgctctggtgatggaaataatccggcct

SEQ ID NO: 126502 - DNA, 839 bp, Zea mays
  Clone ID: MRT4577_46839C.1
tactgatcacattctcatcactatcttggtaatgcctcgatatgttccggtagaccatcccagcatacatatcaacaggcctctggtacttgttgtacaatgcaggcattgtgaccaaagcaatggttcctatgtaagcaagggtgatagacgagcagaaatttccaataacagataacagccacaagacaatcacgacctggaaaaatagcctgaagtccttgccaagagtaatgtcatgcgctatcatcagcatgctgttcactttcacacggaatgaagccgcagcattgctaaccatctcctctgataaaactaactcaggtagtggcctaggctgcctatctagcagtccagctattttaacccttatgaactgcagaactatcaagatgagaagtatatcagagcagatagttaataatgatagtccagacttctcaaacaaccaccatgccagagtagcaccaaatataacaccaaatgtaacacgcgctcgcctccataagatgatatcagcagctttcccgccgccggcgatctggtggacggagcgcctgtacccgccggcaccgcctgagctgcaggggtcggcggagccctcgatcccgccgttggcggcggcctccaccccgccggcagcgtccatgcgggagcctgggtccgcgggcggaatcggatagagaggagacgacgcgatacgctctggtgatggaaataatccgggaaggacggaaaggttagggaagacgagaagggaagcagttcgattatcctaccacgacgcggcggcggtaggaccgaagccgaacgacccggccggcctcggagggtaccca

SEQ ID NO: 126503 - DNA, 293 bp, Zea mays
  Clone ID: MRT4577_4683C.1
gtggtaaaccaagagcaaaccgccactggtatttgggacttgataaataatacttatacattcgggaggcatgttacactgaaatacaacagcaaacgttgagaccacattcgtattttggtggtaccaagggctaataataatacaagggccttaaactgaaaatttcaaggtttttcccaaaacaaggcgactcaaaaagctagcatttattatatgttcggtaaaaggcttttccttttttttttttcattaggacccttcttgctctttttcaacaaaaaataaaaata

SEQ ID NO: 126504 - DNA, 279 bp, Zea mays
  Clone ID: MRT4577_46840C.1
gttccgcccgtcgctgcggtttgtcggctacatgcggcgcaacctgcatcggtccaagcacgactccgagctgcgcatgctggcgtgcgtgcactccactcgcaacgtgccgtccatcatctcgtcttctggagctgtctaacccaaccaagcgctcccccatcttcatctacgcgctgcacttcgtggagctcaccgggcgcgcgtccaacatgttcgctgcccaccactccccaccaaccagagcttctgctgcatcgatcacatcttcaacgcctt

SEQ ID NO: 126505 - DNA, 264 bp, Zea mays
  Clone ID: MRT4577_46841C.1
tgcgtgatcgagttgtggatgaccacgacggctgttcgtctgacgcctagtatggacgtggagatagatgcggaggaaggctatgccgacctgagagaccaaactgcctttatgattttgggtccaaactatttttattccggagtctgaaactaacagcgcatacacagcattactttgagcatatctattatcagaggcaggattgttccaaagccctaccaatcgcttctaaatttaatgtatgttacacgtctaattctt

SEQ ID NO: 126506 - DNA, 435 bp, Zea mays
  Clone ID: MRT4577_46842C.1
atccgaagcttcaacaacgcaaggggagcatacgttgcatcctttttattcccatttccaatctattggattccattacaaacaaattaaggggcaaaggatacgttgcattgtttaagaacacttggaacaaaaaaaaaggggggaccccttcgggggatcactcgagtgcaacagggggaccggggggcttgagcttaggggggagcgccttggccttctttttagggaaccccccgcgcaccaatatgggggcctttttcaagagcttctttggcttctttaaacccaggtccgtcattgggcgcacctccttgatgaacttaattttggccgggggctcgtactttttgatttttaagtggaaggccgtttttaccgccgggggggcctccacgggtgaagacgcggcgtccccggcccgggccgggagag

SEQ ID NO: 126507 - DNA, 248 bp, Zea mays
  Clone ID: MRT4577_46843C.1
gcatctccgctgctgctgcgctatgacttgcttttctgctacctcgctctaacgccagcgagagacgttcacgacgacgaggacgccgcataggccagccttccccggtctacggcggttacggccagccaccgacacccgacccgtacggccgagcgcccgaggaccccaatccgtacggttgacctccgcccaattccgtgtacggtggggccgaggacgcctacggatacaatgatctagggtat

SEQ ID NO: 126508 - DNA, 813 bp, Zea mays
  Clone ID: MRT4577_46844C.1
atttgatgacaaattcttccaccaagctcgaccagtctgtgaaagtataggaagggggttttgcaggtgagccaaaaaggtttagaaaattgtggggcagtaacagtacaacatttctgagaacagtgcatgtaaatcaggaaaaagatgctatagctttcgtggaggctgaagaaaaggcacctaggttttcggaagttcctccttgtgatgaaagggtggcatcccaagaggcaactgattcccgtttagaacaatgtctaggggtggggaattctctaggtcacgaaaatggtgcacaatttgagacttcatgcgtgaataatttaccttcagaggtccatgcagacccagaaatctccagttcattttcggaatgttgttcatcaggaagtcatgccaatggtaatgaaaatcattctgaaagcacagctcaggaaactgcatttgtagggaactctagccaaaatgtcaacaataaagaggaacttgagcttccgtgcattgatgggttgccttgtacttcagcaaggaatcagattttgcaggaacattttaatgttattaatgctgatgaaaacaaggaaattgaagtgaaaatatcaaaattagaagggtcttccaaatcttatttgaattttgaggaagaaaagttacccagttttgttgatgaatcatgcctacagaacaaaaatgaaagagaaaatgaagtaaattcagaatcacccatccatgaaaagatgacaaagttcgggtttgaggacaaaggtgatgcatatgaagattttcaagaaggagatatggatcaggttg

SEQ ID NO: 126509 - DNA, 507 bp, Zea mays
  unsure (1)..(507): unsure at all n locations
  Clone ID: MRT4577_46845C.1
gcacgagggagggaagaccncgagatctcctgcgacggtcatggcggccactagaggttgagcaatttccgcccaaggccaatgccagagatcccggtggcttctgttgaagcacggtgatcccggggcggtgaagaccacccaggcgagctacaggctgactccgcgtgggcggttgccgggcagctcggattcgttgcgaggttcacggcgtgggttgcacatcaaaacggcattccgatctctacggcctccaccgcgttcatggtggaaggaggcttctgcgcgacagggcccaaacggcagagaccgggtcagtgctgtttttctgcggatggtccaaggagtggggtcgatccggtagcgttcggcccgtgattcctggtggcagcaacacattcagccgagcctgcgtgactttcgcgcgagatggggaagacgcacccgaccagcgggtcccacacgcatgtggctatgcgcgaaaggaagggctggcatggtggggcc

SEQ ID NO: 126510 - DNA, 333 bp, Zea mays
  Clone ID: MRT4577_46846C.1
ttccaatgcgctcgctcaataccctagcaagtcaccgaagcggcactttggatatggacgccaccgacactggatgtgaaggaaaggacaagaagggagcgggcgatgggaaggccgttgggacgaggaagaagacgacgaactgttgcgtgaaggcctggctgcacgaccgcgtcgagatcatggggggctaccagaataacgcgcacctaaccctactacgtcgcctgcaccgactccgagcacctcatcggagatgcggacaagaaccaggtcgagatgaaccacatcaacaccattctttgatgccgatgcgagtccattgcgcaggag

SEQ ID NO: 126511 - DNA, 259 bp, Zea mays
  Clone ID: MRT4577_46847C.1
cgggctcgaccacgcgtccaggaactcaagaacggccgcctcgccatgttttccatgttcggcttcttcgtccaggccatcgtcaccggcaagggcccgctcgagaacctcgctgatcacatcgctgacccagtgcggaacaatgcatgggcctacgccaccaacttcgtctccggcaactaagctcaacggctatgctatgccacttcactgtctttcggatcggagacggtgtacgtacctgcattgactgatgctg

SEQ ID NO: 126512 - DNA, 271 bp, Zea mays
  Clone ID: MRT4577_46848C.1
aacacgggaactctatatacattactaaataatgttgtctattcctattagcgacacaggttaaacctcgtaaccagggatgggccaaaagggcaaaatcccacgctagtgaacccaaaactcccaaggtcacggggattttggaacttaagccccccgagaacgtggaaaaaaaggtcccccctttaaaaccggggaaatttgagggagttataacaaaaatagggtgtacaccgtttgggccagaaatttttaaaacaccgggcccaag

SEQ ID NO: 126513 - DNA, 316 bp, Zea mays
  unsure (1)..(316): unsure at all n locations
  Clone ID: MRT4577_46849C.1
annannnnanaatttaaaatttccacacngcacgcataanggncggcacggttaataagcagccgcggaccaaacaaccccccccactcagaacaaacaaggaaagccccactgactaggagaagatagagtaactaatagatgcaatccattaaaggtccttaacgagcgccatcgaaccaattatgcaattctatagaaagatccaatccaatccaagcaagaactccgtcgcgtcatccccccacacttggcgagcatgaaactcggagacttgggtgtgtgcgcccccgtgcattgcttatgcatgcttcct

SEQ ID NO: 126514 - DNA, 697 bp, Zea mays
  Clone ID: MRT4577_4684C.1
aattcggcacgaggtccacccacaggaccgatcctcttcctgcccctcgtcttcctcttcctctttaccaccgccgctgcgtctgcgacggcgcctgaggatgaaaagttcactgaggagctgctcctgcggccgctcccggaccgcaaggcactggcacacttccacttccgctcctctgctccccccgctgcctccgttggtcggcaccaccacctcttccccaaggccatctcccagctggttaagaaatatcatattagcgagttggagctatctttcacccagggaagatggaactatgaacagtggggtggatttgatcctatgtcaactaataatgcaaagcctcctggtgttgagctgtgggcagtttttgatcttcctttgtctgagatcgatgcaacatggaagaacctgacacatacactctctggcctgttttgtgcatccatcaactttttggagtcttccactgcattttctgctcctcgctggggcttcaaactgaacgaaggcaatttgcgatatggtgcattgcctcgtgaagcagccttcaatttacaaaggatattaccattcacaaaaactgaaactgagatcctcccagtcacttggtattattcttgatcaaactctgactgttgtgctgccaccaaataatgtacattggcgaacagctactttccaatcatgg

SEQ ID NO: 126515 - DNA, 401 bp, Zea mays
  unsure (1)..(401): unsure at all n locations
  Clone ID: MRT4577_46850C.1
tcatgacgcgtgggggaccgtcttttttcttctttccatccatacatccatccttacgagcgattctagtttcttggattaaatcaattgggcggatgagcaccgtgcctcgcgaatttgcaggtcttgatccgcgatccgccgatttccatcgggcgcttactcggtgtcccgtcacctgcggtttttgctgtgcggggaggctgatccggcgagcgccttggatgaattcgcgccggtctcggtcggtgaagctggtgtcagcgcgcgccaacggggacggggccctngaggtgggacgtacctgaggaagagggggacgcgcggatgagctcctcggccgccacacccgtgtactgctgcatcgccaggggccggagctgtgatctacccggtacagc

SEQ ID NO: 126516 - DNA, 494 bp, Zea mays
  Clone ID: MRT4577_46851C.1
tttgccaccgcaccccgccatggagcggccgtcgctgcgcgccctgctcctcggcgccgctgggctgctgctcctgctcctgcccctctcctcttcctcctcttcggacacctgcggcccctgcgagccggcctcctgcccgcccctgcccccgctgggctgcctgctgggcgagacccgcgacgcgtgcggctgctgccctatgtgcgcccgcggcgagggcgagccgtgcgggggtggcggcgccggcagggggtactgcgcgccgggcatggagtgcgtgaagagccgcaagaggcggaggggtaaagccggggcagcagccggcggtccgggtgtaagcggcgtgtgcgtgtgcaagagccgctacccggtgtgcggcagcgacggcaccacctacccgagcggctgccatctgcgcgccgccagccagagggccgagagccgcggggagaaggccatcacccaggtcatgaagggcacctgcgagcaag

SEQ ID NO: 126517 - DNA, 364 bp, Zea mays
  unsure (1)..(364): unsure at all n locations
  Clone ID: MRT4577_46852C.1
cccacgtgnccgcggacgcgtgggacgacacaggcattaaatagatatctatctataggagtaacacacgagttcgtggttggcttgcatggatgaatttttaaaaggccatatgcagcgctgtttgattttcgcaaaaaaaaaaaaaaaaaaaaaaaaaaaaataaaaaaaaaaaaaggaatgtttggaaaaaaaaaaaaaaaaaaatatataaaaaaaaaaaaaaaaaaaaaaaaaaaaaaaaaaaaaaaaaaaaaaaaaaaaggggctccccttttttaggtcccaggtttccttccccgggcttccccctttttaccttttttttggggccccctaattcaatttaatgggcccgggttt

SEQ ID NO: 126518 - DNA, 613 bp, Zea mays
  Clone ID: MRT4577_46853C.1
gagagagaacagggtccgcaaagcaagcaccgcccggcaaaggcaaaaaaagccattcatccatcatccccttcctcgtgtgatgctgcctcttccctcttgcttctttcttcttcgtgtagtaccaagttagatagatatccatggtctttctctccttgcttgcttgcgaattgctgcaggttgtaaagtagataggtgttgtacgtagagtaggagctagataggcagcgggtgggagaggagatgaagctccatctcctgctgaaggtcctgttcgggccggtgccggtctacttctcggcgctggccatcctcatcctcctgaccaacgcacagtactttgggctcggcggcgtcggcgtgccgcgcgccaccaagctggcctcctccacgccggtggtgagcgtgatgaagtactgcgacatcttccgcggcgagtgggtgcccgacgcggaggcgccctactacaaccacaagacgtgcggcatgatccaggagcaccagaactgcctcaagtacggccgcccggacctcggcttcctcaagtggcggtggaggccgtccggctgcgagctgccgcgcttcgacccggtccagttcctgcagttcg

SEQ ID NO: 126519 - DNA, 908 bp, Zea mays
  Clone ID: MRT4577_46854C.1
cggccgctcaggcggcgggcgggattttattttctggttataaccctatgggctatgaagcatatgttttgctattgtgtcaactactttctccagatctaatcgacaagtaaaatgttctttaaaaaaaaaaaaaaaaaaaaaaaaaaaaaaaaaaaaaaaaaaaacagatagcctagagagacagggtccgcaaagcaagcaccgcccggcaaaggcaagaaagagccatccatccatccatcatccccttcctcgggcgctgctgcctcttgcttctttcttcttcgtctagaaccaagctcaagctagatagatatccatggtttttctctccttgcttgcttgcgaattgctgcaggttgtaagtaaataggtgttatacgtagtaggagctactagtaaataggcggcgggtggaagaggagatgaagctccatctcctgctgaaggtcctgttcggccccgtgccggtctacttctcggcgctggccatcctcatcctgctgaccaacgcgcagtacttcgggctcggcgggcgtcggcgtgccgcgcgccaccaagctggcctcctccacgcaggtggtgagcgtgatgaagtactgcgacatcttccgcggcgagtgggtgcccgacgcggaggcgccctactacaaccacaagacgtgcggcatgatccaggagcaccagaactgcctcaagtacggccgaccggacctcggcttcctcaagtggcgctggaggccgtccggctgcgagctgccgcgcttcgaccccgtccagttcctgcagttcgtccgccacaagtccctcgccttcgtcggtgactccctggatcgacaacatatggagaccttgatctggcccctctcacggtgaggtatcccaaggaactcccgctgcacccc

SEQ ID NO: 126520 - DNA, 2161 bp, Zea mays
  Clone ID: MRT4577_46855C.1
ggaactacttcctgtttttgagttcgatgagctggagttgaagaggttccctaacccaagggaccacatggtaaatacatacggatattctacaatcaacttttttgcgcccatgagtcgttatgctagtgctggtggtggacctgtggctgcttccaaagagctcaaacagatggtcaaggcatttcataattctggaattgaggttattttggatgtagtttacaaccatacaaatgaagctgatgatgttaacccttacatgacttcctttcgtggtattgataacaaggtctattacatgttagatctcaacaacagtgcacagctgctgaacttctcgggttgcgggaatacactaaactgcaaccatcctgttgtcaaggagcttgtacttgacagtttaagacattgggttaaggagtatcacatagatggatttcggtttgaccttgcgagtgttctttgtcgtggaccagatggcagtcctcttgatgcacctccacttattaaggaaattgccaaagactctgtattgtctagatgtaagatcattgctgaaccttgggactgtggtggcctttatctagtagggaggttccctaattgggacaggtgggctgaatggaacgggaagtacagagatgatattcgaagatttattaagggagatcctggtatgaagggggtgtttgcaactcgcgtttctggttctgcagatctctaccaggtgaacaatcggaagccttaccatagtgtgaactttgtaattgctcatgatggatttactttatgtgaccttgtttcatataactccaagcacaatgatgcaaatggagaaggtggtcgtgatgggtgcaatgacaactacagctggaactgtggcattgaaggagaaacaaatgatttgaatgtgctaagtcttcgttcaaggcaaatgaagaacttccatgtggcattaatgatttcccagggtactccaatgatgctgatgggagatgaatatggtcacacacgttatggaaacaacaatagctatggacatgatactcacataaataattttcagtggggccagttggaagaaaggaaggatggccatttcaggtttttctcagagatgatcaagtttcggcataaccatcctatattgagacgagacaggtttctcaacaaaaatgatgtcacttggcatgaaaatcgttgggagaaccaggacagcaaatttttggcatttacgatacatgatcacagttctggtggagacatctatttggcattcaatgctcatgagtattttgtggatgctgtaattcccccaccaccacaccataaatcttggagtcgtgtggtggataccaacctggaatcaccaaaggatattgtcccagaaggggtgccattcacaggttcagggtacaggattgctccctactcttccatcttgcttaaggcaaagccttagaatggcggaggcaagtcattctcaagtaagcacgaataatggtgttgtgatccctaactttccaagctcttagccaactgtactgcaagtatagcaaactttggtatgtgaagtcggaccaacccttgcggaaatcaacggaagccatggtttgctaaaggtatactcatggagaattggagatatggcaaacacatacgcaagtaacctccacacatctaagcaagaagagcctttcattaggggatgcatggctcgaggaaactatatttgcatttggttgattcatttttatttgttgcacatgtcagtatgtcacctgtgtgtgtcaagctcttatttgcttaaaaattggacattcctttgttacatatttgtgttgtactgtgttggagctagcgttcctggtattctagctatattgcactggggtggaagaacgggggacactgtcgccgtggtcttaagtctatcagcaatggttttctttagatttctgctcctgtatcacttttttgcgtcacatcatcaatattttatcctatacctttttttatctctaaaaaaaaaaaaaaaaaaaaaaaaaaaaaaaaaaaaaaaaaaaaaaaaaaaaaaaaaaaaaaaaaaaaaaaaaacaaaaaatataaaaaaaaaaaattttacaaacacaaacttacaaaagtttaacataaaata

SEQ ID NO: 126521 - DNA, 338 bp, Zea mays
  unsure (1)..(338): unsure at all n locations
  Clone ID: MRT4577_46856C.1
cgctggaggcgcccgcagcgaccccaccggcgagcccgcggaagcgacgaggaccaacccggaacaggccgggaaggaaggacacgcgcgggacaccagcaaccgcgagccagcgcgccggcagcaacggcggcgggggggcgaccactttttttttattaccccaaccccgcccaggaggccagccancggcccccnacccgacagcagacacaagcaagggccccgcaccgacccaggcagccaaggacaaaaagacggcgaccgcagaacaccggcaccnggaaccgggcgaccccgaaccgagcgagaacgcgcaaccggaacccaccaagaaa

SEQ ID NO: 126522 - DNA, 367 bp, Zea mays
  Clone ID: MRT4577_46857C.1
gagaagatggtgcatgacgcggataagtacatgttcgaggacgaggagacaagaagaaggtgtagtccaatatctctctggagaactactcctacaacatgcgcaacacgatcaaggacgagaagatcgctttcaatctggctgccgacgacatgaagaagatcgaggacgccatctacgcggtcatcatctggctggactccaaccatctagccgaggcgtgcgagtttgattacaagatgaaggagctggatagccttttgcattcccatcatcgtcaagatgtaccatggcgcggtttcctacatgggtggctccggcggcatggacgaggacacttcggctggaagctttggcccttggccca

SEQ ID NO: 126523 - DNA, 376 bp, Zea mays
  unsure (1)..(376): unsure at all n locations
  Clone ID: MRT4577_46858C.1
attnatatttctctctcacacacaagggatgcttacattccaaatcgaagagtaagtatactctacttacttagcagtacactaacacgtggggatttaaatagatacgcatgtaaaggaaaggaaaatggacatttgtttacaaacatggctatatatataagaagaaaaaggtgtatgcttatatatatatagcccttccaatttggcacgctggagctcataaaaacaggctaggtaacttggaccgtccgtgcaaaactgtcttaaactggatttgtttaaactggatgctggaataacgtgccattgttggagcacagtatttaaggtttttggacccaaatgtcacaacatgccaagttctgggatttaa

SEQ ID NO: 126524 - DNA, 1089 bp, Zea mays
  unsure (1)..(1089): unsure at all n locations
  Clone ID: MRT4577_46859C.1
aatagctatggacatgatactcacataaataattttcagtggggccaggttgcatgtgttaattttctgttagtattttttttagttatgcatgtaacagccttaaatgctaatgtcctctttaattaacatgtatgtagttggaagaaaggaaggatggccatttcaggtttttctcagagatgatcaagtttcggcataaccatcctatattgagacgagacaggtttctcaacaaagtaagttcagagttagtgtgtccttaagtgttattcttacagttgccatcttttgccatgtgaccagtactaagtattagccatattttactgtatgaaattcttggtttatttttttccgcttaaacgattatattactgagatctttgttgttggtagaatgatgtcacttggcatgaaaatcgttgggagaaccaggacagcaaatttttggcatttacgtaaggaagttaccttagcggaagtgctacgttctgtatacatgatgatatttcttatgtatttttactgaatctttgacacttatctgcttcttcatgattctggtgcaggatacatgatcacagttctggtggagacatctatttggcattgaatgctcggatgagtattttgtgggtgctgtaattcccccaccaccacaccgtaaatgttggagtcgtggtctggaacactgtctgattctgctaacatgtttatactgagtaatttgctgtttagtcctaggatgttcaagcgccaggtatcgtcatgtaattaacattatctactgcaattttactgtattcgttacttggtctggctagcttctgtgctgcttctatcttgacttccctttagttaccttacagtttntnnctatgnnntcgccntcccacaggtggataccaacctggaatcaccaaaggatattgtcccataaggggtgccatacacaggttcagagtacaggattgctccctactcttccatcttgcttaaggcaaaaccttttagaaagttagaatggggctgagacaaaggtcatttcttccagtaagcacgaatagtgtcatggttgctcattta

SEQ ID NO: 126525 - DNA, 2369 bp, Zea mays
  Clone ID: MRT4577_4685C.1
ttcgggatctccgacgacaaatgaaaaccctaatctccagcacccccgcggcctcctgcgctctctggcgctaatggcaccgccgcgtccacccacaggaccgatcctcttcctgcccctcgtcttcctcttcctctttaccaccgccgctgcgtctgcgacggcgcctgaggatgaaaagttcactgaggagctgctcctgcggccgctcccggaccgcaaggcactggcacacttccacttccgctcctctgctccccccgctgcctccgttggtcggcaccaccacctcttccccaaggccatctcccagctggttaagaaatatcatattagcgagttggagctatctttcacccagggaagatggaactatgaacagtggggtggatttgatcctatgtcaactaataatgcaaagcctcctggtgttgagctgtgggcagtttttgatcttcctttgtctgagatcgatgcaacatggaagaacctgacacatacactctctggcctgttttgtgcatccatcaactttttggagtcttccactgcattttctgctcctcgctggggcttcaaactgaacgaaggcaatttgcgatatggtgcattgcctcgtgaagcagtatgcactgagaatctgacaccttggttgaaacttcttccatgtcgtgacaaagctgggataacttctttgctgtacaggccttcaatttacaaaggatattaccattcacaaaaactgaaactgagatcctcccagtcacttggtattattcttgatcaactctgactgttgtgctgcaaccaaataatgtacatggcgaacagctacattccaatcatggtcaacttcagcccaactggtctatgagacatcttttcaacagaaagttgtcagggaaatgccttgtttctaaatccagcagagtattcattgaggttgataaaggcattgctgacgaagttaacatatctggaagtgttcattcttggagtaatgaattctttgtattgtccaatagcccggacaagttgatcaaaggtcaaaatcacttagaaatgcaatcttcttttttatatgtttatgatgctagtaactacagtgaggaacaacctttggatttgggcataacttggaagcttcccctgatatggacttgcaccccatcaccttttcatgcaagcagatttcttatgggcagtggcaatgaaagagggtcaattgctctgtcgtttatgtccactaatcttcataagaagatatctggcagcgcaaatgattgttcaataaaggcagttattttccaggttgttccatggtatgttaaggtctattatcacagcctagaaatatttatagatgggagcaggaagactgtgtcagaagtagttgacaagattcatgtcattccttcagaagacaagcttttgcctggtaccttggagatgctactaagattcccttgcagtatgcagtcgggaactctgacattggattttgacaaggggttcctgcatatagatgaatatcctcctgatgctaatcaaggatttgacattccttcagctttggttagctttcctgagttcagttctgctcgaagttaccctgaaattgatccagtacttggatcacctttactagaaaatttccaggaagatagtgttgtgaagtcgtatacagaagtattgctcgttcccctgacaactccggatttcagcatgccatacaatgtcatcaccttcacatgcactgtcttagctctttactttggttcattattgaatgctttgagacgaaggattggcgaggaagagagggagttgaagaaaagagccacaaggcatgggctcatttctcggttgctagccaagttaagggggcagaaggtggatccatcggagtcagggtcttcatttgaatcgactgggtcaaagaagctgctattcaaggttgtatttgttgcagtagctgcggttctatttcactatttctcaaacaacagttaatacttaacatcggtgtctaaaattttgggtgacttttgtggagccacggcagtagaatgtaccatgttgtgtagcatatgtattgcctgtaagttcgcttgcttccaggcgctattttgccatcctagattcttgaaagccgagggccatgcaatttggacccttctgttgtcgtttttttttggtatggttcgtttcgttttctggccggatgtaatgtaatcccctgacggctgttccctgggcgaacagtgtcagtgtgatccgtttggcaatgtttttattcatgaacgccacgcactgaatcctgtaatttcgttactactataatgcccttccggtttttaccggttttg

SEQ ID NO: 126526 - DNA, 538 bp, Zea mays
  unsure (1)..(538): unsure at all n locations
  Clone ID: MRT4577_46860C.1
accgcagcgcacagagcaccccggacncccggccccgaccgcgcgcgccncnccgacgccccagncanggcagggaaggcacccgagggnncncagnnnngagcnaagcacnanganncnnaaaagcaggagcngcngagcacnggngagacngaggagnncnncactncanangangaagnnnnngaaagnngggaggacangggccnncaagagaancnncngagaggcannnangcananggnnnngagaaaccancngcaanncagcagagaggaanngnnccctncngcaaggggcnngangncanncagcaagcacaancnggnacaggaaagacagcaaccnncngnncngggancnngcagcagcnngaccanggncnggnngaangccaggcccnggnncnggcncccacccgngagcnngcacagcaaanngagaaagnnangcgcgcacnnggngaccaccnnggngnnaaagnccangcangcgnnggaggaacancngnncgngaggaccaaagganncncgcca

SEQ ID NO: 126527 - DNA, 845 bp, Zea mays
  unsure (1)..(845): unsure at all n locations
  Clone ID: MRT4577_46861C.1
ccggtgcattccaattccacctgtaagcggagagccttcgtggtccctgctcggttcatcagaatacaggaggcaccggaggtagtccaccaaaacaaaacaccactccatctctcctcttcccagcgatttcctcttcccctcctcgcccgccgagaggccgcccgtcctccgtccgccgtcccagcgagagctttaagattgtgcagacacatagttgggatgctcctgcctatgcaagatgtcaaccaccagagatattgtttagtgctgggaaagttatgcagttttggatcataaattctacatagacaagataattatggaccgtgcagacacatcagggtttgtcggtggtggttgctttggtactacactcctgctgatattctttcatttcgtctattctacagtccgtgtctgaaagatcgtcagtaacgctgcagctgcctgggcagaaatatcatcaggccccctgttctttgagatctctggtgttttatctcattttcttttccaccatcgtgggatgctcagcgccaagctccacggtggagaacatgggccaaagcacactctgtatggatggcctgaacccagcaattgttaattgcagccatgttaatggaaatacacagataatgaatgacataacagcgagagatgatggcagcaggctagtccttggtttgggtccaacaccgaatttttattctgcagtgtccactggctcaaaacaagctcagagattgtcaggccagagttcaactttcactgattcagggatgctngagcttggccttcacaccgatggtgagggatgcattcaatgtctgcaagcaccg

SEQ ID NO: 126528 - DNA, 333 bp, Zea mays
  Clone ID: MRT4577_46862C.1
cggtccggaatccggtcgcccacgcgtccgccgccctttttttttttttttggaaagtaattttttttggttggcacatacatatcaaaaaacttattattgaatacaactaataagcaatctaaaaaggcaccaccaatgtggtgtggtaggaggccgtcggctgcaaacaagtggcaaaggcaacaattgtgtattgtaagagggtggggttgccgcaaacgtggtgaaagcacactgtgctggtcaagaagaacacgttgtgcactgctggctaaatgtagagatttgtgtgaaataacacgggttcatgcggcattgttccattaacca

SEQ ID NO: 126529 - DNA, 2524 bp, Zea mays
  Clone ID: MRT4577_46863C.1
ctgtaagcggagagccttcgtggtccctgctcggttcatcagaatacaggaggcaccggagctttaagattgtgcagacacataatttggatgctcctgcctatgcaagatgtcaaccaccagagatattgtttagtgctgggaaagttatgcagttttggatcataaattctacatagacaagataattatggaccgtgcagacacatcagggtttgtcagtggtggttgctttggtactacactcctgctgatattctttcatttcgtctattctacagtccgtgtctgaaagatcgtcagtaacgctgcagctgcctgggcagaaatatcatcaggccccctgttctttgagatctctggtgttttatctcattttcttttccaccatcggtatattgtcttaactgtgatggataacggcttcatggacatcccccatccgcctctgatgaatgacccttttgtgttagtgggatgctcagcgccaagctccacggtggagaacatgggccaaagcacactctgtatggatggcctgaacccagcaattgttaattgcagccatgttaatggaaatacacagataatgaatgacataacagcgagagatgatggcagcaggttagtccttggtttgggtccaacaccgaatttttattctgcagtgtccactggctcaaaacaagctcagagattgtcaggccagagttcaactttcactgattcagggatgctgaggcttggccttcacaccgatggtgagggagcaattcaatgtctgcaagcaccgaatggagcactccattctttaggtattgtcgacgaggcttcaacatctactactgtaaggagcatgggtggttacatgccatccctactctttgctccccgctccaatcctactgccaatgagacacaattagaaatcccagattctctaaacctcacgcacagcaccagcaacagtcagcatattcaacgtcacctccagttcagccctgaaccctctgcaatgaccgagtcttcatttggtgtgagttctgatgttgtcaccgcaacaactacatcagaacgtagccattctcgacatcctaagaaatgcaggttcaagggatgttccaaaggtgcaagaggcgcatcaggattgtgtattgcccatggaggtgggcagagatgtcataaacctggatgccataaaggagccgagagcagctctgcatactgcaaagcccacggtggcggtcgtcggtgtgaggaacttggttgtaccaaaagcgcagaaggaaaaacagattattgcattgctcatggtggaggccgccgctgcgaacatcctggctgtcctaaagctgcccggggtaagtctgggcggtgcatcaagcatggtggtgggaagaggtgtttggttaaaggttgcattcggagtgcggaggggaaggctggattgtgcatttctcatggcggtggccgacggtgccagtatccagattgtggcaagggggcacagggcagcacattgtactgcaagggacatggtggtggcaagaggtgcgtcttcgatggttgcagcaaaggcgcagagggtagcacacctctgtgcaaagcacatggtggcgggaagcggtgcatgtttgaaggaggtggtgtctgtgcaaaaagtgtgcacggggctactgaatattgcgtggcgcatggaggaggaaagcgctgttccgtgcccggctgcaccaagagtgctcgtggccgcactgactgctgtgtgaagcacggtggcggcaagcggtgcaaggttgagaactgtggcaagagcgcccaggggagcacggacttctgcaaagcccatggcggaggaaagcggtgcacatggggcacaggctgtgaaaagttctcccgtggcaagagtggcttctgtgcggcacatggtaccttgatggccaggcagcgagaacaagaggcggcgaagaatgtaggaagcatgattggaccaggtctcttcagcggcattgttgtgtcatctgccaccgcagcaagcagcatgacgaacgagcactcgtcctctggtgtcagcaccgcttccgactgcgacggcactgtgaggagccaatcaatgattcctccacaggtgctggttcctcgctctatgatgccttcttggtcgactgagcctgtagatggaggcagagagggaggtcatgttgttcccgaggggagggtccatggtggtggcctactgtcacttctcggtggcagcttcaggaacgccgacttggaaaagctttgaagctagtgcttttccatcagcagattttgtcagtttgtttgtacataaacaggccgcgttcccgcctatagaattgttattgtgccttttcttgtctagataaacatttcaaccttcatgtaccggttaaatcaatactggtttagtccattgtaaagtggtgactgtcaattgtcgtgaacacttttagcttgttggttcggttcggttgtagtcagtctgtttgtgcgtattcttaag

SEQ ID NO: 126530 - DNA, 937 bp, Zea mays
  Clone ID: MRT4577_46864C.1
cggggctactgaatactgcgtggtgcatggaggagggaagcgctgttccgtgcccggctgcaccaaaagtgcccgtggccgcactgactgctgtgtgaagcacggtggcggcaagcggtgcaaggttgacagctgtggcaagagcgcccaggggagcacgcacttctgcaaagcccatggcggagggaagcggtgcacatggagcacaggctgcgaaaagttctcccgtggcaagagtggcttctgtgcagcacatggtaccttgatggccaggcagcgagaagaagaggtggtgaagaatgtagggagcatgattggaccaggtctcttcagcggcattgtggcgtcatctgccaccgcagcaagcagcatgacgaacgagcactcggcctctggtgtcagcaccgcttccgactgtgacggcacggtgaggagccaatcaatgattcctccgctggtgctggttcctcgctctatgatgccttcatggtcgactgagcctgtagatggaggcagagagggaggtcatgttgttcctgaggggagggtccatggtggtggcctactgtcacttctcggtggcagcttcagggacgccgacgtggaaaagctttgaagattttgtcagtttgtttgtacataaacaggccgcgttcccgcctatagaattgttattgtgccttttcttgtctagataaacatttcaaccttcatgtaccggttaaatcaatactggtttagtccattgtaaagtggtgactgtcaattgtcgtgaacacttttagcttgttggttcggttcggttgtagtctgtctgtttgtgcgtattcttaagaaactcgtctggactttctattgcaaccgttcattttctggtttaagtccattgtaaatggtaactgccaattgttgtgaacgcttttggcttgttggttcc

SEQ ID NO: 126531 - DNA, 385 bp, Zea mays
  Clone ID: MRT4577_46865C.1
atcagctcgcgcatcgtgtcctttctcgcgtcgtgcagccctcggtcttaccctcgcccgtccttcgtgcctcgtttcgtccgttttcaactgcagacatcgcggtgcttttccagcttccaataaacacccccccacgagcagtcaccagaatccacaattctgttcctgcccctaaagccaatacccgccaacaaaattcagcgcgcccgccccgccagacctgtctctatcgcagctttcctttctttcctcctgcatctctctccgaccacgaatttctctgcatcaccaacttcagacgaacctctcataccgtttgacaagcacaagatcgcctctcctacacaatggcttctcctctgtactccaatggccaggactc

SEQ ID NO: 126532 - DNA, 757 bp, Zea mays
  unsure (1)..(757): unsure at all n locations
  Clone ID: MRT4577_46866C.1
cattgggtacctcgaggccggccgggttttattctgcagtgtccacttggctcaaaacaagctcagagattgtcaggccagagttcaactttcactgattcagggatgctgaggcttggccttcacaccgatggtgggggagcaattcaatgtctgcaaggaccgaatggagcactccattctttaggtattgtcgacgaggcttcgacatctactactgtaaggagcatgggtggttacatgccatccctactctttgctccccgctccaatcctactgtcaacgagacacaagtagaaatcccagattctctaaacctcacgcacagcaccagcaacagtcagcatattcaacgtcacctccagtttagccctgaaccctctgcaatgaccgagtcttcatttggtgtgagttctgatgttgtcaccgcaacaactacatcagaacgtagccattctcgacatcctaagaaatgcaggttcaagggatgttccaaaggtgcaagaggcgcatcaggattgtgtattgctcatggaggtgggcagagatgtcataaacctggatgccataaaggagccgagagcagctctgcatactgcaaagcccacggtggcggtcgtcggtgtgaggaacttggttgtaccaaaagcgcagaaggaanaacagattattgcattgctcatggtggaggccgccgctgcgaacatcctggctgtcctaagctgcccggngtaagtctgggcggtgcatcaagca

SEQ ID NO: 126533 - DNA, 389 bp, Zea mays
  Clone ID: MRT4577_46867C.1
agatcggaacgtctcatgttggtggagttggtgtccggagtggtggggtcggcgctgcagcggaagcagcaatcagcgattctgaatatgggaatgaacctgtgtaacgtggcaacctggagctgggatatggacatgaagtcgaagatcaggaggaagatggtacgcaccagctgttctggggctccgtgattggcgatatgaagaagatgaaaatccattgcgacaatatctttggggagcagaatacccatcaacgatacacgcgcatgaagcatgatgtgaggattttggattccctgagttgaacagcttcataggcctacaagtagtgaaacgtccatgtgttggctgtactgttccgtcactaggagcagctatttatccat

SEQ ID NO: 126534 - DNA, 3019 bp, Zea mays
  Clone ID: MRT4577_46868C.1
ccgggaaaaaaaaaaaaaaagtccgtccgcccgtcccaccctttcccacccgcgccgagacggattggaggaattcccctcgaggatcaatctcgcttctcgcctcgtttcgtctcagctgcattccaattccacctgtaagcggagagccttcgtggtccctgctcggttcatcagaatacaggaggcaccggaggtagtccaccaaaacaaaacaccactccatctctcctcttcccagcgatttcctcttcccctcctcgcccgccgagaggccgcccgtcctccgtccgccgtcccagcgagagctttaagattgtgcagacacataatttggatgctcctgcctatgcaagatgtcaaccaccagagatattgtttagtgctgggaaagttatgcagttttggatcataaattctacatagacaagataattatggaccgtgcagacacatcagggtttgtcagtggtggttgctttggtactacactcctgctgatattctttcatttcgtctattctacagtccgtgtctgaaagatcgtcagtaacgctgcagctgcctgggcagaaatatcatcaggccccctgttctttgagatctctggtgttttatctcattttcttttccaccatcggtatattgtcttaactgtgatggataacggcttcatggacatccctcatccgcctctgatgaatgacccttttgtgttagtgggatgctcagcgccaagctccacggtggagaacatgggccaaagcacactctgtatggatggcctgaacccagcaattgttaattgcagccatgttaatggaaatacacagataatgaatgacataacagcgagagatgatggcagcaggttagtccttggtttgggcccaacaccgaatttttattctgcagtgtccactggctcaaaacaagctcagagattgtctggccagagttcaacttccattgattcagggatgctgaagcttggccttcagacggatgacaggggagcaattcaatatctgcaagcaccgaatggagcactccattctttaggtattgttgacgaggcttcaacatctgctgctgtaaggaacatgggtggttacatgccatccctactctttgctccctgctccaattctattgccaatgagacacaagtagaaaaccaagattctctagacctcacgcacagcaccagcaacagtcagcaccttcaacatgacctccagctcagccccgaaccttctgcaatgaccgagtcttcatttggtgtgagttctgatgttgtcactgcaacaactacatcagaacgtagccattctcgacatcctaagaaatgcaggttcaagggatgttccaaaggtgcaagaggcgcatcaggattgtgtattgcccatggaggtgggcagagatgtcataaacctggatgccataaaggagccgagagcagctctgcatactgcaaagcccacggtggcggtcgtcggtgtgaggaacttggttgtaccaaaagcgcagaaggaaaaacagattattgcattgctcatggtggaggccgccgctgccaacatcctggctgtcctaaagctgcccggggtaagtctgggcggtgcatcaagcatggtggtgggaagaggtgctcggttaaaggttgcattcggagcgcggaggggaaggctggattgtgcatttctcatggcggtggccgacggtgccagtatccagattgtggcaagggggcacagggcagcacattgtactgcaagggacatggtggtggcaagaggtgcgtcttcgatggttgcagcaaaggcgcagagggtagcacacctctgtgcaaagcacatggtggcgggaagcggtgcatgtttgaaggaggtggtgtctgtgcaaaaagtgtgcacggggctactgaatattgcgtggcgcatggaggaggaaagcgctgttccgtgcccggctgcaccaagagtgctcgtggccgcactgactgctgtgtgaagcacggtggcggcaagcggtgcaaggttgagaactgtggcaagagcgcccaggggagcacggacttctgcaaagcccatggcggaggaaagcggtgcacatggggcacaggctgtgaaaagttctcccgtggcaagagtggcttctgtgcggcacatggtaccttgatggccaggcagcgagaacaagaggcggcgaagaatgtaggaagcatgattggaccaggtctcttcagcggcattgttgtgtcatctgccaccgcagcaagcagcatgacgaacgagcactcgtcctctggtgtcagcaccgcttccgactgcgacggcactgtgaggagccaatcaatgattcctccacaggtgctggttcctcgctctatgatgccttcttggtcgactgagcctgtagatggaggcagagagggaggtcatgttgttcccgaggggagggtccatggtggtggcctcctgtcacttatcggtggcagcttcaggaacgccgatttggagaagcttcaaagctagtgcttttccatcagcagattcggtcagtttgtttgtacataaacaggccgcgtttcggcccattgtattcttattgtgccttttcttgtctagataaacatttcaaccttcatgtactggtttaagtccattgtaaagtggtgactggcaattgttgtgaacgcttttggcttgttggttcagctgtagtcagtactgcaataatttcgtgtgttgtttaagctcctcttttttgtagcttccagctcttatttgtttgtgcatattcttgtctggattttttagcgtttttgcttcgctttaatctatacaaaaaaaaaaaaaaaaaagcggccgcgtttcggcctattgtattcttattgtgccttttcttgtctagataaacatttcaaccttcatgtactggtttaagtccattgtaaagtggtgactggcaattgttgtgaacgcttttgccttgttggttcagctgtagtcagtac

SEQ ID NO: 126535 - DNA, 640 bp, Zea mays
  Clone ID: MRT4577_46869C.1
gaccctccgggctggccgggtgaggtaaacaccaaaagaagcttagaaacctgtggggttcttgctggtaccctgaaaaatagaactttttatgtgacaaccttaattattccaaagcagaaatcgacatctgatacgtgtgaagctacaaatgaagaagaactatttgaagttcaggacacatactcattgttacacttggttggattcatacacatccaacacagtcctgcttcctttcttccattgacgtccacaatcattattcttatcagaaaacatggtatatttcatctcacggatccaggtggcatgggcgtgatccatgattgtcaagagagaggtttccatcctcacaaggcaccacttgatgggtcgccaatatatgagcagtgctcccatgtgtacatggacaccgatataaagttcgatatgattgatctgcgacaaagatgacgaagctcacctttgggtttattttgcaacctatacttctcgcagttaaatcaattgctgccttatttttttcttagctcaagatttgtgaattcttatgtacgctgttgtacatagcttattgcgttgtatagggaaaaccattgaggtaataatgtcattggtaatgctttcgttgtaatcc

SEQ ID NO: 126536 - DNA, 399 bp, Zea mays
  Clone ID: MRT4577_4686C.1
cccacgcgtccggtgctgcacaggcaatgaggaggcctggaacagcccgaactggcggaggacccggtgcacaacgtgctcctccacgaagatgtcgaagacgagcggtttcctagtcggccaatagtccctgtcttaaaagcatagggacaaaaggccgtaaggagcacgttgttgcacgacgttgtcggcgtacagggtctagtggacctggtcatccttcaggtcgtcgagctcagcgacgaagctcaggtgttaccttcctcttggtctccttggccatgagacacttatggccgaagttggggaaaagaagtcccttgttgacgacgatgttggcggcgtcctcgtcggaggaatcggtggagctctcgtcggagtcccactctcacaacatgt

SEQ ID NO: 126537 - DNA, 1079 bp, Zea mays
  unsure (1)..(1079): unsure at all n locations
  Clone ID: MRT4577_46870C.1
cctaattcggcacgaggcccactcccgctctacgtcacccagtctctgacgcgcacggatccgttgccatggagcttttcgccctccccgatgacggatctttcggcgagttacggagttagtacaccacgacatctgcctgtcgccatggctgggaggcgctcgacaccggtggccatcctcctcaccgcggccttcgtccccatctcctccgtcgttcgtccaatctttgacacgcacagatccgctgccgtggagctcttcaacttctccgccgacggatccttcgacgaattgtgcgaccgcagagtttggatgctcctgcctatgcaagcaagatgtcaaccaccagagatattgtttagtgctgggcaagttatgcaattttggatcataaattacacagggacaagataattatggaccgcgcagacacatcaggctttgtcagtggtggttgctttggtactacactcctgctgatattcttccattttgtctattctacgatccatgtctgaaagaccctcaggaaccctgcagctgtctgggcagaaatatcatcaggcccctgttctttgagatctctggtgttttatctcattttgttttccaccattgttatattgtctcaactgtgatggataacggcttcatggacatccctcatccgcctctggtgaatgacccccttttgtgttagtgggatgcccagcgccagcctccacgatggagaacatgggccaaagcacaatctgtatggatggcctgaacccagcaatggttagttgcagccatgttaatggaaacacacatataatgaacggcttaacagcaagagatgatggcagcaggttactccttggtttgggcccaacaccgaatttttattctgcagtgtccacgggctcaaaacaagctcagagattgtctggccagagttcaacttccattgattcagggatgctgaagcttggccttcagacgnatgacagggaaagcattttcatatctgcacaagcaccgaatggagcactccattctttagatattgntgacgaggcttcacatctgctgct

SEQ ID NO: 126538 - DNA, 701 bp, Zea mays
  Clone ID: MRT4577_46871C.1
cggacgcgtgggttgttttctaagggttgccgagtcaaacaccaaaagaagcttagaaacctgtggggttcttgctggtaccctgaaaaatagaactttttatgtgacaaccttaattatcccaaagcagaaatcgacatctgttacgtgtgaagctacaaatgaagaagaactatttgaagttcaggacatgggctcactgttcactcttggttggattcatacacatccaacacagtcctgcttcctttcttccgttgacctccacaaccattattcttatcaggtcatgctgcctgaagcaattgcaatagttatggcacctactgacacaacaaggtggtatgggcgtgatccatgattgtcaagagagaggtttccatcctcataaggcacctcttgatggttcgccaatctacaagcaatgctcccatgtgtacatggacaccgacataaagtttgatatgattgatctccgagaacgatgagagcctaacttttttgggtttattttggagcccatactgtagttaaatcaagttgctgctttttcttagtcgtgctgaagatttgtggattcttatgtatgctgttgtacatagctattgtattgtatagagaaaacaattgagtgaatgatatcagtcattgctgctttgttgcgattcatcccatatcctcgcgaggcacgtttgtgtggc

SEQ ID NO: 126539 - DNA, 2559 bp, Zea mays
  Clone ID: MRT4577_46872C.1
gaggctcggccgggcaccctatattgttccccgagctccagccgccaaggattggcgaaaggagccgggcagatattgaaactcgtttcagatcggatccgaggactcgagaaattgcagggaaggaatttgaggatggatttcgagctgcggcaggcgcgggagaagctggagcgcgagcagcgggagcggatgcagcgcgccaaggccaaagcggaacgcgagaggggggccaaggcagaggcggcgcgccgccaggaagcgctcgaggcgtcccaccgtgagcgacgactcgatgccgtacgggcccaggaagaggctgaccggacaatggaagaggtaatacaattcctgaagggctggcgggcacgaggagggcggaagaaactaccgaagtctacttccattcctctccttcctaaacccgcgtcgcccacgagctcgccgtgccggcagaggcgaggacctcgccgaagcagaggccatggggcgaccgcagccagccagggctggcgccatcaacatcgaggcgtgcgcgcggccgatcgccgtcgaccaccgtatcagtctcccgtactacttccgcatcgcgggcagcctcctccgacaggctaatatatatcggaacgagagtaacttcctcgacctgtatgtcatccttctgagatactcgagcttgctgtgcgagacgattccgaggcatcgtgattaccatgccttcaagttaagagaaaaggcattttttgataaacttgttgatattatcaaagagcttgagacattgaagccagttgtgcagcggcagattgttgagcataacagaggaggtactgtggaatttaatactaatagtctaaatggaaactatggtacaactcataggatagagcagtgtactccaagctcttatactccacagacatttgtaggcagcagtaatggagcattgcaaaaacccttccatgctgggagacaagtggcatcattatcgagtgtacagaaacaatttatgaatctaccatatccaaaagaagaaacactagctagacactccatattaggacctaatggtcttaatggccggtggaatgggcctgttactggaatcaaggttcaatatccaagcaattttgaattaacacaaaatgatataacaagtttagtgccatccatcttgaaccaagatgatttgcatggttccaatactgcacctgcacctccacctccaagtagctcctcaaatgacaatgacaatatgaaatctgttctctctcttgatgatggtcgatggtctgtaccagcagaagaacacactccacttccttctgctaatttggaagaggagttgttccaattgaatatcaaacaaccttctcctccaccagttcttgcagaggtacaaagaccaatttctccatcaagagttgccgatccaacaccaggacttccgacctcaggaactgcccgatttcagaacttgcatgttccgatcaagttgatggagtgttttctaagggttgctgagtcaaacaccaaaagaagcttagaaacctgtggggttcttgctggtaccctgaaaaatagaactttttatgtgacaaccttaattattccaaagcagaaatcgacatctgttacgtgtgaagctacaaatgaagaagaactatttgaagttcaggacatgggctcactgttcactcttggttggattcatacacatccaacacagtcctgcttcctttcttccgttgacctccacaatcattattcttatcaggtcatgctgcctgaagcaattgcaatagttatggcacctactgacacaagaaaacatggtatatttcatctcacggatccaggtggtatgggcgtgatccatgattgtcaagagagaggtttccatcctcataaggcaccacttgatggttcgccaatctacaagcaatgctcccatgtgtacatggacaccgacataaagtttgatatgattgatctccgagaacgatgagagcctaacttttgggtttattttggagcccatactgtagttaaatcaattgctgcctttttttcttagctgaagatttgtggattcttatgtatgctgttgtacatagctattgtattgtatagagaaaacaattgagtgaatgatatcattggtaatgctttgttgcgattcatcccttcaacctcgcaaggcacgtttgtgcggcaagatgaggaagtggtgtctggattttatgccatgccaaatatttgacttaaaagggcatcaaatatcacaaattgttaaaggtctcatttcttagactatcttcattagactatcttcagtagacttcttatcccactctttattttaaacttcactctgcaaatagtgtaatctacagtacaaattttgcacggccgtttatatgacctgctagagatggacttagagacttatgatgcgtttggtttgttgagtcatcatttatttcatgagttgatgtatcataagtttatcctataaatcttggtctcatttgtcatgtatatattaattattaggtt

SEQ ID NO: 126540 - DNA, 535 bp, Zea mays
  Clone ID: MRT4577_46873C.1
aaaaaaaaaaaaaaaaaaaaaaaaaaaaaaaaaaaaaaaaaaaaaaaaaaaaaagaaaaaaaaaaaaaaaaagaaaaaaaaaaaaaaaaaaacgggcatgcagaagtaataaattctaatataaagaaagggggggcccattttcaggggacccaagtttaccacccgtggggatctcggaaaaaccctgtcttttttgggctcccttaaattgagtcacatgcccgtttttccaaacggcgtaatagggaaaaccctggcgctttccccccttatcggctttggggcaatcccctttttgaccggcttgcgccctgtagagaagccctaaccggggcggttttccaaacttttgcgcaccttgattggccattgggcccccccctaacgccccctttttccgctgtgtttcgttggtttttcgccccggttgccggttttttttgccaagcctttagccccgggttttttttttttttcccttttttttgtaaccgggtcctcggtttttcccatctagtttaggatgaggggg

SEQ ID NO: 126541 - DNA, 234 bp, Zea mays
  unsure (1)..(234): unsure at all n locations
  Clone ID: MRT4577_46874C.1
tatcntcgtgnacgtcgcagcatccgcgactgagctcgcattaggctcgagggccaatctatgcgtccttatatataggaaattagagccaaacgtctgtgtagtggattgtaatagtcgctttttgcgctccgaccgcccaaggaatccgagtttggcaaaactgtcaaattgtaaagtcaacccttgtccacgaataatgatggtcttatgaatggaatatatgcttgtttc

SEQ ID NO: 126542 - DNA, 693 bp, Zea mays
  Clone ID: MRT4577_46875C.1
ttagtctgatccgtgttccgcgaccgcgtctcgtgtgtccgctactccgctctccctcagtcctcagtgcctcgcctatcgataacgagcgcgcgtcagacgtagatgtcgtcttcggatgcttcacctacgaggggctacaccgatgacgccgagagagaggacgaggatcgcgatccacaccctggaggagtggatgatcccgatcgaggaggtccatacggccaggaagctgatgatgattgacttcactgcaacatggtgtcctccgtgccgcgccatgactcctatttttgatgatatggaccacaagtccccaaatgatgttttcctgctagctgatgtcgatgaatctgaagaccattgtgtgtagcaattcagcgtaaaggccatgacgacattcctgttcatgaggaaggtggacgccaaggacaccttagctggcgcaggaaacgaagagctagtgaggaagcttgaatctacacatggactcgtagatcaatgatgccataatgtagtattcgcctcatataagaggacgcctcgactcaactctgagaaaactagagcttctgtgatggataattcacatgagagagtgcaccctttggtgctacttcttcagatgcaacattaactcctgtgttagtatgtgaactcaggtttttttaacacaaactgtccaaagattgg

SEQ ID NO: 126543 - DNA, 581 bp, Zea mays
  unsure (1)..(581): unsure at all n locations
  Clone ID: MRT4577_46876C.1
nagcaactgtactggcatatttgccgatcctagcacaagctgaactcataaagtcataacttatagccctcagcgctcgtgaagtttgaacctcgattggaaactgctttctgtctagctagcctgcttgcatgtgctgggcgaaccatttcgaggctcctgatgtacaacggatgacttcactaaatcaagggctttttcttgatactgcttgagtcgggccaaattctgaaatgaagaactgagaaaggcattctatgagcttcgtcctaagattgcaaaaatgattcgcgaagccaaggttgggatccattggttgaagaagacatacctttttgcgtggaagctcgtattgatataccacatatggatggtccaataccaagatttgggcagtcacgaagaggaggaacaaataatatcactcaagatcatttttatcgcgttgatatcttctatgctgccattgactctcttatatcagagttggatcatcaattcaatgaggtatcctctgaattgcttacttgttttgcttgtcttgaaccaagagattcattcagcaagttagatgtgaataa

SEQ ID NO: 126544 - DNA, 250 bp, Zea mays
  Clone ID: MRT4577_46877C.1
cgacccttggttcccctccattattctacctcaccttaccttgccaccagccatgggtgcggggaccgccgcggtgcatctctctgtcctacttcttcggctgctcccgtggggttggtgccatggccaaggttgcttccctatcgttgtttcatgcagtcacctttagttcctgtgtggttgctagcccgcggtgggtgtggaggtccggctctcttgctgtactggctcaagtgtttaccaccgatac

SEQ ID NO: 126545 - DNA, 287 bp, Zea mays
  Clone ID: MRT4577_46878C.1
ctctgatgctgctggatctgggagatgagccatgactacacactcagggggcggggctaactatccgccgccagcccacatacatacgaaacactaacagagagctagcccccctcagatgctgcttctccaacacacacctccctaaagtattctatcaaccaaagccgctgctacacctgatatgtttgtttggggtgttattaattaggacggactagctagctgatctatattatcgtacacaataatgctacgctgtacctatctataacaagcacacaaat

SEQ ID NO: 126546 - DNA, 963 bp, Zea mays
  Clone ID: MRT4577_46879C.1
cattgggtacctcgaggccggccggggatactctctttttccttcctgtccaaggcccatcaccgagaggggagaagcgatgaaggcggcgccgatcgccaagtcgaggcgggagccgccttccatccctcccaactacgtcagcctccagcagctccttgagcttcgcctcaaggagaaggaggaggaggagaagcggcagcgggaggaggaggccgccgcagccaggcgggcggcggcgctaagggcggaggaggcggccatggccgccgcggttaagcgggaggcggcgctgaaggcagagactaagggacgatcggtctcgcgcgaggccttctgtggggccaaggataggcagcatggggggcagggccaccagtgggtggccgtggtgcatcgagcgccgccgacgtgcggggaagttgcggcagggaagagggaatggatggtaggaggtagctgtggcaagaaggggctggacgatgtcgcggacagtgcaccccatccccgtggcggacgcaagtacccgcggaggaaggggaagaggaaggggagtaaggagggcgagccaggtaatctggccaaggcagctcctccaacatcgaacgacggcaaggtggacatcaagagcgaactcaaggcgatggggaaggcctcggttgcgccactcgatccggccaaggcggccgtggtatcatccccgggccacctgacttgcaaggggaggaaggggaaaggcgcggctgaccggagcgcagagatgagccggagcgatgctccggtgaaggtgaagacggccggtccgtcgccgccgcgaggcgtcaagtcgggcaacgttgggaaaccgaaacctacagcgcccaggctcgcagacgccgggacaggcagcgattctcttgacgggaaggcttcggctccggagccggctctgaccccttccacctcgcccgccgatggcaggag

SEQ ID NO: 126547 - DNA, 529 bp, Zea mays
  Clone ID: MRT4577_4687C.1
agttacttgtgttcattcatggatcacaacatcatgcttgcggtcattgcacaaatatagcacaaggtcagagcactgggcactaacttttatggaaattacaaggattattctagaggaaaggagtaccaggccttggcattagcactgaccaatcacaaggatattcttagactgggggccaggtcatttgcctgcctacgaagagatgaacgtggatgtggataaacagattgacatacacttgggccgttattgatgacaacgagcatagccatcttcaagggcttgctgcttcaaaacaaccttggcaacatagaggagatagccaagggtctttatgggcctctcttgagcctttgccacgccagttagaccatccttgactttggggatgatgagaatgcgcgttggagcttgtagggttgatgcccctgaaagctcagtaccttttcttcctcgtaaaccacactggaaggtatttcctttttgatgatcttgtcaaatatggccgggctgtcatcgaaca

SEQ ID NO: 126548 - DNA, 489 bp, Zea mays
  Clone ID: MRT4577_46880C.1
aaaaaaaaaaaaaattaacaaaaaaaaaaaaaaaaaaaaaaagtttcccgcatctgccgatctcccccgttccccacctcccccttcccgtcgggccgtagccaccgcaccgcccccgatggcctcctccgctgccggcgccggcaagtcactgatccagacattccgcaagttcttcaagaagccgtgggagatcaccggcccgtgctcctcgcccgagtaccgcagcgcggtcccgggtgcgctcgagtaccgtcaaacctgcccggccacccttcgcgaggactccctcagggccgtcatccccacctccgacccggagaccgtgttcgacatcaagtaccacccgcgcgactgccgccgcaaccgcccgcccgtccgccgcaccctcctccgcaagcccgatctcgagcgctacatggccgccaagcagttcgaccccgccaaggacttccccgtcccctacgtcaattctgctgtcgagtacag

SEQ ID NO: 126549 - DNA, 304 bp, Zea mays
  Clone ID: MRT4577_46881C.1
gtacgtggtctctccaggtgagcttctgagaaactgattgaccttcgcggtcgcacctgccgcacacggggactgcctctcttcctgcacccgttcggccggtcgcacatcctagcttcaagtgcgacgatgttgttttccccaatgattctcgggggaggcggtgaatagaacatctgaatgtgtcttgactaatgcccgatctttgaattaagtttttttaacttttccgaaggcttttgctgccatttacattttttatacttatagtattttattttggtaatcttcttacctttttttt

SEQ ID NO: 126550 - DNA, 305 bp, Zea mays
  Clone ID: MRT4577_46882C.1
gggggcaaaccaaacacaacacccggtggaacccgaaaacaatttggaaaacataaaccaaacccggcgggagcttaaactcgggggccactttataaatttgccccccaaacaaacccccccaaaaaagtatcgcccgccccagggccctggacccccccccggggtgaaacaattcccccaagcttgggcttaggatttaacccttacaaaaggggccagggccttacccggggcaacacacggggcaacaaaaacccgggggttcacttggagacctccccaacacaccaaaaagcccccct

SEQ ID NO: 126551 - DNA, 614 bp, Zea mays
  Clone ID: MRT4577_46883C.1
ggccgcttttttttttttttttttcttttttttttttttttttttttttttttttttttttttttttttttttttttttttttttttttttttttttttttaaaaaacaaaagccacagggggccaaatttatgggtaaaataaaaattattgagagccaccaccacataagaaagggaccccttgcaacgggtggggggaaatccatcacccaggggggccccttaccactaaaacggggacccaaaaacgacgactttgacttttggtagggggggggcaacgcaaatcttgctggaaagctattacagacttcctaaaaaccaatgggggggcttattaaaaagggcctggaacctgaaagaggcccccctcatcccaacaggaagcccccctccaccattttgttaacttgggggggggacagccattgacctgaccctggagttaaagaagggtctaaaacttgccacgcaggtaaaaaaagttaatcttcactggccccaggggctgggggaacccatttttgcttttttggtgaaaggattcgggaaactgaaagcaagggttcttaaccttcggagcaccaaaacttgcactgtttcctttgagct

SEQ ID NO: 126552 - DNA, 689 bp, Zea mays
  Clone ID: MRT4577_46884C.1
cgttcgcgcgactgtcggaaatcctgtaacctatccgcacggtgcgcctgacccgtgaccgcccggcggacgcggcaatgatccggcgcctcctgaccgagggcgacctggtgatctgccccgaggggacgacgtgccgcgagccgttcctgctccgtttctcggcgctgttcgcggagctgacggacgagatcgtgccggtggccatggagaaccagatgagcatgttccacgggacaacggcgcgcgggtggaaggggttggaccccttctacttcttcatgaacccgagccccgggtacgtggtcacgttcctcaacaagctcccagccgagctcacctgcagcggcggcaagagcagccacgaggtggccaactacatccagcggctcatcgcgtccacgctgtcctacgagtgcaccagcttcacccgcaaggacaagtacaaggcgctcgccggcaacgatggcaccgtcgtgtccaagcccaacatcgacaaaaacaaggccatggcctgctagcgtagcacacgtactgtggtttgtggtggaagcctaatgggcctcggattaaaaggccaataagctgcatcgtacgcaggcttccgtgctacatgttttcgcacgtagcagatgcgtgcgtctgtaattgttttttttttctgaaccggagggagggagggttttatt

SEQ ID NO: 126553 - DNA, 173 bp, Zea mays
  Clone ID: MRT4577_46885C.1
ggaattgggaccctccagacgccgcgcttagcctttgtctcgagccctcatataggctggcgagagcaagtaagcgcatctgcgcttggacttctgactctcggccatagaacagggccgccgaccatgatcagatatagacaactcaccatgccacgccagagaccctcacc

SEQ ID NO: 126554 - DNA, 339 bp, Zea mays
  Clone ID: MRT4577_46886C.1
gaaacttcttggacggtataattttctggatgaactatcaactcttgatcctgagctttatagaaatcttatgcaactaaagcactatgatggagatgttgaggatctatttttggattttactgtaactgaagagttgggtggtaaaagaatcgtccatgagcttagacctggtggtaaaaatatataacagacgaacgaaaacaagttacactatgttcatgcaatggcagatttcaaacttaaccgacagcaccattgtccttgcagatacttacatttgcaaacgcactctatagatgactcatctaactcatcacaccatattggctgagcctg

SEQ ID NO: 126555 - DNA, 291 bp, Zea mays
  Clone ID: MRT4577_46887C.1
gacagacatccatttacatcactagctatctgcgcagaggcaatgctgcttcaaggttgtcctggtggcggaggccaagtcccccgctgacaagctgtgcgctgcgctccgtgactctacggatctattacccaaaatctcacccgagccatgcaggtgcatcgcgactgtcaagggtgacggaaccatagccggcaccgtacgtctgttcaaatacacccaggcctggccgatgctggctttcaccaaggataagcttgaaacatgggacgattaaaacatggttgcgtt

SEQ ID NO: 126556 - DNA, 342 bp, Zea mays
  Clone ID: MRT4577_46888C.1
aggacgcgtgggcggacgcgtgggcggacgcgtgggcaggggattatgtgagtttgcaaaaagccaaaaaagtctatacgcgtatagaatttgcttgcttgcttgacagccagccaactgttgtcgaatgatagttctggcgttgctaactgtcaggcttttgaaagcgagtcaaagacggtccagctcgcgaaaggtaccggcctgcctgcgcagcagaacaaacctagctacgaggcattaattcgtttgatgtgcctttttggactcaaatcgattctctctctctttttagaatataaaaaacaagtaaaagatgaaaggtaaggataagatcaatca

SEQ ID NO: 126557 - DNA, 927 bp, Zea mays
  unsure (1)..(927): unsure at all n locations
  Clone ID: MRT4577_46889C.1
ctcgaggccggccggggaatatttaacagggagacccaaacctgagacgaacacgaagaagcaaggagcaaagcacacacgtagcgagcccttcccaacccacgaagcagcagcagcagcaggcagccgcctcgccacgcgcccgagcaacgcgccggagagagcaacncnntgnnccnncctgcnttgnttgnnnnnnnnttgtgtgtttgttgttttnttgtgnttgctgcntttttgttnctgctttttntgnctgttttgnttgntttttttatgttttttctttgtttttttgttttgttgctgttgtttgtgtttttttttttttttttntntttgttttttttttttgtttttttttttttgttttgttttttgttttttttttttttttttttttttttttttttttttttttttgttttttgtttttttggtttttgntttttgttgttttttgttttttttttgtgttttttgtttttttttttttttttttttttttttttttttttgtttttttttttttttttttttttgttttttttttttttttttttgttttttttttgtttttttttgtttttttgtttttttttttctcttctgtctttttttttttttctttttctttctttgttgtgggtgggtttggtttttttttttttttcttttttttttttttttcctttgttgttgttttttttttttttctccctctttattttttttttttgttgttttttttttttgtttttttttttttttttttttttggttgtttttttgtttttttcttttttcttttttttctcttctttttttttttttctttttttttcttttctttttttttttttttttcctcttttgtctctttttttctgtttttctctttctttttttttttttttttgttttttt

SEQ ID NO: 126558 - DNA, 351 bp, Zea mays
  Clone ID: MRT4577_4688C.1
ggagaaaaagggttaaaatttaattttttttctatggaaaggaaaaaatagtttctctgttttttacaagaatataataatttattatctggcgaaattgagctcatagaatacttgatcaccctataactgaaaggttttaaaaatcacgagatattttaagcttgtgcgaggtaaacaacatgcaaggacagagccagacaaatagaatatttttttttggcagcagctttagacattttggctctatttggaaccttattattcacactattgatgactgcgagaggcaactgttgacttatgtaactgacgggaaaacgaccaagaggaggatactgctaaaaggtt

SEQ ID NO: 126559 - DNA, 293 bp, Zea mays
  Clone ID: MRT4577_46890C.1
gtttatcttttttcattttttattttataaaagttaatatttagaacttcagcttcaaactaacacaaacaacttttgttcgaaaaaacaaactcacacaaaattgcttgttgcccgactacaagtagcgattaaccccatagggcagattctgggcgccttctaagatattactatctcccattggaccaaaccctcttctttattctaatccccaaaaaaagagtaaaacggcgccctgatttggtggggcgtttatttagactggacttaaaaaggtcgcatttcccctt

SEQ ID NO: 126560 - DNA, 1244 bp, Zea mays
  Clone ID: MRT4577_46891C.1
agcagtggtaacaacgcagagtactttttttttttttttttttttttggagatgagcatagtcgtcatctcactgttgatgaccttagacgactgttagtgtcaaagattgttcgatagttaatttatggggtaggtcgtgtagtagacaattgcagaaattctgttgggaagacttgtgctcgcaaagtttatggtcattcttcactatccatatataatccttaagatgtcaagccctaatggaataatcattgtcaaaggcaacttgaagcagtctgagtgtgacaaagtaaagaaatccctcacatatagtcatcatgaaaaggaggagatgcagatctcgagccttcccacaggaaatatttgctagtaactttataggccaagtccaagatcacaaagtaagtccagctagaccccaacaactcggctatgaacacatgtatcgaggctagtctggatcccaaataggaactcatgctcactaatttcctccaagacaacttgaacatcttcgcttggaagccaacagatgtgtagggagtcccaaggaatttggttgatcacacttaatgtcagtcccaatgcaaagactgtcaaacagaagttgcatcgttttcctcacgttaaaaagatttaatcaaggaacaaataactcgattttttagttgtagggttcattagagaagttcttcacctcgagtgggtcgctaaacatatacttgttcaaaaataaataatggagaatgtgcattgattatactaaaccgaataaggtgtatccgaaagatcccttctctctcccacaaattgatcaaattatgtgttctaccttcgaatgtgatccactatttttttatggacttctattctagatatcatcggattccgaagaagatcaaaccgattcatcaaccattcaacatatactcctatactactatgttgtttgggctaaaaacgcggggtctacatgtgagagagggatttagatgtacccatcttctcaactatatagaaatattgaagcatatatggatgatgtcatcattaaaactcaggctaaaaaggatctaatctctgatttggtagagaccatagagagtataagaatattctatatcaaactcaacccataaaaatgtacttttggtgtactatcttgaaaattactagggcatctagtttctcaaaaaggaatcgaagctaatccccgcgtactctgcgttgttaccactgctt

SEQ ID NO: 126561 - DNA, 201 bp, Zea mays
  Clone ID: MRT4577_46892C.1
tgttgggtgacaaaccagggcagacgcatatgatcctgtctgacttccggcgtctcttacctccaagcgaagtttaattgatacattatgagcgttaagtgcgcagaccaccagatgtagcacatccgacttaggctatgagacaacgggagacgaagtgtatgaacaacccttggtcaggttagtagcgcgagattccac

SEQ ID NO: 126562 - DNA, 670 bp, Zea mays
  Clone ID: MRT4577_46893C.1
agcgagccacaaaagtaggctcggcttgggctcgttcaagctcgtgagcatgtccgacccgagcctgagtgagcccaagccggctcgtccgggtctagttccgtctttccatcgtccgcctgacgtctggtaatcgagtaggattcctcttgtaacggacggttcctgcctatataaatatacagcccctctgaccttaggcaagcaatttaatatcctggtgccgtgtttctttcaatatatatggtatacaatatgagtgaactatccacatataaacctgagtccctgtcttcccattctccactgctatgccagcattgtctaccaccagatcgtaacaatatggtattagaagttttctcttgtttttttggttactttcatgccctaaaccatatcttggctctgaagtttgtgccttccttcacctcatccaaactcctaggcatgtgcctcgcaccactactctgtacatagtttggtgtatacatggaacaataataatgcattttatgcaatgaacactagttgcacctggatttgcaccatgattttttcagaagaataatgaacacatgaattgaacgttttatgtattttgcttgccaacagaaggtctttttacttatatatgtcactttttatcagtagggtattattcatatat

SEQ ID NO: 126563 - DNA, 271 bp, Zea mays
  Clone ID: MRT4577_46894C.1
ggccgccctttttttttttttttctaaaaacatagcattaactattgcatggtaaaatatagtgtttatacatcaagaaacttaagtctcgttctactacttagtctatgttcaaaagctctaaaactgatagtaagtcgctaaagttacttgagagttttagaacgggatacctctcagatagttgttagttgtcttaacacaattgataacttattagctaaaaactagctctagagatttgaaacagggccttacactatttttctgt

SEQ ID NO: 126564 - DNA, 1132 bp, Zea mays
  Clone ID: MRT4577_46895C.1
gacaggcggccctccgcctgcgcacgcctcgtgttttccgtctcgccaccgtgatgtcgcctctgctgcttcgtcgcgtcgtcgcctctctgctgctccacggatccctgaagtgctgctgctccggcgccacgggcggcgccctctggcagccggctgccaggggcgcgtggaggatgtagattggtcctggtggcggcgacagcggagggccagcaactgcgagcggtaccgtgctcctgcggtggcttcgtatgcagggaccggaggtctacagtagcgcgcatctagccggctcagcatcgtggatctaaccagaggaggccacggctgttgctcctccctcggcaatggcgagggttcgagacaggacgaagcacttcaaaggggtcgcaatgctctcacatggatacatcgagaaaatgggaaccactcgaaaacgtcgctcactctggctgaggtaatggaaaatcactacgcatccaaaatcagcactttcaatctttagaaaatagcactggttattggagtcattttttgaccgatggagttatcctttgattcagtaagtattttttcctaaaaaacaaatcaaccatgtggcacctgaaccaccatcagagattgcagaggagcacgatggtttagagagtgttttagtgcctatgcaggggattgtggttaatgggaaaagtacttcagagctattgagtggctctgtatcattgaggtcagctgaggtggttggaacacctgttggacgaattgtgaagtgtgaggagtttctgaaggctgcaggacctgttatggtatgtaatatatgcatattgttcgatctacattttatatcttgtgcaatgccgatggatattaaaatgtcggttgtatttatagcctgtgttagggtagtgtcaaccccaagaaggattcagtttttctttccatcttctgatctggctttccgtatcaagctgacgatgtgaaatgctaacagtagaagcttgcctagctatgtcatgtgggaattagatttaagttcttgaatgttacactattttgtgaattttttatgttggacaaattatatagtgagggtgtcaagaaaatcatgcaaagaatggaactttacgac

SEQ ID NO: 126565 - DNA, 379 bp, Zea mays
  Clone ID: MRT4577_46896C.1
aaactcccggaccccgggggtggttaaaaagatccctttcaaaccttggtttggcaacccaaccccatttggccctttttcccaattttgtcctccacttgcttttcgattttgtataaaggtcccgtttgtaccaaagctaacctttggggctttttggttaaataatccacctggaccttggcctccacattagtaaatttttaaaaatttcccctggaaggcttaattgggtggttatctttttggggggcccccttttttttttatttgggatattttttttggggtttccaattctaacaagttgtatttccttcccccccaatttttttggggcccgttgttttcccccctcgcttttttttttgtgggatcc

SEQ ID NO: 126566 - DNA, 285 bp, Zea mays
  Clone ID: MRT4577_46897C.1
ttggttggtttgaaaaaaaagccaaagtacacctgattcccaacaagaaaaacagagtatagataccggcaagaactaagtagctggatgcgtgatccgtacaaatactatataaatgtaaacgcacatcccactggaaaggaatagaaagcatccaccaatgcaaccacttgatgacaaacataaaaagataaggcgcgctaaaactacaggcgcaaggtacaacaagaagcggctttttaaggtaaaggctgcggccgaaaaggtactaaggttggactaaaa

SEQ ID NO: 126567 - DNA, 659 bp, Zea mays
  Clone ID: MRT4577_46898C.1
ttttaatgatacttctatcggcttcgatcaagtctcagggtgaacgcatgcttctctccttgacctgagagattttgacagagcagttatgttgaagagccatcagactcagctgatcaagctcttctcagggagctgcgaggcaggagtactggacagatggataacgtgatatcacaagctcaggcaacactaggttctctcatgactcaacggtcaacattcggcggcatcactacaaagataagcaacgtcagcagccgacttccaacaattaaccatgtcctcgcgtctatcagaagggaagaaatccatggacactatcatcctttcccttgtcgcatcagtcgcgcgttcctcatcttcatctactggctgtcgaagtaggtttaccaaagcaaatgtattacggtgttgtaagcttgggatcacactaccggtacagatgatcgtgattggtgtttgtacaatattggttgattgaatgctattacgattcgggagtgctgtagccaccgtgtctccaagctgtgattgattgggcgcatggattgagttggcctatcagcaacttatattataatggagggaaaaaatcatttggtgttattgcacgaagaacatgaaagtggtcctacaatgaacaagctatttttcaa

SEQ ID NO: 126568 - DNA, 641 bp, Zea mays
  Clone ID: MRT4577_46899C.1
ttgggtccctcgaggccggccgggacatgtatccactaaagtcgctactgtcgacgtcgcttcctcctgcatggtaccctacaccagcgtacaccaccggcgttcgaaaatcctccaagacatgaatgttcgacgcggagtgaatggcccgacgccaacaagatactcaacgctgaagcactgtccagtacatactctgctccaactgacgcaagggttgtgccaacgagaacggtatcaaacttcatcttgcggaggaacattgctcagcagactgccgccataaacgccgaggaggactgcgtacatgatggacatgttctaccctaagtgcatcgaaaagctcatcactgaggactcgagcgcaatccatggcgacatcggccgagtacgatctcattaaaacaggagaaaacgtgagcccccacaaggcttacaacgacgaatatgatgctcactatagctggtgactcccacgccgcttcgcaggcggccgtagctccagcagctacaccggctgatggtcatcatacataagtgctggaattacactatgtaataattatacgctaaaaattacctgtctagaaaaaccattagaactggatcccctagatgcaaattttttaccactaattgag

SEQ ID NO: 126569 - DNA, 666 bp, Zea mays
  Clone ID: MRT4577_4689C.1
gccagtagattcttttttttttcaaaacaacaaagtggagaattcaatcgaacaagggcttgtgtgtcgtcgatgtggattcagattttaacagcgagccgatgcttgggaacttgaggttaggcgagatttcagaactctttctctgatggtgacagacattccacttggtgttgtgctcccaacccccaattcgccgccctgttcggtagctctcgatgaacagtgcaccagcacaatcgctttctagctgctgctgctttttttttggcaaggttatggcgcgcatttgtgtttacagtaggggtcgggtcactgcttttctaccaccaccttgcatttgtcggtggaatatttatctagcttaggaacataggcgtgtcaaacccttctctcattgcaggtatctatgctattcttgcaagattatcctacctaacacaaggtcacgataacaatgtttccggacgcggttttagtacagctagaattcctatcttcacacggtaatcttgacttgaggccctaagatgcttccttgtccaatatgcgtctgcatgtttgttggagccttttaatacccccatttctggatgtatatgtatcatcgagcagcagaggagtggtggtcctttcgagcgatgggcagaattccttattcgtaat

SEQ ID NO: 126570 - DNA, 312 bp, Zea mays
  Clone ID: MRT4577_468C.1
aggcactgtcacaaaggggggttactctactcacattctagaccatgaaaggtatcgggtcaaagtacccgacggctaacctttgtcaaaagcagcacctcttctgcgtgctggaataaccgcgtatactccaatgatgcgactcaacattaaccaacctggatagtcactttcattcattgctattacacctctacttcatatgtcatggacaactggtcaagcattatctcttcaggtaacacctctcagtactagtgaatcacaaagcgatggatccaccaatctacgatgcgcacatagtattgacta

SEQ ID NO: 126571 - DNA, 182 bp, Zea mays
  Clone ID: MRT4577_46900C.1
gtcctttttttttttttttttataaataaattaggcacggaggataaaacgagaccattcatttctaaactgggagtatttgaaacaacagggaagtatcactctacctatatatggcgcagaacatgagggcaaacgaggacggcaccatccatgttggggccagcatcaatgccgcaaaa

SEQ ID NO: 126572 - DNA, 270 bp, Zea mays
  Clone ID: MRT4577_46901C.1
gtctcacctcccgctatggaagaagggctggtgcatgtcattgaaaggcggctctagctaccacttagaaagccgtcgatcctgcactacccctgcaaaaaaaactggatatttcatgcattgctatctaagagtgctgattcaggactgacccgaaatttggttcatggccaagaaccggcattatttaggatagcactgcactctgctcatattatacatggaatcatcagatgaagctgtggattttacaaaaggaaatcaatgcca

SEQ ID NO: 126573 - DNA, 619 bp, Zea mays
  Clone ID: MRT4577_46902C.1
ggcgattgggtacctcgaggccggccgggatccccgtcaaacaagcgttcgccaaagtctcccttcctactaaaaatccccatatccgcggcggcgccggtcttcggattcgatccttttatcgagccgactccatctgatcggcggaggcgcggcaccagccaccatgtgggcgccatcgtgcctggcgtcgtgctgcgcgtagagcgcgtgagaggcgtgacgcacggcgggcggcagcatccgccgccgctccggccgcatcgcctactgcggactcttcgcgctctccctcttcgcatcctgagcgctccgcgaggtcgccgcgcccctcctccagtcgatcccatggattagccacttctattatacccccaaccgccagcgtctcaagaccgacgcgtggctcatgtccagcctcggtaacttcctcttcttcaccatcctcgccgacatcatgtccgagataagggaccagaaggacccccgggacaagggccaccacggcggatggatgagacaagatctgctgatgggacatcatcgccgtcctcatgtacatcgcgtccaacgctgtcctcagattctatgaagctatatccatgtttggctctgggct

SEQ ID NO: 126574 - DNA, 797 bp, Zea mays
  Clone ID: MRT4577_46903C.1
gatggttgtgcggcggacgaagtcgcagggaaaccaggaggaaggctagtgcagagaatcagagctgtctgggtgaaagggcaaaggcaagcagcagagggaggccattacgtgtctccttcctccaggtttctctctgggctgccatggatttgctcagcagaggggcagtgttcaaggccctggtgttcctctgcttcatcagatcgtctcaaggcaagcaggttccccaggttccaaagcgaggcatacgactacatcattgtcggcggcggcacggccgggtgcccgctggcggccacgctgtcccacaagtacaaggttctcctgctggagcgaggtgggtctccatacggcaaccgcaacatcacgttgctggagaacttccacatttgcctggccgacgtttcaccgcagtcaccgtcacaagctttcatctccacggatggcgtgataaatgcccgcgcaaatgtcctgggtggcggaacatgtatcaacgccggcttctacagccgggcgaaaccaagcttcgtccagcaagcaggctgggacgcagagctggtgaaccagtcctacccctgggtcgaagagaggatcgtccactggcccaaagtggcgccatggcaggctgcgctccgggacgggcttctggaaacaggggtgtcaccatacaacgggtattcctatgaccacctctacgggactaaagtcggcggcaccatatttcacgacaccggggggccggacccggctggcgacctccttgctgctgcaaccctatatccctccggttgttg

SEQ ID NO: 126575 - DNA, 2457 bp, Zea mays
  Clone ID: MRT4577_46904C.1
ttgggtacctcgaggccggccggggatggttgtgcggccgccgaagtcgcagggaaaccaggaggaaggctagtgcagagaatcagagctgtctgggtgaaagggcaaaggcaagcagcagagggaggccattacgtgtctccttcctccaggttcctctctgggctgccatggatttgctcagcagaggggcggcggtgttcaaggccctggtgttcctctgcttcatcagatcgtctcaaggaggagatctgaatctccctcccttggtgaaggcaagcaggttccccaggttccaaagcgaggcatacgactacatcattgtcggcggcggcacggccgggtgcccgctggcggccacgctgtcccacaagtacaaggttctcctgctggagcgaggtgggtctccatatggcaaccgcaacatcacgttgctggagaacttccacatttgcctggccgacgtttcaccgcagtcaccgtcacaagctttcatctccacggatggcgtgataaatgcccgcgcaaatgtcctgggtggcggaacatgtatcaacgccggcttctacagccgggcgaatccaagcttcgtgcagcaagcaggctgggacgcagagctggtgaaccagtcctacccttgggtcgaagagaggatcgtccactggcccaaagtggcgccatggcaggcctgcgctccgggacgggcttctggaagcaggggtctcaccatacaacgggtattcctatgaccacctctacgggactaaagtcgggggcaccatattcgacgacaccgggcgccggcacacggctgccgacctccttgctgctggaaaccctagcaacctccgggtgctgctccatgctaccgtcgacaagattctcctcgcaaggaagcacggcggggggaggaagcagccgagggctactggagttcggttcagagacgagaacggagcgcaccaccaggccttcctcacaaggaagaggggtagcgacgtcattgtttccgccggcgcaattggcagcccacagctactgctgctcagcgggatcgggccgaggggtcaactcagcaggcacaacgtttctctagtgcacgccaacgaacacgtgggggaagggatgtcggacaatccgatgaactccatcttcgtgcctatgaagagccccacggagcagtccttgattgaaactgtcgggataacggacgctggggtgtttattgaggccagcagtggtttcagccagtccgacgatagcatccattgccaccacggaatcatgtctgccgcgcgcgtccagatatctacaattccaccaaagcaaagaagtcttgatcaaatccaagagtacgtgcgtaacaaacatagcctgcccaaagaagtgtttgacggaggattcattcttgagaagatcgatggcccactgtcgaccggcagtctggtgcttgcggacaccgacatcgatagcaaccccagcgtgagcttcaactacttccagcatccacaggacctcaggcgctgcgtctacgggattcagacgatcgagaggatactcaagacaaaccacttcgccaaccttaccgccaacggtgccgggtacccgatggaaacgctgctcaatctgagcgtgtcggctaacataaacctgatacccaagcacacagatgacaccacgtccttggagcagttctgcagggacacggtgacaaccatctggcactaccatgggggatgccatgtaggcaaggtggtggatcgacactaccgggtgattggcatctccggcctccgtgtgatagatggatcaaccttgttcagttcaccaggaacgaatccacaggccacggtcctaatgatgggcagatacatgggggtgaagattctaagggaaagattaggacgagcagctggagtataatggactttatccagctcatcaagtatgaatgtgacttaggaggagacaagtatatagtgatttttgaaagcgattcattaaatcgccaaagaaacaaaacaaaattaagcaaggggttccatttgtcacagtgcgtgccccacacgtcaaaattaagcaaccgtttgacttttttggttcaactgggaattccttaagtaagcataagtttaaccagttataagaaaagacgagcaacctatttcaacaccagatcgatgacgtgtgctcaaagtcaaagggtactttcgcaagcaaatcatatcagtttaagacatgtaagctagaaacaagatacctaatttatttaatcaggcagccgcgtgcacagaagatggtccctagctagtccgcacttcagaattgtgtcactcttttttttttacaaattacacggcacaatacagatgttcacaggacgactggactgactgttgaacacctatttggcaggcccgacggacggcccggtataatagtcacagtgcgtgcccc

SEQ ID NO: 126576 - DNA, 1015 bp, Zea mays
  Clone ID: MRT4577_46905C.1
cgaccgactctcggcaacggatatctcggctctcgcatcgatgaagaacgtagcaaaatgcgatacttggtgtgaattgcagaatcccgcgaaccatcgagtttttgaacgcaagttgcgcccgaagccttctgccggagggtcccgcggcccgggccgggccgggatcccacttccgcccaaatccaccaccgccataccagcgtgtccgcgattccgtcgagtagactgggcgagagagtagtctcggacgagaagaggcgaatatgagttccggcggcggcaggggcaagcccaaggggtccaaggctgtgtcgcggtcgaccaaggccgggctgcagttccccgtcggccgcatcgcgcgctacctcaaggccggcaagtacgccgagcgcgtcggcggtggtgcgcccgtctacctctccgccgtcctcgagtatctcgcggcagaggtgttggaactggcgggcaacgcggcgcgcgacaacaagaagaaccgcatcgtgccgcgtcacatccagctcgccgtgcgcaacgacgaggaactcagcaagctgctcggagctgtcaccatcgccgccggaggtgtgttgcccaacattcatcagacgctgctgcccaagaaggccggtgggaagggcaaggccgacatcggttccgcatcccaggagttctaagcggccgcggcggcggttgcaggtttctctgacttgttcgaactggagctccaacatgcatgaagtccccccgtcgctcaagtttcgtcgattagtagtgttagggtgttttctatctttggttaggtttaggttgtctgatggatggtttatcagacgaaagtttggtgatcgagggcttcctgtatgtatcaatcaatcttgctggaatggaacaaatcgttggttgcagtaaaaaaaaaaaaaaaaaaagcaccaaaaaaaaaaaaaaaggcccctaactgctattttgtttttaccagttgaagttgctactgattgtgatctgtggatgcttg

SEQ ID NO: 126577 - DNA, 836 bp, Zea mays
  unsure (1)..(836): unsure at all n locations
  Clone ID: MRT4577_46906C.1
ccggccggaactaacaactacctaagtcaaagtaaaccaccggtcaaacacttacacaaaaacatcaccacggcagaccaagaaccatcgtcccaaaaattctccatcccagcctctgaagctcaacgcctcgtgcaagatatcctcaaaggaaacgggatcccttcagaaaatgcgtccatcatctcccgttgcctcatagcagccgacttgcgcggtgtagatacccacggcatgaaccgtataccctcatacatggaacgcatccgccaaggcgttctcagcgccacagcccagcccatcctaacccaagtaactcccgccgtcgctcaagtcgacggtcaaaacggcttcggttttgtagccgcccataaaggaatggctgctgctatcgagtctgcgcgcatctttggtatcggaatggcaagcatcaagcactctaatcactttggcatgagtgcttggatcgtccagcaggctcttgatgccgacatgatgagtcttgtctttacaaactcaagtccagctcttcctgctttcggtggcaaaagtaaactcatgggtgtttcgcctatcgcttgtggtgcgccgggtaaaggccccatggagaacttcatcctcgacatggcaccctctgtggcagcgcgaggaaagatttacaaagcaaaacgacgaggcgaaaagattcccttggactgngctctcgattcagatggacgaccaacagatgatcccgaagctgcccttggcggcgtcatgctacccatgggcggccccaagggtctgcactgtcataatgatggatgtctttcagggagtctatcccggtctgcatt

SEQ ID NO: 126578 - DNA, 178 bp, Zea mays
  Clone ID: MRT4577_46907C.1
aatacggagggaagcaagggggcataagttagaacacccagttcagtcctaagagctgcccggaaacaaacttatttttagcataaagacaatatcgaccctgccagggttaagagcaaaacattttctgggggaaattacacacaatctccttctatgctccaaagcaaaacaactt

SEQ ID NO: 126579 - DNA, 322 bp, Zea mays
  Clone ID: MRT4577_46908C.1
gtgacaaaagcccacagatacttctccctactcctccagtccttcgtcatccgtttgccgcgctgcctccgccaccgtgcaaaaagctacctcctgcctgaaccgccccgacatggcgatgctatcccgcgcagcctcctccgcgggccggcgcccgctggtgccgccgtctatgcttttggcggtgagggcgaaggtcattgttctttttggccacatcgagcctgagcccaatgaccccatccttagcagtgaccaggcttttctcgccgaccccttcatcgacaaaaagaacgacgtgcgcggcgcctaccgggacgac

SEQ ID NO: 126580 - DNA, 277 bp, Zea mays
  Clone ID: MRT4577_46909C.1
tttttgaagcattaaaagcgtactttgttttttttttgacagggcaaaaaaaacaggcagaggtcttattgtggttttagaatgaacaactcacggggaatgggttcttattagcccacaaatcaaagagtttttaaatgggaacccacggggtggggcacatcaagaaaaataaatatcttacccctcacgtgaccctatcggagggagggcccagccccttttttttgaaaaaaattgggattggaagaaccctacccgggaacgagaatggggt

SEQ ID NO: 126581 - DNA, 293 bp, Zea mays
  unsure (1)..(293): unsure at all n locations
  Clone ID: MRT4577_4690C.1
cctaggggatgttcttattagctgtagacgcatgcggtgttgagaattgaccgtgacatgatgcaagatgacgctaccgctgaagcgaagagagactgcgagctcaagaagcttttggatgagatcccccaccacaattccgcgaagacgactaaactctacaccgacaaggacgaagacacagacaacctgcaagtactanancactcaggatgcttctcgcacagaaaagcccaatcataaagaactggaagcacggaaaacagaaatagatggacatctatggcagagaa

SEQ ID NO: 126582 - DNA, 260 bp, Zea mays
  Clone ID: MRT4577_46910C.1
aaaaattctacattaattgaacaaatacccagctggcttaaccacacctacggcagacacctgttgcctggcagagagaagcgccgtgggttcagaacttgactctggacggaggtgtgagactctgggttcaagacacctcgcagggaagtaatcgccgcatggaggggcttactcttcaggaccctccccactcccgagacgacaagcccccatctaggggcggttcgcagtcctcggaccgggggtctctgactgac

SEQ ID NO: 126583 - DNA, 830 bp, Zea mays
  Clone ID: MRT4577_46911C.1
ctgcactaacgaccacagcgaaacgaaatggtggccaaacaagaggacacgaagcccaccacccagaagttctccaagggggagaggtcgataccgcaccactcgcagaaggccagcaagtactaccctgctgaggacgttgctgtccccaagaaggcccgcaagtctgtccgccctgcgaaggttcgcgagtccctccagcccggtaccgtcgtcatcctccttgctggtcgcttccgcggcaagcgcgtcgttgtcctcaagcacctctcccagggtgtcctccttgttaccggtcccttcaaagtcaacggtgttccccttcgacgagtaaacgcccgatatgtcattgccacctccaccaaggtcgacctgaagggcgtagacgagaaggttatcgagaaggctagccaggacggttacttcaccaaggacaaggccgcccacaagcctggtgaggatgcgttcttcaagcagggcgagaagcccgagaagaaggagacctccaaggaccgcgtcgaggaccagaaggccgtcgacaaggctcttctggccaccatcaagaaggaggctcacctcgccgactacctcggtgccagcttcagcctccgtagctcagacaggcctcaccagatggtcttctaagcgacggataacgatcgggcattcggcgttcagtgcatgggatgaaagatgacttcggcatactgcagccgtactagcgaggaacaagaacgcagcggcacggcagccaatttttttcatggaagataccgacaaggcatttaccataagactttataacaagcaagcgaatccgagacggtccc

SEQ ID NO: 126584 - DNA, 281 bp, Zea mays
  Clone ID: MRT4577_46912C.1
gatagcaagcgtgccaacagtctaaacgcgggtatgatgtgcacagaaatgacacaagttcatcatgtccaaggtgaattgacggcagaatgccagggacatatcataatggcgtgttctttgggaaagggccggataaccatgcggaagactgtgaacaatgcgaacagccagaacctgggggggggggggtgcgggcccaacaggctaaagtgcctatgacctttgttcatacaaaaatgaagatagctcacgatgatgatatcaaggtagtactgtgt

SEQ ID NO: 126585 - DNA, 270 bp, Zea mays
  Clone ID: MRT4577_46913C.1
ctttataactgggtatactgaaatgtcgcaggaccccactacacactgatgtctttggaggtttctatttgacatgtccaaaccatctcaaccgatattggacaagcttttcttcaattggtgctacctctatcctatcacgtcaatattctacaccgtacaacatagcagggctaacatcttcatcaatatacacgtctttgagcattgatcctaaataatgacagcatcgccaagaaggaaaagggagctcattcctaaagatgaagt

SEQ ID NO: 126586 - DNA, 226 bp, Zea mays
  Clone ID: MRT4577_46914C.1
ggcgcctttttttttttttttttttttttttttttttttttttttttttttttttttttttttttttttttgggtcctacaacactttagtgacttggctttaatttcatgctgtccccaactgttcatttataggggacacatgaactatccctacttaccctttccccatttattgctgggttaagtttttataatccgacattcacaaagaggtgtaaaatgc

SEQ ID NO: 126587 - DNA, 167 bp, Zea mays
  Clone ID: MRT4577_46915C.1
atctatatcactacaggtccagccattccattcatatcacaaatatatctttggcagcgcatacaatctttagtcttaaagaaaaaaaaaccatcaacgtgaatgtacaataaagcacagcaggcgcgccttacaacatgaatggtaactaaacccacgcgttcgct

SEQ ID NO: 126588 - DNA, 241 bp, Zea mays
  Clone ID: MRT4577_46916C.1
cggacgcgtggttgttaaatgtcatgggggggaaaaacccaacttggtgaactcccagctaaacaaccaagacttcactgaagatatattccaattctagaattgttcttttttatttttattttttcaactgactaacttcattaccttaaagcctagaacattattctgctttatttatatggctttctcacttttatgttgtagcatgggttgcatcgacttttttactagagaattt

SEQ ID NO: 126589 - DNA, 690 bp, Zea mays
  Clone ID: MRT4577_46917C.1
cctcgaggccggccgggaaaatgatcgattcaactgtttcactcgctgcattcctcttgctgctgggctctttcgctgtggcagaaggtctacacacgacgcctcacatacagaggtctcatctggcatttgctccctgccactaccaccgccggctgaaacgtacccctcccgtgcctgcgcgccgagccggccctctgcgactgctcgagcgacgacgagatcaagacaaggaaaacacgcatccgttcgctcaactcgtggcccctcagcaacacttcatgctccagggagaagaactctgacgcctacatatatggaataccaccatgtcatgctaaagctggatatcgtggaactaccgagagagcacatggtataggtagctcgataggacatcatgagatctcaggtactctatcatccaccattgcaagacgtatcaggtgaaacagtgctactacttacactcgcagcggatacatgccaacttctgcaattgtaggctgtgcaccattgggttgctggttcgtagatatgagaggtcaccaaagcttgataggacgcactccagaacgactgcatccatctcacaagaaactattgaccagacttccgaagagaattccagagagaatcattgagaatgaggccttctggcatgctccgcaaggcaagcatgacaacaag

SEQ ID NO: 126590 - DNA, 378 bp, Zea mays
  Clone ID: MRT4577_46918C.1
tgtaataatgtaatggagccgctggctagctacctagctcgctagtttactcatttagcggcgatgagtaacgtagtgtcacccatcaccatgggtggcagtgtgagcaatgaccctgaatgaaccattgcaaatcctaaggggggggagatacggaaaaaagattattgggaaataaataaaactggcgggcgctcgagcctgcctgggggggggccaaatccctatataggggggtattttacaggcgaatgcccgtccattgacagccgttcgactgggaaaccccttcggttccccacattgaatgagcttggggcatatcccctttcttggggaaagtggtatacggtaaaggcccccacaaaatgccattcc

SEQ ID NO: 126591 - DNA, 641 bp, Zea mays
  Clone ID: MRT4577_46919C.1
ttgggtacctcgaggccggccgggacgaccttcatccaaccttctaccagagactcacgcgagtcgatagcagcacacactcagttagctaggagtatcaggagggggggcggcgatggagtgctacatgatctcctcggcagctctggcggtggtgcctctcgggctggcgcccctcgtccgctgctcctccttctttgccgtagattgctccaagaagaagatcaaaaccgacaagccctacggtgattgagggtggcctgatcgtctacgtccacgccaacgggagaaagggaagggcaatgctgaggaccagttcgtctacaagtacggagccaacgtcgacggatacatcccaatctacaaccaggtatgtatggtatcccaccggcgacgtctacatctgtggaactcactgggcttctgatctgggccgtcaccctcgctgggatcctcggcggcggtgtcctcctcatctacaacaccagcgccctctccgacttaaagatatccaatgcatgcgcttcttgctattccccgtgtaaaatcacggtgtctgtctataatctaacctccatggatgctcaaccttcaccatgcaacaataatcagtgcacaaaaaaaacagaaaaaaagcgcgc

SEQ ID NO: 126592 - DNA, 513 bp, Zea mays
  Clone ID: MRT4577_4691C.1
tataggcaatgcgggcccgcctgcccgggccgacccacacttcccgggccgaccaacgcctttccggcatggccatgtttgtccgcggcctccgctgcgaccgcctcctcgcgggcgggccaactccctccactcagtcccgcccgctatcgcaagcccctgagagcgaacctccgccctccgctactcctacatccaagctcaaccccgggacactattggggaggaggccctgcgcatgttccttgacgagaggacgctgcacagcgaatgggtccccaaggtcgctcacctggtcatggacgaagcacggggccgatgatggtgccgttgatgcgaccacaggccacaggagcgcaccggatgtcgctcagcctgaacacatgcccgaagcaccgggggaccacggagtgctgaaaccaacagcaaatgaggcccgcccctccgcgcacaagcagccctcctataacgcagaggactactcctgaggagaggcgggacacaacacccacc

SEQ ID NO: 126593 - DNA, 457 bp, Zea mays
  Clone ID: MRT4577_46920C.1
gtgtaaaaatgtaggtggggggggtaggagggaaaaaaaaagagagggggagtaccggggggaaaagaagaccaaaaggggacccccaagaaaggggaaacaaaaggggggccccccggggggggaaaaagggaaggggaagggggaagggggccaagaccgcggggagggggaaaagggagaataaaccgccagggcatagaaagaagggacaaaaaccccaccgccagggaaggggcaccaaagaggcgaccgctagccatgtacccggagggggggaaaaaaaaacctagtggggggggagggaaaaaaaccccgggggggggggaaaaaatgggaacccggggagggggaaaaaaagggggggggggggggggggctaagtacgggggggcgccgggcggagcgcaaactggccccctggaccggggggctaaacctcgggggagaaaggggg

SEQ ID NO: 126594 - DNA, 819 bp, Zea mays
  Clone ID: MRT4577_46921C.1
ggcccgctcgagggccggccgggcccgggaacgaagcaccagaaaagaacaaaaataaaaaaaataagacgagagagccacccccatcgcctcgtctctcctctcctcgcagatctttcccggctccggccacaatgaactcctactccggcgaccggtcctcctcccgtcccaccacaacctccttcgactcctaccggtttgacttcggggccaacccctcccgctcctccacctcccgccccctccgcgaccagaggccaggcggcgccaccaacccttcaccgaggccaaccaccacaaacacatggtcacaccagccggtgaagacgtcctggactcatcagccatccccgtctgcggccgcggcgctcggatccgggcctgtgtccatggtcggcgacatctccggccggagctggtccgccacggcgccctcctccggcatcggcctccctcagtccaacaaccccaacctcttcagcgacctcctcgggccggcgcttggatccacccgagcccagtccaacgcgcccctcagatcagcagcggcccagccctccaagccttcaagcgctaatcctaggaccaacagctcttccttctcgatgggcggtatggcgagcacgctcccgaaaaccaccggggcaccgatagcttctggtagttatggggggttggtggccggccaatgaagccggcgggcatggcgccggcgaccgcgtcacagcccatggcgcagaagaaagatccgttcggctccatagatcccttcgcggcgaagcctgggtctatgaatgctgcaaagcaggcaggttc

SEQ ID NO: 126595 - DNA, 458 bp, Zea mays
  Clone ID: MRT4577_46922C.1
gtctttcggtaaccagcgagcttatcatcatcgcagctatagctagtcgcatttgcaagtctcaatccacatccacagggatcgctattagctttagccatggccaagagcgcagcatcgtcggtggttaggtgcttgcagctgctcaccgcggctgcggtgctggccgatgctgctgccggcggcgggctgccgacgagcttctacagcaagaagtgcccggacgtgcagagcatcgtgcgggccggggtggcgtccgccgtggcggcggagaagcagcatgggcgccttcatcctccgcatgttcttccacgactgcttcgtcaatggatgtgacgcgtccatcctgctggacgacacggcgaccttcaccggcgagaagaacgccgtgccgaacgccaactcggtgcgcgggtacgaggtcatcgacgccatcaaggtccgggtggaggcgttct

SEQ ID NO: 126596 - DNA, 1850 bp, Zea mays
  unsure (1)..(1850): unsure at all n locations
  Clone ID: MRT4577_46923C.1
ccggngtcgacccacgcccgtccgaggaaatgaatccgatagccaccgccgcccccacgccatcctcatttttcgcctcaaaccgccgcttcgcccctcgcctccgctccctcctccccgccgctggcatgtcttccgccgccgtatccgcctctgccccaagccccagctccggcactggggaacaggcgaaggcggccccgctcccgcactcgaccctcgagatcgcgggcgcccgccggggcctcctctcaggcttcgccagcctccgcgccccgtaccgtgccttccccgtactcgcgtcgaaccgacacgtcgagaccatcttcgctgcgctcacgcgatcgctccccgccgttaagctgcggcgcgagtgcctccgcgcccctgacgacggagccgtcgcgctcgactgggtctctggcgacgaccgcgtgcttccgaatgatgctccggtgcttatactcttgcctggtcttacaggtggaagtgatgatacatatgtaaggcatatgcttatgagagctagaagcaagggatggcgtgttgtggtgtttaatagccgtggatgtgcagatagtcctgtgactacacccaagttctattctgcttcatttacaggggatctccgccaagttattggtcatattttaggacgttatcctcagtccaatgtctatgctaccggttggtctcttggagcgaatattcttgtgcgctaccttggcgaggaaactgataaatgccctttatctggcgcggtctccttgtgcaatccttttaatttggtaattgcagatgaagatttccacaaaggatttaacaacgtttatgataaagcattggctagggctttgacgactatatttaagaagatgcccatgctctccttttcgaagggctggagggtgaatatgatgtacacaaggcagcgaatgcaagaactgttagagattttgatgaggggttaacccgagtttcatttggtttcaagtcagtggatgattattactccaattcaagcagctcggattctatcaaggatgtttgcatacccttactctgcatacagtgcgtacacgctgataatgacccaattgcaccatccaggggaattcctagagatgatatcaaggcaaataagaactgtctacttatagtaacaccacagggtggccatcttggatgggtagcaggcgacgaagctccattcggatgtccttggacagacccaatagtgatggaatatctagaacatctcgagaatgagaaggactctagtaccaaaaataacacatcctatgagggtgtttcagaggcatcagtatcccatctaactgtgcatggccaaagataataatatctctcttctcatatttctcattcgccacatatgttttatatggaaatagtttagtagagttcatttagccgtgttgtctgctggtgcctgctggtttgggtacatggctcttcgtctacaggtctacacatgtgcgagaagatttctgtgtcaaataagatgtctggttctgagatcaaaatagaacatgcgttgtccaattgttcgttcttaggggtttcactttcatccggtgtttgaaagggattctctgtaaatgcatgagctgttacggaattggcctttgtatccctcttctgcaacgcgtgaagttgatggcgatgagaacagcagtgcatcatgtaaatttgacaatgtcattgagggctaacaaacatctcgtgctaaacatcatcttggattaacatatgacaatgtgatgaaatagtaacagttgttgaaattttaaaaaaaaaaaaaaaaaaaaaaaacccgggggggggcccgg

SEQ ID NO: 126597 - DNA, 2008 bp, Zea mays
  Clone ID: MRT4577_46924C.1
ctcgaggccggccgggccgggatttttcgcctcaaccgcctcttcgcccctcgcctccgctccgtcctccccgccgctgccatgtcttacgccgccgtatccgcctccgccccaagccccagctccggcactggggaacaggcgaaggcggccccgctcccgcactcgaccctcgagatcgcgggcgcccgccggggcctcctctcaggcttcgccagcctccgcgccccgtaccgtgccttccccgtactcgcgtcgaaccgacacgtcgagaccatcttcgctgcgctcacgcgatcgctccccgccgttaagctgcggcgcgagtgcctccgcgcccctgacgacggagccgtcgcgctcgactgggtctctggcgacgaccgcgtgcttccgaatgatgctccggtgcttatactcttgcctggtcttacaggtggaagtgatgatacatatgtaaggcatatgcttatgagagctagaagcaagggatggcgtgttgtggtgtttaatagccgtggatgtgcagatagtcctgtgactacacccaagggaaaagtgctaagatctcatttatatggtttgattgattgggaagtgcactgcccacttttaagttaattatcagcaacagtagacacacccattttgttctgttctattctgcttcatttacaggggatctccgccaagttattggtcatattttaggacgttatcctcagtccaatgtctatgctaccggttggtctcttggagcgaatattcttgtgcgctaccttggcgaggaaactgataaatgccctttatctggcgcggtctctttgtgcaatccttttaatttggtaatggggtgtgaagatttccacaaaggatttaacaacgtttatgataaagcattggctagggctttgacgactatatttaagaaggatttgaacaaaatttaggcatgctctccttttcgaagggctggagggtgaatatgatgtacacaaggcagcgaatgcaagaactgttagagattttgatgaggggttaacccgaggtttgcagcaacgtctaacccaactgtactagctgtaatttctatagtttcctgttcacattccagaggacacttcaatggtttgcagtttcatttggtttcaagtcagtggatgattattactccaattcaagcagctcggattctatcaaggatgtttgcatacccttactctgcatacaggctgataatgacccaattgcaccatccaggggaattcctagagatgatatcaaggcaaataagaactgtctacttatagtaacaccacagggtggccatcttggatgggtagcaggcgaacactccattcagatgtccttggacagccaatagtgatggaatatctatgacatctcgagatgaactctagtaccaaaaattaacacatgagggtgtttcagaggcatcagtatcccatctaactgtgcatggccaaagataataatatctctcttctcatatttctcattcgccacatatgttttatatggaaatagtttagtagagttcatttagccgtgttgtctgctggtgcctgctggtttgggtacatggctcttcgtctacaggtctacacatgtgcgagaagatttctgtgtcaaataagatgtctggttctgagatcaaaatagaacatgcgttgtccaattgttcgttcttaggggtttcactttcatccggtgtttgaaagggattctctgtaaatgcatgagctgttacggaattggcctttgtatccttcttctgcaacgcgtgaagttgatggcgatgagaacagcagtgcatcatgtaaatttgacaatgtcattgagggcaaaaaaaaaaaaaaaaacccgaaaaatgtgttggaagagtttttgtgtgcgcatgctaacaaacatctcatgtgctaaacatcatcttggattagcatatgacaatgtgatgaaatagtaacagttgttgaaattttatatt

SEQ ID NO: 126598 - DNA, 654 bp, Zea mays
  Clone ID: MRT4577_46925C.1
ttattgggtacccgcggcccctccctcgagtttttttttttttttttttttttttttttttttttttttttttttttttttttttttttttttttttttttttaggggcgggccggactttactttttttaccccctggcaaaacttgctttgggaaaaaaaattgtcccgtcctccccaaaccaactaggccctcccttctttttactggggggggcggcccatatttcactccctccataacaaagggcaaattaaacggggggaacccccgcaaaacaagaacaacattccccaaccccaggtttttttatgggggggcctacctttaaaagagccggcgggcgttttaaataaccccagggcccagcaaacggggccttttaactggccatccatttcccccgatttaggggggggtgctccgggcctcgcccctgaaaaccccatctaaaacggggggggagttggcctgccccccgccaaaaaggttggcccccatccccttgggggccaggttgccccccggggggaaaacccttccccacactttgccgggcccgcgcggggttttcaacaacaacggggtccccggggttttgggggtccacggggtcaactgcccccgtttgtacctgcccccccccccgtttt

SEQ ID NO: 126599 - DNA, 213 bp, Zea mays
  Clone ID: MRT4577_46926C.1
ctcccctttctcttggacgcccccccctctcccatcttcttactcctgaaatgtttgcagccctcaccacccaaaaccttagtcgtgctcccatttcttcctctcctagaatgtgacagtatcaagttgggcactacggagagtggctgatatctgaattgtatatagcatacataaaaaaagaaggaagaatggaataaactaagggggggg

SEQ ID NO: 126600 - DNA, 850 bp, Zea mays
  Clone ID: MRT4577_46927C.1
cattgggtacctcgaggccggccgggctcactcactcaccgatccctcgccaagccacaggctccccgtgagctccgccacgcgggcgcctcgcctccctcgtcctactccttcctcaccgcagtccgcaggagcaatggcgatggcagccatagcctccccgtcgtcgaggaccctgatccctccgcggccgcgccaccacggcgccgcgccctccccgtccacctccggcgactcctcgctccgcctcctccgcgcacacccgcgccacggacggcgcggccgggcggtgtccgtctcgacgcccgcggcgcggagccggccgttcgtcttctccccgcgcgcggtgtccgactctaagagctcccagacctgcctcgaccccgacgccagcacgagtgttcttggaatcattctcggaggtggtgctgggactagattgtaccccttgacaaagaagcgtgccaagcctgcagtgccattgggtgccaactatagactgattgatatccctgtcagcaattgtctcaacagcaacatatccaagatctatgtgctaacacaattcaactctgcttccctcaaccgtcacctctcaagagcctacgggagcaacattggagggtacaagaatgaacggtttgcttgaagtcttagctgcacagcagagcccagataatccaaactggtttcagggtactgcagatgctgtaaggcagtactttgtggttatttgaggagcataatgtgatggagtttcttattcttgctggcgatcacctgtaccggatggattatgaaaagttcattcaggcacacagagaaacggatgctgatattactgttgctg

SEQ ID NO: 126601 - DNA, 159 bp, Zea mays
  Clone ID: MRT4577_46928C.1
ggcggagacatcgccgaggccgagcagcgagagcacggtttcttgtcggtcagctgcacactcttcggcagtcacactccctgcatatacttatatatcgcccctccttgacgtcgccatacccctctcctacgctttgttctgggctcttccaggctg

SEQ ID NO: 126602 - DNA, 325 bp, Zea mays
  Clone ID: MRT4577_46929C.1
gaagacatggcttgttgttcatgccacagacaggatcctaggctggctcgcattcaccatggccgtgcatatcaaggggatgaatgagcccccttacactcccagagtgcacacgggagctcttgcccttgctgtcaatgccgattaaggagctgcatctggtcaaaagcggccaccaaagccttattggaagcacctctgaaggcctgtaaggacgaatgaagaaacttttgacctacttctaaacaaattccatagagaatgacttgacataccgttcgtggcatgctccccatatgcaggcttgctaaaatattatttaccc

SEQ ID NO: 126603 - DNA, 334 bp, Zea mays
  Clone ID: MRT4577_4692C.1
gaagaactgttttttctatattaagggaggaaaggtcgtcccttttaattcacaacagggttttaacaggaccatgaccacacctatgggccaaaggtcgaaaaggaaagaaaattttttgatggctggaccagcacttgcctgccagagatacattagtcccatgggaagtagaggacagctttttgctttcgggccaaaaattccagcactccctgccatgtaaaacttttatgccagccctttcttgatccccggggaaaccttagaccaatggaaatccaagaacacatatttacctaagggtttaaaattcaaggcccagttgttttca

SEQ ID NO: 126604 - DNA, 186 bp, Zea mays
  Clone ID: MRT4577_46930C.1
ggcggcccgggctgtggcgagagctcatcgatctgtttagtgcaccctgaggtggatgaggaggatgagaagacagatcggccgaactgatggttccgactagacgcggaggctgcgccctactgaccgagaaataaccccggcaatctacgattttttttttgaagggggaggcgttagtaacaa

SEQ ID NO: 126605 - DNA, 326 bp, Zea mays
  Clone ID: MRT4577_46931C.1
aaacccaaaaacccccgggggacacattctacttatggtttaaaaggcagacaactttcaaaatccaaacgatactttaaaaggggaaccccctaaaaaaaacttttctttagtttattacaagggcgggaaaaaaaaaacttgaaaagcctacaaataataattagggcccaagaacctttcccaagtttaagaaaatacttctttcccttaccgttttacttgtaaccattggcaacaaccccggtattccttttccttttatttggcagggaaaaacccgccttgctttaaaaggtctcctttgcttttgggaacgcggaccc

SEQ ID NO: 126606 - DNA, 943 bp, Zea mays
  Clone ID: MRT4577_46932C.1
ggcacttgttgcattccttataagggatactatggtcctgcaatatcagccctgagtgcaactccaaatttcgttcctacacccccgcgtccgcccgcccgcccgggccgccggggttccggtgggtgcgccggggtttgcattgatcgcactggccggaatcttcttgtggtgtcagaaaaggagaaagctattgttagagctagaagaattgtataccatagttggaaggccaaatgtcttcagttacagtgagcttaggtcagctacagagaacttttgttctagtaacctacttggtgaaggaggatatggatcagtttacaagggtaagttgagtgatggaaaagtggtggcagtgaagcagctctctcagtcctctaaccagggaaagatgcagtttgcggcagaaatcgaaaccatttcccgagtgcagcaccgtaacctggtgaggttgtatggctgctgccttgagagaaaaacaccattgttggtctacgagtacctggagaatggaagcctcgatcatgcgttgtttggaaaggggagcttgaatctagactggccaacacgattcgagatatgtttgggcgtagcaagaggtatagcttatctccacgaggagtcaaccatccgcattgtgcacagggacataaaggccagtaacgtgttgatcgacgccgatcttaacccgaagatctccgatttcggccttgccaagctctacgacgacaagaagactcacgtcatcacaaatgttgctggcacgtttggttatctcgcgcctgagtacgctatgagagggcatatgactgagaaggttgatgtgttcgcgtttggcgtggtcgcgctggagattgtcgctggtgaatcaaactatcagaatgctctggacgaaggcacgacctatatctttgaaagggtgtgggaactgtacgagaac

SEQ ID NO: 126607 - DNA, 237 bp, Zea mays
  Clone ID: MRT4577_46933C.1
agctgcggtattatattcaccagaagctggacaccaacgggcgggggttgcatcatgtggtgcccgactagcagcaagtcatgtccttgatgaactaccgtctctacgtcgacgcctacgaccccgacggccgcaccgtgccctacattgacgtggtgtacgagcagttctggacccgcaccacccagattaacttcttcaacccggtgctctgagctccctgaaaccatactgaca

SEQ ID NO: 126608 - DNA, 546 bp, Zea mays
  Clone ID: MRT4577_46934C.1
gtcacacagccctcctaagtccagtttgggcattccacacctacggaaggagttgaaatacgctaatagactaagctgtccgcaaaccaaattattatccatgcttggctttggatcaaacagcacctaagccagacttggggccgattgtcttctatgcgacagaaagccagtacaacagcatatagacactgcctagatatcctccataagtatcgcgagcaagagttcttatcccctagtaatgacattagatatatagtgatgacggaactgggtacgagcatacaccagacgaatcaacaagaggcccctccctcggttaaaggaccagcccagatctctgcttgctttgttcttcacgaggcccatgccaagtacgagcagattgcgcgccctgggttggaccacttgccgcacccgaacaagtaacacctctgtatgcgatccgggttgcagcacgatactccacgcgtaaacagcgcttatgtacggctcatggatgttgccttcgctaacgaggacggggcgttcgaagagctcacc

SEQ ID NO: 126609 - DNA, 245 bp, Zea mays
  Clone ID: MRT4577_46935C.1
gctacttacagctgtgtcatgatcatcaacgtgtcatatgtgttgaactgggaaggctgccttcatgtcttcaagaaatggataagagctcaataataacaagtggtctgcttcagtaaaactttggttgaatctcagactggctcattaagcattgtgttagctatgcattatggtgaaactgtctgctgaaaacgagcatgtggatcaaattgcacactgctacatgacactttttttttcta

SEQ ID NO: 126610 - DNA, 1516 bp, Zea mays
  Clone ID: MRT4577_46936C.1
attgggtacctcgagggggggggccagcccctgccgttttcttctcccgtagtcccgtcccaccggcccccctccgccgcctccacacgccaggtgtagcctcgtcgatcccttcgccggcgaagagcccctactaggattcaagatgggtcatcgtaggaattattctgacgacgaattttcagttgctagcgagaagccagaagtagaattcatggacttccagaacggtgacacttttcaggattattcatctgaagatacccctgtgctcgtctcagctcctttccctttcgagcatggaaaaccaaaatctgtacttgttggagaaacatcggctgatactattcagattgagaatacctctcctgaacctgtaaatttgtggagtgtaagaattttctcctcaaatccagaagacagctacgtgttatcgatgatgagacctccatcaaatggtgctagcgaagaggaaaagcaggcttttcttgctttgacatcggtggaagaccgtacacttcggcctggacaaaccctcacagtttggctgtcttgtacgccaaaagatattggtttgcatacatcaatcgtgcatgttgatatcggcaatgagaagattgagcgtgtggcttttcttttggcagatgacaatgtctccaagtcattattttctgataagccttattctaggagacgtgttcaagttaagaaatttgagccttcaccatttgtgccaggttgccgtccaactcagcagcatgttcaaggatacaaacataagcttcctcagtatgcaatacctgcacatatccgtgagctcattgaaagtaaacagacacctgatgtcctatatgatgagttgagcatggtaaactatgcagaatatttcagcactcttctagtcatggaagaactcaatttggaggaggagatgagaacatatgacatggagggtgtcttaatgagaaggaggggtatgcattttttgtctcttgaggtccctggtttggcagaaaaaaggccatcactagtccaaggagacttcgtagttgctagatatgctgggaatcatgctcaggcttaccaaggtttcattcacagggttgaagctgatgagatatttttacaatttgaccatcagtttcacatgaatcatcatgatagaaaccggtaccatgttagcttcacatataacagagtgaacatgagaaggctttacaagtcaattgacgatgcaaaatatttgggacctggcattttgtttcctcgccaatcaccttgtagagttttgaaaaggtggccgtttaatcctctgaatccacatataaatactgagcaagctgatgctgttgcaatggtacttgcctgcagaggaggttcaccatatgtgatatatggacctccattaactggcaagatcatgaccattgtagaattcgttttgcagttttacacgggaaagaaggggcaaatttctcatttgtgctgcttccatactgcagctgatcatgtactg

SEQ ID NO: 126611 - DNA, 357 bp, Zea mays
  Clone ID: MRT4577_46937C.1
ggttcctctagctggatattttttcttttgttttgtgtcactagaccagagaagacggatccgtatacgaccgcccgcccgctcatcaggcggtgacgatgccggaggtgaaaaagatctggccgacggcgacgacgacggtgcacggggacccggtcatctacggggacgaagtccgggacacggcggcgcggagcttgcgctacttctcctgctggaactcgtcggtcaccatggcgtggtaccggcactgcatgctggagaaggctttctacccgcggtacatgaagatgttcctcccgttcagagcccggcgggacatgttgcatcacgacaggaactccccgacgcggaacg

SEQ ID NO: 126612 - DNA, 1204 bp, Zea mays
  Clone ID: MRT4577_46938C.1
ttggtaccctcgaggccggccgggaacccgggtgccttcacgcttgacaggcacccatcccacgccacgggctcctcctcccctccgcttctcctctaggtccctctcctgacagaaccctcccaatccaaagcgattcctccgggccgccgcggcggcgtctccccgggcgcccctagcacagctcgcgttccggtggaacagagaagagaggcgagaggatggagatccagtcgtctggccgctccatcgaggggctgatggagaaggtgctgtccgtgaacatcctctcctcggactacttcaaggagctcttcaagtacaagacctaccacgaggtcgtcgacgagatctacaaccaggtggaccacgtcgagccctggatgaccggcaactgccgcgggccctcctccgccttctgcctcctctacaagttattcaccatgaagctcaccgtcaagcagatgcacggcctgctcaagcaccaggactccccctacatcagagctattggattcctctacctacgatacgttgcagaaccgaagacactttggacttggtatgaaccctatatcaaggatgacgaggagtttgcacctggatcaaatcgtaaagtgactacaatgggcgtttatgtgcgtgatctcctccttggtcagtactatttcgacagtctccttccacgagtgcctctcccaatcctccgacaggtcactagccaccttgagaagctaaagcttccaacaaagcagtcaggaatgactggggattccaacaggcttgaatcaaatgataccgccagaaggcctccttccgtaaaggcttctttgtctgtctcctttggtcagcgcgctccacaccgtgcatccacaagggattcttccccggtccgaagaacgttaccttccaaacaggacaaggaaggtgaccgtgcgaaatccccaccgatgaagcaccggagtcggggctctgagcgtgatcatgatttggagagggagcgctcggatcgtgaacgtggcagtggcaggtactacaaggatagggagcctgatcggcatgctcgtgagcacagagaccgcgatcatcgtcggtctgattattcggacagggatggcgaaacacgaggccgtgaaaggagggacagggattctgaccggagtagacatgcaagcgtccgcaggagcaggagcaggaagtcagt

SEQ ID NO: 126613 - DNA, 542 bp, Zea mays
  unsure (1)..(542): unsure at all n locations
  Clone ID: MRT4577_46939C.1
cccagcgtccgcccagcgtccngactacgatacgttgcagaaccgaagacactttggacttggtatgaaccctatatcaaggatgacgaggagtttgcacctggatcaaatcgtaaagtgactacaatgggcgtttatgtgcgtgatctcctccttggtcagttgcttttaagaggagacatcatctcttccgccagtaacatcactgtataagtactatttcgacagtctccttccacgagtgcctctcccaatcctccgacaggtcactagccaccttgagaagctaaagcttccaacaaagcagtcaggaatgactggggattccaacaggcttgaatcaaatgataccgccagaaggcctccttccgtaaaggcttctttgtctgtctcctttggtcagcgcgctccacaccgtgcatccacaagggattcttccccggtccgaagaacgttaccttccaaacaggacaaggaaggtgaccgtgcgaaatcgccaccgatgaagcaccggagtcggagctctgagcgtgatcatgatt

SEQ ID NO: 126614 - DNA, 906 bp, Zea mays
  Clone ID: MRT4577_4693C.1
ctccagtttgaactatggcacagtgcctggaagacactccatgtcagaagagcggcagagttatttgaaaagattaggttacccagaattgcactcttcaaatttctttgaccttgatttgttgtcatcttcaggaaattcgtttgacgaggaagtttttgagaggtcattactgatcaattcacctatggatgtgatcagtcctgaatcatctatgtcatacagtgaacaaggacacactgatgagggaagggatgacacggatctttcccgttctagcagccagctatcagacattcgggactactctgaccactttgcgcagtgggtcgtgaatggaggcacgctttgctactaggccctggacttttgtcttggtgacagctcagtagatgtgacacggcaggaaatggaagtctgacggatagagcagatgaaatggctaacgactagctgggctaggtgccgtgcatctacctgcagaggcggcgtagcagaagagggagaagtctcgcatcggcatgcttgtggtcactggaaggcttgaacgatgaacgctgatattcgtcggatgcagctttcggtggggtacatgattcaatttgctatggtgaaaaatttgaccgtagcttagacaataaataggcaaaatatatctgttcttttagtttagcttaccttgcgtttcccttctccatagaaaagtatcaaaaggaaaaacaatggaaaatctattaggaaaaggaaaaaacaaacaaaccataggtaaagaacacttctgttgtaaatagttagtttgctacagaagtataaatatctggtacttgttgggtttcttggcggtgtctgtttcataattgtttctgtgaaaaagctgaaagaaactcggtatgtcttttaatatgc

SEQ ID NO: 126615 - DNA, 1996 bp, Zea mays
  unsure (1)..(1996): unsure at all n locations
  Clone ID: MRT4577_46940C.1
gggaccctcgaggccggccggggactgggtacgatccgtatgtagatcgtccagccgacggctctgatgtgactgagcagtgagcacaggcgcgtcaacccgggtgccttcacgcttgacaggcacccatcccacgccacgggctcctcctcccctccgcttctcctctaggtccctctcctacagaacccttccaatccaaagcgaatcctccgggccgccgcggcggcgtctccccgggcgcccctagcacagctcgcgttccggtggaacagagaagagaggcgagaggatggagatccagtcgtctggccgctccatcgaggggctgatggagaaggtgctgtccgtgaacatcctctcctcggactacttcaaggagctcttcaagtacaagacctaccacgaggtcgtcgacgagatctacaaccaggtggaccacgtcgagccctggatgaccggcaactgccgcgggccctcctccgccttctgcctcctctacaagttattcaccatgaagctcaccgtcaagcagatgcacggcctgctcaagcaccaggactccccctacatcagagctattggattcctctacctacgatacgttgcagaaccgaagacactttggacttggtatgaaccctatatcaaggatgacgaggagtttgcacctggatcaaatcgtaaagtgactacaatgggcgtttatgtgcgtgatctcctccttggtcaggtatatctcttgaagtatttcacaattatcaataaaaaaacagtatcctgagctgctatcacagtgtctccttagttatccaactacatccgagggcagagaccgttaaccatattattttctgaacttaaatgcaattagtcttccttgaatcactccctgttgatttggcatactgaggggatgtttcaattgtggagttgcttttaagaggagacatcatctcttccgccagtaacatcactgtataagtactatttcgacagtctccttccacgagtgcctctcccaatcctccgacaggtcactagccaccttgagaagctaaagcttccaacaaagcagtcaggaatgactggggattccaacaggcttgaatcaaatgataccgccagaaggcctccttccgtaaaggcttctttgtctgtctcctttggtcagcgcgctccacaccgtgcatccacaagggattcttccccggtccgaagaacgttaccttccaaacaggacaaggaaggtgaccgtgcgaaatcgccaccgatgaagcaccggagtcggagctctgagcgtgatcatgatttggagagggagcgctcggatcgtgaacgtggcagtggcaggtactacaaggatagggagcctgatcggcatgctcgtgagcacagagaccgcgatcatcgtcggtctgattattcgaacagggatggcgaaacacgaggccgtgaaaggagggacagggattctgaccggagtagacatgcaagcgtccgcaggagcaggagcaggagtccagtccgtggcagaagtgatggcgacaaacatcgctccagcccgtttggtagggctccagaattgtcgaacctggcgaagctgaaggatctgtacggcgatgcgacaaacgtgaagaatgatgctggcgacgatagggcgcacagggattctggaacggaagaggtgatccgactgggaggggcaaggtggaggtgagtctcatgttaagggacagtgggacaccacggtgatgcatttaggtccatgaatgaatccaaacagcatcagtggaggaaatgatgggctgtatgtcttaacttgaacctacgatttcaatgctttattctgaaggttttcctctcattatgaaaaaaaaaaaaaaaggacgcctgagctgctatcacagtgtctccttagttacccaactacattcgaggccagagatcgtntaccatatttattttctgaacttaaatgcaattagtcttcctt

SEQ ID NO: 126616 - DNA, 300 bp, Zea mays
  Clone ID: MRT4577_46941C.1
acgcgttgagtgcgagcggatgccctttatcgtgaggaggggttttactgacaaaatgggtgaacacaccaacaaaaggggagtgcatacgaaaagggcaaacaacgcaaaccaaagacaggtaccaagggcctcctgattcgggcacggaacaccaggtatcttgggggtaaagcaccaagcgatggcgtaaacgaagagggcattctctagtaaagcctcttggaaaacacaggcgcacacaccactaccttctcaatgataggagcaaaccttgcatgagagaggatgcaaagcaaa

SEQ ID NO: 126617 - DNA, 236 bp, Zea mays
  unsure (1)..(236): unsure at all n locations
  Clone ID: MRT4577_46942C.1
gccgggagacttttcaaacagaaggcggcggcggnttttcccccctgaccagagccagggcgagccactgccatgtcgccactgacaaaggcggcgccggcggcggcggcgccggagcttctcatctcttccgcatcggatacagggcgggccatgcctgcccctcagatctcaccacaggcctgcgccctgacttctcggtccgcgtatctccccctccccctcccggaccgcgc

SEQ ID NO: 126618 - DNA, 385 bp, Zea mays
  unsure (1)..(385): unsure at all n locations
  Clone ID: MRT4577_46943C.1
ngtcttcctgcaccatgccgccgcgcctgtccgaattgagtcagaataggatcgcctgtcaacaaaatccgcatgtcactgcccctaccgtggccggctactcctctctgtgcggacaacacgtgagccaaaaacctctgacatcatctccgacaaggagatcaaggagcgcctcaaccgcctcccctccgcctgtggcacaaacgtgcccatgaccatccgtagagaaggaaaagaccgacctcgggaagaaagtgatgctctgacgtcaccgagcgtcagcgcaagccgtgtgacttcactgacgatgattacatgtacttaccacatgatgttgtactgattgcgaatcccatggatgagatgaaagagctctgcaatcact

SEQ ID NO: 126619 - DNA, 1491 bp, Zea mays
  Clone ID: MRT4577_46944C.1
cattgggtacctcgagcggggccgggactaccacctgtcccgtcctcccgtcccagtcaacaccaccgtcagttcagctgagcctgagcatggcgtcgccggcggccgtgctcgtcagcaatggcggtatctccccacacgctccaccttccgccgccgccttcctcgtctccactccgggcgcctacaccaccgcccccggaaccctcctctggtggacacgtcacctccgccgcctcgccgaatccgccacgctcctcgcccgttcccgccccaacctgctcggcctccccctcccccgatcgcgcgccctcgacctcgatttactatccatccattctctcgtgaacccctccgtgcgggtcgccatccgcgagatgcgcacaaggctgcccatgaccaaggacgaggatttggcgctcacggccctggtcaggggagccgatcccatttctggcggtggcggggctggcctcgacgtcttcgtccacgtggggacgtattccccgccgatctttggagaatcgggggccaggcttgccgcggccggcaggggaagggacgccgctgccgccaagtacgcgtcctgggccaggatccggaagagtttggaaaagatgaggcctcctggggtcactgagctcttgctgactaatgacggggatcacattcttgaaggcgctgttacaaacttctttgttgtctgccaacaggaggaatgcgagagcaacggaaaattctctaatcaaacaatggctactaagtttgaagtgcaaacagcaccactgagtgacggagttctccctgggattatgcgtcagatagtgatcgaggtgtgccatgatattggaatcccagtacgagaggtctctccatcgtggtccatgaatgaattctggaaggaagcctttgttacaagtagcttaaggtttatccagcatgtagagtcagttcaagtgcctttattttgggaggacatacaatctaaaacctggagtgatgtaccttgggcggtgaagaagtttcagggtgttggatgcattaccacacagattcagagggaattactgaagagagcaagaagtgatgagtacggcgttaacggtctcctttgagttatgatcattgttgttgattcatttgaagggacttcttttccaggcacttaattatttcatttctgctgggacgacactgttaagactgggtttcttgtgtgtataattcagacattttttgtctgctcagtgctgtgtcggccttctacaagctgcagatagatagccactgagcagtagcgaagcaattccatgcttgtttattactgtaattatgaggatggatcagatttagctaactgtcggagtccttttttttacttgtacctgcaattaattgatctgatctgtttgccgggtaaaaaaaaaaaaaaaaaaaaaaaaaaaaaaaaaaaaaaaaaaaaaagaaaaaaaaaaaaaaaaaaggccccta

SEQ ID NO: 126620 - DNA, 225 bp, Zea mays
  Clone ID: MRT4577_46945C.1
gcccactgcttggatttgatgctagaggatattgggaagataaacgaattcaacacttgcattaatcatgcaaagaaggtgaccagatttgtatacaagcatggccgaattcttgatatgatgagaggtaagattggtggagatctagtgagacctgctgtgacccgttttgctacttcattcctcacattggcaagtatgcaaaagaataagcagggtcttaaa

SEQ ID NO: 126621 - DNA, 156 bp, Zea mays
  Clone ID: MRT4577_46946C.1
ataaaaccctttgaattaacgttactggtcatcccaaattatgagggtgttatttaattatacggtaacccaatctcggataaaactctcctctatcttctataaacccctcatcgtcgattattttatttttggccaaattattaggggtttaaa

SEQ ID NO: 126622 - DNA, 285 bp, Zea mays
  Clone ID: MRT4577_46947C.1
tggaacgttttcatccggcacctcctctgcattgggatggccaatgctgaccaggtgctgctcaccggctgctcctctgtcggtttggcgtgtgatactgcactgtgaccagctctccgccttcttcccgtccggcttcaccgtcgtcaagtgcatctccgactgcggcctgtacctttacgcgtgcgtacccctgtgcgctttgcttataaccttttttccttccttgctcgctccttgtgggcatgcaatgcaactgaactgacaacatgatctttgccacca

SEQ ID NO: 126623 - DNA, 251 bp, Zea mays
  Clone ID: MRT4577_46948C.1
cttctgccgctttttccgattccccctgtggggccctcactttatgttctaggtcgcccatcaaatttttccttgctttaaacatcttctttatcatcttatgagttcaaaaaataattggtatctaacttaaaactgaatgagaatttggttgttagcacattacattggttgagaaaatgatatcttgctactgcattttttaacccaaatgctatttcaattccttattataatgaaattcacaattt

SEQ ID NO: 126624 - DNA, 461 bp, Zea mays
  Clone ID: MRT4577_46949C.1
ctcgcgcgcacggggaacgacgccggtgagatggctcctccccgcacggtgatctgcgtgggtgacgtccacggctacatctccaagctggagagcctgtgggcgaacctccagtccgcgctccccgccgacgccttcgccgccgcgctcgtcatcttcctcggggactacaacgaccgcggcccggacacccgccgcgtcctcgacttcctcctcgcgctcccggcccgccacccggctcagcgccacgtcttcctctgcggcaaccacgacctcgccttcgccgccttcgtcggagcgctgccgccgccccccgacggttcccctttcgccgccacctgggaccaatacatcgacaatgaggcccacgagggctggttccgcgggccggggcacgaggatatgcacgtgcaggggaggagatggggcggcgtcatcaaggagaggtggaaccccaagaa

SEQ ID NO: 126625 - DNA, 370 bp, Zea mays
  unsure (1)..(370): unsure at all n locations
  Clone ID: MRT4577_4694C.1
cttaaaaaaaccggaaggggcacattttttattttggaaacacaacaaaaccctaaagaggggggcccgaccgaaattcgaccaaagaacaaacgtggccgaagggaaagcccactccccccgagttaaagggggttcggaacccaaaaaacccaaaacacccgcccacagggggggggacccaaattttgggcgcaaaaaaaagggcccaagggcccgtaaagaaaccaggggggccggggcccggggaatannccgggccttatccccccggagccaccagtgggggaagggcccccaaaggacaaattcaggccgggggaacgccggccggacaggcctgaacttactattaaccccaataaggggg

SEQ ID NO: 126626 - DNA, 365 bp, Zea mays
  Clone ID: MRT4577_46950C.1
cccggaggaacctaacccaaggttttttttcaagaaaagcccaggaatgctcatttccaaacaattaaatgtgtcgttacaagcaagcttgctaacacataggcactaaactttcgtgataaaagacacattactgaacaagcaaacaacccaaaacaggctgggtttattccattcaccgattgacagggcaaccgtttaaagcaaatggtttcataagggcagcgaccttttggacagacggccttttcattaaaccagaccaccaggcctttacatgcgggtgggcgttaagcacaaatgcgtagggcgtagcgaacaggcaaagagtgacaaacacatggttcaggtcggcaaggctgagg

SEQ ID NO: 126627 - DNA, 282 bp, Zea mays
  Clone ID: MRT4577_46951C.1
tctaccgaaaccgagagctagtgcttgattcggtcggatatgggcaccgggcgcgttattgggaccgccgtcgtctacctacttccagtcccagctgctcatgtctgcatcggtctaaagccctttgccggcgacgagcactcacaacaccagggtgttacaatgtcttcttcaatggaatctgtataccttactgatacaactgagtcatttacccaagctcaagaggctaaggatgcttcaaagttcattttaatcctttaccgagtaattcaggaccca

SEQ ID NO: 126628 - DNA, 656 bp, Zea mays
  Clone ID: MRT4577_46952C.1
gccgcgctacacacacgggtcccgctagcggctagttccaccaagcgatcccccctccaactctctacctaaaacccgcaaggaacacgatcgctacaggcctcggataatggcagctcggctcctacctcccacgagacagggcgcggcggcagcacctgacctcgaagatgttgttgctggccgacgaggccgactagcctcaccgtccgcggacgagctagcgggaggtgaccccgcagagccgccggccacaccaacactatgggcagcgcgtgggctcccatccgcgacgtgatggagcgaggatgcgcataccctgaacatccgcgtctccaacacggccaatgggctcgccatctgcaactgcctcaagaggatgaccgggcggatcgtgggggcggtcagcatggacaaccacgacaacatccccggtgagtgcggagactccgtcggggtgcccagtcattccgatccgtccactgtgccgagatacattgatctatgcatccatagcgtcaggagctcgatcgccgcatggcagcgcacgaggccatcaccaggatgcatgtgtcgtgggaccagagatgaccaacctacctgggagatcctgcctctgactggaccatgactacgaagcagatcgcgcccccact

SEQ ID NO: 126629 - DNA, 648 bp, Zea mays
  Clone ID: MRT4577_46953C.1
cattgggtacctcgaggccggccgggaagaggatgtcaatatagaataacatgaattgtgctggcgattctgttttatgcctaaaatgaacaacgaaaaaacagcaagaagtgtccaacgagagccacatcccgctctccacccgggcgggcgtgtactccgtttcgcgatgcgcaactctaatcatctcgagggcgtacgacgacggacggcatcccagcccccgaggcgcgcggataagagccctccgcttaacaagtacgacctcgcctgcgacgacctcgcttccatgaactctatcgtcctcgactacgatgtgatggtgatgaccggagcgcagctattcatgaactatgatgtcaagattcctgacgactagatcgaagatcctcgacggaatcatcagatatgtactcgctcgttggctcggtcgcgatggaccgaatgtccgattggttcggtgcggaggacaccatggtggctcgcggcgtcctatctgcttcgcgggtgagctcatcatgggactcgccccgaactacacaatcctcatgattgctcgcttccagatgaacagtcctgtcggatacaagataatgatcgcacccgcgtacacagctcgaggtctcgaccacgtacttgaataggcct

SEQ ID NO: 126630 - DNA, 1666 bp, Zea mays
  Clone ID: MRT4577_46954C.1
cccacgcgtccgcccacgcgtccgcccacgcgtccgcccacgcgtccaagatgggtaggagaagcagccagtttccgtcaatggcactggccatggccacggtgctgatggcactggccggggtagccgccacagcgcgcgccggcggcggcatcgccatctactggggccagaacggcaacgaggggacgctggcgcagacctgcgccacgggcaactacaggttcgtcaacgtggccttcctcccgacgttcggcaggggccagacgccggcgcttaacctggcgggccactgcgacccggcgagcggcgggtgcacgggcgtgggcgcggacgtcaaggcgtgccagcgcatgggcgtcaaggtcctgctctccatcggcgggggcgtcggcagctacgggctctcgtcccgggccgacgcccggagcgtcgcggcgtacctctgggacaactacctcggcggcggcggcggcgggtccgagtccaggcccctcggcgacgccgtcctcgacggcgtcgacttcgacatcgagagcggcgggggcatgtactgggacgacctggcccggttcctcaagtcctactcccggggcgcgggcgcgcgcggaggcccgtgtacctgtcggctgcgccgcagtgcccgttcccggacgcgtcgctgggcaccgcgctcgccacggggctgttcgactacgtgtgggtgcagttctacaacaacccgccgtgccagtacagcgcgagcgccggcgtgggcagcctggcgaaagcgtgggcgcagtggacgtccatcagggcggggcgggtgttcctcggcctccccgccgcgccccaggccgctggcagcgggttcgtgccggcgagcgacctcgtggcgcaggtgctgccggtggtcaagaactccaccaagtacgggggcatcatgctctggtccaggtactacgacgggctcacggggtacagcgacgcggtcaagtcctacgtgtgagctagccagcctcgtgtcatgtcgggcgtgcaggagggagtaggactgtaggaggcacatgcttccatgtgcgtgcacgtgcggggcgttatcatacctatgggtatactgggtcgctattcgctaaggaagagaccggaaagaagcaaatcgcaaatacagcttcttagcggtgtttgtttgggattataatccacttagattatataatcccataatttttgaactaagggcctgtttgtttacccccagattatataatctggagggaataattctaagaggcaaacaaacagtccagcttatttgcccaaaaaaaaaaaaaaaaaaaaaaaaaaaaaaaaaaaaaaaaaaaaaaaaaaaaaaaaaaaaaaaaaaaaaaaaaaaaaaaaaaaaaaaaaaaaaaaaaaaaagggggggggccccctttttttttttttttttttccccccaaaaatttaaaaaaattggaaaaattcccgttaaaaaaaaaaaaaaatttgttgggagagttttcctaagggccccttgggggacccccccttttgtttcccaaaggggggcccaaggggacccccaaaaataagcttttttttatataaccccccccccctaaaatgccaagggggttgggtctttaaaaaaaaaagggggacccaaaaaaaaaaggtttttttt

SEQ ID NO: 126631 - DNA, 172 bp, Zea mays
  Clone ID: MRT4577_46955C.1
tccaatccgaacacgctcttttgcctgggaaggatatgcgcgtcgtgtttagtttactgtggactgtggtctcgtttggcagaggttcactcttccagagctgattctctactaatgtaatttcaagtgattctctagtaaaagtaaatctatttgatgaaaaccgtttgac

SEQ ID NO: 126632 - DNA, 567 bp, Zea mays
  unsure (1)..(567): unsure at all n locations
  Clone ID: MRT4577_46956C.1
ccggccggagcagcagcagcagcacagtcatccacactaacgaacgaactcttgctccgatcacgagctagctgaggtcgacgatggcggctgtgctgaacagcaggaagacgccgcaggcggtggtggccgtgctggtggcggcggcgctgctggcttcgtccgcttcggcggcgatcacctgcgtcccggtggggtcctcctgctgctgctgcgcgtcttccgggggcccgtctccgggcggggccggggcctcctctgggggtccnccggctccccgttggttcccctctcggngttctctggccctattatcgcgntggnttctggtgcnncncccgncttggccgccttgcgcctcctnggctctaccgctacccngaaggaaattatggtggttgtgaaagtcctgtggcgagatccgcgtgagaagctctgtcaagttatccatgaccccccgttgagctgcttggctataggaagcaggggccttggcattctcaagagggtgctcttaggaagtgtccgcgattacgtcgtgaacaacgcagcctgcccctgtcccgt

SEQ ID NO: 126633 - DNA, 323 bp, Zea mays
  unsure (1)..(323): unsure at all n locations
  Clone ID: MRT4577_46957C.1
cctccgggggggggatgcaggcangcacgccacgccggcccaaccagaggngacaagaggaagcgcacgggcancaccagcaacgacgcggccccacgagccggccgccaccgcaacaggaaacagcacagcaaaggccgcaaaagccaggcaccagaggcagaggccacccagacggcgacccncgcggnggacgccccgccgcagnccgcccggaagaacccagacacacaggacgggaacaacccggaggagaccaaccaagcaggggccggcggcacaagggccgaacacgacagaaacagagggcacgaagccggagg

SEQ ID NO: 126634 - DNA, 246 bp, Zea mays
  unsure (1)..(246): unsure at all n locations
  Clone ID: MRT4577_46958C.1
atttatctaatacaaaccctatctnnattttcttctatttttatcctacaactattgttcttaaagaccattctatctcacattattctaacaaatctcacatacaatttatcacactatacctcaactattccaatcaattaactacatacatgtaaccaatgattagagtttacaatcatttcttctaccgaaaaaaaaaaaaaaaaaggcaccccctttaaaaaatccaaacttacttacact

SEQ ID NO: 126635 - DNA, 1936 bp, Zea mays
  unsure (1)..(1936): unsure at all n locations
  Clone ID: MRT4577_46959C.1
cattgggtacctcgaggccgggcgggattgcgggaactgaaagcaaaccaaaaaagaaagagagggggagagacacagaggcctcactccacacactgtcttgtctctcagtcccagagctttcttggatcgcgaggaatccactggaaattttgcaattgtagtagagaactgtatcgtccgacgaaggtgcatggtgttggccatgggtcacggcagggaacagagacgagcaggtcggcgctctccccccagctcattgatcctgtcctcgctataaggtagtcctgcggtggcctccgaatttcactcgatcgaacacgacatgaagcggccacgcggcgccagtccccctctggctgcgatgaccaatccgaacgatgatggttacggcgtggtcgggatggaggcggacgcagacgcggacgcggacgaggagatgatggcgtgcggcggcggcggggagaagaagcggcgcctgagctccgagcaggtgcgcgcgctggagcggagcttcgaggtggagaacaagctggagccggagcgcaaggcgcggctggcgcgcgacctcggcctgcagccgcgccaggtcgccgtctggttccagaaccgccgcgcccgctggaagaccaagcagctggagcgcgactactccgcgctccgccagtcctacgacgcgctgcggcacgaccacgacgcgctgcgccgcgacaaggacgccctcctcgccgagatcaaggagctcaaggcgaagctcggggacgaggaggcagcggcgagcttcacgtcggtcaaggcggagccggcggcctcggacgggcctccccccgtaggggtggggtcgtccgagagtgactccagcgcggtgctgaacgacgcggacccgcccgtggcggaggcgccggtgccggaggtacggggtactcttcttgacgcgcccggcgccgtggcggcgaaccatggcggcgtgttcttccacgggagtttcctgaaggtggaggaggacgagacggggctcctggacgacgatgagccctgcggcgggttcttctccgtggagcagccgccgccgatggcgtggtggaccgagcccacggaacactggaactgaaccgaggcggaggtagatgcagcgcagcgtagactcgggatctgggccgagcggtggaggaataaagaattcggagcgagaggcgggggcttttctgcaaattttgtaaaatggagttttacgtagccctctttcgtcaattctcgcgcgaatattttagcagtagcagtagtctttaggaacccagtcgagatcagtacctggttgcgtttggactcgaatgcaaaaacaaaaaaaatgcaagaaaaagagatgagaccaaacactgatgcagaaaggggagagagggacagtgggaagaggagtgtagaggaagagctgagcgaggtagggagtaaaggacaagctgtatgtcactgttagtgggcccagggccacgtgaaagtcaggcattgttggcgcccaattgaccgccggacttgtcagtgatgcggatcggcgacgtgaacgtgtctggccgtgcgctcccccaatggcctcttccgcggaagcgtggctctggctccttcgtcgacctgtcgtgcgtctctgtatctaattttggatgctcgccgacgccgctagatagctgtttggatgccgtgccgtgagaaatggcgatcgtttttgtgccctcttgctcgagcagatgcttgtccttgttataaaaaaaaaccctgcgaggtgttatataggctagtgtggggttctatctttttctccaataaatatgtagccctttataataactaatgaataaaagataacgcaagaaaaagattttctacctataaattnnnnnnnnnnnnnnnnnnnnnnnnnnnnnnnnnnnnnnggtctagagcg

SEQ ID NO: 126636 - DNA, 756 bp, Zea mays
  Clone ID: MRT4577_4695C.1
gccggccgggccgggccttccctcttctctctcccctcacctctctcctcccttccctcgcctcgctcctttctgtcccgaccgagcagcagccgcgagcggatgtcaagaatcactggcatgtcgtcatggcacgtcgtagccgcgagcgctccaggctccttgccagggccgcgagctcatcctcctcgtcgtccaccggtgggtacctcttcggcgctgtcacgtcggcgactagctcgctctgcttcggcttctccaagcttggtggtgccggcagcgccagcggaagcggcggcctgttcaagtcgctggtgcctgcacctcctacttcaccgttcaagaactttggcatagccactgcgagtaagggcttgctggggccgagtttcaaggcatcgggacggtacagctacagcggcaagcagccaacggcacctctctccatcatcttctcctctccaagagaagcgctaggcatggatatcagccaccatggccgccatgagcaccaccaaaaggattatcacgccagcgacatcgccgatgagccactgaagaagaaggacgtgtcgttctttgatttcctcggcgtcgggcgaactgcatgcggctgacaagtattcagggttagagttcatcgtcattgatggttacagtgttctgatcatcatgtgctgattcatcagtcaaataaggctccagacacatggctatttaatatttatttaaaagttttttttactagtctactca

SEQ ID NO: 126637 - DNA, 1961 bp, Zea mays
  unsure (1)..(1961): unsure at all n locations
  Clone ID: MRT4577_46960C.1
gggagagacacagaggcctcactccacacactgtcttgtctctcagtcccagagctttcttggatcgcgaggaatccactggaaattttgcaattgtagtagagaactgtatcgtccgacgaaggtgcatggtgttggccatgggtcacggcagggaacagagacgagcaggtcggcgctctccccccagctcattgatcctgtcctcgctataaggtagtcctgcggtggcctccgaatttcactcgatcgaacacgacatgaagcggccacgcggcgccagcccccctctggctgcgatgaccaatccgaacggtaacttccagcttctcctgttttgtttttcctgcgggaatccattgtatttgggggnggtgatgtcgtggcggaacgcgtgcggaggattgagtcctcttgcgtgttcccagatgatggttacggcgtggtcgggatggaggcggacgcggacgcggacgcggacgaggagatgatggcgtgcggcggcggcggggagaagaagcggcgcctgagctccgagcaggtgcgcgcgctggagcggagcttcgaggtggagaacaagctggagccggagcgcaaggcgcggctggcgcgcgacctcggcctgcagccgcgccaggtcgccgtctggttccagaaccgccgcgcccgctggaagaccaagcagctggagcgcgactactccgcgctccgncagtcctacgacgcgctgcggcacgaccacgacgcgctgcgccgcgacaaggacgccctcctcgccgaggtagttgtcgacgttatgccgttatacaagctgctggacgagcacgatgacgcgcgcaatggctgaccgccggcctgaccccctcggttggctgcctgaatttctcctagatcaaggagctcaaggcgaagctcggggacgaggaggcagcggcgagcttcacgtcggtcaaggcggagccggcggcctcggacgggcctccccccgtaggggtggggtcgtccgagagtgactccagcgcggtgctgaacgacgcggacccgcccgtggcggaggcgccggtgccggaggtaccggggtactcttcttgacgcgcctcggcgcccgtggcggcgaaccatggcggcgtgttcttccacgggagtttcctgaaggtggaggaggacgagacggggctcctggacgacgatgagccctgcggcgggttcttctccgtggagcagccgccgccgatggcgtggtggaccgagcccacggaacactggaactgaaccgaggcggaggtagatgcaggcatgcagcgcagcgtagactcgggatctgggccgagcggtggaggaataaagaattcggagcgagaggcgggggcttttctgcaaattttgtaaaatggagttttacgtagccctctttcgtcaaaaaaaaaaaattatatacgccgccatattcgcaagccaccgcaaccgaagccggccttcgccgccgcccccgcccccgccgcctctgcgatccccgcaaggtcgcaaacatgtctaccgtgctccagcgcccgacccccggcacggtccagtgcttcggccgcaagaagacggctgtggccgtcgcctacaccaagccggggcgcgggctgatcaaggtgaacggcgtcccgattgagctcatcaggccgcaactgctccgcctcagcacatacaaaccatcctgctggcagcgtgcaggttcaccaccaggggattgtttttataacaaggacaagcatctgctcgagcaagagggcacaaaaacgatcgccttttctcacggcacggcatccaaacagctttctagctcgagcagatgcttgtccttgttataaaaaaaaaccctgcgaggtgttatataggctagtgtggggttctatctttttctccaataaatatgtagccctttataataactaatgaataaaagataacgccag

SEQ ID NO: 126638 - DNA, 507 bp, Zea mays
  Clone ID: MRT4577_46961C.1
atctgaacgagtgcccgcacctgtgcgcgctgtcctacgattacctcaagaagacggagggctacgagcagaacctgctcgccttcttccacaacaagatgaacccggacgccctgctcgtgcagctcatcgaggagatggacaagtgcatcctcggctacttctccttccactggaaatatgcgacccacataatcacgcaggttctgacacacgagcagcctagaagaaagctcagaagaatggtaatggaggccactaggaagatgaggttcgagagggtgacgagagagctgaaggttaccaggctgttcaccacgctggtggaggagctcaaggccatcggtgtgcactgccagcacgaccacaaccgggcgggcacggacgtgatggacccggctgcgcacagcgaccgcagcccggggctgctcctgatgggcggtggcatgggtgctggcaagagcaccgtgctcaagcaaatcatgagggaggtgctctggactgagg

SEQ ID NO: 126639 - DNA, 683 bp, Zea mays
  Clone ID: MRT4577_46962C.1
cccctcctcgagtttttttttttttttttttttttttttttttttgggctcatctctttttcttgcatttttttttgcattcgagtccaaacgcaaccaggtactgatctcgactgggttcctaaagactactgctactgctaaaatattcgcgcgagaattgacgaaagagggctacgtaaaactccattttacaaaatttgcagaaaagcccccgcctctcgctccgaattctttattcctccaccgctcggcccagatcccgagtctacgctgcgctgcatctacctccgcctcggttcagttccagtgttccgtgggctcggtccaccacgccatcggcggcggctgctccacggagaagaacccgccgcagggctcatcgtcgtccaggagccccgtctcgtcctcctccaccttcaggaaactcccgtggaagaacacgccgccatggttcgccgccacggcgccgggcgcgtcaagaagagtaccccgtacctccggcaccggcgcctccgccacgggcgggtccgcgtcgttcagcaccgcgctggagtcactctcggacgaccccacccctacgggggggaggcccgtccgaggccgccggctccgccttgaccgacgtgaagctcgccgctgcctcctcgtccccgagcttcgccttgagccccttgatctcg

SEQ ID NO: 126640 - DNA, 373 bp, Zea mays
  Clone ID: MRT4577_46963C.1
caaccacaacacttccaaaaactcgatatacatcatgggtcttattgaaagcactcccgccaatgctgaaggtcaagctgcgaacagaggtggtttgatgatctcgcaaggaattatccctcctcaagatgagaacaaattcgcttctcttttgcaggaaactgatctcgatagcgcgaaaataaaggagatcatgaaagaggttggatcaaacaactacgacaagggcctcaacaaggctgagttcactagagtcgccgaagctttgggcttgttcgagaaggctaagactcacggattcaccaaggaaattttggctgatctgtacttcgacatgttcgattctgataaggatgaaaacgtcaacttcttc

SEQ ID NO: 126641 - DNA, 421 bp, Zea mays
  Clone ID: MRT4577_46964C.1
cgccgctatacctctacatttcaacacctaggcctttgtgaaaataaatatatgcttttaaacacgcacgggggcttactaaaatggttcagagactacgtagatttaataataactatgctcatgaatacaagctaagcgtatactactcacgctaacctcactatactggggtccattgaactatatgatgattgcataatggatgacaccgagaaacgctattatattacaccttctacttcaaagaaccaaatcctcccgttctattttgctaaccaattgttgacactatttttatgcaataggtctttctaactcctatcatgaacaacaaactgtccttgctagactaacccttttaaaagagctcacagtaggacattgtgaaaactcttttcacacatccattactacacta

SEQ ID NO: 126642 - DNA, 146 bp, Zea mays
  Clone ID: MRT4577_46965C.1
agatctatccaactatacacagcagcccgtggtttccccactagctatatcgcgcagaggtcttgcgcgacaaggctcagctgctcgcccggtgctcctgctccccgacgtgacacgatcgagagagagggctgcgcagactccac

SEQ ID NO: 126643 - DNA, 273 bp, Zea mays
  Clone ID: MRT4577_46966C.1
cccactcttccggaacttacaaatgaaactaccgcccattggggtgcttgaaggcggagaagcgccagtagatcaatgacctcatctttgaccatggaagccgggcccctttatgattccctccttggggcgattaaggaccacaccgaacctcaagaagcccaacgtgacacccatcttggtggagaggactttgacaacaggatgggcaaccaattagggcatgagctccagaggaaaaaccagaaagatatcactggcgaccccagggct

SEQ ID NO: 126644 - DNA, 163 bp, Zea mays
  Clone ID: MRT4577_46967C.1
tgtgcttatatcaattcacgaacttatacgagattgcatgatgccatgaccctacggcgggcgggtacataaacatatacgcgactggagggggcacagtttatcgagtcgatgagccgtggattgaagactgcattctcagaggagtgataatgccccataa

SEQ ID NO: 126645 - DNA, 211 bp, Zea mays
  Clone ID: MRT4577_46968C.1
tcatattccacaatatcactaactcctactccattattacacaaattctcccaccatatacttcaataaacttcaaacacctaacttttcattccaacattcatcaacaatctcttgcacctaccatcttacaacaaccaattacccaattacaacaacaatactttcctcatctaacaatacaaagccatcacatctcatcatcaacaac

SEQ ID NO: 126646 - DNA, 380 bp, Zea mays
  Clone ID: MRT4577_46969C.1
cgagtgctcacgggcagccgggcctagctcggcgcatcccctaaagagtgattgggatcctgagggagtggctagtcacgcgtaagttggcggctgacacgacgcccatgaggtccaatccatattggtatgcgctggtgcgcacaactgtttttaggggactgtactaacatacctttctactaccttgatggagtccaccattgggaatggtgctgttgaggataagcgtataggtggacttaattacaatctgcactggcaagcccggagtgtcatagctctgatagggggaagcgacttcactcgtttgaaaagggagcggcgaatcaattctgtcttaaatattcatccatacaatctgctagaggcctagatac

SEQ ID NO: 126647 - DNA, 695 bp, Zea mays
  Clone ID: MRT4577_4696C.1
gctctcccctcacctctctcctcccttccctcgccttgctcctctctgtcccgaccgagcagcagccgcgagcggatgtcaagaatcactggcatgtcgtcatggcacgtcgcagccgcgagcgctccaggctccaggggaagcggcggcctgttcaggtcgccggtgcttgcacctcctacttcactgttcaagaactttggcacagccactatgagtaagggcttgatggggccgagttttgaggcatcaggacggtacagctacagcggcaagcagccgacgacacctctctccatcatcttctcctctccaagagaagcgctaggcatggatatcggccaccatggccgccatgagcaccaccaaaaggagtatcacgccagcgacatcgccgatgagccactgaagaagaaggacgtgtcgttctttgatttcctcggcgtcggtgtgtcctcgtaatcaataataatattgcattcctgaaataccaatcgatgttgatcaatcaagtgtattgatcagtgtttgttttttaattattagggcgaactgcatgcggctgacaagtattcagggttagagttcatcgtcattgatggttacagtgttctgatcatcatgtgctgattcatcagtcaaataaggctccagacacatggctatttaatatttatttaaaagttttttttact

SEQ ID NO: 126648 - DNA, 402 bp, Zea mays
  Clone ID: MRT4577_46970C.1
tttgctagttacctgggagaacagatcacgggatgaggatcctttggaacacgcacatcttgaagaagctcgccaagatgggcatcgacccagccacgcaccagcctttagccaactcgaaggcggctgcttcctcgcagtccactgttacagatgaatttgctaaaaccagcaacaccagagaggagctgagcttgaagaatgatggtagcccgagggaggctccactgtccactgattcgtcggagccaccaagctggccatagtcaggctcagggagcaacgtctgtgatcaaagctctgaactgctggagaactggctctcggagactggcctgtccatggatgagccatggccggaccaggttggttattggctaggggacccttgttcctggattg

SEQ ID NO: 126649 - DNA, 569 bp, Zea mays
  unsure (1)..(569): unsure at all n locations
  Clone ID: MRT4577_46971C.1
tagcaaggagccaagcaggacataatactgaagcaggctgcggctgcagtaacaagtcaaggaggttgaaggcgaactagagagaagaggaagatgttggcggcgacggatccgatgctgtggcacaaggggttgccgctttggggctcggcacctacggcgcgcacatgttccgccccaagaaccccgcgtacaaagaggtttggcacacggcgtccctgtaccatctcgtccacaccgcggcgctgctcggggcgcccatcaccaagcgccccaacgttttcggagggctcctcactgctggaattgtgctcttctctggaacgtgctacaccgtggcttatcttgaagacaggaagttttcttcaccggcaccattggggggctttgcgtttattgctgcttgggccagcctcctcttctgattaaattgtgcttttccaagaaaacaaaaaaaatcataaacctctctatctggtgttttatcaggttgtgaaaaatatacttgtaaagtgtatacagtggacaaaaaaaaaaaaaaagggcggnccgccttttttttttttttt

SEQ ID NO: 126650 - DNA, 733 bp, Zea mays
  Clone ID: MRT4577_46972C.1
ttgggaccctcgaggccggccgggtctcttcacgctagtagtgtatcataatacggtcagcgccgactagcaaggagccaagcaggctgcggctgcagtaacaagtcaaggaggttgaaggcgaactagagagaagaggaagatgttggcggcgacggatccgatgctgtggcacaaggtggccgccgtctccggggttgccgctttggggctcggcacctacggcgcgcacatgttccgccccaagaaccccgcgtacaaagaggtttggcacacggcgtccctgtaccatctcgtccacaccgcggcgctgctcggggcgcccatcaccaagcgccccaacgttttcggagggctcctcactgctggaattgtgctcttctctggaacgtgctacaccgtggcttatcttgaagacaggaagttttcttcaccggcaccattggggggctttgcgtttattgctgcttgggccagcctcctcttctgattaaattgtgcttttccaagaaaacaaaaaaaaatcataaacctctctatctggtgttttatcaggttgtgaaaaatatacttgtaaagtgtatacagtggacagtatgcgcctctgtttaataattcaatctgtgattcctatgtttctattctaaaaaaaaaaaaaaaaaccgcggccttttcagttggacatgccagtgaaattgcacctcctgttttattaatttagtccaagttcatt

SEQ ID NO: 126651 - DNA, 278 bp, Zea mays
  Clone ID: MRT4577_46973C.1
cataaacctcaaccctaagagaaacaacagtgcaagcataaaatgtaacaacccgaaagttataaaacacatccgaaacaaaaacttatataaaaccaatttatattaaactgtgacatccaacagacaaccaaactgacaactactcatgcaccaacaaaataaattgctgcgccacacaacaattaacagttttaaacacctacaccaagcaagaaaaacaaacttattgaaataatattataaagtcccgccattaccagaaaagcagcgtggcc

SEQ ID NO: 126652 - DNA, 355 bp, Zea mays
  Clone ID: MRT4577_46974C.1
ttgatcacgcgtccgcccacgcgtccgtgccacatcggtgaagtggtgtcgtggtgactatggcgcttggcctcctcgctgccgccgccgagctggccgctgaggcggtattcctcgcgggccacgtagcgctcaactgccccgtgcaaacggtgccgtagcattgtccgccgaccactctgacgaccaacaacctactacagaggctggagaagctcggagaaggggcgctggacgcgcctgaggacgtgtacgtggacgcggttgtgggcggtgcgctgtacacggacactagggacggatggctgcaacggatgatgcaccccaacaacggctcctgggaacggtggcgctt

SEQ ID NO: 126653 - DNA, 438 bp, Zea mays
  Clone ID: MRT4577_46975C.1
ggggaaatggaaaatcaaactttgcagggcgccctatgcgactttaaatagggggggcttaaaaacataaatgccgggggggctaagcaaggaacaaaccccgtcccaaaggacaaaagaccacccattcctcccttaacaaacccccaaaagaagaaaactaaatttcggtgcccaatttctttttcacccaataccttaaaacgttcttcccaacttagtggcaccaacaaaccttaagcctaacccttggaccgaaggaccccccataaatggcaaagggaacccatctaaatactcaatagaggggggtccagctacctgtcctatttcgatcccactaaacagcaaatgaaaggggcgtgcttaagtaaaacataaatgcacatgcccgcgccttgatggggctccgacccccaagaaatttataaaccctgg

SEQ ID NO: 126654 - DNA, 302 bp, Zea mays
  Clone ID: MRT4577_46976C.1
ggaaagtgttcgctctcatggcgccggcggagccgaagtcgggcctattcgtgggcatcaacaagggccatgtcgtcaccaagcgcgagctgcctctgcgcccgtgccaccgaaaggggaaagcaacgaagagggtgtacatggtcaggggccttatcaaagaggttgatggctctgctccttatgagaagcgtatcaccgagcttatgaaggttggcaaggacaagcgcgctctgaagcttgccaagagaaagcttggaactcacaagagggcaaagaagaacacagaggacatgatcggc

SEQ ID NO: 126655 - DNA, 436 bp, Zea mays
  Clone ID: MRT4577_46977C.1
gccaccaaatttgagaaatagatttatgatgcaccatctcattttggatggagtgatacgtaaaccaaacaccccctaaaatatctctgaaaatggcccgggaactgaaacctcaaactttattgtgacaaaaatgtgtgtcgtagaccaacgatggactcgggaagatatctggacactaaaatatctctacaactagtccaaatagacaccaagtataagatacacaataagatggccctgtttcgaaaaaatacagcaggcaaccccagattttagccatgcaacattagcttacaggttaactggctgtcaatctatatagcctcagccacaagcaggatcatcgccatcttcatggaagccctgtgcagcaccttggatcatttcgtcatcaactccttcaatgaaggagttaaattcatcttcagttggg

SEQ ID NO: 126656 - DNA, 395 bp, Zea mays
  Clone ID: MRT4577_46978C.1
ctcatatcatcccaaccacctgcgctaggggaagagctatgcgatttctgggccccgcgagaactttcctattcaaatccattagattaaggacttgcttctcaccactaggtggatggttgccccctcaatgatgatcaagacgagtaaactatgttgctaagcccaaggcgcgctactccaagtacttgtacacgctctgctttttctatactatacaagctaactagttccatctctctctttccccacgtttgaccggcaaggaggtctgattggattcatgacaactccaacttgatctacccaatcttctttatcagtagcatagcatgctactctatgtactctttgtacctaagctattaaacctcccagcgtttgatgtctggatc

SEQ ID NO: 126657 - DNA, 356 bp, Zea mays
  Clone ID: MRT4577_46979C.1
tttttgcccaaaggggaatttcagctcttataggattatcaagaatctgataacacagcaggtgaaacacgaattaagcgggggctccttggggttaaaatatccacaccttacccggtaaattaaactggggggggtccatgcaaacttaaaaccccccctcatatcaccaccttttttttaaaatccaaaggaacggccgcagggggagtctacgatcacgggggggggggggccgaacagaccagttcagaggggtctgggactgcttccccctgtcagcggcctttaccaccttgggggggtagcccttgggggggcccacctttttgatgggcttgacgacgttcatgccc

SEQ ID NO: 126658 - DNA, 1173 bp, Zea mays
  Clone ID: MRT4577_4697C.1
attcggctcgagatccgagttcgtctcaaaggcatcgcctttcttcctggcagcagagagagagatggcatcctcctcgaccacgaatacatcagatggtggtgcaaagtcatcgtcttgcccgagaggacactggcgacccggcgaggacgagaagctgaagcagctcgtcgagaagtacgggccgcagaactggaactccattgcagaaaagctggaggggagatcaggcaaaagctgccggctccggtggttcaaccagcttgaccctcggatcaacaagcggcccttcacagaggaggaagaagagcggctgctcaacgcccaccgcgcccacggcaacaagtgggcgctcatcgcccgccacttcccgggccgcacggacaacgctgtcaagaatcactggcatgtcgtcatggcacgtcgcagccgcgagcgctccaggctccttgccagggccgcgagctcatcctcctcgccgtccaccggtgggtacctcttcggcgctgtcacgccggcgactagctcgctctgcttcggcttctccaagcttggtggtgccggcagcgccagcggaagcggaggcctgttcaggtcgccggtgcctgcacctcctacttcactgttcaagaactttggcacagccactgcaagtaagggcttgctggggtcgagtttcgaggcgtcaggacggtacagctacagcggcaagcagccgacggcacctctctccatcaccttctcctctccaagagaagcgctaggcatggatatcggccaccatggccgccatgagcaccaccaaaaggattatcacgccagcgaaagcgccgatgagccactgaagaagaaggacgtgccgttctttgatttcctcggcgtcggtgtgtcctcgtaatcaataataatattgcattcctgaaataccaatcgatgttgatcaatcaagtgtattgatcagtgtttgttttttttaattattagggcgaactgcatgcggtagtagctgacaagtattcagggttagagttcatcgtcattgatggttacagtgttctgatcatcatgtgctgattcatcagtcaaataaggctccagacacatggctatttaatatttatttaaaagtttttctaaaaaaaaaaaaaaaaaaaaaaaaaaagcttgtactca

SEQ ID NO: 126659 - DNA, 706 bp, Zea mays
  Clone ID: MRT4577_46980C.1
atctccaaacaagctctcaaggcaatatctagctagctactcctagataacacacttgactcgatcgatcgtcagcaacgtaaacccatagatcgaccatggcggcgcgcgccatcgtcgtcctggtctcgctcatccttgcggtggtcgccggcggcgcgtcggcgcagctgtcgtcgggcttctactcccgctcgtgcccgggcatgctcaaagccgtgcgctcggcgctgcggccggcgatcgtcagggagcggcgcgtgggcgcctccatcgtccgcctcttcttccacgactgcttcgtccagggctgcgacgcctcgctgctgctggacgacgccccgggcctgcgcggcgagaagaacgccaagcccaacaagaactcagtcagggggtttgaggtcatcgacgccatcaagacggccgtcgagaaggagtgtcccggcgtcgtctcctgtgccgacatcctcgccatcgccgccgaggagagcgtcgtcttgctgggtggcccgagctgggaggtgaagatgggacggagggactcgacgacggcgagcttcaacggcgccgagaacaacatcccaccaccgacatcggggctcgcaaaccttacgtcgctcttcgccgcgcaggggctctcccagaaagacatggtcgccctctcaggagcccacacgatcgggcaagcacgctgcacattcttccg

SEQ ID NO: 126660 - DNA, 327 bp, Zea mays
  Clone ID: MRT4577_46981C.1
aaaaagagaagcgattggtttattcttgataaacggattgagatgacaggtgttatggacagccgcacgttacaggcctacttctactgaaaagaagttgcaccgaaccatgacgattatgccaccgacagcgccacaaacaccaggttgtgcccggcatccagttcttctgacaccgcgttgtggtcgatgaaattgtacagcgcgagccccgcggaccacacgctgacgaccatcaccgacttcttcggcgagtggttgatggcgacgcgggaccgtacgaacagcattcagatcttggtgagcctggtcatcgccatcgcgtac

SEQ ID NO: 126661 - DNA, 226 bp, Zea mays
  Clone ID: MRT4577_46982C.1
ttccgggtccgaccgaccttccgttttggtttcttttttcaacctgttttcccccgcttggcaagcaacgccaaccctgagccagcaacccccttcttggaagcttttcgcaaccgattaactaacccttcgcgccaagattcggggaaaaaaacccaccggaacttaacttgaaccggggtggttggttcctgttccgccgcaccaggattgacccgaaacccct

SEQ ID NO: 126662 - DNA, 199 bp, Zea mays
  Clone ID: MRT4577_46983C.1
gttctagtcgcgacggccgcccttttttttttttttttttttttttatattcttctgaattccttcttaggggactaccagctcccgggcggcacgcggaccacaccggggtgcctcggggtggccaccggaacaagcagagccggagcaaaaacacaatacgcgaacatggggaggggggggggcaacccaccctaca

SEQ ID NO: 126663 - DNA, 809 bp, Zea mays
  Clone ID: MRT4577_46984C.1
ttccgactagctccttccaccgacgacactccccacgcatcgacaaaatggaggtaccgcgcctcccccagggtgcccttccatccatggcgttgccgcggccgtccccgcaatcaactcccagatctcgtgctcacctccccgcaatcaaggtcgtcacgcccgatgaggatggccgcgggtcgccgcacggcggtccgggccccagcgatagctccggcgcaggcgcgaggaagaagctccggctcaccaatgagcagtcgacgctgctcgaggacaccttccgcgcccacaacatactctccaacgcgcagaagcaggagctcggacggcaggtggatctcagcgccaggcaggttcatatcgtcttctgcgtgtatgtagttgtttcttcttcaattctctttgtggggaaaacattaattgggattttcccagcaatcagcttgataggcgacatcatcattgtcgggatcttctacttcattggatttgcattgttctgcttggaggcttttctgaacatgtgggtcattcagcttttgcacccttctgatcaattcagaagagaacccggagaaccatgcacttgtggagttgttcatctggaaagtgacaccattattgaatatgattgatcgactttggggtcaatagtggcacaacaaggttctccatcgactcaagaaccaagctgttaatgaggacacctttcggtgttcatatgagtttggatggaaacctcgggttgctttgttgtccaattcctgttaatgttatctacacttacaaataaacgttgttgttgc

SEQ ID NO: 126664 - DNA, 765 bp, Zea mays
  Clone ID: MRT4577_46985C.1
ctctcgtgggctcggttcattcttatctcctcgcttctcttcacctccctacctgtagttttctccactcgtcctcgtcctttgtccctgtccttcggggacaaaaacaaccaaggcgcaagcggtaatcttccgtggtgggggcgtgctctgctgcaagcagtggtgacgccgcttggagggagggcgggcgggaaaggatggaggcggtgatggacctcaagtacctgccggttttcccgaacggcggcgtggccgcggccaagaagaagacgaggctcgggaccactgcggttgccggcggccagacgggggtgtactaccgggaatgcctcaagaaccacgcggcgagcctgggtggccacgcgctggacgggtgcggcgagttcatgccgtcgccggaggccgacccggcggacccgagttcgctcaggtgcgccgcgtgcggatgccaccgcaacttccaccgccggctacccgagctgtccccgccgccgcctctcctcgctttgccgccgcctccaccgccactggcgccggcgccggcgccggctctcgcgtcgcatgccatgcgtgacagccgcacgatgcgcggcgaggaggcgccagacgaccgcctgccggccgccttcgacgacgacaccgaggagtcggacgagggctcagatttcgaagaggaccgtcccctaacgccgctgccggcgccgggcatggtgccgctgccgcccggctaccgccaggtcgcgccacacatgctcctcgcgc

SEQ ID NO: 126665 - DNA, 566 bp, Zea mays
  unsure (1)..(566): unsure at all n locations
  Clone ID: MRT4577_46986C.1
aaaaaaagctggactcaacattanacaaacgtgaatgggtacaatcaaaaattgctccancgtgtggcctctgctggatgaaggtgacttaccatgaggatatcttngctgttnacanaaaaaccaaagggggcgggggaanaatacttaccgcttttntgtattctncatcagagagagctcagccttattgtgtccagtgactcaatttaaaaagtgtcatgagtttcctttctnaactgaaaaaaaagcgtgaattgctcaatcataccagtacaagagtaacaacagtgngagggggaagacattattanaacgagtttttcatgngaagcatttgcaaaangagattcaagatagtangcantcatgtcctgggtttgtgattaacacaaaacccnatctccaaggagctgaaataatcaagtcctcactataccttgggtcacaggatgtaacccaagatttgaaactaatgaaagattgtaaaatcactcatattgtgagcataggtgtgccgggtccccctcttcccacatgtgaaacttgggttacaggtttattcc

SEQ ID NO: 126666 - DNA, 413 bp, Zea mays
  Clone ID: MRT4577_46987C.1
ggcgagcggcagttcctccgccgcgcggcgtggctggtgatgaggacggacgggtacttcgtgccggcgctgttcctgaacccggcgtaccaggacgagctcgacgggatgttccctcggaaggactcggtgttctacctcctggcgcactacctgttccacccgacgaacgaggtttgggggctggtgacgaggttccacaggtcgtacctgaggggctcggacgaaaggctgggcatccaggtgagggtgttcgacggagacgccccgttccagcacatcctggaccagatcctcgcctgcacttcgcaggaacacctgctccccgacgtggcggtgacgcaagagccgtcggcgggccgcggcgcgcggtccaaggccgtcctgatgaccggcctcagctcgtggtacta

SEQ ID NO: 126667 - DNA, 645 bp, Zea mays
  unsure (1)..(645): unsure at all n locations
  Clone ID: MRT4577_46988C.1
gtttactcgtgtttccactgctgtcgagtcaaataagagaaatggaatatgtgtaaattgcatttctgtatggtctcctctctcctgtcatcttttatacccatggtatgtgtttctgcctcctgaaggagttcagccaagctgtatactggatgaaggatgatccacatgtatctggacatcctaatacaccttgccatactgatcggaaacttatatttataaattgtgaagtgtgtaaattctattgttcccagtatgttcatgaatccaggacatctcaatagcgctgtgagaaatcccaattgttaacctaaaggataaagtcaatctgtcatagtataaacaatctaaacttctcaactttgatgttcaattaattgcaccatttggtgtatatgagaagagttatcttatagcttgccagaatatgtttgttttagtggattattagttgatatctctgttttctatttttgtgttttcagaatatgcagatgaaagagcatccatacctcagaacacaactgtgctggtccgcagaatttccattgccgggcaactgtcagagaagatcgttttgtcccccacgcggaaagtcacanaagaattttctgtgccttgcaagtcagtggttactgactc

SEQ ID NO: 126668 - DNA, 263 bp, Zea mays
  Clone ID: MRT4577_46989C.1
taggcggaaactcaaaaaaaaaaaacgggtggggatttacaaaactcaagacacagcaacagtgggggaagtttaaaacggggggttgtccttgacgagggagccgtcgaaaaagctccacaggggcatgtcctggtccgccggggcgggggggttgttttgaacggggtcggcgctaaacaggctgtccagggacttgtacgcggcggggtcaaaaaagggaaactggtcgccaaagaggagcgagtggaacagggcgtcca

SEQ ID NO: 126669 - DNA, 267 bp, Zea mays
  Clone ID: MRT4577_4698C.1
cggacgcctgggtcggagtgttttaacttctgcctggtgctgctattccgggcaacaaacagttgggcagtggggacatcctcaagtccaccaacaacttcgacccggcctacatagtcgggtgtccgaggcttcggtctccagtacaggttgactcttcccgaccgcacgagggtggcgatacaaagactggcgcgaggccaacatgcagatcgagctggtgttccatgccctggtaggaactctggatcgggcacaacacgagaa

SEQ ID NO: 126670 - DNA, 2074 bp, Zea mays
  unsure (1)..(2074): unsure at all n locations
  Clone ID: MRT4577_46990C.1
accgcgcctcgaatccatcgctcaactactcgaacccgactcaccggcgcctactcacgcctggctcccgggcccattcgtcgacccgtcgccgggcgaaagcgcgccactaaggtctccaacctccgcccgctgaagcgacggcgccgcatcggaggaactgtagctgttagtccgcctcttctcggcagcgcggggcggagatccgactggacttgggatcgattccttcccttttctcgggaggcagtaaatagtgggctgtttgtttcccgaaaatttgaagggggttcagctgaacccacgagttccctcacgttaagcccgccgcacccggttcggcgaccgatctggctgattgaaactgcttggtttgcagattcagggcgctaacagttcctgagggaagcttctggggacatggacatggcattgcccgttgtgaatgccacagcggcggtgctcgcccgtgtctcggctgccttcaatggcccccttgcccgcgcagtcgtctttggggtccatattgatggtcacttggtcgtggaagggcttcttattgcagtcatagtgttccagctctccaggaagagttacaaaccaccaaagaagccactcactgaaaaggagattgatgagctatgtgatgagtgggagccagagccactatgccctccaatcaaggagggggccaaaatagatgctccaacattgngaaagtgccgctggaccacatacgattgttgatggtaaagaagttgtgaactttgcatcaacaaactacctcggtttaattggcaacgaaaagattattgattcttgcatcagttcattggagaaatatggtgtcggttcttgtggtccacgtggcttttatggaacagttgtgatgagggtgttcactgggcagtgcaaaatggtctccatctatcaagaagcactgtggtgtacttcaagcacaatgatatggcttcacttgcaagcactttggaaaaacttactcgtggaaataaacgtgctgaaaagattagacgctacattgttgtagaatccatttaccagaattctggccaaattgcccccttggatgagattgtcaggttgaaggagaaatatcggttccgtgttattctggaggagagtcattcttttggggtgcttggcaagtctgggcgtggccttgctgaacattatggagttcctattgaaaaaattgatataattactgctggaatgggaaatgcattagctaccgatggtggattttgtacaggaagtgtcagagttgttgatcatcagcgtctaagcagctctggatatgttttctctgcatctctgccaccttatcttgccactgctgctgtttctgctgtcaactacctggagcagaatcccgcagttcttgcaaatctaaggagcaatattgctcttttgcataaagaattatcagatactccagggctagaaattttcagccatgttctgtcacctattgtcttccttaagctgaagaaatcgacaggttctcctaccactgacctagaccttcttgaaactattgctggcagggtcttgaaggaagactcagttctcattgtgacatcaaagaagtcaaatctggataggtgcaaactccccgttggaatccgcctgtttgtatcagctggacatactgaatccgacatctccaggctttcctcatccttgaagcgagtttctgcatcagttttttcagactgcttttgatccacatcggatacccttgaagacgaaagccatccattttctacgcgctttgtaccctagaccgtgtgtgtgtgtttggtaaatgtacataacctgtacatttctacatgtttatgaattcaccttgttgtcgctcatactcgtagaacttgggattttttttttgtagaacagtgatgttggagaatagtgcgtttgtgctgtacatctcgttgatttccatgtagtgatgttttcccctgtatcctcacccacaagactttggccgtcttatattttcaaacaattgcaacacccaaaaaaaaaaaaaaaaaaggcccctagggcc

SEQ ID NO: 126671 - DNA, 264 bp, Zea mays
  Clone ID: MRT4577_46991C.1
gtgactttttccccccttcactatttcaaaatggttgtgaaatggggtcttaaaggtaagcgccctcatacatgactgaaactttgtgagaggtcttatatttgaatggacccttaatgatgtatgtggaatagaatgaagtcctgtctctgtgagagagcgtgcctcctcactcatttgtctctgtctgtgttcatagccatcaatatagtaacatgtttgctatattcttgaatacgcttgaagaaagaaatccgttttcta

SEQ ID NO: 126672 - DNA, 611 bp, Zea mays
  Clone ID: MRT4577_46992C.1
aatatagataaataatattcaatatctcataaataagtattgtcaaataataactcatacataagtgtactctaaatttaaacttgctcatcaactgtttgtgctaacattgagcctaactaagtatataacttgatgaagtctatgaaagggcaaatacaacttgatgaagtccatgatcttgttggtctccagattgatcttgatggtgtcgttggccttgatgagagggtcggggtagcggatggtgcggtcgtcgtaggtgttcaggtaggggatgactttctggccaaactggacagacctcaccttgcagagcttgaactttaaggtgtagaccgaggtggtcgttgtttcgcaacaatcacgcgctcagggtcacgtaccgtagttgctaagatgattaaacctcagtttgcaacgctgtgtctagactccagacctcatgctgatgcaaagttcacaacttctttaccatcaacaatcaacaatcgtatgtggtccaacgacactttccaatgttggagcatctattgtggccccctccttgattggagggcatagcagctctggctcccactcatcacataactcatcaatctccttttcag

SEQ ID NO: 126673 - DNA, 508 bp, Zea mays
  Clone ID: MRT4577_46993C.1
agtatcaaatgaatattgattaatgtccaggctgtcctgggctcctgctccatatctatcagaaatgtaccttgggttccctagtctctttgctagctgtatgaaggagacaacaatttgctttatatctcccgaatcattgccatctttatatctcaatgcatcttggcacatggtacggatgtcatgcttgatggtacgaaagccatggcgagcataatacccgttttttagcctaccttcaatcttggaaacctttggaatgaaaaaatcaaatctgttgctcctcataatttctctcagtctgtttatgatgaactcttccatctttctgtaactggtctctgcctgtctctgcatcaaccgcctcatttctgcatccctcgacaaaaccgcagaggactttctagcatcaagcaattttgatcgtttatagaaaccttgtccaaatgaaaggttagcattctctctatttgaaatatcagcaaaatacccatcaagctcatca

SEQ ID NO: 126674 - DNA, 356 bp, Zea mays
  Clone ID: MRT4577_46994C.1
ggcaccacatttgaacttagcagctgtagggcagtattatatatactggacaaaatagaagcacgcgcacacctggcccttcccttatctgaaactgaaacaattcactctcacggacggactagtccgcatcggccaagctagcatgcgggatcatgccgggccacgcccccaccccaccccgaatggaagcgccgctcacaatcacatatcgtggcgtggggactgggactggggacaccggccgcgttggacttggacccctagcactcgccacacccacacacctgtatgtacagcacgcccacgcatcacgtgcgacagacccctggatcatcatcggttcaccgggggct

SEQ ID NO: 126675 - DNA, 1033 bp, Zea mays
  Clone ID: MRT4577_46995C.1
agaagattcacaagtgtcaggaaaatgaaggggatcgctggttacatctcaggcgccatctttggcatctcctctgaggaagcagaagtatctccctccttgtcctagtagcaaagcattgctttcttctttctctgagccttggcaatctctttgcggtcgatgtacgcaagcagttcctcttgcctgataagagcctcgtgcaaagccttctttgttacaattagttcggcttccaatgcatcgacacgacgcacagcggcgttaagcaactcttctttctcgcaaggcatttcggaaggcttttcttgaagcatctgaaccttctcttcaagctctcccagcctttgcaagaccacggcgaacaggtcggcttcagcaaatccagggatcggagaaggaggacggaattcctctttctggatggggtctgggtacagcgtagagtggatttcttctgacccgcctttatatggcaatctccttgtgacaagatctttgactgatcgaaccatcattacaatagccataagacaagccatcagagttgcagcgatcttatcccaggaggaatcagatggcctggacatagttttcacagaagagtctgcatcttggggcatgaatggtatctttcgtggttgctcccttctccatgtagcatccacagccttgtcaacaacaggtacatcatattcagggagacgaatagaaaagctcgtagccctgacaattttgacctaataaagagacaaagacaacattaatttcacctgacataatctatagccgtgacataaagggcaaaggagaatgggatttaggttgcacttctagtgacatagactggcatttgctgacagcctgacacaattgcagaaaatatgcaaaaagatcaactaccaacctcttcacgaactggggtcaacttaggatgtggtatgtaacttctgagagctttgggggagatagcatcgtcagcttctgagccagactcagcagttgatgtgtcacaccctcgaaggacgcgtgg

SEQ ID NO: 126676 - DNA, 346 bp, Zea mays
  Clone ID: MRT4577_46996C.1
ttagcggatttatcctctgaccactcagggcactccaaatacgactgggggatgtggaactctcaaaaggctatcccactcccagtgctgcaacttcatcaaaaagttgtacggctgatgtgacaccattgaaaagcattgtttcaacctccaaaccgtaccaaagcaacgtccttgtgacaaagacatgccacagaagtgtcactgcaaaataccagctagagagtcatatgtataccaataacccattctcaatccacgcgtacgtcgagagtctactgcaaaacaacactcgttgacaaacacttttaaagtactgtacctactgaggaaccacacaaatgca

SEQ ID NO: 126677 - DNA, 2491 bp, Zea mays
  Clone ID: MRT4577_46997C.1
aagaaaccaaccaattatcatcggcgcggctaaccaaccaattatgcagttatgctgcaactaacaacaaccagattgcgagaccgggaggaggcagcaatgctcaggattgcaattttttaaaaaaaacattttatttatgccagaattttgttgatttacaacggaaacctgttgattcacaagtgtcagaaaaatgaaggggtcgctggttacatctcagacgccgcgtttgtcatctcctcacggaagcaggtgttgtcctagtagcagaacattgttttcttctttctctgagccctggcaatctccttgctgtcgatgttcgcgagcagttcctcttgcctgataagagcctcgtgcaaagccttctttgttacaattagttcagcttccaatgcatccacacgacgcacagcagcgttaagcaactcttctttctcgcaaggcatttcagaaggcttttcttgaagcatctggaccttctcttcaagctctcccagcctttgcaagaccacggcgaataggtcggcttcagcgaacccagggaatggcgaaggaggacggaattcctctttctggacggagtccgggtacaatgtacagtagctttcttctgacccgcctttagatgacaatctcattgtggcaagatctttgattgatcgaaccaacattacaatagccataagacaagccatcagatttgcagcgatcttatcccaggggcggccagatggcttggatgcagttttcacagatgagtctgcatcttggggcacggatggtgcctttcgtggttgctctctcttccatgtagcatccacggccttgtcaacaacaggtacatcatattcagggagacgagtagaaaagctagtagccctgaacattttgacctcttcacgaactggggtcaacttaggatgtgatatgtaacttctgagagctttgggggacacagcatcatcagcttctgaaccagactcagcagttgatgtgtcactccctctcattgtgtggcggttcggtttggcgtaagtaataaatttttcctcaccattggaaatagttacaatttgacgagcacaatgaaccccaccactttggactatcttaagtatgtttgggtccttccacggtcccttttcagccttaaggcaacctccatattcaggacaggtacaagtgccaccaaggaattctggcaattcactagcgtcaattgtttcaagcagcttactttggtatttgttcccaagaacatgtatcttggcggtcgttttgggatcaaggaaggacttcacggtggttccatagtaacccggaagcccggaccagcattgacgataacatttggtatagagtctctgggtagttatcattgtcaattttctgcagtcgttgaattaattcgcgtgcagttttgctgaaatttttcaaccccactccgtggacatccagaattgtcgtgctggaatcaatgtgcctttttgcagcaagagagcaagctggaaatttaatcaagaagctcctctcaaactccttcacatggtatcgcacgtatcgatccatcgttgtgacattcataagtttgctagggtcaacctttccaagcctttcaatgtaaacaggtctcccctctttgtcaactccatgataaccatgaggataatattgcaaaacggtgctcaactcagtgtattcgaagtcctccacaattgtatcagtgccatactccctccgccactgaagcatatcaatccacatttgcttggctttatcgatatcaaatttccttgccttcagaaatctcagcatcatatgatagtcgtcatgccttgcaggcaacagctcatccaagagtaatgcttgtctaaatgcttcaacagcttgcagctcctctagatcgcgcacatcctcaatagacacagaaaggaccctactaccactcttccttctagtcttttttaatgagtgcctaatctttgttgatgcatctattgcttttttcttcaaagagcttattcttgtcttcttttcatcttcagagacttcaaagtctgacttatggtctctacgttcatcgtgacttgagcacccttcaaaacatggccgcgcgaagcgatcgaggtggcccgacatgggcgtcgacgacgacgggcgccggatcccggacctccgggcgcgaacggatcctcccgcgcacctccttacgtcgccccgcctccgtccgaagcctggaacggaacgacctcgctgttgcgtcggcgggcgggggcgcgagcgaatccgaggcgaggggggatttttttttttgtatgtgtgtgtgactgtgtgtgtcccgggggtgttgtggtggcgtcgaggaagagtgggtggctagtgggagtaacgttaaagcaataaagaagaggagggagaggagagatagaaaggatgggggagggggaggccgggaggggaaggacgggaggtatgtcccggccgg

SEQ ID NO: 126678 - DNA, 758 bp, Zea mays
  Clone ID: MRT4577_46998C.1
ccacgcgtccgatggggtcattcacaaccccttcccagaagcagagcattttggccagtctgttgcatatgtagcagtgaatggtgctctggctggtcttatttgttttgaggataagctcaggggagattctcgtcaagttatcgagacactatctaaacaaggaattagtgtatatatgttatctggggacaaggaaagtgctgctatgaatgtggcttcagttgtcggtatccaggcagataaggttcttgctgaagttaaaccacatgagaaaaagaagttcatatctgaactccagaaagagcacaagttagttgccatggttggtgacggcattaatgatgccgcagcactagcttcagctgatgttggaatcgcaatgggtggatgtgttggggcagctagtgatgtatcttcagttgtacttatgggcaacaggttatcccagcttatcgatgctttagagttgagtaaagagaccatgaagacggtgaagcaaaatctttggtgggctttcctatataacattgttggactacccattgctgctggagcattgcttccagctacggggacgatactgacaccatcaatagctggagctctgatgggttttagttcggtcggtgtgatggccaactcgttgcttttgagggtgaggctgagctcaggcggaagcgagaaccactgaaagccatctctgctgaggttgagaaaattactcatcgaaatggagtacctgagtagttcggatc

SEQ ID NO: 126679 - DNA, 2071 bp, Zea mays
  Clone ID: MRT4577_46999C.1
ggccgcttttttttttttttttttgataacactataattaatataatatagataaataacattcaatatctcataaataagcattgtcaaataactcatacataagtgtgctctaaatttaaacttgctcatcaactgtttgtgctaacattgagcctaactaagtatataacttggtgaagtccatgaaagggcaaatacaacttgatgaaatccatgatcttgttggtctctagatcgatcttgatggtgtcgttggccttgatgagagggtcggggtagcggatggtgcgacagtcgtaggtgttcaggtaggggatgcctttctagccaaactgaacagacctcaccttgcagagcttaaacttggggattgaatggtgcctttcatgcttgctctctctttcatgtagcatccacagcctcttcacgaactcgggtcaacttaggatgttgcagttctgagagcttgtacggagacagcatcatcaacttctgagccagactcagcagttgatgtgccactccctcgcatctgtcattccacattaaagcatgtttttaacaaagcaacacattactaaacttttgatacagaaaattctggaaatgaaatcaatgaagattgattcgaaagttacgcaaggcacttcaatttgcataaatactaatttttcctcaccattggaaatagttacaatttgacgagcacaatgaaccccaccactttggactatcttaagtatgtttgggtccttccacggtcccttttcagccttaaggcaacctccgtattcaggacaggtacaagtgccaccaaggaattctggcaattcactagcgtcaattgtttcaagcagcttactttggtatttgttcccaagaacatgtatcttggcggtcgttttgggatcaaggaaggacttcacggtgttccatagtaaccggaagcccggaccagcattgacgataaacatttggtatagagtctctgggtagttatcattgtcaattttctgcagtcgttgaattaattcgcgtgcagttttgctgaaatttttcaacccccactccgtggacatccagaattgtcgtgctggaatcaatgtgcctttttgcagcaagagagcaagctggaaatttaatcaagaagctcctctcaaactccttcacatggtatcgcacgtatcgatccatcgttgtgacattcataagtttgctagggtcaacctttccaagcctttcaatgtaaacaggtctcccctctttgtcaactccatgataaccatgaggataatattgcaaaacagtgtccaactcagtgtaatcgaagtcctccaaaatcgtatcagtgccatactccctccgccaatgaagcatatccatccacatttgctttgctttgtcgatatcaaatttccttgcttttagaaatctcagcatcatatgatagtcatcgtgtcttgcaggcaacagctcatccaagagtagtgcttgtctaaatgcttcaacagcttgcagctcctctagatcacgcacatcctcaatagacacagaaaggactcggctaccactcttcctcctgttcttctttaatgaatgcctaatcttagttgatgcatctattgcttttttcttcaaagagcccattctggtcttcttttcgtcttcagagacttcaaagtctgacttatggtctctgcattcatcatgacttgagcgcccttcaaaacatggccgcgcgaagcgatcgagatggcccgacatgggcgcgtcaacgggcgctggacgcgaacggatcctcccgctccctacttccgcctcccaagccttgaacggaaccacctcgctgtggcgtcggcgggcgccggcgactcgagggccgcgtgggaatccgaggcgaagggggattttttgggggcgtgtggtgtcgtcgaggaggagaaggctgggattgggggtgatgggacggcgcgggggctggggctagtgggagtaactttaaagtaaagaagaggatggaggtggagggcgaagctgatgaaggagcagagagagaaataagtaggga

SEQ ID NO: 126680 - DNA, 472 bp, Zea mays
  Clone ID: MRT4577_4699C.1
ggggggtgggtttttttttttttttttttttttgtttttttttttttttttttttttttttttttttttttttttttttttttggttttttgattaagcaaaggcattccttattggtccataaaaagaaacaactgtcccttttcaagcgggtaagaagggcaacccaacactttactgaaaaaaaggttgaaaatatactggtttttgggcactggcatcaccatcctcaccgggggtacaaccaggagcatcgggtaattcttccggggtttcaggtttccaaaccggtcctccgggggccttaaaggatcgggggatttgcttaaaaattcttcgacttcattgggaggcaagaacagggggggggaaaaaatgatgctgtccccagcccccctggggagcattccacggttttcgcactccgggccaaatattgaaccaacaccccatttagctggaaaagggtcat

SEQ ID NO: 126681 - DNA, 184 bp, Zea mays
  Clone ID: MRT4577_469C.1
catgagcgagaacaagcatgagcatgtcgcggctaccatctaccacactgtgtggcgacgccaacgagaacaatctgaagtgcactgatacttgcaaactatcaattcgcatgaacaattatgacccacactacgacaagcctatcagtggctctggtcagatgcttcatatcactcgtaccaa

SEQ ID NO: 126682 - DNA, 541 bp, Zea mays
  Clone ID: MRT4577_46C.1
gcacgagagacggcggagcgtcagagaagggagggggctgccaccaccgtcgcccgctctggttccatacctgcccaacggcgcgcccctgcggttgtccaagaagcagggggtgaccattgccaaagggcataagaactatgagctaatgctcaatctgcagctcgggatcaggcatgcagtaggaaggcaaggtcaagttttattagatctgaaatcatcagcatttgatccaaaagagaaagtgtggacaaaattccctcctgaaggctcaaaacatacccctccacacaattcttgtgatttcaaatggaaggattactgcccaaaggtgttccgaacactccgtaagctgttcaaggttgacccagctgattatatgttgtccctctgtggagatgatgctcttcgtgagctctcatcccctggtaagagtggaagcttcttttacttgacaaatgatgatcgttacatgataaaaacaatgaagaaaggtgaagtgaagatgcttttgaggatgcttcaagcttactacaatcat

SEQ ID NO: 126683 - DNA, 3000 bp, Zea mays
  Clone ID: MRT4577_47000C.1
atgagttttttgttctacagctatgccctatgctaaattcactaacaacatgagacacttctaatcgtctcttgttcctggtataccaccttatgtaaatgctatctgttttaaagttttctccctgcactgtcttgtaaaagtgtatgttgagtctgtttgctagtaaaattacaatatttcaggcatggggtcgttcacaaccccttcccacaagcagagcattttggccagtctgttgcatatgtagcagtgaatggtgctctggctggtcttatttgttttgaggataagctcaggggagattctcgtcaagttattgacacactatctaagcaaggaattagtgtatatatgttatctggggacaaggaaagtgctgctatgaatgtggcttcagttgtcggtatccaggcagataaggtaatatcaaccgaatcttgttgtgttttgttcttgtaaatgacttaattctctatagtaaaatgtggctaggcccgactaacttggtctattgatacaacacccaaccctgagttaggattagggtttcccggggtgagactataattacaagggactaacccccaaaccctaacgggtactctaacatttggcactcaagtagccagaatgaacatgttatgggttgattgctgtctgttgctgttagctgcaccaattacatgacgcgtagtgatcttggagatgcactgcagataatggttctacagaaagagcacaaggtagtcgccatggttggtgacggcattaatgatgccgcagcactagcttcagctgatgttggaatcgcaatgggtggaggtgttggggcagctagtgatgtatcttcagttgtacttatgggcaacaaggttatcccagcttatcgatgctttagagttgagtaaagagaccatgaagacggtgaagcaaaatctttggtgggctttcctgtataacattccactcatgtcgttggactacccattgctgctggagcattgcttccagctacggggacgatacttacaccatcaatagctggagctctgatgggttttatttcggtcggtgtgatggccaactcgttgcttttgagggtgaggctgagctcaaggcggaagcgagaaccactgaaagccatctctgatgaggttgagaaaaattactcatcgaaatggagtacctgagtagttcggatgcttagaccatgttcacgttcactcattcatatgatttggaatatgtgaaatcatttaaatgctattctaagtcatcatcatcatccacttgaaaaatgttctgtttgtgaagtgcattcgtttctaaaaaaagaaagtaggtggtagcaggttcataaactaacaaacaaaatatctatcagatgatcagattagaaccaactgaagcacaaaaggcagcacaaggaaaaactgtttcagtttctttcatttagattgactttgtgagcatgactttttattgccatttcttctaaatataaacgaaagggtctctagccgagttggtagatggtctgagtagcactcctcaggtcctgggttcgactccctgtgggagtgaattttcaggatgttgttaaaaaaatcctctcgtctgtctcacgctaaagcgcaggtctaaggttcggccccggttgtggtcgttctcacatggggctacaacgccgctgtgtatgggtggggggcaggggttcttaacataatactgtgggagcggtccacagtgttaaggcccattaggcccaggcttactgcctatatatataatagtccttagggactgatgatagactgttaatcctaaggttagtaacatggtaacagaggaggttttgattaggggtttttagccgccgtcgcggccttcctcctggccgccgtcgcggccctcccctaccctatcccacctcgtccgccaccgtctgcgcgctctgcctcgtccgctgtccgctgccggtgttgcgtctgtttcgaccgccgccatcacgtccatcttctacgtcgactcggccccgccagtgtcgtccacagcgccgtccgtccggctcgccagggacttgagcaccgccgcgaccttcttctccgccgccgtccgcgaagtctgccacatctgcgaccttctcctatgccgtctcgttgtccgggcaaccatcgactttttttcttctaaatataatgatacgcagctcaactgtgtgttcaagaaaaaatattgccatttcagtatggtccgcttatctatttatgtgggaaaatgtcttaggttcttgctgaagttaaaccacatgagaaaaagaagttcatatctgaactccagaaagagcacaaggtagtcgccatggttggtgacggcattaatgatgccgcagcactagcttcagctgatgttggaatcgcaatgggtggaggtgttggggcagctagtgatgtatcttcagttgtacttatgggcaacaggttatcccagcttatcgatgctttagagttgagtaaagagaccatgaagacggtgaagcaaaatctttggtgggctttcctgtataacattgttggactacccattgctgctggagcattgcttccagctacggggacgatactgacaccatcaatagctggagctctgatgggttttagttcggtcggtgtgatggccaactcgttgcttttgagggtgaggctgagctcaaggcggaagcgagaaccactgaaagccatctctgatgaggttgagaaaaattactcatcgaaatggagtacctgagtagttcggatcttagaccatgttcacgttcactcattcatatgatttggacacacgcatcaaaggcagttgtcagttgaacaaatgaaacagatgtagtatgcaattgctgaggtcagtcagttcctgtggtttggtagatcttcatggtgtgctataatataataccccctctattccaatttataaattttttgacttttttttacc

SEQ ID NO: 126684 - DNA, 1475 bp, Zea mays
  Clone ID: MRT4577_47001C.1
aataacactataattaatataatatatataaataacattcaatatctcataaataagtattgtcaaataataactcatacataagtgtactctaaatttaaacttgctcatcaactgtttgtgctaacattgagcctaactaagtatataacttgatgaagtctatgaaagggcaaatacaacttgatgaagtccatgatcttgttggtctccagatcgatcttgatggtgtcgttggccttgatgagagggtcggggtagcggatggtgcggtcgtcgtaggtgttcaggtaggggatgactttctggccaaactgaacagacctcaccttgcagagcttgaactgcacacaaaccaatacataagtgtggttcttgaaagacaattgatccttgaaagacaattgaccgcaacagccatttcatccatcatatcatgccattctcgcttgtgggaaattggaggatgcatgctttatagaatacttggatccactgtacagattgatacttttctcctatgctcaggggatagatccaattgagcactatgaaaagccatgtcgcgcaaacctttaaggtgtagaccgaggtggtcgttgtttcgcaacaatcacgcgctcagggtcacgtaccgtagttgctaagatgattaaacctcagtttgcaacgctgtgtctagactccagacctcatgctgatgcaaagttcacaacttctttaccatcaacaatcaacaatcgtatgtggtccaacggcactttccaatgttagagcatctattttggccccctccttgattggagggcatagcagctctggctcccactcatcacatagctcatcaatctccttttcagtgagtggcttctttggtggtttgtagctcttcctggagagctggaacactatgactgcaataagaagcccttccacgaccaagtgaccatcaatatggaccccaaagacgactgcgcgggcaagggggccattgaaggcagccgagacacgggcgagcaccgccgctgtggcattcacaacgggcaatgccatgtccatgtccccagaagcttccctcaggaactgttagcgccctgaatcgagaaaagggaaggaatcgatcccaagtccggtcggatctccgccccgcgctgccgagaagaggcggactaacagctacagttcctccgatgcggcgccgtcgcttcaacgggcggaggttggagaccttagtggcgcgctttcgcccggcgacgggtcgacgaatgggcccgggagccaggcgggagtaggcgccggtgagtcgggttcgagtagttgagcgatggattcgaggcgcggtggtgagtgtagtcccgacgggggttgtatataacggtgggtgcggggacggagggagggagacgacgacgcggtggacgaagagaggacaggagaccaaagggtttgagtgggctggcgcccgggcggcggtc

SEQ ID NO: 126685 - DNA, 512 bp, Zea mays
  unsure (1)..(512): unsure at all n locations
  Clone ID: MRT4577_47002C.1
gggggggggttttttttttttttttttttttttttttttttttttttttttttttttttccaaacatcttttttccttaaaaaaaatccccttccattaaaaagggccacccagggaaaggctaaccctcccccccatggaaaggggggggggggggggacttatttcctttaaaggagaaaacaagcaagctaggaagcaaaacaggggctccattacataaaaacaacagaccaaaattccctcagaagaaaacaccccccccagctgccttgcaagggcaggaacccggctgctgcagttgcaggccccacatggccgcaagttgcggccctacctggccccccatcggcccccggagccccccctgcgggggctgccccgggaaggcctgccggacccccccgtaggtcccctggccccggggcagggggcccccccgcctcatctgggggcacccctgcggcggnggcccctgcccctgggggcagccntggggcctcccccccggg

SEQ ID NO: 126686 - DNA, 2421 bp, Zea mays
  Clone ID: MRT4577_47003C.1
ttggaggcagcaaagctcatgatgccaaaaaaaacactttattcatgtcagaatattctcgatttacaacggaaacttgtagaagattcacaagtgttaggaaaatgaaggggatcgctggttacatctcaggcgccatctttggcatctcctctgaggaagcagaagtatctccctccttgtcctagtagcaaagcattgctttcttctttctctgcaagaggaagcaagaccactgagccttggcaatctctttgcggtcgatgtacgcaagcagttcctcttgcctgataagagcctcgtgcaaagccttctttgttacaattagttcggcttccaatgcatcgacacgacgcacagcggcgttaagcaactcttctttctcgcaaggcatttcggaaggcttttcttgaagcatctgaaccttctcttcaagctctcccagcctttgcaagaccacggcgaacaggtcggcttcagcaaatccagggatcggagaaggaggacggaattcctctttctggatggggtctgggtacagcgtagagtggatttcttctgacccgcctttatatggcaatctccttgtaacaagatctttgactaatcgaaccaacattacaatagccataagacaagccatcagagttgcaacgatcttatcccaggaggaatcagatggcctggacatagttttcacagaagagtctgcatcttggggcatgaatggtatctttcgtggctgctctcttctccatgtagcatccacagccttgtcaacaacaggtacatcatattcagggagacgaatagaaaagctcgtagccctgacaattttgacctcttcacgaactggggtcaacttaggatgttgtatgtaacttctgagagctttgggggagatagcatcgtcagcttctgagccagactcagcagttgatgtgtcactccctcgcattgaatggtgcttcggtttggcataagtaataaatttttcttcaccattggaaatagttacaatttgacgagcacaatgaacctcaccactttggactatcttaagtatgtttgggtccttccatggtcccttttcagccttaaggcagcctccgtattcaggacaggtacaagtgccaccaaggaattccggcaattcactggcgtcaattatttcaagcagcttactttggtatttgttcccaagaacatgtatcttggcggtagttttgggatcaagaaaggacttcacagtgttccatagtagccggaaacccggaccagcattgacaataaacatttggtatagagtctctgggtagttatcattgtcaattttctacagtcgctgaattaattcacgtgcagttttgctgaaatttttcaaacccacgccctggacatccagaattgttgtgctggaatcaatgtgcctttttgcagcaacagagcaagctggaaatttaatcaagaagctcctctcaaactccttcacatggtatcgcacatatcgatccatcgttgtgacattcataagtttgctagggtcaacctttccaagcctttcaatataaacgggtctcccctctttgtcaactccatgataaccatgaggataatattgcaaaacagtgtccaactcagtgtaatcgaagtcctccaaaatcgtatcagtgccatactccctccgccaatgaagcatatccatccacatttgctttgctttgtcgatatcaaatttccttgcttttagaaatctaaagaccagatttagttaggcttgagctgtgcacttgtgatttggaaaaatgaaaactaacacatcaagctaaacaaaaggtgcatcataatttactggatacatatacctcagcatcatatgatagtcatcgtgtcttgcaggcaacagctcatccaagagtagtgcttgtctaaatgcttcaacagcttgcagctcctctagatcgcgcacatcctcaatagacacagaaaggaccctactaccgctcttccttctagtcttttttaatgagtgcctaatcttcgttgatgcatctattgcttttttcttcaaagagcttattcttatcttcttttcatcttcagagacttcaaagtctgacttatggtctctacgttcatcgtgacttgagcaccatggccgcgcgaagcgatcgaggtggcccgacatgggcgtcgacgacgacgggcgccggatcccggtcctccgggcgcgaacggatcctcccgcgcacctccttacgtcaccccgcctccgtccgaagcctggaacggaacgacctcgctgttgcgtcggcgggcgggggcgcgagcgaatccgaggcgaggggggattttttttttttatgtgtgtgtgactgtgtgtgttaaccgggggtgttgtggtggcctcgatgggaaaac

SEQ ID NO: 126687 - DNA, 826 bp, Zea mays
  Clone ID: MRT4577_47004C.1
aataacactataattaatataatataaataaataatattcaatatctcataaataagtattgtcaaataactcatacataagtgtactctaaatttaaacttgctcatcaactgtttgtgctaacattgagcctaactaagtatataacttgatgaagtcaacttgatgaagtccatgatcttgttggtctccagatcgatcttgatggtgtcgttggccttgatgagagggtcggggtagcggatggtgcggtcgtcgtaggtgttcaggtaggggatgactttctggccaaactgaacagacctcaccttgcagagcttgaactgcacacaaaccaatacaaagtgtggttcttgaaagacaattgatccttgaaagacaattgaccgcaacagccatttcatccatcatatcatggcattctcgcttgtgggaaattggaggatgcatgctttatagaatacttggatccactgtacaaattgatacttttctcctatgctcaggggatagatccaattgagcactatgaaaagccatgtcgcgcaaacctttaaggtgtagaccgaggtggtcgttgtttcgcaacaatcacgcgctcagggtcacgtaccgtagttgctaagatgattaaacctcagtttgcaacactgtgtctagactccagacctcatgctgatgcaaagttcacaacttctttaccatcaacaatcaacaatcgtatgtggtccaacggcactttccaatgttggagcatctattttggccccctcttgatggagggcatagcagctctggctcccactcatcacatagctcatcatt

SEQ ID NO: 126688 - DNA, 670 bp, Zea mays
  Clone ID: MRT4577_47005C.1
aataaaaaacattcaatatcttataaataagcattgtcaaataactcatacataagtgtactctaaatttaaacttgctcatcaactgtttgtgctaacattgagcctaactaagtatataacttgatgaagtccatgaaacggcaaatacaacttgatgaagtccatgatcttgttggtctccagatcgatcttgatggtgtcgttggccttgatgagagggttggggtagcggatggtgcggtcgtcgtaggtgtttaggtacgggatgcctttctggccaaactgaacagacctcaccttgcagagcttgaacttggcatcctcatatatttactgctgcagaaaacttgccacagtgacttagccacactgtcacgctcataatacaacatacacctctggtgagatgccagctccatatgaacaactcaacttctttaatatcctctagacccggtttcttgtactcttgccaaattaaggtgctgacggcgaaggcgaggatggtggcttgaaatctggataattagggtatggtgactgaggtctgggcctagtagtgacaggagatgacccagtgctagcgtctgctataggtgcagaaccgaccactactggtccttcagtcacggtgcagccagccttcgtctgtatgacgtgacacgag

SEQ ID NO: 126689 - DNA, 170 bp, Zea mays
  Clone ID: MRT4577_47006C.1
ccggggggaggggccaccggcgtatgtattttttttgaatttttttgcccaacccaaacccctttgggatttactcacacgatttggcccaaacaatttggttacggaacactaaatgggggggggtgcctttttccgcccttaaattccgaacctgccccaccttgggt

SEQ ID NO: 126690 - DNA, 518 bp, Zea mays
  Clone ID: MRT4577_47007C.1
aaggagattatatatatatcatttgattggttaacatcacaatcaaacatattaaaacgtgatctaacccaaattgaaaggctacaaaaagaaaattaaaccgtgaaaatatcctcctttttcgtcttaacatttccaagctgagacagtaacaagttcttttctctgccaacacaagacaagtgaaggcgacgaagactgtctcttctccaagtgaaaccctctcattggattcctctgcaacaaatactccgcttgtgtctccgccgtctgactcagcgtcacaggagtaaacccacattgcccaaataagcttctccacggcggtgatctctccatccaacggtaacgattcgtcaacagtttctgtatcgacggttgcacacaaaacctctcaatactcgtagcagcttccgcattattcagattcccagagtcgagagactcgagcagagatgtgtagtactgaagcgcgttaatcacaccgttagggaacggcgcgtcgttgttacggtcgc

SEQ ID NO: 126691 - DNA, 515 bp, Zea mays
  unsure (1)..(515): unsure at all n locations
  Clone ID: MRT4577_47008C.1
cattgggtacctcgnagccggccgggatagtcacacagcgaaggtgtgagcgagcgagacggagacagagagagagatggtgacgacggactgggggccgatcatcgtggcggtggtgctgttcatcctgctgtcgccggggttcctgttccagctgccggcgagggtcagggttgtggagttcggcaacatgggcaccagcgccctcgccatcctcgtccacgccatcctctacttctgcatactcaccatcgtggtggtagccatcggcgtgcatgtgtacacaaccaaaccggatccggtggagtagattgaaatttgcgtgtgtgtttttcagttctgctgctcttgtctattttttcagtactcaatataagtggatgcaggagtatctattttgtaatatatacgcagataacacgattatcgtctttattgatcatgatattgagcaagcgaagaacatatagagctacttctatgtacaattatccagtctaaagataaatttttat

SEQ ID NO: 126692 - DNA, 259 bp, Zea mays
  Clone ID: MRT4577_47009C.1
tcgtaacatacaacttctaaggttcaaagcctactccactcattcgagatccctaaccaggggcgttttctacgtggagacggcggttcctttgctgtccccgccggcgtctgctctgtcggactagccctccgtgggccctcccccatacgaccggcttggcatctgttacttcattttctataccttgttcaccgatttactgtttatttggaactcgttcatcaccgcctccttctaccttgacttcctctaccct

SEQ ID NO: 126693 - DNA, 1074 bp, Zea mays
  Clone ID: MRT4577_4700C.1
cacagcgccactgtccagtgcgcgcgtcaagcttgcttagctagccgccatggcctccctcgccgccgtctccgtgaagcccgtggctcatcaagggtctcgccggtagctccatctccggaaaggtccggccgggaaaagcgctccctctcccggccgggagccgcgcgctccctctcttctctcccagccgtcgccgcctctatctctctctcttccctcttctctctccctctctcctcccttccctcgcctcgctcctttctgtcccgaccgagcagcagccgcgagcggatgtcaagaatcactggcatgtcgtcatggcacgtcgcagccgcgagcgctccaggctccttgccagggccgcgagctcatcctcctcgtcgtccaccggtgggtacctcttcggcgctgtcacgccggcgactagctcgctctgcttcggcttctccaagcttggtggtgccggcagcgccagcggaagcggcggcctgttcaggtcgctggtgcctgcacctcctacttcactgttcaagaactttggcacagccactgcgagtaagggcttgctggggccgagtttcgaggcatcgggacggtacagctacagcggcaagcagccaacggcacctctctccatcatcttctcctctccaagagaagcgctaggcatggatatcagccaccatggccgccatgagcaccaccaaaaggattatcacgccagcgacagcgccgatgagccactgaagaagaaggacgtgtcgttctttgatttcctcagcatcggtgtgtcctcgtaatcaataataatattgcattcctgaaataccaatcgatgttgatcaatcaagtgtattgatcagtgtttgtttttttaattattagggcgaactgcatgcggtagtagctgacaagtattcagggttagagttcatcgtcattgatggttacagtgttctgatcatcatgtgctgattcatcagtcaaataaggctccagacacatggctatttaatatttatttaaaagtttttttactagcctactgaaaaaaaaaaaaaaaaagcggcc

SEQ ID NO: 126694 - DNA, 426 bp, Zea mays
  Clone ID: MRT4577_47010C.1
ccggccgggctccttcctttagtcagtccagccatccatggagacggtctccttcctttagtggcagctggccctggcggacctcgtccccgtctcgctgctccttgtgaaccggctcctctacggcaagctgcccccggggccgtggttgggcaccgtaggcgggcaacctgtaccacgtgcagcccgagcggcgaccctactaccagagagcgagcgcgacgggactgggcccatcatgactgcgtggctacgcacgtggcccactgtggggggatacacgtttgaactccgcaaggactggctgaagacccacaaaaactagctcggctaccgctggcggaaccggtgaaccgacagcttgacacgcttggccaggacctgatgctgatcccactacgtgccgaccatacatcaaggtgatca

SEQ ID NO: 126695 - DNA, 199 bp, Zea mays
  Clone ID: MRT4577_47011C.1
tgtcgaggtacatgtgttgcgatgagatccacctcgtggatcacaggggcatggataactggctcaaggtcacgcatggtgtcgaccatgtcttcaatcgcgctgctgatatagggggcatgggagttcatccagtgaaatcactctgtgattcatgtacaacaataccatgatcagtttgaacatgcaggatgctgtc

SEQ ID NO: 126696 - DNA, 163 bp, Zea mays
  Clone ID: MRT4577_47012C.1
ggatataattgccagaaccaggcttgaggttggtgactcttgatagagtttgtttcttcaggcctagatcagaaaattaagtgcagcaatatcatgaattctcagaagcgctttcagggagccagtgagtcatacagtatccacagttgagtcacttaaagat

SEQ ID NO: 126697 - DNA, 460 bp, Zea mays
  Clone ID: MRT4577_47016C.1
ctggggttttttttttttttttggtttcctctctctttctttctttttttgtgttctctttctttttttttggggacccaaatttggggatttttttcttcagaaactagcctcaaattggcttatgccaggcgttgggtataaaacatggcgtgcccaataactctgggaagggcttaagctgaacccgaaagaggatttacaaccccccgattaattgggcccaacattgtcgaattaaataaaggcccacccttatttgattcttttggggcggcgtttatgtaccccaaatgattttttggggggtttatagccctgaaacaaaccaagtgcccaggtccaactccgacaaaggagatgggaaaaccgccccccccccccggcacggggccaaccttttacccgacagtttctttaccccatccccccccgggggggacaaaaccccgcgccccct

SEQ ID NO: 126698 - DNA, 609 bp, Zea mays
  Clone ID: MRT4577_47017C.1
ccctcgagttattccttttttttttttttttttttttttttttttttttttttttttttttttttttttttttttttttttaaaaaaaactttacccctaaaaggggagggcccgggtttttttcttcaaaaaaataagggggcattgggggcttttttttaaaaaaatttcccccaaaaccaggggaaaaaccttttaaaaccaacccccaacttttttttggccaaaaattttcccatttgggtaaaatcttgggccaaagggttaaaaaaaaaaattattggggaacctgggggttcctttttttttaaaaccaggggggggaaaaatttttttctttttttcaaaaggaaattttgatggggggtgcccccaaaacccctttaaaaactttggttttttttaaaaaacccctgcctttagggggggctaaaggggcccccttttttaaaaaaaattttttttttaaattgttttttccaaaaaggggcagggcaaaaaaaaaaaacccgcccccaactaaagaccctttgcccttccggactttggggaggggggggaactttttcttcttggacccaacaccccaaaggcccttttctttgggg

SEQ ID NO: 126699 - DNA, 258 bp, Zea mays
  Clone ID: MRT4577_47018C.1
acagccattgtgagattcgctcgaatcatctgatccatgacttcgtgtgcgagccgagagatactgatatactatggctggctgcgtacgcgacagcgctcgcgactccccctgcgacacggtcaacagctgcctactaagcagcaagatggatccggacatggatgcacacccccatcaacaacacccatgctcacatcatggatgacgcaccatccaaggccacacgctgatcctaaagtgcagtcgcacatccac

SEQ ID NO: 126700 - DNA, 855 bp, Zea mays
  Clone ID: MRT4577_47019C.1
attggtttcctcgagcaaggtagggatgcacttccgagcgatttcctcgtcatttctctcatccgctgcgctccctctctcccactcggcgaagaaggggggggaaaagctcgaaagcgggagccggcgagcgagatgggcgcagggagcagccgcgcggacgcgccgtcgcggcgccgggcgcgcctcagcctcggcgggtgcttcggggccggatcctcctcgtccgcgcacgacggcgggagcttcgccgcggccgggccctcctcctcgcgcgccatcgaggtacaatcacgacagtcagggcgacaagtgagtgccctgaattttcaggcttctctagctgctaaggatctccaggtttccagtgagtcaaatccaaggctgcattcgtcttcaagtaccataagccatcatctcagattcaatcacctcaattaccatgaaaacaaggaagatggcctggggtctgaaaacgctgaaacaagtggtcttcaaagctcatctaggaaacctgtcatggtaaggggaagtctcattaatgaagctgttaatggtgacatatcaggagaaggaataagttctataggatcagagctggaaaatgttcctagcacagtctccactaatgaaattggtggctcaacttctgaatctggtttgggcccctcatcgatgacatctgaaaggatcatgtctgactcagaagtagagatatctccgcaagggacctcatccacaactgtcatgatgagtggaagatcagatgcatctcaatctagcttaacatctgtgttttctaactctttcactgcatcatctgtgatcgtggaaccaatgccagatccatcccta

SEQ ID NO: 126701 - DNA, 301 bp, Zea mays
  Clone ID: MRT4577_4701C.1
acgattgagaccaacaagcaccatataaagtgtaatccagtagcaacattacagcagcaatggcgaccaagatacttttccttcttatgctccttgctctttctgcatgtgttgctaacgcgacaattttacctcaatgctcacaagcttctatagcttcccttcttcccccataccttgcatcaatgatagctctagtatgagaaaacccagctattcaaccctatacgcttcaacatgcaatcgtattacgcaacatacctttatgacccttggtgtaacaattgctaggcatatctta

SEQ ID NO: 126702 - DNA, 226 bp, Zea mays
  Clone ID: MRT4577_47020C.1
gcggcagtaggcattacatacagatgttttatacttgcaaccggaaagctcaactcacaagtgatttgagatcatacacgatacatgtactcttgctgtttcatcacttctacggctgtacaacaaccgatgataatgagaggttcgctggaagtcagtctgaaaaaaaaaaaaaaaaaaaaaataaaataaaaaaaaaaaaaaaaaaaaaaaaataaaaaaaaaa

SEQ ID NO: 126703 - DNA, 217 bp, Zea mays
  Clone ID: MRT4577_47021C.1
ggggacattagggggagggccaccaccacttaggaaaaaaaaactacttaccggggtgctttttacagtaactacaaccaagacttgaggaaaaaaaaaaagtcccagggaaaaggggttcacactgctttttttgggctaccggcaggttgggactcttaagacctcaaagggggcacaatcgccttttaacccactttttgtaaatttcaaaggg

SEQ ID NO: 126704 - DNA, 366 bp, Zea mays
  Clone ID: MRT4577_47022C.1
gaaaatcccccgggccacaatttttattacatttttattcagagattcttacacacaacacaacacaccaaacatctgaaaatcccacacttccctacacggggaaaatacaacgcaggggtcacttactgacacttgaacacacccttacacggatttactttgaaccgggcatttttctagatggaaaccaacccgggtggggcgcacacccacacacaaagacatgaccgcttgggcaggggacccgtaagtaacgatcgattggcccctcctccaaacacataaaaagttttaaatggggagggggagacctggaaaaaagggttaaccttcccttggccataaagacctgccttttttttt

SEQ ID NO: 126705 - DNA, 379 bp, Zea mays
  Clone ID: MRT4577_47023C.1
cggcactacggcagccagccagccagccagcttctgctggaacaagaacagtacaggtacagcctcctccctccacagcagcgacaccaatggcatcgtggtcgtggacctctgttcactgcagcagctaccccctaccggggccgtcggcacgcttcacgccttctctggtctccgcaacaacaccggcgctcaggcggacgagggcgaggaggcagctgcagcgatgcctctgttcccagtacgccggcgaacgacagccgccgccgccgccgccaccgccacagccggagccggactcgtcgcagcagctggagcgcctattcttcaacctcaaccagaccaccatgaagcacgagccagaacgaaatgagatcct

SEQ ID NO: 126706 - DNA, 119 bp, Zea mays
  Clone ID: MRT4577_47024C.1
acggaaatccaattgcttttgcccgcggcaatacagacattggaaacgcaaaattaccgaaattcttaaacgcgcacccaacacagcctactgtatagagaaaaatggctcgaggaacg

SEQ ID NO: 126707 - DNA, 396 bp, Zea mays
  unsure (1)..(396): unsure at all n locations
  Clone ID: MRT4577_47025C.1
tggcngacgaggcggccgccccaacccaacngcccnnnggggagagcgcgccgccnccgccggcgacnnccggcgccccccaaacccgcgnccgggccnacccganggcacggcngcacgggcnngaggccgnccngccgcnggggancaccgggggcaggcgcggcancaggggcaacgcccagnannncanccacaaggccgcgcacggcaggccgaagcacagcgggaacganaggggggacggcgccagggagcgccgngacaagagagcggnggaacaancccccggcaaccaggggaggggagcaaccgaaacnncncgggagggggacgaaccnngggcaaaagcacagaaggacgggngnnngggggccggggcaangggaaccaaca

SEQ ID NO: 126708 - DNA, 464 bp, Zea mays
  Clone ID: MRT4577_47026C.1
ggggggggaaaccccggacaaaaggaatccccaaacctccccatttgggcctatccttttggggcacccccaaaatttttaaagaaaccaaccccatttttttaaaagatgggggggaagggaacatcatcccccctttttcactagcacgggggggagaggcttataacggggggggaaaaagaaaggaaaaattttcataattaaacgggtttcccaaacttttccccgggaaaaaccccaaacgggggcaaaaaacgggcccctcgaaaattaaagggggcataaaggggtaaggccgggcttttccggggggaaagggttaatttccggggggggtttcccgccgccaacactggggggcccaagaaagagagacgggggtccatcatttacaatatttgaaccaaaaagaaacgctttggggcccccggggtggggaaggggaacaaaaaagggggggg

SEQ ID NO: 126709 - DNA, 647 bp, Zea mays
  unsure (1)..(647): unsure at all n locations
  Clone ID: MRT4577_47027C.1
aatacaaccattcgttcgcttcgactcccactctcgctcgttctttcactctctagctccccctcgcccccctaacgggtaccctactcgtcaccacaataacagacactccacacctcacccgtcctacgcgtcaggtgctagctggtccacatgatcatcccgcatcacgacctctagtactaggcctctcgccggcggtagctgccgccgatgaccaccatgacctgaaggctatgcatctccgccttggtgtgccgggttgcgaatcgccggatctatcgagacgagtctgacatcacaggccccctgcacctgctccccagtatagtcggatacagagcgcccgctgaccaggtgccgacgccatccaccgaagccgattccgaccaacaaaagaaggctgctcaatactccgaccaatggaacgtagaagagactaccgcaagcgacgcanaagactatcgccgaccggcatcgccaccaatcccaacgtaccgcgagaacaccatgtctaccacccatatgaagggcatccaggaggactgctgaggccaagcatgatcagctcttcctgcacatccaggtcagtatggatggcgcaccgcacctcaagaagattgacctcatgacttactagaactaca

SEQ ID NO: 126710 - DNA, 122 bp, Zea mays
  Clone ID: MRT4577_47029C.1
ccgggacagcccgtggtagtagagagcacatgcagacttgttggcactaccaagttgcctagccgcggcagatagcagcgaataaatgcgtcaccactataaaaaacgaggcggtgtggtga

SEQ ID NO: 126711 - DNA, 181 bp, Zea mays
  Clone ID: MRT4577_4702C.1
aaacacactgaccgatctggaaagcagccacctaattacagtgacttgggaccatacacactcagtttattcacgctcatgtactccgcaacaccagtctgattatagcctgggcgtgcatatatacgccgcagctatttaacttggcccgcgttttagttgcgcgggcttttattattgt

SEQ ID NO: 126712 - DNA, 1189 bp, Zea mays
  unsure (1)..(1189): unsure at all n locations
  Clone ID: MRT4577_47030C.1
tgggaccctagcgccgggcggaaattcggcacgagggagacctgcatacatcgataaccctaaaaccccaaatcgcccatttcccgattcgcatcgccgccgccgccgccggggcttaccggctggtgccgccgagcgctgggctcaccgcgggccgacgccaccgccccacgggccacggcttccctcgatatatctgcattttgaagtttggtaaatagcactgttctatgtgccaagaattttgggagttactggcataatggaattctcaaagcaagggcaggcacccttgccaaacaacatcggactacaatcgctgccctcttcaaatgtccaatctaatcaaacagagtatccatctctgttttatccatcatcattgcctggtgactggagttcacatatgggaacctcagtaccagttagctcatattatattgtccccatgaatcaacaatcagtccagctaggtgcttcgaggccagaggtttcacatccggcacaacctttgctaagtagggtatcattgaggccaccccagcaggtgctaaatattcaaacatctttgccagcaatggctggatcacaaccctcaccatctatggcaggcaggaaatcacaacagaaagttgcttctccaaaggttcaaatgctgaaatctccatcattccagtcatctaataagcgatctgcacagaaggagccaccgtcaaaggatcagcatcatcaacttgaatctgttaggtccaagttcagggagtcacttattgctgcgctgagtttggattctgatcagctcgcttggagtctgtctcctgatgatgcgctgtctgatggtgctacagataaattcaaaccggcagcaggagatgtggtacaggatttagcggcaaacacatcaaaagatgtgtgcacaaccaattcaggtgtagccacaactgtagctcccagtagatgtgaggaaaatgagaagttaatcagtggtttagcttcagagatgnccatgagcatcaacgatgacatgcagcaaccatcaaatcaggtttcttcagaagacgacttattgggtcagtgtatggttgcagatgaacttttgcaaggtcacgggcttagttgggtttctgatcatgttgccgggatttctaaacctaacgcagaacctaatgatttaaaaagacccgacagc

SEQ ID NO: 126713 - DNA, 554 bp, Zea mays
  Clone ID: MRT4577_47031C.1
ccggccgggagcttgcactacccaggtaagtgatcggcggagcagagtagagactttctctcctccatcccatcccgtcgtcgccgtctctacgagacagataatgagaggcgacgcatccaggtatggatatgaagaagatcgcctgtgctgtcctcggcgcctgcccttccgccaccgtgtgcgctggccaggaggcgccgggtacacctcgcacgcacggaatcctcagggggccggcatctgctctcgcaccccgttgcgggatgcgtgtacgtgcaccaccttgagtgacgcgtccaactacgcggccatcgacaacctgaacgagctgaacatgcaagaggactcgttctgcaagcgcatcgtgtagtggtgcaagcacttcgcgaagtctgcccgcactatgcctgcgcacgagacggaggcggtcacgttctgcgacaccatgtacatgaacacgtatgataccatcggtacttggcagcgggccatcacgttcaatgacaccaggcacgacaagatcatgctgcagctcgacgtgcaggacttct

SEQ ID NO: 126714 - DNA, 189 bp, Zea mays
  Clone ID: MRT4577_47032C.1
atggactgcaggagcacaacgacgatagcgcaccgcggcgacgcccccgtcggcgtggagcccaattccacacccaacgctccatactcgaatctaattggtgcccgagaaagaggacatgaggacgacagcgatggcatgcttcttaccgtcagtgagtatgtcgacgagactgtccacggatcttga

SEQ ID NO: 126715 - DNA, 545 bp, Zea mays
  Clone ID: MRT4577_47033C.1
aattcggcacgagggttccttactccttcgactgcctcctgggcttacttgatcggtgctgccctatggggcttcgtgtccgtacactgctagctcttggcgtgatcaccgtgcttggctattacacaatacttactcttggaaagaagctaagcccgctaacacgtctgaacgaatctaactccctgccctcccaactgctatcccacggacgcgcacgaagccgcgaacggttgaatttactccttccgcaacgcccgccctgagctttaatttctaagactagatcggcctgctctatgacccctgctaagaatgatgatgcagctcaacatccggcgccacccccgacacatgattcgtaagatgtgaacgcgcagattccaggagactgttgatgtccgagatggcggcctatttggacttaccgctgctcaacatggtaggcggaggtctctagatcacggtgaccagacttcagcacacggctgtccgtggtccagctagacgagaggcgctaagccagactacatcgtgagatactg

SEQ ID NO: 126716 - DNA, 384 bp, Zea mays
  Clone ID: MRT4577_47034C.1
ggcaggcagcttaagaaaacagagagggttttagtgtttgcccatttaggacttcagtttctcttacgaaacaaacatcttagccgtcggtgctcacttcactttccagtgacgaaacttcgtcagcagttttctcttacgaaacaaacatcaaccgtccggtctgtgtaagtgtaaccaccaccgaaaagaagaaggtaattactactcaacacctaacgcgtgtactgcagattaagctgcacttatcctcggcgcctaacaacgcatctaaagatcctgcactatcttagcactaacaccgctatagattatgcctacggaacgaaactgcatgctgttgctgaccacgcccaccaggaccattgtttagtaacgtcagtg

SEQ ID NO: 126717 - DNA, 494 bp, Zea mays
  Clone ID: MRT4577_47035C.1
ccggccgggaccaatggcccgggaattgcagcgatttgagggacccgaacagggcacgcgcccaggcgtcgaatgctgcgccggagagacaccctgacgtggatagtctacgcgcgacgaagaggggagaggcgtcgctgtgaacgttctcatgcacgtgagctggacggcatccgtcacctggcgtaaggatctatatgtatccaaaacgcataaaccaatgtgcaatgagagctagagcaccaaaacaccagcggtcagtgacgtgaattgaaaatggcttacgtatagtgctgatgaagtctgtgtactcaccatgaacacaccgatgcaaacattattacacgaagatgcggagtgcgacaactactaaggctggtgacgccaacataaaggctgcctcattcatatgacagaatgacatgcacaggactatgagagcctcatagtgcgcgatgaaggacaaaccacatatgtgaacctaccgtacggac

SEQ ID NO: 126718 - DNA, 279 bp, Zea mays
  Clone ID: MRT4577_47036C.1
tactgtagagtgtgcccgaggcccgttcgtcggagctctagcgcccggcctcgcccgcccctggctgccgcgcccgcccccggccccaaccaccgtgcccgccggcgcgcgttccctcgaccgcgcttgccggagctcctgcccccggccctgcccgccgtgcccatataacctgccaaaaccgagcgaaccacatcctgtcaacgttggtggcaggcgatccaaggaaagcgatgacggcgtacgaccccaaagacgacgtcaaccgcctcttcgctt

SEQ ID NO: 126719 - DNA, 311 bp, Zea mays
  Clone ID: MRT4577_47037C.1
gacacgcgtgggcttactcctggcttgatgactactgtgcattgccatcactgccacccataacactgttgatcgaccctcactcatagtcacggtggaggtggcttaggctgcctgatttaacgtgattcccagcaacagctctgctgtctcagttaaaagtgccgtatgcccactcttgtatgcatgctctctacaatgaccttgcggtttacgccggtggacgcgttagatgaactccttactgttcaacaaagaaagagcgcctgtaactaggtaaactccatagcttgaatgcagcatatgtgggc

SEQ ID NO: 126720 - DNA, 303 bp, Zea mays
  Clone ID: MRT4577_47038C.1
ccttgctgttttctttttttttgtggttagcggacgggggagggaaacagtggcagcactcgctgcaccattttcatgctttgagatcacaaagactgtcaagggtgtggagaaaggaaaccgtcttcaaacactcacaatcggcatactccgagaagacaacgtggcaatcgatcacatgaaggcagctggagctcgatggaatcaggttgctgagctaactatggggcttgaacttgctcctctcacatcggctgaattgattgatggatgcggtccacttgtatctgccctatcaggatg

SEQ ID NO: 126721 - DNA, 367 bp, Zea mays
  Clone ID: MRT4577_47039C.1
gtccgtctgattggattgctgctccattggtacagttgcacccgcggagatttaaagcaacgtttgtttggttgttcggtacataaatgcagactcgtctcgtgcaaaatatcacccccagccaggcccgtccgagacggccgccaagcacgtagtgcaacggcacgtaaaaggaggagagttgtagcttgtttattttttgctatatctcttaattagaatatttaatcacagtactgattttatatttgtgtttctgttattttttaaacaaaactagaccacatatattgtataatatttaaagattttttgtacaatcttatctaatacacgttctgatacagacaaccaaacacgagctatt

SEQ ID NO: 126722 - DNA, 293 bp, Zea mays
  Clone ID: MRT4577_4703C.1
gtaaatattatggttttgtggttttttttttttttttttttttttttttttatttttttttttttgggattgggggcaaagcaaaaactccccccaaaagcacagagttttttaaaaccaaaagtgcttaaagggaccgactttaattacaaatgcaaaatcttaagctggtcaacaagggatgatgggagggaacacccaaacattgccctgggcccaaacaaagggttttcaaaaccacaacctggtttgtcgggcaaaaagattttggcaggccggacactgtttcttct

SEQ ID NO: 126723 - DNA, 501 bp, Zea mays
  Clone ID: MRT4577_47040C.1
gcgtgcgtgtactgggctgctattacacggtcgacctatgctttcgtttgagaccaagtagctacttattagtggaatgccgtaccatcattggcaaacatattttttgctgtcttatgcttattggtttttatgcagtgctgctactgacggttgttggacaatgcttacaagcttctatagaattacgttgtttcaatgtgcctattagcagcggtggtttgagggtgcgaaaactcagttcttcaaccctacaggaatccaacaagctgttgcagcgtgcatattgacctttatcaccacttgttcttgctacaatccgtggtgcctattacaggctgtacctttgatgcatttggtggaacacaacatgaaggctcaacagctacaaaagcttgtgctaggaaacctttatgtctactattagcaacagcagtttcttatattcaaccaactggcatgcattgaactctgctgattatttgcaacaacaactaccat

SEQ ID NO: 126724 - DNA, 1237 bp, Zea mays
  Clone ID: MRT4577_47041C.1
cattgggtacctcgaggccggccgggagacctatccactccctcatgcagcatcgcggctaacttcccagccactgcttgcaccatcccgattcccccccacccgccgcgcaacaaggcgcaacccagaccccggcccctccagctcggaaaacccccccgacgagccaccgccacgcgacgccccctcactcactcactccgccgccctgcccgccgcgcgaggccggtcctggaacacggcgcgccgcgctcgtacccatgccgtaacgcccgaacccgccaaccgcgccgcagccgcctcgccgcgcacacatgcacttcccctcgccgcgcgcgctcgccatggccgcgccggcggtcgcccgccctcgcctcgcccccgtggctcaccccgcctcgacctcttgcctgctggccctctgggaccggaggcgcgggcacggccgcgcggttgcggcggtgagggcgcgcgagcaaggcgcggcgccgcccgacccggcggccttcctgcgccggccggaggtagcgacggtgacgtcgacggaggaggagagggaggccgatgcggggtcctcgtttgatggccccggggaggacgaggcgcccgaggaggaaggggtccgggggaggaggaaggcgccggaaagggagtgggtggattgggaggaccttatcctcgaggacaccgtgccgctcgttggcttcgtacggatgatcctccactccggcaagtatgaaagtggcgatcggctgtgtcctgaacatgagaaggcgattctggaacgtttgcttccataccatccacaatataatgagaaaattgggtgtggtattgactacatcacggtagggttacatccagaattcgaaaactcaaggtgtttattcatagttaggaaggatggcgagcagatcgatttttcgttctggaagtgcgtcaaaggtctcattcggcaaaagtaccccatgtacgcggacagtttcattctcaggcatttccgcaggagacaagactactgaagtagttgctcgtacggctgtttcagtgttatatttttctgtgtaattgattttgtcctgtccctttcatatcatgcgattctagcatttgttacgtggagtttttcattaagcatattattccatgcaacataaatagatataggtttgtcgcttgcagatgaaattgtagcgcgccatttagttactacatttctaattgtgagtcgttcttt

SEQ ID NO: 126725 - DNA, 312 bp, Zea mays
  Clone ID: MRT4577_47042C.1
ggaacaagcttttttttttttttttttttttttttttaatttttttttttttttttttttttttttttttttttaaaacccaacccccaaatattaaaggaaccacccccttccccaaagggaaaagtaaaccgggacaggggggggatctttggaaaaaaagggaaaaaagcccccataggggggtcaaacgtcttccttttgctaggagcccgggggaaaagcttaaaaacttgggggcgaagttgggggaaagccaaaaaagcccctaaaacaacccttaaccaaagggaacacaagggctcgggggga

SEQ ID NO: 126726 - DNA, 301 bp, Zea mays
  unsure (1)..(301): unsure at all n locations
  Clone ID: MRT4577_47043C.1
gagcacgcgacgcgcgcccgagaaggaaggggaaaacanggcggcggcgaacggggacgcgngccgcagcgncggcggggggccgcgcccgacgaaccccanggggacgccgcngcncaccgacccgnaccaggggaggggggggcgacgccnacnggaaggccggcaagcaccncgaccgcgcagncnnagancncaacnnccggaaaaanccannnggcggggagnncaccaccgncggnggccccgaggaacgcacaaggcgcaccgcnaacnncaagcgcacggaggaggaaaccaa

SEQ ID NO: 126727 - DNA, 3005 bp, Zea mays
  Clone ID: MRT4577_47044C.1
cctcgaggccggccggggtctgtgcggctctctcgatttcaagctcatcctcgatgagtcaaccggcggttcgacgagctagagattcgctgggaccggcgcttctcgtccgccgcgtacatcgaccttccgcccacctcgctcagcatcaaccactcctccgacgcgtctgccagtgcgccgcccaccccggtcgcggtcatcgcagacaattggggcgggtgctttgacgacggcgagcagtaccgcactaggccatccgtcgtcgtcgacaactggggcggattcttctatggcgaggacgtcgctccgtcagacaaccccacgagattcgtcctccccgttgcctccaccgacgagcccagcatcgacaccgcgccggcccgcgccaactctggagccgcggatgactccgtgtttgtgaccgccgaatcctccggctacgaggaaccctccggctacgacgagatggatgctcgactcgacctgcgcttcgccaggctgcagcagctgcaagctgaggaggtggacgagccgtaccgtgacgcggtgagcccactgcctcctctacccgtcgtctacgagccgtaccgcgaggcaagccatccgcctcccgtccacgacgacgttgcgggggtggtgtccacgggctcggatgatgacctcgacctgcagcagatcgccaaggagccgtccgtgtcgtcgccgccgcgtcacagctcgagagacgccgtccgaggtccttgccctcgtccactgcatcaccagctaactattcccatcgcggccaacctggaccaaatctgccgcctatccaggccctgcgatgtggccgaccggggtctcctctgtgacctgctctggtccgacccttcttccatggaggacagagagtgggcggacaacaaggatcgatacgtgtcctgcaccttcggcgccgacgtcgcgacggactgccgccgcgcgcaggacctggacatcgtttacagagcgcaccaggtggtggaggacgaatatgagttctctgtcgaccgacagctcgtcaccttcttctctgcccccaactaccgcaagctcggctgctccttcaccatcatcaagctgaaggcggacagaaacagcagctcgcccctcgggtgttcgaccaaatgtcccagccaggcactgcaccccattgtcaagcccaatctagtagtcgtgctgaatattgcaggtgctgggggcaagttatgtggaggatttgatatcaaagttttcacaagggttcatcagactggggatgtatcgcttatgccaaacgtatccattgagcttgtgtcaaacatgatggaacagggcaaacaaccttctgttgcagccattccaggtcttgcattgggtggtggcctagagttgactatgagttgtcaggctcaaatacctactcatgttgctcacaccatctgctcgcttgttaacaacgttatggcatcgcaggctcatgtcgtcggacaagggatcgtagaccgcgccgcgttcggtggcgatcaccaatggatcgtccaaggtactgccaatggtcacgggctctcctccaaggttgctgctgaggtgaacaatcagtttagagttggtattcagactactgcgattattcatgtgctgccaaggggtgtcctacagtttggctctactggtttggctttgggaaacaaaaaaattgtgatgtttgcaaagacgttgtgttctcagctaaacaatcgttcaagcctagctgcatctgcttcggctaaaaacacttcaagacagcatggccagtcacttattgataatgcaattgtgtcaaccagtacaccaccaaatgtattgttgattgcatctttgctttgggctgcacaacagaatggtcaccctgagctcattggaaaaacaccaatagtgaggccatcattagatgttgagagacacattcttctgaaaggagcttttgataaagctgaggaaatagtcttgagaatgaagcaatgggatggtactgcgggacttgtttggcagaaggatagcttaatggtgcccaagtggcttactgacagattgatggcatttctaatattctatagtgaggccattacagctcttctctgttgtgcactcattcctggcctgttattgctagaattagtcaagttcacagagacttggcaagggactgtttgctgggagccaacaatcctattgttgacgcggagacacctttacaaacagaatgagttgtatgcgacactttttgagggagctatgattgggtacactccaggaggaatgcaatttgctcaagaaactatagagacgatgatttcaagcaatctcttcttgactgccgagatggccaatactctatctccatggccatggttcaattgcgttcaagagtgtgtgctgtggcagtttgatttattggatatatcggctcttcatgcatcgagaattggtttttcatttgtgattatactgacggaatctatcaaagtgctcaagatgctgctagtagaccaaggtgctgcaggacatttctttgtcatgatttgggatcctggtggaattgatgccatgtatcggcttgagggcaagccgaattttaagaaggggagaatgtcagcagcccgccatctgaaccatgagccactgtcactgtctcaacaaggaagctggaccaagacgagcaagtagctgatgaagatactttcagagtccggcgatagtttctgttgtgcaaaataccagtgtgcaagaggccgagcaaatgtaacgcatccaaaggcccacagtccgcttcgtcttggcccagaatagcgtgtaaaggttgcgtgtgtctgtgttgggctgtggcgctgaataagtacgcgcgccgtcaagatccttgtatcgaacaactgaacaaacaattattctctagaaatcacatctgttcttctcctcctttaaaaaaaaaacacaatcactttttattgcataatttataaaaa

SEQ ID NO: 126728 - DNA, 234 bp, Zea mays
  Clone ID: MRT4577_47045C.1
ggttggagaactcgacaccaagaaagtgctgatcgctgcccttgctctactggcgctcgctgggagcgccgtctacagtacaagcggtggctgtggctgccatataccaacgtttcatttaccggcttcgttctatatgccggcttcgttctatattccggcggagcagcatccgcatccatggcaataccccacttaacctccgtagcttatcccgtgccagcagttcggatc

SEQ ID NO: 126729 - DNA, 597 bp, Zea mays
  unsure (1)..(597): unsure at all n locations
  Clone ID: MRT4577_47046C.1
agcaagaaggccatcaaggtgttctccagtgccaagtaccctgctccagagcgcctgcaggaatatggctccatcttcacgggcgcccaggaccctggcctgcagagacgctcccgccacaggatccagagcaagcaccgccccctggacgagcgggccctgcaggagaagctgaagtactttcccgtgtgtgtgagcaccaagccggagcccgaggacgatgcagaagagggacttgggggtcttcccagcaacatcagctctgtcagctccttgctgctcttcaacaccaccgagaacctgtacaagaagtatgtcttcctggaccccctggctggtgctgtaacaaagacccatgtgatgctgggggcagagacagaggagaagctgtttgatgcccccttgtccatcagcaagagagagcagctggaacagcaggtcccagagaactacttctatgtgccagacctgggccaggtgcctgagattgatgttccgtcctacctgcctgacctgcccggcattgccaacgacctcatgtacagtgccgacctgngccccggcattgccccctctgcccctggcaccattccggaa

SEQ ID NO: 126730 - DNA, 235 bp, Zea mays
  Clone ID: MRT4577_47047C.1
cctccttttttttttttttttattttttttctggggggctttttttgatgaggaggggcggtgaatttactaaggggggataacaacaggttgtaaataccttggcccgacaattgttcgacaggaaaagttacaattcttttttcgggtgaaatcaaaaacaagtcagggcccgggagaagttcccaacggtaattgggggggcatttcactgccccccgggatccgggttccc

SEQ ID NO: 126731 - DNA, 424 bp, Zea mays
  Clone ID: MRT4577_47048C.1
gtgttgtgcccccccaaaaccccgccaaaaactttaaaaaatgaaaaaaggaggggtccccgaaaaaaccgggcatggggaacgccacaaaaagggggggcgcactccccccttcgaacaaaaaccccaataagagccacaacagcgcggagcggacaaaaaagggccccccttaggcaaaccgattcctaaaaaggaaccggggagcgccaaaagtcgaaaccccggcccccgggggcccaagcccaaaaaaacccccttaaacgggggccggcccatggggaaaaccagaaaccccaacaccggtacttaccaaagggggaccaaccaaagaattggggggaaagaaaacggtctcccaaaacgttgtacgagggaggaagccagccaacaaaaaaaaaaaagaaagctgtataaacaaaag

SEQ ID NO: 126732 - DNA, 659 bp, Zea mays
  unsure (1)..(659): unsure at all n locations
  Clone ID: MRT4577_47049C.1
gggtttattccgccggaagcgaacgggccccttatgttttattcctaagcattcacagatctattaagcatgacccacataggaaagacagacgcactgtaggctaaaattttatccctgtcaagtttagcatactgcctgttaattcggctgttagatcaagaatctaaataggctctctaggagtcgtagttataaaatgctagcagcgctaacaacttttgctgccttccggtgatcgagcgagagtggtaacaacgagagtgtggacgtctccggctacacgaagagtaagtctctgctgtaccagtactactactaacaataactactaagtacggagtaataaataatcatagatgacccggaagaacaaaacctggtgattgtggccagccgatctggcttctttatctacactgtttccgcttcctaaccccaataaatacatataggtcaccgctcgcagcatcatatgggtcacaatcatgacataccgcagtgtcgntgtcgttgagctactgctgtctgctggtaatgtaataacagtgcgacctggtggatactctgacgactgaacggtcaggccccatgctggtggcatgcatgcatgcatgcatgcgggagaatcttttggagttctttctactaacatcgcc

SEQ ID NO: 126733 - DNA, 450 bp, Zea mays
  Clone ID: MRT4577_4704C.1
cccactcgtccgggaattcttggggtgcatggcttgaggttacgaaagatgccggatggacctggagaaagtatggccccatatgtataaaaggtcaaccacttggggtgattcagccagttccctacaggactgacgatggaactattcgagtgttgctgcgatcatttgaaacaattggtcatgtctgtatggccgattccattgatgaaggtgtgacatggagttatgtccgtgagactgagcttccaaacccaaattctgggattgatggagttaagatgaaggatggaatgagtactgcttgcctacaacaccttctccagaggaacgctcaagcttgcagtatccttaaacgacggtgattcatgggacgaagtaatgacactagaggacacgaaaggatggagttttcgtatcctgcagtgatccagtcttggatgagctcat

SEQ ID NO: 126734 - DNA, 429 bp, Zea mays
  Clone ID: MRT4577_47050C.1
taccgttcggaattccgttcgagacacgcatacgaggctgtcaacattacaatgattgatacacctggccttccacctgggttattgaagtgtcctactcgaatacacttctgcttcattcgcatggtaacacacgcgccatatcatctgtctgcactctcacacgcttcaacatgtctatgctacaacagactacgtgcctaccgatcatccgtccataactgaggtgctcctcgccatttacgtatctgacaacacttcataatgctccacatccatggataacaaaaacatccagttcatagaactcatctatatcactcacatcttccaaactcaaaactatcccgagcgccgtcttatctagacctgcgagtgtgtactctacacttctgagacacgcccttgcaaaagtccaaaattttactt

SEQ ID NO: 126735 - DNA, 324 bp, Zea mays
  Clone ID: MRT4577_47051C.1
atggcaattcttcctgctccacagaagattaatcatctagaggttttggcaatgtctggaatacaatctatgtgtgacaagtttgtgaaggggctcattcctgtgcatggttcaaatctgaaggagttagcatttgctggttgcttggaacttacctcagcttccatcaagactgttggggaatattgtcaagaattaacttcattggatctccgcaacttgaataggttgtgtgactcagcactgtggcatcttcgtggttgtaggctactaaggaaactaaggcttcaaagaaacgcattcagcttctttctggcattctaa

SEQ ID NO: 126736 - DNA, 348 bp, Zea mays
  Clone ID: MRT4577_47052C.1
ggggtcagatcaggcaggatcagataagatttgctctggttaggctacctccgcgccgcgctggaactccctccttgtgaggttgttgaaaccgacaaggaacgggaacgtggggcccgaggaaggtcacgctgttagggtttttccttcgcgagcgatcccttaagcctccggatactccctgctcttgttcctccgctgctttatcgatcagttcaatagcgactatggccgtgtatctgcccctgccacggccccgattcggactaatctgattcacctgagggcggccgggagagattgggaaatcctgtcttgtgcccatgcgctctgcactgtcagttatgc

SEQ ID NO: 126737 - DNA, 250 bp, Zea mays
  Clone ID: MRT4577_47053C.1
aagtgttgggggtataaaggaaaggagattcccctttccttcttcccatgttttttcattttctcatccggaatcaccaccaccaccacccaaacccaaaccccattttacacaatcgaccactgcgtcaaaaaaagaacctcccgaattccatcctaagatggcctaaacctaaaaagaaaggggaaattcctcattcttttctcccagaccttcccaaccggattaggggatcaggaccctttgctca

SEQ ID NO: 126738 - DNA, 626 bp, Zea mays
  unsure (1)..(626): unsure at all n locations
  Clone ID: MRT4577_47054C.1
gggagttcgaaactcccgtctcgtgccttctttaactttgacgacgtgcagctgtggatgtcgtgtcgcttacacctccactcagaacgggaaggccgagcgcatgaatcgcactatcaccaacctcatttgcaccctcctgttttaggcctccctgcttgttattgggctgagggctttcacactgccacctacctcttgaaccacctctcctccagagggggtcaatcatcccactcctttctttgccccattcaacaccgtaccttcctatacgcacattcgtgtctttggctatgtgtctgctatcctagcacctccgccatcgctccttgccaacttgtgcccgatcgacttgctgccttttccttgggtactcctctgatcaaagtggtactgttgcctagatcttctcaccaagaacatcatctttagacatgctttcaatgaggacgcgtttcccctgctggctcgtnctgacctcgacgtcgacgtgcctcctctctccttaccaccgatcccgtcgacgtgccttctccttaccaccgatcctgtcgaccttttgcgcgccctacgtgggcgtattaccttcgaccgctccacacgtgggcctgcttctttgacct

SEQ ID NO: 126739 - DNA, 434 bp, Zea mays
  unsure (1)..(434): unsure at all n locations
  Clone ID: MRT4577_47055C.1
cggacgcgtgggctgacacgttgccggacgcgacagctgtcgcgacctctggcttaaggcggcatgatggctacacctttgacagccgcatccatggcatactgcatctcgctcagagcatcgatgaggacaattctcacgacgccagagctgaaatacctgctatgaaggattactcctatcagagcgagacctaggacgtcaactaagctgcacaccactcacgagtatacctctagacatatgactaccgaaatcttgactactgtttgaggactcactcacaacaacttgcttcctgcacaaacactcaatgagttccggaggaatcacatatgatacattgctatacagattgttcttgttatctggaatcctactagtatagtacatgttctacatgtcngttttgcctgaaaaaaaaaatnanannt

SEQ ID NO: 126740 - DNA, 272 bp, Zea mays
  Clone ID: MRT4577_47056C.1
gatttgtgaaaaacgagcccttatacactgaggttgcagatggagtgtttgttggaggatggccttcttcggttgaacacctgccaccaggtgaccctgcaatcatagattgcacgtgtgagtctccaaaaagctcaactatatctaacaatgcatatctgcgtgtttctacctgggataccagggctccttatccattacatatcgagtccgccgtgctatgggctgtgtgacagcgctcacagagcaaacctgtcttatttcactgttcc

SEQ ID NO: 126741 - DNA, 392 bp, Zea mays
  unsure (1)..(392): unsure at all n locations
  Clone ID: MRT4577_47057C.1
gcgagtacaagctttttttttttttttttgagaggttgttgtttttttgtnaaaaggtggtgtnaagtggtgggagggtgaggaagtggagagtggtnttggtggtatgaagaaggantataaagtggntaatnttntatgntgggagggggggggggaggnnatggaggagaaggggggagtgnttgatgagtaagaagggnttntggggtngatttgnttntgagttgtttattttatatngtngaaatttngtggttgtggtttggttattntgtgaagnagnnaagnnaagntattgttatgaaaatttgtggtgtgtaagnatgtgaaattaatgagttgnnanatgntggataagtntgaataagtaagtatgnagntntaggtgg

SEQ ID NO: 126742 - DNA, 531 bp, Zea mays
  unsure (1)..(531): unsure at all n locations
  Clone ID: MRT4577_47058C.1
attgggtacctcgaggccggccgggagcaagatcagttcagcatcccgagccccaggttttcgctcggagccggcgctgataccgtccatgggagcgccatcgctggacttgctgggaatcgacgatttcaagctcgacgagcctagcccggtggtgcccgaggtcaagcaggagccacagaaagagccggagcgcgtgcccgaggacgcgaaagccgatgactcggagttcccggagttcgacttcgacatcgtcgacaagggcgtggaggtgcaagaagagaaagatgaaccgaaagaagaggctgagaacaagaaagaaaccggggacggggaggagggtgaggaggaggattttttatttttctccccccccccccccgtggnnaaggaggtggggctcgacagtgcgcacacgtggcgcctaaacaaactcgaggcgatcaccaaccagatcaaggccctcgagaatatgatgcacagcgatgtgctggaagctggtgacaagtcgccggaacggtgggacgacca

SEQ ID NO: 126743 - DNA, 3606 bp, Zea mays
  Clone ID: MRT4577_47059C.1
aattcggcacgaggatttctgggttttgggtcgtctccacgggctgggtttggggtcggtcggcggcggcggcggagctaggagtggaggcctgagatatactccaagcgggagtctgggcgctctctgcggtcggagaggcgcgggtgagatctacgagggccgctgcgtcgttctcgcagggccggcggaagacatgggtttcctctcggcgaagctgctgccgtcgtgcgagagcgtgtgcgtgtgctgccccgcgctgcgcccgagctcgcgccgccccgtcaagcgctacaagaagctgctcgccgagatattccccaagacgcccgatggtgctccgaatgagaggaaaatagtgaagttgtgcgagtatgctgcgaagaacccattgcgcataccaaagattgccaagtttctagagcagaggagtcacaaggagctgcgctctgcccatgtgaacttcgtcagaatcatcactgaagcttacagcaagctactcttcatttgtaaggagcagatggcatattttgccatcagcctagtgaatgtccttaccgagcttctagaaagcaagcaggagaatgttcacatccttggctgtcaaactttagcaaactttattaacagtcaggtagacaacacatatgcacgcaatattgaaagcttggtgcacaaagtatgtgcactttcacgtcgacaaggagaggatcacaggcttcttagggccgcaagcttgcagtgtctgtcagcaatgatctggttcatgaaggagcattcatacatatttgctgattttgatgagatagtgcattcagtgctggaaaattataggacagaggaatctaatggtggtggtgatgacagacatgcattgcagcataattgggttgatgaaatagcaaggtctgagggtagacctggtgtaggtggtggtaatgatgtgaatattaacactacaactattaggttgcggccagcaagaaattcgtcagctcttacaagggatgaacgtgactccccagaagtatggtcacatatttgtgtccaaaagcttgcagaactggccagagagagtacaaccatgcgtcgcattctagatccgatgctttcatactttgatatgaagaaacagtgggccccacgacatggcttggctttgcttgttttgtctgatatggcttatctggaaaagagttcaggcaatgaacagctgattctaaccaccatcatccggcacttggatcacaaaaatgttttacacgatcctcagacaaaatcagatattattcagacagcaacgtccttggcacgacaacttcgatctcgaggatttgctgttgaacttgtagtggcaggtgacttgtgcaagcacttaaggaaaacacttgaggccgtggaatcaggcaatgttgaagatcagaatttgaacgaaccccttcagattgtcttggaggactgtcttatggaagttgttagaggaattaatgacgtacggccactctatgatatgatggcaatcacattggagaatttgccttctatgccaactgttgccagagcaacccttggaagcttgctgatcatttcacacataatctcgttgacatcagtatcttccaacaatctgatggtatttccagaagcacttctccagcagatactgaagtccatgttacatactgatattgatactcgtgtgggagcacaccacatgttttctgctattattgtccgagggccaagccatctgcggagtgaatcagagtacctatatgaaacaaaaaagcagtctcggaatacatctgtatttgcttcagctactgctctactggagaagttaaggagagaaaaggagagtttgagttcagataagcctcgaaatatcatgcatgatgatgtgaaggaaatgaacatgcatgaagaggataaacgaaaaaacccagcttatttctctaagctggtttcctctttcattgaaagatgtgcaacacgaagttctgtagaggagaccaatattgccatgctaactgaagatcaaaccaaccaattgctgtcttcattctggattcaggcaaatcaaacagataataccccttttaattatgaggctattggacattcatacagcctaacagttctttcttcccgccttaagaattcaagcaatggcaatatcattcagtttttccaattgccattatctcttcgaagtgttgctttaaccccgagtgaagttctgccggcttattgccaacggtctatttttacattagcaatgagtatgctggcctttgctggaaaagtttgtcacgtcgctgaactgtcggacttgctaaggtgtttttcatcttccaaaattgacccttacctaagaataggtgaagacttgcaactctatgtaaggttgcaatcggatctaggcagctatggttctgaaagtgatcaagagattgccaaatccatgctttctgactgcaggacaaaagtagggattaacgatcatcgagtgcttgatgttattgcctctgcactttctaatttcattgagatgggcaaggatgtaatagtgaaggagctgactgagttgttcacgcctgaagagatgcctctgtttgggtcgaattcagcacttgactgggccaacttcaatgcacaagcattttctgatgaatccctttcttttgatgaggaatgttcaagaacctcttcagtagattgtggcttgcacgagtcaccaatcaccaacactgctagctctatctcaaagattactctaccacagtctgttccacatgttttaggtgtcggtcaattgttggaatcagcactacatgtggctggccaggttgcaggtgcatctgtttcaacctcacctcttccatatggtacaatgactagtcaatgtgaagcccttggattgggcaccaggaagaagctatcgagctggcttgtcaatggacacgaatcaaccccggacaatcctatgccaagccttcccactgcccatcattccatcattcccaaggtaaaccctgccacgttccgcacatcatctgaatcatgttctgcagtaaagctcccacctgccagccccttcgataacttcctgaaggctgcctatcgcacccagcccgagctgtgatcgatttacctaagaacaaccctcttcacgagtgctaggctgcagtaccaaagcatagggtactagattatctaaaggaacttatctatgacgttgttttagttgtagtagcgtaactatgtgtatctatctactagatgtctgtaacgtttgcatatgtatcatcttacgactgtgcctctgtagttgtaagccgcgagttctgtgtcgcatgttcagactgagttgtatgagaatactgagtatgcttggcactcctgtatacagtatgcttgccaaaacgtttcttccgaggtcatcaaaaaaaaaaaaaaaaaaaaaaaaaggcggcagccgttaccttgggaatgatgaaatgatgggcagtgggaaggcttggcataggattgtgtcgcatgttcagactgagttgtatgagaatactgagtatgcttggcactcctgtatacagtatgcttgcc

SEQ ID NO: 126744 - DNA, 537 bp, Zea mays
  Clone ID: MRT4577_4705C.1
cccacgcatccgctggagacgcgcacggccggcttctcgttcgccgtcagctccaacatgctcttcaccttcctcatcgcgcaggcgttcctgtccatgatgtgctccatgcgcgccttcatcttcttcttcttcgccgcctggatcgtggtcatggccatcttcgtcctcacgctgctgccggagaccaagggcgtgtccatcgacgagatggtggaccgggtctggcgccgccattggttctggaagaggtgcttcgccgacgactacgacgcggccagggtctacgacaactgctagtgctaggcacgcgcgccgccggggattagtttttttgtcattgtaattagaaatcggcctgattaattgatttcgttgctatgacatttaaattgatgtcgtggcaatcaacaggcaaaactatatagtatatgagaaatatgctcgagttctcgtgtgattcgtatcgtcctcgtatatatcttatatgaggaaaacatgacggcagaattgattctacgtacattatctgggtca

SEQ ID NO: 126745 - DNA, 1300 bp, Zea mays
  Clone ID: MRT4577_47060C.1
cccccctcgagtttttttactatcttttttttttttttttgaactacactgtaaaagtgttttgattactaattaataggggttttatttcactcgatccaaagacgacactactaactttgcaaacaggcacaaatgcgatgcgtcatctacgcgcagatcgagcacctggaatcctgtgaatacacagcagcacagctgcatgcagagtctacaactacctgaggatctgtcgccaccgaacgcagcgggttcagtcgtaggcggcgctgaagaaggccttgacgacgttggcggagaggatctggaggacgccggagttgttggcccggccgacgcagcgcggcgacttgaactggctgacgggggcgccgagggagaggtagtggcggagcaccttctggaaggtgccgcgctgcagcacccgcagctcgagcgggccgatgccgcgcgccctccgcgacccgacgtagcccgggtccgcgaaggcgcggtccagctcgtcgcagcagctctgcagcacgtcgtcgccggcgtcggcgttcagctcccagaacaccacgtagtggcccgggtcgcgcgacacctccgcgtggctgctgtagtccaccacctccagcttctccgccgccaggaccttggccgcgctgtccacggccagctgcaggtcctgctcgctgctcttgtcgatgttgatgctcagcaacaggttccgccggcacacgaacttgagcttcggcgtcgagttgtagaacccggccacctgcaccacgtcccctagacggtaccggtacagccctgcgaaagtggtgacgacaacctcgtagtgctcgccgacggtgacctcggttagcccgacgggctcgggctcagcctcggcgtagcacgtgtcgccggcagtgccgccgccgtggccggtggccgccttgagcgggatgaactcgaagtaggcgatgttggggagcacggtgaaggtggcggactccggcggcgtctcgggctccacgttggcgccgacccagccctcggacgcgccgtactcggcggcgacgaggggcaggccgcccgcgtagtggcggagcttcttcacgtagtgctccatggtccccgtcatgatgccgtgcacgtacctggcgttggggaacagcgccgggatgacgccgtaccagttgctgagcccggcgcaccggcgcgccacctcgtctgcgcgcgccgggtccgggcccgccagcagcgcctccacggccccgcgcacggccggcgcggcgacgcgcgcgggcgacagcccagcccggccggc

SEQ ID NO: 126746 - DNA, 403 bp, Zea mays
  Clone ID: MRT4577_47061C.1
cctcgaggccggccgggccggcagtatagctcccacctgccagccccttcgataacttcctgaaggctgcctatcgcacccagcccgagctgtgatcgatttacctaagaacaaccctcttcacgagtgctaggctgcagtaccaaagcatagggtactagattatctaaaggaacttatctatgacgttgttttagttgtagtagcgtaactatgtgtatctatctactagatgtctgtaacgtttgcatatgtatcatcttacgactgtgcctctgtagttgtaagccgcgagttctgtgtcgcatgttcagactgagttgtatgagaatactgagtatgcttggcactcctgtatacagtatgcttgacaaaaaaaaaaaaaaaaaaggcccctagggcc

SEQ ID NO: 126747 - DNA, 630 bp, Zea mays
  Clone ID: MRT4577_47062C.1
tgctttaaccccgagtgaagttctgccggcttattgccaacggtctatttttacattagcaatgagtatgctggcctttgctggaaaagtttgtcacgtcgctgaactgccggacttgctaaggtgtttttcatcttccaaagtaagttctagcgcagagaataataagataattatgtccttttcacacaaaatacttcatgctatatctccattatggtttttcatgtttataccagtttctgcttctgtactatttagcaaatgtaaattcatttgcttttatgtatgattagtcaaaatgtattgttaaatgctatgcagattgacccttacctaagaataggtgaagacttgcaactctatgtaaggttgcaatcggatctaggcagctatggttctgaaagtgatcaagagattgccaaatccatgctttctgactgcaggacaaaagtagggattaacgatcatcgagtgcttgatgttattgcctctgcactttctaatttcattgagatgggcaaggatgtaatagtgaaggagctgactgagttgttcacgcctgaagagatgcctctgtttgggtcgaattcagcacttgactgggccaacttcatgcaccagcatttt

SEQ ID NO: 126748 - DNA, 721 bp, Zea mays
  unsure (1)..(721): unsure at all n locations
  Clone ID: MRT4577_47063C.1
ggcttttattcgcttcttaacggtctggcacctaaactattgtctcttttccacaacgtctacaatctattctccggttcaacaacccgacttgcacttctgcacacttctctctccccgacctttcaagatgcaaatcaaggctgctctcattgccctcgcgggtctctccgccctctctgaggcttctgtcttagaacgtcgaacccctctggatcgtgctattgcccgtcggcagttcggtggcggccgaggcggtggcggtaacaacaacaacaacaatggcggcaacaataacaacaatggcggcaacaacggcggcaacaacaacaacaatggaggcaacaacaacaacggcggcggcaacggcgctaccctcctcgctgataacatccaggcggcttccaacagcaatggcggtgccgacactgaagccgggcagtctccttccaagactgaccccgacaacttcatcaacttctgttctggccagaccaaaaccaacggtgaacaggtcgaggccggctcctgcaacggtattgtcatgggcaaaatccccgcaattggaaagatggtctccagtgtgatcgttaaccccctgaacggggctaaccttcaagcctgaccagactttaccattgaggtcaagatgaacaatttcgctcctggaacctttacgaacccggcaaacacctactacgctgcntctcaggatcttgac

SEQ ID NO: 126749 - DNA, 469 bp, Zea mays
  Clone ID: MRT4577_47064C.1
gcagcaccaagaagcaccattttttccttaagataaacttaaaataaagcctgacgggggtaacagcatccatcgatccgaagcccatgctgtttgatgcatgggtctgctgaaaccgaggatgagcacagtttttacaactgccacaaagcgaccttgcaatcaaaaacacagatgggccacaacaaacacgacccggacgaagataaaccctttggactaggggaaacatcacgggagcgaacaggataacttggccgagcgggccccaccgttaagttcctacagataccgtccgagttgccatagccgccggcaccgttgccaccgtcgtagtcgtcgtcaccaccaccggagtcgccgtcgtaaccgtaattattcgccaccggcgtaacccacaccgacataagagcgccctacaccatcggagacgacgaatccaccggccaaactgtatcaacattcgact

SEQ ID NO: 126750 - DNA, 705 bp, Zea mays
  Clone ID: MRT4577_47065C.1
gtggcttgcacgagtcaccaatcaccaacactgctagctctatctcaaagattactctaccacagtctgttccacatgttttaggtgtcggtcaattgttggaatcagcactacatgtggctggccaggttgcacgggcatctgtttcaacctcacctcttccatatggtacaatgactagtcaatgtgaagcccttggattgggcaccaggaagaagctatcgagctggcttgtcaatggacacgaatcaaccccggacaatcctatgccaagccttcccactgcccatcattccatcattcccaaggtaaaccctgccacgttccgcacatcatctgaatcatgttctgcagtaaagctcccacctgccagccccttcgataacttcctgaaggctgcctatcgcacccagcccgagctgtgatcgatttacctaagaacaaccctcttcacgagtgctaggctgcagtaccaaagcatagggtactagattatctaatggaacttatctatgacgttgttttagttgtagtagcgtaactatgtgtatctatctactagacgtctgtaatgtttgcatatgtagttgtaagccgcgagttctgtgtcgcatgtgcagacgactgagttgtatgagaatactgagtatgcttggcactcctgtatacagtatgcttgccaaaaaaaaaaaaaggggggcgtcc

SEQ ID NO: 126751 - DNA, 224 bp, Zea mays
  Clone ID: MRT4577_47066C.1
ctcccttgctcatgatcatagggccacccaccttccaagccaggggaatcaccatgcacgacgcctgtcgcgcgcttgaaggacgtgttccataacgtcaagaccgacgtctatgacaagaagccgaagctgctcgagcctatcaaggccggccagacgcccaagtacatggtgaccgcctgctcccactccctcgtagctcgtctgtgaccctgggcctgcag

SEQ ID NO: 126752 - DNA, 402 bp, Zea mays
  Clone ID: MRT4577_47067C.1
cgcgtacgtaaagctcggaattcggctcgaggccccctcggcagtgcgttttttccttgacccgctgacgagagaatacggtggagtcttctacttgagcggggctgcgatggcgctgcaatggaacactctcacgcgcgcggagacggcggaagctgtggtgactgggctggacacgctcccgatggccagctctgtgatgcgccagatcgtggtgctcacgtgcttgatcgtgccacccctgtgcagggtgagacccttctgcgggatacagacccgtgagctatactggaagaaggagcacgcacggaggtgcacctaccagatttgccaccaactacagcgcattcgattcgagaaacatctgactcaagctcacggaactgtcattttccgtggttc

SEQ ID NO: 126753 - DNA, 269 bp, Zea mays
  Clone ID: MRT4577_47068C.1
cttggttacgccgatgaacgactggcgtctatcaccatataaagaagatacacatcataacaaacagaattgcaccaactgaaccaaaaaagatgacccataccatacccgaactgacatgcgtgggaatcgatagaccaaatgaacaggaaccaaccaacacagaacacaacaaggcttagccgacgcaggcatgggggaccgcaccactgtcaccgggccccatcacgattaccacgcaacgcatactttatttatcccacgtgtct

SEQ ID NO: 126754 - DNA, 155 bp, Zea mays
  Clone ID: MRT4577_47069C.1
aaatacagcccaaccccaagggccggaacagtggtggaaacagggggaagggccccagggcacccaacaggggagacactgtaaaacccggaccgggggggcccggggaaactgaccaggaaaaagaaggccccatggcaaaacggcgcacgaag

SEQ ID NO: 126755 - DNA, 247 bp, Zea mays
  Clone ID: MRT4577_4706C.1
agcagagaaagactccaaggacgtggaaatggaagaggaggcagggaagcactccaaagacgtgaatatgaaagagaaggcagggaaggagtccaaagatgtggagatgaaagagaagatagggaaggaatccgaatatgcaaaaatgacacataaggcagggaaagaatccaaagatcgtggagtgaaagagtaggcacggaaagactccaaagacgtggaattgaaacatgaggcatggaacgac

SEQ ID NO: 126756 - DNA, 492 bp, Zea mays
  Clone ID: MRT4577_47070C.1
ccggccgtgtgataggacactggcagggctacagcagcattgccgtagcactcattccattagacaaagcagggcgctggatcggccggaggagtgggccgaccacccattccacgatacattgcaaccgtgtatgcttctcggccatcgacatcatctcgacctcccgatccacacagaactgtgatgcttggctcgacgtggaccgttacaagacacagccagatagctcgacggcgtcatgacccagaaggcgagccggatcccagatacaacatgtatacgagatgcatgcatggacggccctatgcgtgaaaatccatgatggagaacgacgactcgtccgccggcaacgaagaatggcacatgcatacttgctactcgactcccatagctatatatagagacatagtacatgtaactgtcgtgatgtgtgcagaagtgctactggctactgtatatgcatgtcatatgctcacgcattatggatat

SEQ ID NO: 126757 - DNA, 289 bp, Zea mays
  Clone ID: MRT4577_47071C.1
ccttcgtggggtgcaagcgcaaccgggaagcgggagcaccgcagcttccagccgctcaagacggccgtgtgcgtcaagaaccactaccggcgcagcactgcgacaagagctacacctgccgccgctgcaacgtcaagcgcttctccgtgctcgccgacctgcgcacgcacgagaagcactgcggacgcgaccgctgggtctgctcctgcggcacctccttctcgcggaaggacaagctcttcgcccacgtcgccgccttcgacggccacgcgcccgcgctgccgcccga

SEQ ID NO: 126758 - DNA, 428 bp, Zea mays
  unsure (1)..(428): unsure at all n locations
  Clone ID: MRT4577_47072C.1
tccattccccaccggcgaccgcatctagcggaccagtgtagcccaagcggcagccggcaggcgcccagcagcagcattgcaggttgcagcaaagcgagcgagagtgagacagagctcacaagcctaacaccctctctccttcacctcccacatgcgcctccgccgctcctgtcgccggcggcagcgcgcagtcttccctccgcccctccagctcctccaagctcctcagccccggccgcggtagtgccagcgcaagcggagctgagacagtgccggccccccctctgcacccctcactcagccgccgcctccgcaacagcggcagcctcaagggcggccagtccccaatgttcccgtccgggtctaccggcgggggncggcgcaggcgggggggcgttggccctgtccggcccgccttttccctgggt

SEQ ID NO: 126759 - DNA, 678 bp, Zea mays
  unsure (1)..(678): unsure at all n locations
  Clone ID: MRT4577_47073C.1
ctccaagngccaagaagaccaaccacgtcaaaggaggataagcatcaactcaagtcttcaaagatcaagttggatcgccacaggaatcaagatccagagttcaagatgaagtctttccttattatacccttgccacaacctctacttgccataaccgtacctcatctgacctaatagatggctagacatacaatattcatattttctaaattatctactaacagttatgtaaaaacttgaacaaaactttgattcccaaaaccaaacgagaaactaaaattctagaccaatcctattgtatccctagatcttcttaaatctcgaggacgagattatttttaaggggggtaggatttgtaatacccaaaatgtatacagtgatactatattggatctcgttattttatgtaccatatttgcatcataaaaagagcatgcataattaagagtgattaattaaaacaaatgatactaaaataaaataaagtgcatccgttgggagtttttgcttgtgcatttaattaataccatagtaataaaaggaatgaaaatataatactgacaatgtggtgggagaaagtaaggaaatgggaagaaaagaaaaganaaggagagtatataatacaaagagaaattatatttttagaattggtacctcttaattttacaatataatta

SEQ ID NO: 126760 - DNA, 210 bp, Zea mays
  Clone ID: MRT4577_47074C.1
aaaaaacgtgcctctgcctgacgacgtacaatgttcatgggatgactgggaacatcactgcaccagttagcacatcgtcatgtgagctgggcaccaatccatatgatgggggttgtgtcctaccaggacagtatgagtattaccactgtattggagtagttcgcagttggggatacactcatgtccacacacagcacagcatcatgtgcc

SEQ ID NO: 126761 - DNA, 1219 bp, Zea mays
  Clone ID: MRT4577_47075C.1
cattagtataaatgtgtggttctgcacttcagtttggttcatctcactcatcagctagcaccaccaggaagtaggaacacacctcccaccagtccactgtttcatcgctcatcactaggctgcaatggctgcaaagtcacctgtgcttgcagcactggtactgctcctgagctccgcccagctgtccacgggggcaaggaggcgcatggagctgtaccagcccgatccggcggacatgctctcctaccacaacggatccgtgctccactccgacatcttcgtgtccgtgctctggtacggcagcttcacgcaggtgcagaaggcgatcatctacgacttcctgctctcgctcaccacgacgccccaggccgcctcgccgtccgtcgcggagtggtgggacatgatcgagcagcagtacctgtccaaggcggcgcagaccaccaagcataccaccacccgggtgatgctggacaccacccaggtgtcgtccgacgacggctgctccatgggcacgtccctcaccctgtcccaggtctccgccctcgccgcgcgggccaggcccaggaagggcggcgtcgcgctggtgctcacggcgcaggacgtcgccgtggagggcttctgcacgagccagtgcggcctgcacggcgcggagtccggcgccggcgccgcctccgcgtacgtctgggtcggcaactcggccgcgcagtgccccggccagtgcgcgtggccgttccaccagcccgagtacggcccgcagaccccgcccctcgtcccgcctaacggcgacgccgccgtcgacggcatggtcgtcagcctcgccagcgcgttcgccggcgccgtcaccaacccgttccgcgacgcctactaccagggctccagcgacgcgcccctggaggccgccacggcgtgccccggacagttcggcagcggctcgtacccggggtaccccggcaacctcaagatcgaccaggccagcggtgccagctacaacgccaatggcgcgcaggggaggaaatacctcctccccgcgctctacaacccttccacgtctgcctgcagcacgctggtctagccaaaacacgaatgcagtgtattatcgtcttagcttgtttgttcaggaggttccgtttatgggtgtatgtatatatgcaagttcacatcaggtgtagtgtaattgtaattctttcgttttaaagatcgtcttgctttctttcttaag

SEQ ID NO: 126762 - DNA, 130 bp, Zea mays
  Clone ID: MRT4577_47076C.1
ctggggatgaaaaccttcctgctgtgatctgacaccttcggggacattgaccactcaaaactcagatcatctcgcccaccctggagagtgcagagctatctgtagacttaggaatacttgatgggcagcg

SEQ ID NO: 126763 - DNA, 287 bp, Zea mays
  Clone ID: MRT4577_47077C.1
atcgtctgctccgggctgctgttctgcgcctccacaaggctttggcctctgttgtaaggtagcatttcttctcgtgttttcgttctccctcgctcgaactcttttattagctgcttgatgcgatagagactggatcaaggttgtactctgtcgccttgtccctgtagtctgtcctcggttagtctgtttgcgattaatgatagctactgcgcggtcttgcttgctatcttgtttcgactggatcaagtgtcagatcgaatttttttaggtgtatagctgctgtagta

SEQ ID NO: 126764 - DNA, 1257 bp, Zea mays
  Clone ID: MRT4577_47078C.1
ttgggatcctcgcgtccgacgagcaaccccatgcgcaagaaaatctcgcgatttcccctcgcagtctctcgcacgcgccggcatggcgacgctcgcgcggtggcatctacaacctcctactgcccgccccctcgctcgccggcggatcccgcgccgggctgcgaccgtggtttccccgcgcgcgttcagccgcgcggacttcgatggcttcgtgcggcgcgcgtggcagggcgccaacgcgggggccgagcgcttcgccttcgaggcacggcaggccgcgcagcggctggacagcaggttctcgatctcccggaggctcgcagacgcttcccgtgccgcccgcgcccgcgcagttgagatcgacgccgagttcggcatcgggcggcggtggcgctccttctctgtcgacttctcccgcaactggcccaggtatcggagggacatcaatgacttcatgggaactcccatcgggagagcattagctacaatatttttcctgtggttagcactgtcagggtggttgttcagaattttcatttttggcacgtttgtgctgccatttgctgcccctcttctccttgggacctttgctaacagggttgccattgagggaacatgcccagcatgcaaaaggcgtttcgtgggctaccgcaaccaagtgattcggtgcatgagctgccaaaacattgtatggcagccaaataacagcccatctggtggtgctagaagttcacgaagctcggaacctgatgtgattgatgtagaatatgaagagaagtaagaacattctgccccaccctacaccgaaaagcaaaaatcacgtgggcggaagaagaggcaaggcttcagacacaggctgcaccccatgagctatttgtagatttggttgtttgtgtttttttggtgtacatacattacgtgctcctttcgaaataaaatggaaattctggtgttgtgcacagcgagacgatgtgtggcacctttcgattttaggttctggtgtatccatagcttattgtactgttgcatctggatactaggaaacatcttgtaaagcaagcagcttagggaagactttgtacaatcactcacttcatacgacgccattgcaaaatgttaatgacaattaaaataaccagtaaatctatatgccagatcaaaaaaaaaaaaaaaaaaactcgagcccggtaaaggaagggcggccgcgggctggagtgactcggcgtcacaagaattaattcagggccggtcctgcag

SEQ ID NO: 126765 - DNA, 325 bp, Zea mays
  Clone ID: MRT4577_47079C.1
ggactatcgcgagcgccatgggcgacgctgcggtcctgccgccacatagtgctgttcctccgcgccgccgccgcaacagccgcgacggctgcggcggaggcggaccggatcggcaggctgccgggccagccgccggtcaacttctccatgtactccggctacgtaaccgtgtacgcggcgtcgaggcggaatctcttctactgcctcatcaagacgccaactagagcccgctcacgccgctctggtccctctagggcgaaaaggtggatcatccggtccgtccctccgctatgcaccgtcccacgcgctacacctagcctgacac

SEQ ID NO: 126766 - DNA, 246 bp, Zea mays
  Clone ID: MRT4577_4707C.1
gctctgggccctacaactgcaccctgagccggagctgcccagtcgccgcgggaccggggccgttggggtctggacgggggtcgccatgatccgcttcatcctcatccagaaccgggcaggcaagacgcgcctggccaagtggtacatgcagtttgatgatgatgagaaacagaagctgatcgaggaggtgcatgccgtggtcaccgtccgagacgccaaacacaccaactttgtggagttccggaa

SEQ ID NO: 126767 - DNA, 198 bp, Zea mays
  Clone ID: MRT4577_47080C.1
cacacagccacagcaaatcctaccgtaccgtaaagcacaggacatcaaaccgcgcaggaacgagcactaccaaacgtttcttgtaaccaccatacccaacatcacacaacaacatcaaccctacacacactaacgcacacacacataccatcatatacgagccaacatcacaactgaagctaccacaactgacaccaa

SEQ ID NO: 126768 - DNA, 287 bp, Zea mays
  Clone ID: MRT4577_47081C.1
aagctacacgaccgggcccggaaccttctacataacggtttgtgtatgaattcatgacggggccacatttcctgctaacaatgcattggcctctaaactacggggggataatccagcttatctatttcgggccactcaccgtttttggggcccgtatttcgccacttgttgggttttgcaactggcgcccatcgtatttcacagggaagaagaggatccggcctttggaccctttccggcaccccttttagaagaccactacaggggactggggcgcccccaggttc

SEQ ID NO: 126769 - DNA, 162 bp, Zea mays
  unsure (1)..(162): unsure at all n locations
  Clone ID: MRT4577_47082C.1
gatgcatattttcttgggcatattattagaagttcccaacgcaccacaaccagaggcctaaagaaccccccaatacaaaacgggcgcggaagcgggntacaaaaacaaatctattccaacgcaaactaccgtaggacaaccagtaaataccacgggctagat

SEQ ID NO: 126770 - DNA, 311 bp, Zea mays
  unsure (1)..(311): unsure at all n locations
  Clone ID: MRT4577_47083C.1
aagcattatagcctttacttgatggcttgatgctctgttgtctgagattaatcgagactagtcgccttgtctgtgccatgatgactagaattgactagataatttacaaacctcgagtccacaggtacaaagttgagcaatatatgctcagtgcaacattgatttcaagaaggatcgtgtggcttctcaattctattttataatgatcatcagtgtttgtatcaaagtttctcagtcatttgttgtanaaaaatatttgagtcttgatttgttttttcagctctanaaagtaacacaattcaacatttcct

SEQ ID NO: 126771 - DNA, 208 bp, Zea mays
  Clone ID: MRT4577_47084C.1
cgcaccatgatggtgacaaagcagctgcagatgatgatgacgatgatgtccagtggcagactgacacttcaattgacgctgcgaacacgacatgccagagcagctgagtgcagcaactgctgaaatggtgatgctgtcgactgaggagactgagaagaagatgaaaacaggcaacccacacagatgaagcactacatggttcagcaaa

SEQ ID NO: 126772 - DNA, 200 bp, Zea mays
  Clone ID: MRT4577_47085C.1
gcagaactgccggatgagcaagatcttctacatcgcctgctctcctgacccggcacgcttgaggagcaagatgatctacgccacctccaatgagaggataaagcgggagctggacggttttaatgtggagctccaacccaccgactacggcgaggctggccttgacatcatccagggccgatcaatctgagagatgccca

SEQ ID NO: 126773 - DNA, 357 bp, Zea mays
  Clone ID: MRT4577_47086C.1
ggcaggagttaatggccccttttttattcaccattaaaaaaggtacaaacagccggtggggttcgagcatccgggcccaaaaggcttttgcaaacagtttgggagggggaaaaaaaaaaataactgaaattaaaccatagcccacagaggacacaatatcacaaatatggccgggaccgggagtaattaaaaaaaaactggggctaataaaaaaaaaaaaatgggacctgactacacaaaaaaacagggaaaaggccataaacccaatctgttaaattaattaaaaacttgccaaactatgggaacactgacaaacgaacagggattaagggggaggcatctttgatatagaacggg

SEQ ID NO: 126774 - DNA, 188 bp, Zea mays
  Clone ID: MRT4577_47087C.1
aaaaaaaaaaaaaaaaaaaaaaaaaataattaaaaaaaaaaaaaaaaataaacttccacagatacttttccaaactcacttacacttccaatcaacatcttacctatcttaaatttacacctaaattacaattaacaaccctttcttctcacatcacatcacatataaaactctctctttacccaact

SEQ ID NO: 126775 - DNA, 113 bp, Zea mays
  Clone ID: MRT4577_47088C.1
aggaaaattaggagcggggaaagggcgcacggatgacccactggggacccccttataacggagatatagagtaaacattacttaaagttgacagggggctttgaaggcgcatt

SEQ ID NO: 126776 - DNA, 498 bp, Zea mays
  Clone ID: MRT4577_47089C.1
gcgcaatccaaattcaaaatctctggtcagttaaaatacgagttacaacagagaggtggatcactcttgaattaggagattaaacttactaaacaatgctacatccgcaacaaaaggaactgacgcacttgccggctgacacaaattcgaccatataaaatatgaagatgtacgcactttggagctaggcatccaatgttacatctctcagtttgaatttttgctgcccctgctctcattgaaccaatgaagtgccatacaccacatggagacagaattgcttgcctaaggtatgcctgatctggtgtagaaagctgtcttatagctgctgtgcttaaatgcctgattttagtttcgatcattgggaggcccgttgtactattacacaaatcacactgctggaccatatgcttcctataattgggcatgggaagatgttgttttcgatgggcgctacgactactttactttcttcttgcaaggctagcacatgtgagc

SEQ ID NO: 126777 - DNA, 395 bp, Zea mays
  Clone ID: MRT4577_4708C.1
gccacgcgtccgcccagacgtgcgagcgggggtccgcccacacgtcagcgcacgcatccggaaggcatcacagctgcgaacacagatgatgctcaaatatggtgcaggacagctgtcttatcagtatatcagtgatcgagtcctgcctgacaaggccataggactttattgaggaagggggagccaatcttacgcttaagcatgcgcaggtcactcttgaagccagggagctggacaaagagttgtgacagagaactaagcacaaaaacgaggatgaacacggacaggattttgagaaggatggggaattaatggaccgagaaatggaactgaaggctcagagtacggccatgaccgacaagagcagggaaatgaataaaggagaaactgaatct

SEQ ID NO: 126778 - DNA, 768 bp, Zea mays
  Clone ID: MRT4577_47090C.1
agattcggtcgccatggcgagggaccagcccgcaccgtcttataggtaacttggacgaaaaggtatctgagagaatcttgtatgagattcttattcaggcaggccatgtagtagacctgcatgtacccagtgacaaggagagtaacagtctcaaaggttacgcttttgttgagtatgaaaccgaggaaatcgcacaatacgctgttaagcttttctcaggacttgttcggatcagtggtaaaacgcttaagttcatgattgctggttatgacaaaccgtcttcaaatgtcaatacctcagtaatgctcaatcctgtaccctcttcaaatggcaataatccagtaacgcctaagctcaaccctataccattaccaaaacagactcaaataatgtgttgtagtgacatgcctgtctctcgtaccctagcatatcaggtggtaaacgggaggattggaggttatgtcttttctctcactccttatccatatggttttcaagctttatcaggtggacaagtacacggccatggccaggtaagcaaccgtacctatgattacaataggcaggaatttggttctgttctgagcattgtccatggaggtcctgttatgaatttcctttgcccatggagttgcgaattgaaccagtcgatcatgtacccttcctaggtgcagaagaatgtagtatgtttacagtaggcaggttccagctccacataggttcttgacatggtcacgtctagattttggtaatagtcatgcccaaaca

SEQ ID NO: 126779 - DNA, 262 bp, Zea mays
  Clone ID: MRT4577_47091C.1
ctaaattcgtaatatctttcgcttgtaaacaatggtggattgcgtggaaagaattagcgtctcacgcgcataatcaggatgcgtcgtggggataagatttccaaacagatgaacctacccgtactctccacatgggctgattggagaggtatggttgcgaacagcaatgcggcaatgctttcctccattaaacattgggaactgattccatcgaaatcaaacgaagggccacagcccacagagtttacaaaagtaaattgcg

SEQ ID NO: 126780 - DNA, 2931 bp, Zea mays
  Clone ID: MRT4577_47092C.1
atgtctgaagacaagaagatccctgctgagacgaagctgagtctcgaggaggagaagaatctggggttcctgatagcgatggcagagactaatacagagaaaatcacgaaggagattcttgaaggtttgtccgaagatactgatgacagcgacagctatgatgtggaaagtgatggggaagaggccgaagatcgaccgtggcgaccaagtcactcagtttttgggaaaacaaccatcaagcagagtcacattgataatatgagggggcgatacttccgagacatatctattgtgagagctgatgccggggaaaagacttctcccacccctgaagaagatgaagttgtgattttccgaagcctcctcaaggctgggcttcgattccccctgagcaattttgttattgaggtactgaaaacattccaaatctaccttcatcaactcactcccgaagctattataagaatggggatttttgtctgggctgcgagaagccaaggtttggaaccaaacgctaaaagcttctgcaacatacacgagttattgtacgagacgaagccctggggaaaggagcaataccacaacaactttgggtgctacagcttcggcgcccgctccgggtcaagctaccctgtgccaacctttcggaagaggtggcccggagcctggatgtctgaatggttttatgtgaaaaatgatctaacagcgcaaaataatgtcaaaagtatcattatgtacccaatttggcaacgcttcgggcttcgaaggccgaaggttgaaatggatgaagcagccgaagaatgccaaagagccttcggcgcagtctgctccttcattgggacaagggacttggtccaggaacacattgccttcagggtatggccacttgcagaaaagtgggaaatgccgaaagaaaccatcaaagagtccgacgaaggcggactagtcagattaaaatacacattcaaatatgcagataaatttattgaacctgatgatgactggctgaaaagcattgaaacattaagtgatgaattacttggggcattctcgaaggctgaaaatactgcactatcagcagccttcggaggccgaaaaaagaagagactgaaccgagtgtttgatgcaatcgggttcttctaccctgattattgttatcccatccgaaggcaaaaaaggaaaaacataacctctgaaaaagaagaagctgcaaccgctcctagcgagccagaaccaaaaggaaaaaggttgaaggtcttcacacaccgaccacgccatattgaaccagcttcggtgcctgagtatactggaggaaccccttcggccgctgaagctgaacggccactcttattgccagaaattgcagagatggccgaagcaccatcgacagaaaaaatggaagaagcgaaaaatgtgactaaggaaaaaacctcagaaattttaagtcctgcaataaatgttgaagcagcaaaaatccaaaaggctccaatggtgaccccaaaaaggaaaagaatggtaaatgtactagatgtcttggagacaattaagtcttcaagcacaactccaaaaaagagtgttgaaattgctgaagcttcctctgaagctccgacacaacaaactgaagctgaagctgggccttcagagcccttcaaggaagaaactttggaagccgaagcgataaaaataccagaaccaattttagttgaagagactgacactgccatccccgaagcgcctgccagcatgtgtgattacatcatacgacatgcttcgggaaaaaagctatctgaggaagaaactcatgaagctaaccattatgcaaaggagctgaaatatccgaagggggcagtaatattcaatggaacaaatgaagatgacttcttatactgcctgcctgataacaaagagctatccgtctgccgagagatggccagaagcataggctttccgaagcttgaagctgggttaagtgccatgacgaaagaagatctcgcagacagccttgcgtacaacagcctgaagggcctgatcctaagcaacgcgttaagagcgcaaaagagcgccgaagatgaaagttatgaaattgcgtttaataatttacgctccgaagttatcaaactgagaaacgaagctttggaaaaagataaaattctgcttacactggtagataaagtgaaaaaagacgaagctgcttcaaaggcccaggccgaagctcaaaaacgcgagattaaagatcttcagaaacagctggctagagctaaagaggagcgcgcgcttgaggaaacgaaacgagaacttagtgattttatggtcagcaaattggaatcaagagttaaggagcttcgcacatctcaggggaaatgctatgtcaaatctgtagaatgtgtgaataaaattaaatccagcttcgccagcgtaggcgccttttccagcgaagagaatttctctcgaggcaatcccgaaggtccgctggaatggattagccacgaagcagaggccttcgaagagattctgaacagtcgtggcgacatatgtgctttttcgggcgccagaggaattgcttccgtcttggagaagaaaggttgcgaacatgtaaaatttttagctcaatccgaagctaccttatctaccgaagacatcaaggacccctcggccgaagcgagcgtggttggcggcaaattttttactgatatctggaacgacggcggccgaggaatggcgcgagagatcattgaaagaagcgaaaaaggcattcacgatgctagaagagtagcagacgctgccgaaaggagtagggagcccgaaaggcagttaggtaccaactagtcaaatgtcgacgaagaaattaaacaaatggccgaaactatcttggacaaggttgttgaccaacttgtaaatgaggccgccgaagcagtattgagagaagattag

SEQ ID NO: 126781 - DNA, 2910 bp, Zea mays
  Clone ID: MRT4577_47093C.1
atgtctgaagacaagaagatccctgctgagacgaagctgagtctcgaggaggagaagaatctggggttcctgatagcgatggcagagactaatacagagaaaatcacgaaggagattctcgaaggtttgtccgaagatactgatgatagcgacagctatgatgtagaaagtgatggggaagaggccgaagatcgaccgtggcgaccaagtcactcagtttttgggaaaacaaccatcaagcagagtcacattgataatatgagggggcgatacttccgagacatatctattgtgagagctgatgccggggaaaagacttctcccacccctgaagaggatgaagttgtgattttccgaagcttcctcaaggctgggcttcgattccccctgagcaattttgttgttgaggtactgaaaacattccaaatctaccctcatcaactcactcccgaagctattataagaatggggatttttgtctgggctgtgagaagccaaggtttggagccaaacgctaaaagcttctgcaacatacacgagttattgtatgagacaaagccctggggaaaggagcaataccacaacaactttgggtgctacagcttcggcgcccgctccgggtcaagctaccctgtgccaacctttcggaagaggtggcccggagcctggatgtctgaatggttttatgtgaaaaatgatctaacagcgcaaaataatgtcaaaagtatcattatgtacccaatttggcaacgcttcggacttcgaaggccgaaggttgaaatggatgaggcagccgaagaatgccaaagagccttcggcgcagtctgctccttcattgggacaagggacttggtccaggagcacattgccttcagggtatggccacttgcagaaaagtgggaaatgccgaaagaaaccatcaaagagtccgacgaaggcggactagtcagattaaaatacacattcaaatatgcagataaatttattgaacctgatgatgactggctgaaaagcattgaaacattaagtgatgaattacttggggcatactcgaaggctgaaaatactgcactatcagcagccttcggaggccgaaagaagaagagactgaaccgagtgtttgatgcaatcgggttcttctaccctgattattgttatcccatccgaaggcaaaaaaggaaaaatataatctctgaaaaggaagaagctgaaaccgctcctagcgagccagaaccaaaaggaaaaaggttgaaggtcttcacacatcgaccacgccatattgaaccagcttcggtgccggagtttaccgggaaaacttcttcagccaccgaagctgaaaaactaatcaagtcagccttgttgccagagatcacagaaacggccgaagtgccaccaaagattgaattagaacaatcaaacattttgttgtcagaaacaaaagagaaaaccgaagcgccgctcacagaaaaaattgaggaagtaagagaagcaactgagggctccaaaacattagaagttttgagtcctacagcaatcgttgggacagcaaaacaccaaaaggggccattagtgaccccaaaaaggaaaagaatggtaaatgtactagacgtcttggagacgattaagtcttcaagtacaatttcaaaaaagagtgttgatgttgctgaaggttctactgaagcttcggctcaacaagctgaagctgaagctgaagctgggccttcagagcccttcaaagaacaaccttttgaagccgaagcagtaaaaattccggaaccaatattagttgaagaaacgggcaccgtcatccccgaagcacctgccggcatgcatgattacatcatacgacatgcttcggggaaaaagctatctgaggaagaagcttatgaggccaaccattatgcaaaggagctgaaatatccgaagggggcagtaatattcaatgggacaaatgaagatgacttcttatactgcctaccggataataaggaactatctgtctgtcgagagatggcgagaagcataggctttccgaagcttgaagctgggttaagtgccatgacgaaagaggatctcgcagacagccttgcgtacaacagcttgaaggtaccggaattaaacgctgcgcaaaacccgcagaagagcgccgaagatgaaagttatgaaattgcgtttaataatttacgctccgaagttatcaagctgagaaatgaagctttggaaaaagataaaattctgcttacattggtggataaggtgaaaaaagacgaagccgcttcaaaggcccaatccgaagctcaaaaacgcgagattgaagatcttcggaaacaactggctagagctaaagaggagcgcgcgcttgaggaaacgaatcgtgaacttagtgatcttatggtcaataaattggaatcaagagttaaggagcttcgcacatcgcagaggaaatgctatgttaaatctatagaatgcgtgaataaaattaaaaacagctttgctagcgtcggcgccatttccagcgaggagaatttttctcgaggcaatcccgaagatccgctggaatggattagccacgaagcagaggccttcgaagaaattctaaacagccgcggcgacatatgcgctttttcaggcgctagaggaattacttctgtattagagaagaagggttgcgggcacgtaaagcttttagctcagtccgaagctaccttatgctccgaagatatcaaggacccctcggccgaagcaagtgtggttgctggcaaattttttactgatatctggaacgacggcggtcggggaatggcacaagaaattatcgaaaggagcgaaaaaggcatccatgaagctaggaaagtggcagagactgccgaaaagagtagggagcccgaaagacagttaggtaccaactag

SEQ ID NO: 126782 - DNA, 690 bp, Zea mays
  Clone ID: MRT4577_47094C.1
ggccgcttttttttttttttttttcgagagaaacctgaatcaatactattaggttagtttctagagaaacacactgtcggttgtgacgggcaccaataagacgagtacactctacatatgtgaatctaaatagcatggcaccatccaaccatgaggcagctgcacggcagggatcatcaaaaagaactgtttgtgtggaagcactcgatgctgttgcctgaggaaggcagccaccaacgggctatccactggcaatggattaagacactgctgtcgatgatgcaggcacgcaacagagcattgcacaaccaggggcacggatgacatcaactgctgtcatgtaggcagaagcttttgccacacactagcatgaccaacacctgctacaatgtgatgcaacagctgccgttgtaagcacatgcgggcattgcccaccgcaagcggactgcctgaacggagccgttgttagacgggaaggttgaccatgcctaggcgactgaacactggactaaactgttgcagacatcgttgcctttgtgatccgggtacacaccccacatcaagtgtgctgtatgcaagccattgccggtgcaagcacgcgtcaggccataccacggttaggcggctaccatgtggaccaaactgttgtcgatctcggactggtgcagtgggacgaagggttagatgagc

SEQ ID NO: 126783 - DNA, 2386 bp, Zea mays
  Clone ID: MRT4577_47095C.1
ctaagcagttgttcctcgccgtctcggggtctcggcctctcctcggtctctcctcccagatcgggccatccaggtgctaccgctcttcgccccctccacttcaccgccgccgcgtagatccgtctccgcctcctggaagcgctaccagtggaccaacgccgagccggcggagttagcggcgttagggttgcggttgggaattgattgcgggggacgcagcggtggcgcctggcatggcgggggcgcccggggtcgggccgggtgcggggggtgggggcggcgccgctgcggggctcaagacttacttcaagacgcccgaggggaggtacaagctgcagtacgagaaggcgcactccgcggtgctgcactacagccacggcggcaagaccgtctcgcagttgacagtggcatacctcaaggagaagcctgctagccagggctctcagccatcaacaccaagcgccagcagtgggatgcggtctgcagcagcaaggctgctgggcactgggaatgggagcaaggcacttagctttggtggcggtaatggtgcaagccgagctgttgctggaagcagccgtgtaggaggcggccttggtacacctacaggccttggtggatcacaggggggcacaaattatgatggcaagggtacatatattgtattcaatgctgctgatacactattcatcagtgatctcaattcccaggagaaggatccactaaagtccatccatttcagcaactcaaacccactgtgccatgcattcgacccagaggccaaagagggacacgacctgatcattgggatgggatcaggggatgtctattcaatgtcgctgaggcaacagttacaagaatcctggaagaaaacccgtggcagctctacattacaataagggtgataaagatgtctcacccaatggaagtcgttgcacttctgtcgcatgggtgccagagcgtgaaggcattttcgttgttagccattctgatggaaatttgtacgtgtatgataaaaacaaggatgggaacacagactgtacgtttccagctgtcaaggatcagtctcagtttatggttgcacatgcaaagtcgagtaagagcaacccagtcgctaggtggcatatatgtcaaggttcgatcaatgcaatttccttttcaccagatggcgcatacttggcgactgttgggagagatggttatttgagagtattcgatttttcaaaggaacaactaatatttggtggaagaagttattatggtgcactgttgtgttgcacttggagctcagatggaaaatatctattaacaggtggtgaagatgatcttgtgcaggtatggggcatggatgatagaaagatagttgcttggggtgaaggacataattcatgggttagtggagttgcttttgattcatattggtccccaccaagttctgatggaaatggagaaaatgtatatcgctttggttctgttgggcaggacacccaactacttctgtgggacctggcactggatgagattgttgtcccactacggcatccttcaagtgcctcacctacgtttagcagcgggagcccttccacacactgggacaatgcatgccctccaacaggtgttcttcaaccttctcctagaatgcgagatgtcccaaaactatcgcccctagttgcccaccgagtacatgccgatcccctatctggtatggtgttcaccagtgaatctatcctcaccatctgccgcgagggcctcatcaaaatctgggttcgaccagagcagagcgaaaacaatcagcaatcgaattcttcagaatttgctttaggccctgcttcgaaggatagggcgatcacatcttccaataaagcaagtagctccagctttaagaagctgccgcctgttcttgtcacatgatgaatcaacgggatggttcttgtggatatttctgcttcacgtggcattagtggtggatatgaatcttactccatggttgatggggatgaaactctcatatggagtctgcagactgcaagtaatgagggtgagcatttgatggttgatgttcccaggaagcagggccagcgttgccagtttttttggcacgaaagagtaaatgggagctcttgtacagacacatacttaatgataaaattgtaaaaactcactgtccgtttcataatattcaatagccaccgaaagatgattggacgaccatgttatcgattttagctggtgggttgatagtatccttaaactttggtacttcggagacttgtaattatggaccataatatctgaggaatgcttcagtcttacctggtgtaagttgtgttactatttccttctgccttttgtcaattattagatctagtttggcaactcctttttctcc

SEQ ID NO: 126784 - DNA, 787 bp, Zea mays
  Clone ID: MRT4577_47096C.1
tagctgtaggagtcgcgtgacttgctgttggtgtagagcctccggcggcggttgctgaagaggatctcgcggccctggcggcggacgtggggcaggtactcgtcgacgacgagcgcgcggtggcgcaggtggaaggtgaggcgctggaagcgccggtcgcccttgcgctggccctgcacgtccctggcgaccacggaggaccaccagagcgggacgccgcggaactcgtcggccacgtcctggccgtcgcgcatgctgacgacgaggccgttgccctcccgggcgccctcggcgcggagctcgcgcgcgtcctgctcgcgcgcggcgccgctcaggtacgccttcacctcctcgtaggtgctgtcgttgtcggagacggggccgtagcgcgagtagcgcacctcgccgccgggctccgagatgtcgatggtcacgtaggggtccacgacgttgagcaggcggcgggagcgccggcggaggaacaggttgaagtaggtccggaacagccgccgcggcgcgtaggtggccaccagcgacaccaccggcgccaggatcagccacgccgagccgaagttggtggtgaacagggccgcgaacgggcccaggttggccagcgcccaccgccgccactgcgccaccgctcttttgcccggctccgccatctcacaaagctatacgggcggcggttgatgtggtgcgtgccaatccctttttttttttttttttttttttttttttttttttttttttttttttttttttttttttttttttttttttttcccgg

SEQ ID NO: 126785 - DNA, 241 bp, Zea mays
  unsure (1)..(241): unsure at all n locations
  Clone ID: MRT4577_47097C.1
cggcaaggnaggncgagacggggggcggcccaccacaagcagcagaacgccccgccaacagggacgcgagaacaaccccccccagacacgaccagggggcaacaccacaagcggcagccanaaaccacaacgccgaacaggaggcccgaccaccnnnaagggggggcccggggcagagaacaggccccagcggccggccggcgccgcggacgcacgccgaacacgccggcacacgngacca

SEQ ID NO: 126786 - DNA, 392 bp, Zea mays
  Clone ID: MRT4577_47098C.1
aaaaaaaaaaaaaaaaaaaaaaaaaaaaaaaaaaaaaaaaaaaaataaaaaaaaaaaaaaaaaaaaaaataaaaaaaaatttttaaaaaatataaataaaactaaaaattcaatttaaaaatccatttaaccccctctaattaaaaccctttaaaagagttttttttctttctctctcccccctttttttttggggaatttcttttttttacccctctcattgccctacttaatcctttttttttaaatcccttttttccctttttgagttcttttaaaattcccctttccgatcttttttccaaactgtttgggaaattaacttgcgtttgtacactctttttacctccacattattccctttttctcccgttgttacacgtaattttgcc

SEQ ID NO: 126787 - DNA, 396 bp, Zea mays
  unsure (1)..(396): unsure at all n locations
  Clone ID: MRT4577_47099C.1
ctctcacaattctcctatttatgtctcctccactgtttcttctcntcctgactggtaatcaaatggtggggcgtgcgagttanatcagtgaatcttgatctgtagctggagccagagtgtaatgacaataaaattaagtttagtttgtgtcaaaccgttcagtcgctagacaataaaattaactttgctagctcaagcaaaacaccatggccacagaagaatggttgatatgcaacaatcatcaggtgcctgattttctttttcttttccctctctatcacgagtcatgccactaacacacccatcagatgtcaggtatatttggcacggtttctccaccggtttatgtataaaaaaagagtgaaccacattttttnnnataatatatatttattt

SEQ ID NO: 126788 - DNA, 1094 bp, Zea mays
  unsure (1)..(1094): unsure at all n locations
  Clone ID: MRT4577_4709C.1
attgtttcatctaacgagnaaccaactgnaaccaatatccccaacaattgaggcactcattttgctccacgataaagtgggcaggtgattactgaaatgagaagacgaactggggctgaaattcgagtttactcgaaggcagataaaccaaaatacttgtcttttggtgatgaacttgtgcaggtgacttaatatttgctaacagcatcaacatatttctatatgtttttattatctagaccatttatttgttaacttttgttgtacctgtatatttgttccaagctttcaggttgcagggcctccagctattgcaagaggagccctcacagagattgcttcgaggcttagaactaggactttgagagatacaagtactgccaataatcctccaccttttgccccttccgatgatcctactgtcgatatgcctagcagaaaattaacactatatggagggcctaccaatgatacaccgtatggaaggcctgccaatgatccactgtatggaaggcctgccattgatccaccatttggaagacctaccaacgatcgaccatacggaaggcctgccatcgttccaccatttggaagacctaccaatgatccaccatatggaaggcctgccaatgatccaccatatgaaaggcctaccaatgatccaccatatggacgaccttccagtactatagcatatggaagaccaaacagaagtgcacctcgtgatccttcagatgcatatcctggagactacttctctaaaagagaacatcctagtggaggccctatggttactagtaatgccccatcagctgcttatgagagatatgcagcacccacacactttcctactagagaacctccctcaactttcagtcatcgttcctatcgtgaccacatgcctactgatagctactctagtaggggtacacagaaattagacatcacgagagatggaaattcagatgcttatgattatacagaggctgctggacaaattcatggactggaggactatagaggactgccaagtgcttctggaagggtctcgagcactattgaactaaggattccaaatagttctttggagtcta

SEQ ID NO: 126789 - DNA, 414 bp, Zea mays
  Clone ID: MRT4577_470C.1
cccacgcgtatttggacgcgtgtgcggacgcgtggggcaagcttgggagatcgatcctagacattatggtgtctccgaacacagcatccatacacggtcattatttacctccggcattgaacacccgggactgccaccaccatctcacagcagcagcaggagaagcaccaccaccagcaggacctgcagaataagaccgaggacgaccacggcgagggcgcgccagagctggtcggcgaccgcgacacgtcaagctaccacgagaacaatgactagaacagtggaaacagtaacggaagcggctgaggaaagctggcgctgattacaccgtatgatggcggcggtcccgagggcgcagatgccacccctcgccagccgagaggcctaccggcgtagtgcaagaacaagccgaaa

SEQ ID NO: 126790 - DNA, 293 bp, Zea mays
  Clone ID: MRT4577_47100C.1
acgcgcacgcgtaaactccctcgtccgcattcaccgagccgagcccggcacatacactacgggcgggcacgcacgcaccaggaccagcaccacaccacatgcatggtggaacctatcacgggcagctggctcccgaccaacatacattacaaccacctattgcttcaacaacaccaacgagatccccttacctcaactgcatttacgccaccgccatccatcaacctcctccacgacaactactcgcaatgtctaggtaaccacgttccgcgacatccaccctttgacacccg

SEQ ID NO: 126791 - DNA, 785 bp, Zea mays
  Clone ID: MRT4577_47101C.1
cctcgagccggcgggaagctatgcaccgttcttctctgactctctccggccacacgtactcggtctcatcctgagccgttctctacgtgcactctttgctctctctgaccaacaagccatgtctcctccgcgtttggttccagctgtacgcgcctcctccttgttgtccgtccatggagctcgctccggcctcctgctccctcagtcggcactgtgctcggcttccagctcatcaagctcagcccccatggccgagcgccctcccagccatgacccccccggtgtttggccctagtcgctcgccctcaactgtgctgcgccaacgctccagccatggagtccctacgcgcacacctccactcggatttcgccaaggctcgtgctgttccctggcgcttcttcctgcgccgcgcccctggctcctctgttggccgcgcggccgtctcctgctccctgctcgccgagctccttgtgcaggccgcattcctctactcggccacggatgtcacattgtcggccgcggctttctctctctacttcacctccctgtgcgtggtagtgcccctctgctcgccacggcgcgtcgaactctcgcgccgagtccttttcctgctcggccgcccgtgttgctgttctttgcatgtgcgcagctcccggtgcgtcgctgtcctccctccccaactccctctggtccgcgctttcttcagttcggccagacaggacatcgttccctgctgcagttcgttgttgaacgcctgctcgttgtctgtgccatcgaaactttc

SEQ ID NO: 126792 - DNA, 628 bp, Zea mays
  Clone ID: MRT4577_47102C.1
ggctcttcgggttgctactgtttactgatatattatcggtaatcctcgaaaacgcataaattattctgcatgcgaagctgcgtctaaaatcgggtttggccaactgctttaatttctaacagaggaagtggatgtctgaaatttgtgacctaaacaagcacaaaaaagttacaaaatgagacttgaattttttaccattgtcactatgaattgctttcaaggcattctttggaatcttattctacaaccaaaaaaatcaaatcttgagcatgagaacaactctcatcctttgcctacatgaaaaacaccaagaatagtgtgaaaagtcatcaacaatcaccaaaacatatcacttcccccgagtgagcgaacctgagctggaccaactatgttcatatgaatcaactcgtttggttgcttggacatcaccttagtgatcttgggtgagaagtgacaactattagggtgttggatttgagaaacgagctagtccatcttctcacttgtcacttttttgtttggtttgtggaataaaatgagttgatccatcatcatctcattcctcatagtactaatatgagaaatgagaactcaccaaatttgaaaaattgattcatgatgtaccacc

SEQ ID NO: 126793 - DNA, 398 bp, Zea mays
  Clone ID: MRT4577_47103C.1
cttaaagccactcccgaaatgggggaatttggggaaatttggaacccgggcgaaaacacaaattgggggggcagggggtttggaaccataggggtggttccattccatcccaatctacattggggaaacatttccataaaacacgaaagggggaaaacaatcgggtgggtacggggcatataggctaattttaagaagctgggaacaacagtccgcggggtttgaggcagggttggccccagcccaaatccatagggggaaggccttgccagggggctaaaaaacaacctttggaccttttaagggggatttttggaaagaaaacaaataagggcctccatcaccaaagactcacaggggagggggatcctgccgttatcaccagggaggccgaactc

SEQ ID NO: 126794 - DNA, 198 bp, Zea mays
  Clone ID: MRT4577_47104C.1
acccgttggaggttgacaccggagagaccggaagcggtgcttgagcacaggaggggcgggaccggcacgcaaacgccgcaggggggaacaccaccctgaccgcggcagacgaagcgccccccaacggagtacacccccgaagaccggaagagacgccacgcggaacgagagaccatagcccaaaaggcagagggcccc

SEQ ID NO: 126795 - DNA, 169 bp, Zea mays
  Clone ID: MRT4577_47105C.1
acggaatgcagtggtacgcaaggcatcaaggaagccgtcgtggaaactggggaggtcgcagacgtcgagctgccagagccacttctaagaagtcgtcgtagcagaggccgttgcgcgtgcaggtgacctgctccgtgaggaggctgcactcggagtccttgtacagcgg

SEQ ID NO: 126796 - DNA, 255 bp, Zea mays
  Clone ID: MRT4577_47106C.1
cggccaaccatttttccccttaaactaccaaaaaaaataaaaacaatttcctacagacaaacattttttaccatccgagtttttaaaccaaagcgcgttgcaagtgagctaaccctatttatatcgccgagttaaccataaaactcaacctgaactgggcctataaatagacacctgagttaacgataattgcccctgggcactaacattcccaaaaaaaagggatcaccatttttgctcacaaaatacacaaaa

SEQ ID NO: 126797 - DNA, 725 bp, Zea mays
  unsure (1)..(725): unsure at all n locations
  Clone ID: MRT4577_47107C.1
tttttttttttttttttttggcagttcactggtaaggaccacgagaggcctgaaaggaaccattttggtcaagatggtcatgtacttgacctttccttttttgagatttgtgatccagaattctccaaaatcaaggaatctgggaatgtgtgggcttcaatcactgatcttgaaccaaagttacttgctcatcagagaaaagccttcgaatttatatggaaaaacttggcaggatcattacagcttgaagaaatggatggctcaacaagtagaggtggttgtgcggttgcacatactccagaagcgggtaaaactcttctgctgattttgtttcttgtcagttacttgaaagttcacacccaagaagccggccattggtcctcataggtatgctcatggaatcaatagtatctcgtgcttggtctccattgatgatctggtaaatgatgttgtcgtcgaccatcttgatgttgaattccattcccctcaggctagacaaaactatggtatgcgaattctagggagaatctttgcacttagcagcttgcttctgttatgatggaagcagtccactacagaattccatcgcacgctcccatcctggagctatgtaattaaggcctgatctatctcgccaactacacgctccttcgtcttcccaaggcctcgacattagatccactctggccagcacaaacgcggcgacgtgtacggacggngatcgc

SEQ ID NO: 126798 - DNA, 243 bp, Zea mays
  Clone ID: MRT4577_47108C.1
gacgcgtccgcactccagcgcctctaccctcctcgctgcctcactccctctgaaggtcccagatccttccggttacacaaacccgccggcaccaatggcttctggtcagctcgcttgcacctacgccgccctcatcctcagcgactacggcatcgccatcaccgccgagacgatcgccaccatcgtgaatgcggctaatatcaaggtcgagtcctactggccggcgctcttcgctaagctcct

SEQ ID NO: 126799 - DNA, 238 bp, Zea mays
  Clone ID: MRT4577_47109C.1
cccacacgtcctcctacatgtgccattattttaggtttagcaacatacgctgaacatagagaactaggcgattgcaatcaactacagaccgaatcaacctgtcgagaatctgtcgctgtacttgtacatccaatataggacaatcgcgctaaatatgaagagatttcacactgacacatctacgaatgatcacactgtactgcaaatgcttaagctcaccatgatgtacatcaaagct

SEQ ID NO: 126800 - DNA, 410 bp, Zea mays
  Clone ID: MRT4577_4710C.1
gagagatggaaattcagatgcttatgattatacagaggctgctggacaaattcatggagtggaggactatagaggactgccaagtgcttctggatttctggtgcaagactgaggctacatgaggctcatgctggttcttctgagtctgtggtggagatccagggcacactggaccaagcaaaagctgcgcagagcctcctggagggctttatcagcgcgaacagcaggcagcagcaatcccattcttctcgcatgccactttacccaagatggggatagcttctggttgtggcaggggaaaaccgagtcagcaaggttggctggagttatcttagactgcagattagattcatcgatgatgttaatggtagctgtttaaattgaccgtgcaagcctgataacttatatta

SEQ ID NO: 126801 - DNA, 354 bp, Zea mays
  Clone ID: MRT4577_47110C.1
gaacccccaaaattttcactttggttcagaccggcaaaattgggccggcgtgcaaaaagggtttccaaacaagaataaccccctgaaccgggttcagggatttggtaggttccaccttcttcccgatagggcttttggggaaagggccgaggcttgcccacctttcaaggccccctgcccctttggagaaaaaccccaagggttgggggggaaccgcaagagggaagtccccccggggcatgggcaaaggccccccccttttttcccacttgtccctgggcagggaggaccccactttcttgaggtttttgggccccattttggggaaagggtgtcccctgggaaagggaaaaa

SEQ ID NO: 126802 - DNA, 170 bp, Zea mays
  Clone ID: MRT4577_47111C.1
gttgggttgaactgaggtcaacaggtcatcgtatttgatctcgaaggtctgtgagtgatcagtgatcaggcttcactgtgctagttcttgttgtgtcgtgcataagaacatggcctctagtatttgtctgattcctaccaaatcacaaaacgctctacacatcatgcatt

SEQ ID NO: 126803 - DNA, 312 bp, Zea mays
  Clone ID: MRT4577_47112C.1
aaccaaaccccaataaactggcgtcgggtaaaaatacaaattctactcctccacaccaatataaaaacctataggtaccttattccatttatatttcatccaattactattcattttttttctcacttagtacttttcaaataaatctctcacaaaaatcaaacaatatccctactttcaccatactaaattaattaaccaatactattttccacttccaccccttaacttctcatcttcaaaccaaaatcctttaccgattattatataatatcctccctccctctccccgcagcggtttcacccctttca

SEQ ID NO: 126804 - DNA, 745 bp, Zea mays
  unsure (1)..(745): unsure at all n locations
  Clone ID: MRT4577_47113C.1
cattgggtacctcgaggccggccgggacgcacccaccttggtggtgggtcttggttcatgctgcccactccggcactcctcttctcatgacaagcgcgctgccgcacatgtctgagctcccggacggcggcgccggcggaaatggccaagacgaagccgccgccttcgcctcgccggccaagcgcctccgtaggtcgccggcgctcgagcccacctccgtgctctacaaccgcagcccgagcccgcccacatcctcctccctggtctcctccgccgcgcccgagccgccccccatcagcgccgaggattgggaggccgtcctctccggcggcgacatggccgcgccaccagccgccgcgcggtctcaagacgcctctttcctccgctggatcatggacgccgacgcccaagtcgacgccttcgatcccttcctgccttgccaagagaccgccgtcgtcgagcccttcttgcagccgcagctcccgctccccgtggccgacgacctcgagccaggggcgacggttgacgagctcctcgaggcggtgcgccgcgccgacgccggggactccactggcgcgcgcgagatattggcgcggctcaatcaccggctcccctcaccgccggggcacccgcaccctcctatcctccgcgccgcggctcacctccggggacgcgctcctgcgcgtcctcgncacgtncgngcccgcgcccgccgncgnnnngacgaccccgctcgacgncgcgc

SEQ ID NO: 126805 - DNA, 2243 bp, Zea mays
  unsure (1)..(2243): unsure at all n locations
  Clone ID: MRT4577_47114C.1
gtttccaatattctggaaggtatggcttacacaatatagctgcagttggaagagtactaaattacctgcaatttcttctgtgctgcatttcatacatgatgaaataaattattatcgaaccctgatattaaaaaaactcagccggggagggaaaaaccgtcctcccggtattatattagaagagactgaaacatggtcccggccgaaaaaatccccgaaccttggcccccatcactagcggaccgtcaccacccactctgcaacggcccggccggagggtggcgcgcaagtcgtaaaagcgggcggngcacaacgagggggatttttaaccaaggcagaaattcgtccccgaggttggcccccgttttcgttttccggtgccttgcttgttctagtagccggttctcaatcctcacccaagcgcctctaggccgaggctcggaggccacggcgaggaggagcagcagctgccagcaggggaggacacggatagtagccggcctcccgccgcccgaggcccaaccgcccccgcaattactgttgttgctgcgtgcagagcggttttgaattgccgtctcctacccaggaataatccatggccccgcctccgccatggcttgccgccctcctcttcctcctcctacccgcgctgctgccggcggtcggctccgtctccggcgcggcggctgccggcatcttccgggtgcggcgtaagttaccagccggagttggaggggacactggcgccaacatcagcgcccttcgtgcccacgacggtcgccgccacggccgccttctcgcggctgccgacctcccgctcggtggcctaggtctccccactgacaccgggctctacttcacggagatcaagctcgggacgccgcccaagcgctactacgtccaggtcgacactggcagcgacatcctgtgggttaactgcatctcctgctcaaaatgcccccgcaagagcggactcgggttagacttgacgttctatgaccccaaggcgtcctcgagcgggagcacggtgtcctgcgatcagggattctgcgcggccacctatggggggaagctgccagggtgcactgccaatgtgccctgcgagtacagcgtcatgtacggtgatggtagctcaacgactgggttcttcatcaccgatgcgctgcagtttgatcaggtgactggggatggacagacacagcctggcaatgctaccatcacattcgggtgtggtgctcagcaaggtggggatttgggcaactcaaaccaagcgcttgatggaattcttggttttggtcaggcaaatacgtcaatgttatcacagctagctgctgctggtaaagcgaagaagatatttgctcattgcttggataccataaagggtggtggaatttttgctattggaaatgttgttcagccaaaagtaaaaacaacaccgttagtagctgacatgccgcactacaatgtgaaccttaagtcaattgatgttggtggcactacattacagctcccggctcatgtttttgaaacaggagagaaaaaaggcaccataatcgacagtggtactaccttgacataccttccagaattggttttcaaacaagtaatggatgtggtatttagcaagcatcgagatatagccttccataatttgcaagattttttgtgtttccaatattctggaagtgtagatgatggattcccgaccatcaccttccattttgaggatgatcttgcactgcatgtgtatccacatgagtactttttcccaaatgggaatgacatatactgtgtgggattccaaaatggtgcattacaatcaaaagatgggaaggacattgtgcttatgggagatcttgtgctttcaaacaagttggttgtctatgacttggaaaatcaagtcatcgggtggactgactataactgttcgtcgagcattaaaattaaggacgacaagacaggcacaacctatactgtcgaatcacatgacatatcctccggatggaaattccactggcacaagtccctggttctgttgttggtaacaatggtgtggagctatttatagtacgctaactctattgtacaacacgaacacgcacttaccgaaattcatttgattcgtattcttttcacaaaaaagaatatctagggttttaacttgtgttctctgaccacggaaaacgatgaaaacaaaaacgttgtgtgccatacaaaaaaaaaaaaaaaaaaaaaaaaaaaaa

SEQ ID NO: 126806 - DNA, 583 bp, Zea mays
  Clone ID: MRT4577_47115C.1
ctcccccggcgtctccttccttgcgttgccccttgcttccgtcacgaggccataccgtacacgctcgtcgtccccagcaactccccatgccctgcaccctctgcatgccgagcgactgcgcgggccccgccgccgccacctcgccgctgacgcagtcgtgacacccgctgcgctgttccccccgtgtccaccccacccctggttcttgatttcaccaggtcccatcagattactcgctcctcctgattcatccggtccgagactccgtgttcgtcatggcgccgcttcgcggggccaagcgccgcaagaaggcggcggcggagaagaaggccgcaatggcggccgcggcggcggggcagggtgcgcctggcggcgactggtgggatggcttctgcatgaggatggcaggaacattatcctctgcggaggacgcacacagatttgagtctctctttaaaatgcccagaaaaactttcaactatgtttgcagcttggtaaaagatgatatgatggtaagggctagcagctacacctttatcgatgggacggtgctgtctttagaagatcgagtagctgttgctct

SEQ ID NO: 126807 - DNA, 337 bp, Zea mays
  Clone ID: MRT4577_47116C.1
ctcgatccagccgctttacagtgctggcgttggcctcttcgaccggctcgagaatgccattcaagaggtacgtggagatcggtcacgtggacctggagaactacgggaaacactatggccgactcctcgctaatcacgatgttgtcgaccaaaacagggcactagtggacccccctgatatgggcaggcgccacattaacttcaaacgggtttaacttactgacatcaagattgacatcaaacgcgttcccaagaagtcaaccgtgatcaaggctatggtggaagctgatgagaagactaactgggaaaacagttcatggggcatgaagctgattgt

SEQ ID NO: 126808 - DNA, 547 bp, Zea mays
  Clone ID: MRT4577_47117C.1
gacctgatccccggcgtcgacttcgccacgatccactcctaccccgaccaatgggtgcccggcgcgagcgacggcgcgcaggtggcgttcatgcggcggtggatggcgtcgcacgccggcgacgccgcggcggtgctgcggaagccgctgctggtggcggagttcggctggtccgcgcgctccaacggctacacggtgtccatgcgggacgcctacttccgcatggtgtacgaggcgatctacgcgtcggcgagagcgggagggccgctcgcggggggcctcttctggcaggtcatggtgcccgggatggagagctggaccgacggctacgacgtcgtgctcgaccgtagcccatccacggctgccgtcgtcggccaggagtgctcccggatgaccggactcaactaggtgtcctagctagtagccagtagcggtggactgattcgtgctggttcaaatgttcaaggcagccacggagagccggagacatgaccaatggatgtgctctaataatttaaagtaataacaaaaaaaatatctttatatt

SEQ ID NO: 126809 - DNA, 349 bp, Zea mays
  unsure (1)..(349): unsure at all n locations
  Clone ID: MRT4577_47118C.1
aaactctctccatctagccccctaactgcaccggccgccacaccaccccgaccggaccctccacaacaatggccaccgtgctgggcagcccccacgcgccggccttcttcttttcgtcatcctccctccccgccgggcgggggcctaccggcctgtctcttcctgcgaccaaagggggcatcatgggccgtaacaccagcaccaggcccaagctgcgcgcgcatgccacccacaacgtgaagctgatcaccccaaaaggggaagtggacccgcacgtcccccactacgggggcatcctngaccaagcccaggaggactgaatcgacctgccctactcctagcccgcggg

SEQ ID NO: 126810 - DNA, 128 bp, Zea mays
  Clone ID: MRT4577_47119C.1
ctcgccccgactgtggagttctcacatccagcttgctacattgcgtccccgaaccgagaactattttaacatgcgtaactggccacgacgttgactgctctacacgcggcccggaccacatgatccct

SEQ ID NO: 126811 - DNA, 370 bp, Zea mays
  Clone ID: MRT4577_4711C.1
ccccgaactcccccaaacaaaacgttaaacaaaaacttaagggtgggcatacaaagatcaatcagcatggcctaattttttctgcacagggttgccccaaatgaactgtttttttggacgtccaccaagggacggggagatacagaattttagggtccgagagcacgttgtttttgggttattaaacggccaatgggggaaaaagaatagttttacaactcatggttaatcattaacagcccagggtgggggaaaaaagccgcagcattttgggaaaaggtttaggccgccttgttttttcagtagttctccaccccctcatgggaacccttttgggcctcttggggggcaggccaagggcccgggccca

SEQ ID NO: 126812 - DNA, 560 bp, Zea mays
  unsure (1)..(560): unsure at all n locations
  Clone ID: MRT4577_47120C.1
tgatccctggctggctccgagcggggaatatccggcggcacccccacaccccagccatggcccccaatgtcgccctccccaccgcaaatccttctcgactcccgtatctcccctctcctcctccgccgcctcgcgcgccgcaattggcgttgtgctcgcgtggacccagatcgccgccaggaagtgtctaattggtggtgcgcataggactggctggatttcaatcgtgataatactgatatacggagactcattgctgatccagtgagcctattcgcgccaacttgattacagcctttctcacacaagtatggcgccctctgctgccgtcccgggtggctctgaggttgaggggtcaccacgcatggccaagttcctctgcagctttggaggcagtatccttccccgaccactcgatggctgtcttaggtatgttggcggcgagacaaggattgncatgttgccgcgtgacatatcatatgccgacctggctgcacggatgagagagctctataaggatgctgatatcatcaaataccagcaacctgatgaggatttag

SEQ ID NO: 126813 - DNA, 291 bp, Zea mays
  unsure (1)..(291): unsure at all n locations
  Clone ID: MRT4577_47121C.1
gcctgcagtacccgtcccnaattcccnnntggtggggggcgtgctttaaaacccatatatatataacaactacttcaccactccttttcaagtttttatttacggggtggggcaatcatagtgaaggggcacaaggaattctctttataataatattgttctgtctggatgctcgactatgttcaaagattttcacaggagggtacaatggtacctaaagaatatagttgattcacggttcctttcatctaaatagcctgtttattattggggatgctaatgcccaaccta

SEQ ID NO: 126814 - DNA, 224 bp, Zea mays
  Clone ID: MRT4577_47122C.1
gttggaacaataattattatattatatttaaatgggctattcaagccattgctgagactgacactgccacccatggtgatgcgtgatacattattactaaatcattgccgctaaatgaattaactagcgatactagacagcggctgtaataaagcacataagctagtctatggggtacaccaactgaatgaagtgagctatgtacaacatctaaaacaacaaca

SEQ ID NO: 126815 - DNA, 447 bp, Zea mays
  Clone ID: MRT4577_47123C.1
gcggccgggccgacggacccaagcctgataggggattgtataggatagagcgcgaactatgtagaacagttccattgaaattgacgtgcccatactgcttgaccagaaaagaagaggcatatctatcctatagtcagaacagacccacaggcacgggcgacacttgcctcattcggaaaagcagagtgacacatccttcattccttttggtccatcattgaaatgaccgacgctttcctctttactgcaaccacgctatagcctacttatatgacaaagatggcacgtctatagatgtaatacgagctatagaccttcctatggagtaagcatggacatatgatgataactgactgaggatgctttcgttcactaccatacacacgataccatacgaaagcgtagagtgtatactcagaggtgccaaatgagtgaactacgcccatt

SEQ ID NO: 126816 - DNA, 381 bp, Zea mays
  Clone ID: MRT4577_47124C.1
gccaattccacatgctcaataaatacagctgcagatataccatatataaattgagatccatcgtttggttatcaggcctatcctgaaaccaaaggaaatgagatcggaattcctcggggaatttcaatgccacattcacaagaaataaggaggctaaaatgttcatatatgaattgcaattctttgatgtcttattacacctatcctgaatccaaagtaaatgagatcggaattgctagcggaattccaatttcacattttcaagaaataaggatgcaaaaatgttcatatatgaattggaatcatttgttttcttactaggcctatcctgaagccaaaggaaatgagatcgcaattcctaagtcttaccatgctcgaatt

SEQ ID NO: 126817 - DNA, 1346 bp, Zea mays
  Clone ID: MRT4577_47125C.1
tcggtacggcctcgaggccccggcccaaaaaaaaaaaaaaaaaaaaaaaaaaaacaatagaggttactgctctcctgggctgtgaggctgtgaggctgtgaccaaacgctctacgctcccacttcccaccaactcccaaatcctccctgaaaataagaatacgagggtgagcgatcgagcggtcgagggggttgtgcttgtgcgtcagatcaaccgactggtggcgaggctgcgggaggagatggccggcgaagggaatggggatgaagggtggaggcggagcggcatcgaggtcagcgccctgcagttcggctacgacgggcagccgccgctcttcgcgcgcttcaacctctgcgtcgcacccggctcccgctgcctcctcgtcggcgccaacggatcaggcaagaccacactcttgaagattcttgcgggaaagcatatggttggaggaagagatgtggtccgtgtcctcaatggttccgcttttcatgatacacagctagtgtgcaatggtgacctttcgtacttgggtggttcttggagccgtactattggttcagctggggatgttccactgcaaggcgacttctctgctgagcacatgatttttggagttgatggggttgatcctgtcaggcgagagaagctggttgatctgctagacattgatctgcagtggcgcatgcataaagtttcagatgggcagcgccgcagggtgcaaatctgcatgggtcttcttcatccatacaaggtgcttttgctcgatgagatcacggttgatctggacgtggtgaccaggatggacctgcttggtttcttcaaggaagagtgcgagcagagggaagctaccatcgtgtacgccacccatatatttgacggactcgagacgtgggctaccgactttgcgtacatccaagaaggcgagctgagaaggtccgggagatactccgacatcgaggagctaaggagcgccaagaacttgctgtcggtagtcgagtcgtggctgaggtcagagaccaaacttccgaagaaggaacccccaccacgtcctgagacccaggccaggcgttcctcgccgttcgatgcttctcctttccgttcgtcacgccacatggcctactaccgttgatggtttcccaactcgtactacaccattgcctcttgttctgcgctatatatatatatttttgttgtcgctcatatcgtatagtagctgtggagtttaatatgtgtcctcttcacggcccttgtagacatcaatcaatatatagcaggcagcacagaaataaaagtttggttcggttggtcttgcgttgatgagcagttggtgacatgacttggtgccc

SEQ ID NO: 126818 - DNA, 202 bp, Zea mays
  Clone ID: MRT4577_47126C.1
ttttctgtatcttacgacactcaacctctcaggatgaccttttaagaagaccagggaggtcattacctaacctccaagaatccttcagaagcgtcattatgtctcacctttagctaattaaaacaattttttgtgtttacataaacaaatagtctaagtatctatcatacatgctagccttcacaaacacttactttttcca

SEQ ID NO: 126819 - DNA, 523 bp, Zea mays
  unsure (1)..(523): unsure at all n locations
  Clone ID: MRT4577_47127C.1
cggccgggagcattttgccataccgcgcacccatacgtatagaaatcgtctggaaccgcgaggaatttcttcaaatttnntcttctgacgatantggagaagcacacaaagcgcgtggacgcactagtgcttttctcgttactgctcctcggatcctgtgcgcagggtcttcaggatgaggtgggcgctcctcctgctctatcagctgaagaaggggtcatggagacgagagcagaatgtagacaggtgttgcttccgtgcaaggacaacaagtgctactgctgtatcgggggcggaactcgtcagtgttacgctacactagctgagtgtagacatgcatgcctgcccctaaacacgaattagtactaagttcgctgttgttggtacaataatgtaacggtggccagtattttcgcgaaaatggcttagaagggaattgatcggacatggtataaataaatcacaaaagaaaattagaaaaaaaaaaaaaaaaaaaaccaaaaaaaaaaaaaaaaaagcggcc

SEQ ID NO: 126820 - DNA, 1284 bp, Zea mays
  Clone ID: MRT4577_47128C.1
ccggccggggaggctgtgaggctgtgaccaaacgctctacgctcccacttcccaccaactcccaaatcctccctgaaaataagaatacgagggtgagcgatcgagcggtcgagggggttgtgcttgtgcgtcagatcaaccgactggtggcgaggctgcgggaggagatggccggcgaagggaatggggatgaagggtggaggcggagcggcatcgaggtcagcgccctgcagttcggctacgacgggcagccgccgctcttcgcgcgcttcaacctctgcgtcgcacccggctcccgctgcctcctcgtcggcgccaacggatcaggcaagaccacactcttgaagattcttgcgggaaagcatatggttggaggaagagatgtggtccgtgtcctcaatggttccgcttttcatgatacacagctagtgtgcaatggtgacctttcgtacttgggtggttcttggagccgtactattggttcagcttggggatgttccactgcaaggcgacttctctgctgagcacatgatttttggaggcgagagaagctggttgatctgctagacattgatctgcagtggcgcatgcataaagtttcagatgggcagcgccgcagggtgcaaatctgcatgggtcttcttcatccatacaaggtgcttttgctcgatgagatcacggttgatctggacgtggtgaccaggatggacctgcttggtttcttcaaggaagagtgcgagcaggtacacaagttttagtttgctctgaattgcttcctccccgcataacacgaaacgctcgctcgctcgccacagagggaagctaccatcgtgtacgccacccatatatttgacggactcgagacgtgggctaccgactttgcgtacatccaagaaggcgagctgagaaggtccgggagatactccgacatcgaggagctaaggagcgccaagaacttgctgtcggtagtcgagtcgtggctgaggtcagagaccaaacttccgaagaaggaacccccaccacgtcctgagacccaggccaggcgttcctcgccgttcgatgcttctcctttccgttcgtcacgccacatggcctactaccgttgatggtttcccaactcgtactacaccattgcctcttgttctgcgctatatatatatatttttgttgtcgctcatatcgtatagtagctgtggagtttaatatgtgtcctcttcacggcccttgtagacatcaatcaatatatagcaggcagcacagaaaaaaaaaaaaaaaaaagcggcc

SEQ ID NO: 126821 - DNA, 357 bp, Zea mays
  unsure (1)..(357): unsure at all n locations
  Clone ID: MRT4577_47129C.1
gtccactgcctgatccatctgagctcttcacaaatgtttatgttaatgactgcggtttggaggtaagtgcacaagttgagggcgtatagttcattcaagaatcaaggttagtgcttcagtagttctcgatgccaattcctgtgctaataaaatgatcttttttttcccgtgatggcagtcgtttggtgtagacaggaaggaggtgaggaccgttcttccgtaggctggcaaacaaaaaaaaggttctactgatacagtacgaagaagnttgctgcgtatgtatatggacgcatcacaccgaagnagtttcctcacttgtggttatggtcctatggaccccgggttataatttccttt

SEQ ID NO: 126822 - DNA, 744 bp, Zea mays
  Clone ID: MRT4577_4712C.1
gaaggtaccaaaaaaaatcggcgcgaaacccccctgcctttttgctctcctgttcaccccttgtgcccgcgctctctcgtggcgacgacttgcgcgaccgccgccaacgccaggcacctaggtcttcgtcggtcctttcttcagagacgagcacccaacagggggctacaagattggttttgatggattatgacaagtctagaagaagtaactccaagaagaggacacattccaattctgatgacggaaagagaaaacggttaaacactaggcatgatgacacatctatgttctctgagccaattgaaaccatctacaggatattgtgcccggtaaaaaagataggcagtgtcttgggaagaggtggtgacattgttaaggcccttagagaggaaactaaagccaagataagggttgctgattccattcctggtgcagatgagagagtaattatcatcttcaattaccaaaatgagcctgaaccgactgatgaagcagctgaagaaaaaaatagtgatggcttagggaacttcaaatcccattgctttgcccaagatgcgttattgaagatacatgataagattgtgtctgatgaaattcatgatgaagtcgccaatgatgaaaagtctgaaagtgcagatgatgtgactactcgaattttggttcaaggcaatcaagttggctgccttctagaaaaggtggctccattatacagcaactacgaagtaatactggtgctggaat

SEQ ID NO: 126823 - DNA, 310 bp, Zea mays
  unsure (1)..(310): unsure at all n locations
  Clone ID: MRT4577_47130C.1
cggaancccgggccgacccacgcggccgcccacgcgnccgcccacnaaaacacggacacgagagacaacagaaaaaacacacaccaagggaagggggggcggccgcacaagaggacccaacccaaccnacgcgcgcacgcgacggcacagcccngcgagagcggcacccaaagccaaaaaacaggccgcgcgcaaacaaccccggaacgggaaaaacccacgcaagaccacacaaaancgcccggcagcacacccccccaacgcaggcgggcagaanagcgaacaggcccgaaccgagcgcccgcccaaa

SEQ ID NO: 126824 - DNA, 2379 bp, Zea mays
  Clone ID: MRT4577_47131C.1
caaaaaactcacacaagccatgcccatgtccacgatgccaccaccaccgccgccccatcacagcccagccatccaacggccgagcacgaccggatcggacgtgcccctgaatttccaccgctgccactaccaaatcccgttttttaaaatcaaaatacaaggctcccttcttccagtcccccgtgctccggctccccttcctccgcatgcgcccacctcctgcgccgccccgggtcactgccaggtaggccacaccatgcagccgccgcagtcgctggtgtcccgcgcgcgcaccgcgatccactccgccgccgcccgcgtgctcaccgacatcaaggccgacctccgagatgccgaaggatccggcgggcgtagccgggcgccgtcgccgaggacgtctctggatcgggaggccgccgaagcgagcgccacggggcgggagccggacgtgaagccgccgtcgccgcgtgatgaggtcctagaaataagccccccagagaacgaggattcctcaagcataccaactgaatcaacctgttcaacaaaactgacctttcctccagcttcaatagttaaacaactggtgtctgccattgaaaatgggaaaagtttcaagtcaatgagtgatatgaggtatactggagaacaattgctgaaagataagggaggtttgagcttgtctgttgttaaatcacttgttcgacgtgacaaggaagaaagatcgagctccgatttttttggtgatgaagaaactcaatctttgatgtactccttgttcaaattagaggaacagttttccttcgaagcaagtcaatgtttccctgaattggttcattcaagatctgtgtccaaggatctacatggtgcaccacctggaagttttattcaccatttagcagtggttattggcagcattagttctgtgcacaagatggcatttttttggcagtcagttgttcttgagttgaggaaactatggtctgattggcaacctgtgcctcgtatgccactggaggttgctccagatttgaattcttgtttactacatcaggaaatccaagttgtaaattgctgcattgccaggaaaaaaaagaagaaaagcagctaaggagtcactggattccttgctaaatcaggcaagtattggtaaatcagaacccaggttgtcagaagcgaagtttcctgacagcgagatgtatgcaagagataatactggtgattatgtccttcgacttggtgctgaccagtcatctgagaacttaacattgctggaaactggtgagcctatctattccccgacactgcaggaaggccccatcatgacagcagagcttataaaagaaacagaggagctagtgttacggacaggaagtcttggtgctggatgctctcaacttctatcagatatgcaggctttcaaggcagcaaatcctggttgtgtcctggaagactttgttagatggcactctccacccgattggtctgaggattgtgctgcaaacagtaccacagttggggaaggctcatctagacgtgggcggttaagtgataggatgcaaacaaaagaaggtaacttgtggaaggaactgtgggaggctgcaaaacctatacctgctgttgaacagactcctatatatgatgaagatttagctgtggagagcatctttgatgcgttggaggttattgagccatcaaaactgtttgagcagctacttggcgtcattctttctgtatgctttgtggcagctgaatcagttttagcagcagatagcaatctgtcaaaattattctacgattgcaaggactacataattggcgtttaccacaatgacatgtcaaaagatgagctagatgagatgtacaaggtgtacgagacgatggaagccatagtaacccaccctgaagaagctctccagatcatggagcaacctgatgagaagtctgttgacaataaaaaccgcttcacgctgaagctcaactttatggccaaagatcgcccgccgctctggaagcgcacgacaaaggacgacaagatttctcaaaaggtcgagaagaatacgtcagaggaaaagaacacgaagatattctccaacctttttgacaagaaggtcagcatattttcaaagaagaatgtgagatcgtcggaggtgccaccggcatccacttcatcttcttcgccagggccatttgacgagagtgagtggacgattttgtagttggaactcctgtattgtttcttttgtacaacatgtagagggggggtgccccggagatgtcgggaataatcttaagctgtacatattcagtctaattcattgaacattttgaaataaattgaaaatataaaaattccatgtggtctgagcaaaaaaaaaaaaa

SEQ ID NO: 126825 - DNA, 436 bp, Zea mays
  Clone ID: MRT4577_47132C.1
ggaaagagaaatcagtaaacccccctccaattctcgataacctatgctttggggggattccccccttagggcccctttcatattggtgggggaaaccccgaaaatatgcttggaccccattgctggggccatttggatcccacccgccaagtctgaattccccaaccttactttttcacatttgggggggtgttttccccccttcttttgcaaattatgatagggccattcatccctccttgcaaaggaaccgttgatgttttctcagggaaaatattttatttaacttttggcttgactgggccccttggttttttgtccaacaaattggaatcaatcctcttggaaaacctcttgatgtcttcactcccccttgcggctggggggccaccccctgtcccatttctttggcccacccctggcaaagggggggccc

SEQ ID NO: 126826 - DNA, 282 bp, Zea mays
  Clone ID: MRT4577_47133C.1
ccggccgagcacccaacggcaccttgatatcactactagcacaacctctcgatctcaccgacaccggagcgaagaacgagcatcaatggccatgcgcagcacagagaggcgacgcctctcaggcgcagcaaggctgagttcgacgcccacatgaccaaggcccaggaagccggcaagctggtggtcatcgacttcactgccgcctggtgcggtccatgccgcgccatcgccccactgttcggcgaacacgccaagaagttcactcacgccgtcttcctgaag

SEQ ID NO: 126827 - DNA, 313 bp, Zea mays
  unsure (1)..(313): unsure at all n locations
  Clone ID: MRT4577_47134C.1
tgtgctgngattcctcntagcgtcgtccgggcgggggggcgcgcggggcacctgaagctgcaggaggggctggttgagcggagccaaactgttgatctgctacttggcgagatgactgggatctgtgaggatgcttcgctgctcaagcgagtggcggatgagcgcctaccattgagcaattcgcggggggggggggggtcaagccttttttcttcactgcattcttttcatctcaagagctggacttgctctgctcggaccaccgcagccaatgggtctttagataagcacacccttgccgttcctgcgtgcc

SEQ ID NO: 126828 - DNA, 360 bp, Zea mays
  unsure (1)..(360): unsure at all n locations
  Clone ID: MRT4577_47135C.1
agcgccgctcagcgccatcctattagtccctcgtcgccatccgtcagccagccagtccgccagcttgcatgcagatgccatccgtccccagcccagtcgctttgagagtatgacacccatatccatccgtccatgagggcagtatagccacatgccgcgaggaagaggttnatctcttcaatcggcgcctgccagtacatagagggtactcctccgatctaggctcatagaatcagctaccatccgagggtggagagagatgtattaccaagagctgcgaaggaaaggccatgatgcccgtcgcagaattggtgttctgctccgtgaccagcacggcatcccgcttgtcaagagcgtgac

SEQ ID NO: 126829 - DNA, 425 bp, Zea mays
  Clone ID: MRT4577_47136C.1
gttggtacgcttatcttgccttgggctttacttttttttgactaccgttcccaactctggagctggtcttcatccacggccggggaagtaaaccacactccccggacacaagagccccccgggtccaattggaaataagcggttttgcccgggctggccaggggtttttgaaacccaggtcgggggggccggggcccaatagcccccctccctgaccctggggggtttattcaggaaaaccaccttccagttcaggcgggcccttggaggggcacatttttttgccaaaaaggggttgccaccgcgtttggtttttatggcgacaaaggcaacttaaacgggcggggcggaactaattcgggaaaccaacccgggggctaacatggtggggaaacacctgttggaccccatttgagcaccatgcg

SEQ ID NO: 126830 - DNA, 308 bp, Zea mays
  Clone ID: MRT4577_47137C.1
ggttaagctggggtccaggggatatgttattggggtgccgggccacatgaaaaaagtctggccatcatccgaaacatgggcagaaaccggacctattaaggacaggatatcatcgtgctacgtacaagcacccaaaggtgggcaacacgacaccggggacatttagaataaaaggacagccgaggtgacatgccacatactaccattaccccaccgaacagaaccgcccacgcaagtagatagaaaggcacacacatgtactccaacatggaccatgagaagaagactgtagcgacgcggcaagaagc

SEQ ID NO: 126831 - DNA, 735 bp, Zea mays
  Clone ID: MRT4577_47138C.1
gggtacatgacccagagcctttggggcccttcaatgtcttttagcggtggcatcaatgtcccagtgatgcagaccccgctctgtgctaatgctcctgctgagaaaggaggcaagaacttcatgattgatttcatgatgggcggtgtttcagctgctgtttcaaagactgctgctgctcccatcgagcgtgtgaagctgcttattcagaaccaagatgagatgattaagtctggtaggctatcagagccgtacaagggtattgttgactgcttcaaacgtaccattaaggatgaaggtttctcttccttgtggaggggtaacactgctaatgttattcgtgtgtactccctggactacgcgagaacaaggttggctaatgacgcgaaggctgccaagggaggaggtgaaaggcagttcaatgggcttgtcgatgtctaccgcaagacactcaagtctgatggtattgctgggctttaccgtggatttaacatctcctgtgttggaatcattgtttatcgtggtctgtactttgggctctatgattccatcaagccagttgtccttactggcaacctccaggacaatttctttgccagtttcgctctgggttggctgatcactaatggtgctggtcttgcatcttaccccatcgataccgtccgcagaaggatgatgatgacatctggtgaggctgtcaagtacaagagctccttggacgcgttccagcagattctt

SEQ ID NO: 126832 - DNA, 1615 bp, Zea mays
  Clone ID: MRT4577_47139C.1
ccccgcgtccggaaagttcggagccgccgcccagtcctgcctccctctccgcctccggtgcccaaggccaatagttttgaggtggtaatggcggaccaggctaaccaacccactgtccttcataagcttggtggccagttccacctgagctccagcttctctgaaggtgttcgggcccgtaacatctgcccttctgtctcttcgtatgaaaggagttttgccacaaggaactacatgacacagagccttttcagcccttcaatgtctgttactggtggcatcaatgtcccagtgatgcgtaccccgctttttgccaatgctccagctgagaagggaggcaaaaacttcatgattgatttcatgatgggcggtgtttcagctgctgtttcgaagactgctgctgctcccattgagcgtgtgaagctgcttattcagaaccaggatgagatgatcaagtctggtaggctgtcagagccatacaagggtattggtgactgcttcaaacgtaccatcaaggatgagggtttctcttccttgtggaggggtaacactgcaaatgttattcgttacttccctactcaggctttgaactttgcatttaaggactacttcaagaggttgttcaacttcaagaaggacaaggatggttactggaagtggtttgctggcaacctggcctctggtggagctgctggtgcttcctctttgttttttgtgtactccctggactatgccaggacaaggttggccaatgacgccaaggctgccaagggaggaggtgataggcaattcaatggtcttgtggatgtctaccgcaagacactcaaatctgatggtatcgctgggctttaccgtggatttaacatctcttgtgttggaatcatcgtttaccgtggtttgtacttcgggctctatgattctatcaagccagttgtcctcaccggcaaccttcaggacaatttcttcgcaagttttgctctgggttggctgatcaccaacggtgctggtcttgcatcttaccccattgatactgtccgcagaaggatgatgatgacttctggtgaggctgtcaagtacaagagctccttggatgcgttccagcagatccttaagaaggaaggccccaagtccctgttcaagggtgctggtgctaacattcttcgtgccattgctggtgctggtgtgctttctggctatgaccagctccagatcctcttcttcgggaagaagtacggctctggcggtgcttaaatggagaaaaatgatgacgaacaagagcagtttgttcccggtcctgcccaatcaggatctggtgaagtttttgcctttcatatcgaagaaattaataattcatgtagagggaggattcttccaacattcgttttgggcggagactttgatctccaaacactcgtaactatcctactaggtggtggcatcagtccccaaaaacattatggtcatagggtgtgtcgagtctgcccttgctttgtctgtcgggcaattttccttacatactttgccttcgattaagtatcggatgagtaagttgctgcggttaattgtttgtttctctttaccttgtgcaatgcttggttatgatagcatttttatt

SEQ ID NO: 126833 - DNA, 895 bp, Zea mays
  unsure (1)..(895): unsure at all n locations
  Clone ID: MRT4577_4713C.1
cctcgaggccggccggggaacctgtggtttgctctccccttccaccccgtctgcccgcgcgcgctgtctcgtggcgacaactgggcgaccgccgccgccgtcgctgccgccgctacgccaagaagctaggtcttcatcggtcccttcgtcgagattttctccggagacaagcacccagcaggggactacaagattgattttgatggattatgacaagtctagaagaagtaactccaaaaagaggacacattccaattctgatgacggaaagaggaaacggttgagctctaggcatgatgacacatctatgtcctctgagccaattgaaaccatctacaggatattgtgcccggcaaaaaagataggcagtgtcttgggaagaggtggtgacattgttaaggcccttagagaggaaactaaagccaagataagggttgccgattccattcctggtgcagatgagagagtaattatcatcttcaattaccaaaatcaacctgaacttactgatgaagcagctgaaaaacaaattagtgatggcttagggaacatgaaaccccattgctttgcccaagatgccttattgaagatacatgataagattgtggctgatgaaatttatgatgaagtcgctcatgatgaaagttctgatgatgtcactgctcgaattttggttcaaggcaatcaagttggctgccttctaggaaaaggtggctccattatacaacaactacgaagtgatactggtgctgngatccgtgtcttgtcatctgaaaaccttccccagtgtgcacttcaaagtgatgaactggtgcagatatctggagcaccatctcttgtaagaaagctctatatgaaatatctactcgtctccatcagcatcctcgtaaggaaa

SEQ ID NO: 126834 - DNA, 1824 bp, Zea mays
  unsure (1)..(1824): unsure at all n locations
  Clone ID: MRT4577_47140C.1
acgaggcctcccgtccccaaggccaatagttttcaagtggcaatggcggaccaggctaaccaacccactgtccttcataagctcggtggccagttccacctgcgctcgatcatctctgaaggtgtacgggcccgtaacatatgcccatctgtctcatcttatgaaaggagatttgccacaaggaactacatgacccagagcctttggggcccttcaatgtctgttagcggtggcatcaatgtcccagtgatgccgactccgctctgtgccaatgctccagccgagaaaggaggcaagaacttcatgattgatttcatgatgggcggtgtttcagctgctgtttcgaagactgctgcagctcccatcgagcgtgtgaagctgcttattcagaaccaagatgagatgattaagtctggtaggctatcagagccgtacaagggtattgttgactgcttcaaacgtaccattaaggatgagggtttctcttccttgtggaggggtaacactgctaatgttattcgttacttccctactcaggctttgaactttgcatttaaggactacttcaagaggttgttcaacttcaagaaggatagggatggttattggaagtggtttgctggcaacctggcctctggtggtgctgctggggcttcctctttgnnnnnngtgtactccctggactacgcgagaacaaggttggccaatgacgccaaggctgccaagggaggaggtgaaaggcagttcaatgggcttgtcgatgtctaccgcaagacactcaaatctgatggtattgctgggctttaccgtggatttaacatctcctgtgttggaatcattgtttatcgtggtctgtactttgggctctatgattccatcaagccagttgtccttactggcaacctccaggacaatttctttgccagtttcgctctgggttggctgatcactaatggtgctggtcttgcatcttaccccatcgataccgtccgcagaaggatgatgatgacatctggtgaggctgtcaagtacaagagctccttggacgcgttccagcagattcttaagaaggaagggcccaagtccctgttcaagggtgctggtgctaacattcttcgtgccattgctggtgctggtgtgctttctggctatgaccagctccagatcctcttcttcggaaagaagtacggctccggcggtgcttaaatggagaaatatgatgacgaacaagagcagtgtgtgttcccggtcctttccaatcaggatctggtgaagtttctgcctttcatatcgaagaaattaataattcatgtagagggaggattcttccaacaatttgttttggatggagacttagatctccaaacactcgtaactatcctactaggtggtgacatcggtccccaaaaccatttatggtcatagagtctgcccttcgtttgtcagtcgggcaattttccttgcatacaatgccttcgtttaagtatcggatgagttgctgcgactaattatttgtttgtctttaccttttgcaatgcttgatcgttgatagcattgtttaagtcactggatttcttttggatgttgcatttggtttacttgtcagtgtctttgtagaggttctataagctttgcgacattgttagtctgggttcaaatggtttggctactaggtagtgttgtcctatgaggctgaagaaatttgtatgttcaaaccttttagttaccagtgtagtcgtttgaaaagctcatgaaannnnnaggctcaaaccgtttagctgccagtgtagccatttgatgaaatgcctcatcaagttatgttat

SEQ ID NO: 126835 - DNA, 1612 bp, Zea mays
  Clone ID: MRT4577_47141C.1
ccggccgggacctcgacgcgcctccaaagttcggagccgccggcccgtccgcctccctctccgcctcccgtccccaaggccaatagttttcaagtggcaatggcggaccaggctaaccaacccactgtccttcataagctcggtggccagttccacctgagctcaaccttctctgaaggtgtacgggcccgtaacatttgcccttctgtctcatcttatgaaaggagatttgccacaaggaactacatgacccagggcctttggggcccttcgatgtctgttagcggtggcatcaatgtcccagtgatgcagaccccgctctgtgctaatgctcctgctgagaaaggaggcaagaacttcatgattgatttcatgatgggcggtgtttcagctgctgtttcgaagactgctgctgctcccattgagcgtgtgaagctgcttattcagaaccaagatgagatgattaagtctggtaggctatcagagccgtacaagggtattgctgactgcttcaaacgtaccattaaggatgagggtttctcttccttgtggaggggtaacacggctaatgttattcgttacttccctactcaggctttgaactttgcatttaaggactacttcaagaggttgttcaacttcaagaaggacagggatggttattggaagcggtttgctggcaacctgccctctggtggtgctgctggtgcttcctctttgttttttgtgtactccctggactatgcgagaacaaggttggccaatgatgcgaaggctgccaagggaggaggtgacaggcagttcaatgggcttgtggatgtctaccgcaagacactcaagtctgatggtattgctgggctttaccgtggatttaacatctcctgtgttggaatcattgtttatcgtggtctgtactttgggctctatgattccatcaagccagttgtccttactggcaacctccaggacaatttctttgccagtttcgctctgggttggctgatcactaatggtgctggtcttgcatcttaccccattgataccgtccgcagaaggatgatgatgacatctggtgaggctgtcaagtacaagagctccttggatgcgttccagcagattcttaagaaggaagggcccaagtccctgttcaagggtgctggtgctaacattcttcgtgccattgctggtgctggtgtgctttctggctatgaccagctccagatcctcttcttcggaaagaagtacggttccggcggtgcttaaatggagaaatatgatgacgaacaagagcagtgtgtgttcccggtcctttccaatcaggatctggtgaagtttttgcctttcatatcgaagaaattaataattcatgtagagggaggattcttccaacaatttgttttggatggagacttagatctccaaacactcgtaactatcctactaggtggtgacatcagtccccaaaaacgtttatggtcatagagtctgcccttcgtttgtcagtcgggcaatttttcttgcatacaatgccttcgtttaagtatcggatgagttgctgcgaccaaaaaaaaaaaaaaaaaaaaaaaaagtactctgcgttgttaccactgct

SEQ ID NO: 126836 - DNA, 308 bp, Zea mays
  Clone ID: MRT4577_47142C.1
acactttccccctctcacacttctctaacttattctctattaaaaaccacaccccctcatggggcccaggatcatttcatttatcatttccgcattatcctcaccatcatcaaatcaaaacatctttaattcattctctaatcacctacacctctcttcatatcaaagttatctctacattacattacctaattctttctattaacctttccaccaataaaaccttcccatccctttaccacctcttttatcatttattcatacaataataaaaaaatccatacaatttttttattctacatcaaatc

SEQ ID NO: 126837 - DNA, 1275 bp, Zea mays
  Clone ID: MRT4577_47143C.1
ctcgaggcaattcggcacgaggctcgcctcgacgcgcctctgaaagttcggagccgccggcccgtccgcctccctctccgcctcccgtccccaagggtgagtcttgcgtcccaccaggcttctctcccgtcctctgtccccgatttaaggcccatgctctctcgttcctatttgtggcgattggtccggcatgcgtgctgtttgtggtagatagatctgctctgcacgtctgcgttcgtcacgtataggttggattgttcgtgtggtagcctcggccgttggtgctcattcagatcggtgcttcctgcgtcggccaatagttttcaagtggcaatggcggaccaggctaaccaacccactgtccttcataagctcggtggccagttccacctgcgctcgatcatctctgaaggtgtacgggcccgtaacatatgcccatctgtctcatcttatgaaaggagatttgccacaaggaactacatgacccagagccttttgggcccttcgatgtctgttagcggtggcatcaatgtcccagtgatgcggaccccgctctgtgctaatgctcctgctgagaaaggaggcaagaacttcatgatcgatttcatgatgggcggtgtttcagctgctgtttcgaagactgctgctgctcccatcgagcgtgtgaagctgcttattcagaaccaagatgagatgattaagtctggtaggctatcagagccgtacaagggtattgttgactgcttcaaacgtaccattaaggatgagggtttctcttccttgtggaggggtaacactgctaatgttattcgttacttccctactcaggctttgaactttgcatttaaggactacttcaagaggttgtttaacttcaagaaggatagggatggctattggaagtggtttgctggcaacctggcctctggtggtgctgctggtgcttcctctttgttttttgtgtactccttggactacgccagaacaaggttggccaatgatgcgaaggctgccaaggcaggaggtgaaatgcagttcaatgggtttgtggatgtctaccgcaagacactcaagtctgatgctattgctgcgctttaccgcgaatctaacatctcccgcgttgcaatccttgcttatcgtggtctgaactttggactctatgattccatcaacccagctgtccatactcggaacctccaggacaatttctatagcccacctctcgtctggactgactgaccaccaatggcgctgagtctctgaatcttaccccat

SEQ ID NO: 126838 - DNA, 1708 bp, Zea mays
  Clone ID: MRT4577_47144C.1
cattgggaccctcgaggccggccggggcggcgacgggggcggctctcactcgcctcgacgcgcctctgaaagttcggagccgccggcccgtccgcctccctctccgcctcccgtccccaaggccaatagttttcaagtggcaatggcggaccaggctaaccaacccactgtccttcataagctcggtggccagttccacctgcgctcgatcatctctgaaggtgtacgggcccgtaacatatgcccatctgtctcatcttatgaaaggagatttgccacaaggaactacatgacccagagcctttggggcccttcaatgtctgttagcggtggcatcaatgtcccagtgatgcagaccccgctctgtgctaatgctcctgctgagaaaggaggcaagaacttcatgattgatttcatgatgggcggtgtttcagctgctgtttcaaagactgctgctgctcccatcgagcgtgtgaagctgcttattcagaaccaagatgagatgattaagtctggtaggctatcagagccgtacaagggtattgttgactgcttcaaacgtaccattaaggatgaaggtttctcttccttgtggaggggtaacactgctaatgttattcgttacttccctactcaggctttgaactttgcatttaaggactacttcaagaggttgttcaacttcaagaaggatagggatggctattggaagtggtttgctggcaacctggcctctggtggtgctgctggtgcttcctctttgttttttgtgtactccctggactacgcgagaacaaggttggctaatgacgcgaaggctgccaagggaggaggtgaaaggcagttcaatgggcttgtcgatgtctaccgcaagacactcaagtctgatggtattgctgggctttaccgtggatttaacatctcctgtgttggaatcattgtttatcgtggtctgtactttgggctctatgattccatcaagccagttgtccttactggcaacctccaggacaatttctttgccagtttcgctctgggttggctgatcactaatggtgctggtcttgcatcttaccccatcgataccgtccgcagaaggatgatgatgacatctggtgaggctgtcaagtacaagagctccttggacgcgttccagcagattcttaagaaggaagggcccaagtccctgttcaagggtgctggtgctaacattcttcgtgccattgctggtgctggtgtgctttctggctatgaccagctccagatcctcttcttcggaaagaagtacggctccggcggtgcttaaatggagaaatatgatgacgaacaagagcagtgtgtgttcccggtcctttccaatcaggatctggtgaagtttttgcctttcatatcgaagaaattaataattcatgtagagggaggattcttccaacaatttgttttggatggagacttagatctccaaacactcgtaactatcctactaggtggtgacatcggtccccaaaaacatttatggtcatagagtctgcccttcgtttgtcagtcgggcaatttttcttgcatacaatgccttcgtttaagtatcggatgagttgctgcgactaattatttgtttgtctttaccttttgcaatgcttgattgttgatagcattgtttttgtcactggatttcttgttaatgttgcatttggtttacgcgtttgtc

SEQ ID NO: 126839 - DNA, 2064 bp, Zea mays
  Clone ID: MRT4577_47145C.1
cattgggtacctcgaggccggccggggagaaccaaaagaagagagaggaagacaggaagagagagagagagcgcgcgcttccaggtttttagctgcaggggaggccgatagttctgttctactggaggaggagcagagagcaagatggggtccggatctttcctcaaggtgctggccaagaacttcgatgtccttgccgggccactcatatcacttgcttatcctctatatgcttctgttagagcaatagagacaaaaaatcctgtagatgatcagcagtggctcacttactgggtgttgtactcatttgtcactttgtttgagctaacttttgctccaattatcgagtggtaaattacggttctggtcaaaaaaaaaaaaaaaaaatctctctttctcaaagttcggagtcgaggccgccgcccagaccgcctccccttccccgcctccggtgcccaaggccaggccaacagttttgaggtggtaatggcggaccaggctaaccaacccactgtccttcataagctaggtggccagttccacctgagctccagcttctctgaaggtgtacgggcccgtaacatctgcccttctttctcaccttatgaaaggagatttgccacgaggaactacatgacccagagcctttggggcccttcaatgtctgttagcggtggcatcaatgttccagtgatgccgactccgctttttgccaatgctccagccgagaaaggtggcaaaaacttcatgattgatttcatgatgggcggtgtttcagctgctgtttcgaagactgcagctgctcccattgaacgagtgaagctgcttattcagaatcaggatgagatgatcaagtctggtaggctatcagagccgtacaagggtattgctgattgcttcaaacgtaccatcaaggatgagggtttctcttccttgtggaggggtaacactgctaatgttattcgttacttccctactcaggctttgaactttgcgtttaaggactacttcaagaggctgttcaacttcaagaaggacagggatggttactggaagtggtttgctggcaacctggcctctggtggtgctgctggtgcttcctctttgttttttgtgtactccctggattatgcgaggacaaggttggccaatgatgccaaggctgccaagggaggaggcgatagacaattcaatggtcttgtggatgtctaccgcaagacactcaaatctgatggtattgctgggctttaccgtggatttaacatatcttgtgttggaattattgtttatcgtggcctgtatttcggactttacgattctatcaagccagttgtcctcactggcagcctccaggacaacttctttgccagttttgctctgggttggctgatcaccaacggtgctggtcttgcatcttaccccattgatactgtccgcagaaggatgatgatgacttctggtgaggctgtcaagtacaagagctcattggacgcattccagcagatccttaagaaggaaggccccaagtccctgttcaagggtgctggtgctaacattcttcgtgccattgctggcgctggtgtgctttctggctacgaccagctccagatcctcttcttcggaaagaagtacggctccggcggtgcttaaatggagaaaaatgatgacgaacaagagcagttcgctcccggtccagcccagtcaggatctggtcaagtttttgcctttcatatcgaagaaattaataatttatgtaggagaatttttccaacattcgttttgggcggagacattgatctcaaaacactcgtaactgtcctactaggtggtggcatgggtccccaaaacatggtcatagggtgtgtctagtctgcccttcgttgcagccgggcaattttccttacatatattgcctttaatcaagtatcagatgagtgtcaagtcgctgcggttaattgtttgtttttcttatgctttgcttgattgtgatagcatttttattatgactgggtttcttgagaatggtgcatttggtttactaaaaaaaaaaaaaaaaaagcggcc

SEQ ID NO: 126840 - DNA, 1675 bp, Zea mays
  Clone ID: MRT4577_47146C.1
ttgggtacctcgaggccgggccgggcctctcactcgcctcgacgcgcctctgaaagttcggagccgccggcccgtccgcctccctctccgcctcccgtccccaaggccaatagttttcaagtggcaatggcggaccaggctaaccaacccactgtccttcataagctcggtggccagttccacctgcgctcgatcatctctgaaggtgtacgggcccgtaacatatgcccatctgtctcatcttatgaaaggagatttgccacaaggaactacatgacccagagccttttgggcccttcgatgtctgttagcggtggcatcaatgtcccagtgatgcggaccccgctctgtgctaatgctcctgctgagaaaggaggcaagaacttcatgatcgatttcatgatgggcggtgtttcagctgctgtttcgaagactgctgctgctcccatcgagcgtgtgaagctgcttattcagaaccaagatgagatgattaagtctggtaggctatcagagccgtacaagggtattgttgactgcttcaaacgtaccattaaggatgagggtttctcttccttgtggaggggtaacactgctaatgttattcgttacttccctactcaggctttgaactttgcatttaaggactactttcaagaggttgtttaacttcaagaaggatagggatggttatttgggaagtggtttgctggcaacctggcctctggtgggtgctgctggcggcttcctctttgttttttgtgtactccttggactacgcgaagaacaaggttggccaatgatgcgaaggctgcccaaggaggaggtgaaggcagttcatggggcttgtggatgtctaccgcagaactcagtctgatggtattgctgggctttaccgtggatttaacatctcctgtgttggaatcattgtttatcgtggtctgtactttgggctctatgattccatcaagccagttgtccttactggcaacctccaggacaatttctttgccagtttcgctctgggttggctgatcactaatggtgctggtcttgcatcttaccccattgataccgtccgcagaaggatgatgatgacatctggtgaggctgtcaagtacaagagctccttggatgcgttccagcagattcttaagaaggaagggcccaagtccctgttcaagggtgctggtgctaacattcttcgtgccattgctggtgctggtgtgctttctggctatgaccagctccagatcctcttcttcggaaagaagtacggttccggcggtgcttaaatggagaaatatgatgacgaacaagagcagtgtgtgttcccggtcctttccaatcaggatctggtgaagtttttgcctttcatatcgaagaaattaataattcatgtagagggaggattcttccaacaatttgttttggatggagacttagatctccaaacactcgtaactatcctactaggtggtgacatcagtccccaaaaacgtttatggtcatagagtctgcccttcgtttgtcagtcgggcaatttttcttgcatacaatgccttcgtttaagtatcggatgagttgctgcgactaattatttgtttgtctttaccttttgcaatgcttgatcgttgatagcattgtttttgtcaaaaaaaaaaaaaaaaaagcggcc

SEQ ID NO: 126841 - DNA, 555 bp, Zea mays
  unsure (1)..(555): unsure at all n locations
  Clone ID: MRT4577_47147C.1
cggtttttccccgcgttttttgcccctagcctggtgccccctggcggctgcttgcgcagcnactgcttgcatccaaccccttgctctggctaacgtggttgctcaccagctacaacaacagctgcttcagtttctgccagcgctcagtcaactagccatggtgttaccctgccgcctacctacaacagcaacgtctggtgggatctaccccgctcgttctggccaatgcacctacttncatgcatcaacaattgttgctntagaatctaccagctctgactcatctagctatggcaaaccctgctgcctacttgcaacagctgcttccattcaaccaactgattgtgtcgaactctgttgcgtacctacaacaacgacaatggttacttaatccattagcagtggctaccccattggtcgcttcctttcctccacatctacaatttgctggcatacaaccagtattttttgttgaaccctttcttttctaggctgcaacccattctttggagttccattttttatattttattttcaaatgaacttgtataatag

SEQ ID NO: 126842 - DNA, 221 bp, Zea mays
  unsure (1)..(221): unsure at all n locations
  Clone ID: MRT4577_47148C.1
aatattacctccatttccatttttttatttgacgctagctagttcaaatttagtgggtgtttggtttctagggactaatgtttagtcccttcattttattcctttttagtgtataaattgctaaatgtggggggggggggaaagttttantttctatatttggcaattttggaactaaaatggaataaaatgtagggactaaacattagtccctagaaacc

SEQ ID NO: 126843 - DNA, 563 bp, Zea mays
  Clone ID: MRT4577_47149C.1
aaggaaaggttttggttaaaccttaagttaaaacgttttttttttggtcgttacagttaagggggccaaaattaggatgggggggatccttaaacccagaaagaccaccacccagggaaagcaagtcccgtcgttgaaaatggggccgatccacccttttttttgttccgccaattgtttgtgctgccccgccatggattgctgacttttaaaaataaaatgttcctgggaaaaaatttttttagcagggccataaagttccatgtaaaggttgttaaggaaaataatttgtttaaaaattgcctgggggaccagtttccgggccttttttgaaaagttggtttcctccattttttttagggattttttacaacggttaaattgggacttccgaattttagcgatgcaagtttaataagcttccttcagtttacccacagccatatttccttttccttgttcgttgctggaaaagttaagggtttatttattttgccaaccatgggggttattaaaatgttcgtttgttttttaatccccgggctccaccatggatggggggg

SEQ ID NO: 126844 - DNA, 585 bp, Zea mays
  Clone ID: MRT4577_4714C.1
gcctgcgtgtaccgggctcctattacacggtcgacctatgcgttcttttcaaaaaccacctcaacgtatcgcactttctcagcctaacatcccggttgacggcaccttttcctactcgtgcttatttgtcctttaagagagggcaccacctgcgatggttatttcacactgactcacttggttccattgacatataactcacagtttctccctacttgttcttgaatggggtaggcacacaccaatgggctagcctctggtctacaataaacgctctgggggagctttttaaagcacccaattgaccaattcccacaacaatgcttgaatcatataaccatacaaaccatcgcaacgcagcttgcaacagctctgtgccacctagccggggcgaaccctatcgcctactgtggacaacacaacggttgcatccaacccacttgctcttggacacatagctgcgtaccaacaacaacaacagttgcgaacagtgttctaccagcgactcaggtcaactatccatgagtgaaccctatcgctctacctacaacagcgaacaacgttgtttgatgctaggcccgctcg

SEQ ID NO: 126845 - DNA, 358 bp, Zea mays
  Clone ID: MRT4577_47150C.1
gagctccatcagtgacaaagtcagaggaggtgatgtatctagcagatgatggctcagatcagatcaaaatgctgttattgtttgcaggccaaccgcttcacgattgttgctcgtgtcatgctcatgcgttcctcttgggtattccttcggtatttcttccttgcagcgagatttgcttcgacccatgagacgcaagtttagcctgtgcccctctcatgttgtagatgtttgtgaggagatacgtaggtagatggctgtgaggaaaattaccaggtggccaatgttgtatacttgtattggtgatacattactgtgtaaaatagaaatcaatgagcttttctttttctgggttgcatat

SEQ ID NO: 126846 - DNA, 306 bp, Zea mays
  unsure (1)..(306): unsure at all n locations
  Clone ID: MRT4577_47151C.1
ttttnatcggtaaatagacagttgtagcccatattgcacaattgataaacagaaagcaaattataatctaaagaatctacaagaaaaacatttgaaatagaatggtcaggtgatatagcaattttaccaagtcctttgaccaaaccttgatttccatccccgaatgtgatagctctttggggatcttggtttttctcataggaggaggacatccttttctcctctgtcatgtggtttgtgcacccgctaccaattatctaacttgagctcccggatgcataaacctttgttgacggcgaagttggc

SEQ ID NO: 126847 - DNA, 1594 bp, Zea mays
  Clone ID: MRT4577_47152C.1
tagccttaataatcaatacttgcactagctctgcatcagggcagcaaaccctgcgcaattttagtggcaaaagaattgtacactaaatcacgtgatttgtatgaaaaagagatctggccccttccgaatttccaatccattacattaatcgtgattacaatcacaaatcgaccctccaatgaatccaatgcctccaaacaaatgactaaaaagctgcccgtggatccaattctttcccaacaggaagcctttattagacacctgccgaaccaattctgacaaccttctcttcccactgcctccgacccatccagccctccaaattccaactgccttcacgttggtacttggtagccattcccctctcggccatcagactcccaagttgagcgtgtgcttgaggtccccgacgtgcagcgtgtggctgccgagcgccaccttcctgttgcccagctcgtccacgacgctgaggtccttgcacacgtccaccttgaacgccaccacgcccgcctgcccgggctccagcgacaccttctcgaagcccagcaggtgcttcgccggcgcgttgtgcaccgccggcggcgacgagaacaggaacaccgtgtgcccgccggacctctcgcccgcgttccgcacccggaggtgcacgtcgaacgccaggccctcgcagtgcgcgccctcggcctccacggacgggcactgctcggtcaggcacgcgtggccctccgcgagctgcagggccaactgcttgggcgccgacaccaggtggtgcgcgaagctggtgtagctcaggccgtcgccgaacgcgtacaccgtgtcgccggtgtagaaccggtacgtccggccggggtagccggtcgacgggtccggccgcatgcgcatgtcggtcatcgggaccttggtgaacgactcggggtaccacgtcaccggcaaccttccacttgggttgtggtatccgaagaggacgtcggcgatggcggcgccgccggcttcgccggggtagccgacccaaagaatggcggcgatcttgtcgctggacttggcgaaggagatgtcgaagggcccgcccgacatgacgacgaggatgcacgggccgctggacgcgttggcgaccgcggacacgagctgcggctgctggccgggcagcaggaggctggtccggtccaggctctcgcgctcgatggactggtcggcgccgacgaccagcacggtcacgtcagcgctggccgcggccttggtggccgcgtcgagctgcaggctgttgccgctgcaccccacgttggtgcaccccggctggtacacggtggccacgttcgcgcccaggccctgcagcggcgtcgtgtacttgcatggcgtgccttcgtagttgccgatcatggtggagctggcgttggcattggggccaatgacggccatggacttgatggaggtggcggagagcgggagcttgccggtgttcttgagaagcacgatgccctggcgcgcggcctcgcgagccagctcctggttggagggcgtgcacacgtcgctgggtccgaggttgccgaacggcagctcccgcgggtcgccgtcgaagaaccccaggcgcatgagc

SEQ ID NO: 126848 - DNA, 243 bp, Zea mays
  Clone ID: MRT4577_47153C.1
ccggccgggatttatagtcccaagttttatattctctatgtccctaggcccacatgtcggggctcagtgcctttatgcatgcccccttcagctataaaaggggaggcatgcgtcgttacaagacagatccaagctcagactcgctagctcatacaagccctcaagcaatatatctcacaatggagtagggtattacgctccggcggcccgaaccactctaaaaaaaaaaaaaaaaaagcggcc

SEQ ID NO: 126849 - DNA, 746 bp, Zea mays
  Clone ID: MRT4577_47154C.1
tttttttttttttttttttggtgtactaagcagattaatggtccctttggttcagctttatgagccagatccactgtcaaaaatctagaatccaaactaaagggtacaaaaggtgaatatattcctaacagtctatttttccatgacctcctctcaccctcaatttttcagaatttcgccatctaaagtttccaaaatattacccatctgctgctatttataggatcaaatcattttcttttctatttggaggcccctgcctaactcgtcgctcgactcccacccgacaacacctcccaacaacggctagggttgctaccacctccttaagcccgactccagtggtctgtgacgtgattgtcccagaaccatcgcacctgttccccgtcgacccttcagcgttgctcaccccaacatccacgtcgtctgttcccatctgaagttgcccccttcagcaccttctcagtctccacttcaatgttcgatgacgacaaggctccatcctcatggaagccgacgaagcaacacctatcggtttagttgttgctcgtgtaggatgccatgcacgtgctgaagtaagcataactatggccacgacacttgagcctaacgttctgggccacgacacttgggcctaacgttctgggccacgacacttgggcctaacgttctgggccagacacttgggcctaacgttctgggccacgacacttgggcctaacgttctgggccacgacacttggccc

SEQ ID NO: 126850 - DNA, 640 bp, Zea mays
  unsure (1)..(640): unsure at all n locations
  Clone ID: MRT4577_47155C.1
gttcacctcttgccggcctgccgtctcatgtctctgttgctccccatgctcaccccgatccacctctacacataggcctctccgccgccgccattgctgcccctgcctacgaaaagctgaacccaacccgcacttccccgttgctgctgtcagctgatccaacctccccacaaccgcgcactgctcgtggttcgtcactcgccaactcactcgctgcgaccatgcgtcgccggctaacgtgcgctcgaagcgaagttgttgttcctagacataggctcacgagcatcatcgtctccggcagcagctatccggcataggaaaaaaaggcagctgaatcatgatgtacgaccacaagaccatacagactgcgaatcttgtcacaaaagctcatgctgcggcatgtgcagctatcccaatctacggtaataacacgcatgctctacactatctcaggttatatgcacagatataggcatcgatgatgagtggcaagcgagaaccagcaagttgcctgtatctaccatgagtacagtgatggaatnacgtcgcccgccaccgtcaggtagatgattgagcctcaacgtgtcacaaggaactactacagtaccatgttcactgcgctatgagaagtatgctcatt

SEQ ID NO: 126851 - DNA, 367 bp, Zea mays
  Clone ID: MRT4577_47156C.1
agaagccgttgatgagtgggctgaaaaaagcattcacggatgcagctccctggcgcttccagaactagcaacagtctggcaagatatgtgatgtacataaccatcgttgagatatagtctatgtgatcgtatagcgcgacaacttgctcattagtgctgactagatcgcaaacgtgcagattattgcgcgatatctagcatggacgatacttccagcaggtgaagccccagctctttctctctttgagcagcacctggctatcccgtgaatcatcacacctatatgagcttagatgctgatgctgataaccgacctatctttgggacgcctattaagacaagccagctgggcgcatgatgtatatta

SEQ ID NO: 126852 - DNA, 219 bp, Zea mays
  Clone ID: MRT4577_47157C.1
tcgccttcgtgcgtgccccgggggccttgatcgctcgcaccgagcaactcagaccgtcgtgattcgcgtgctgccagccgtgctgcgagcgcgaaacacaagcgtggagggattgctagcttgatcgacgaagctcgtggacgctgactgtcatggctcctgagactatgcacgctccgaggctgatcgccaccgttggacacacagggtgcaggtgct

SEQ ID NO: 126853 - DNA, 502 bp, Zea mays
  Clone ID: MRT4577_47158C.1
caaacaacgtaataaagcatcttatataagaaaacaaaagatacataagataaatacactcggtccaagaacacaactttacagtagcaatacagttgcgaaactgtcgtcaagaacctgaacatgctttcaaggtcacaacagagggctccatgatgactaagagtactgtaacccacttaagactaaaacacaaacgatgcaagctgttgagcattacaatctgcaatgatatatgcatccaactatccaagaatccaaggcctgacagtgcacaaagattctgtgaacgcatctgctttgctagatttgcctgcatgtaacatcaactacaaggtggcgaatacgcggcccgtaccatttgacacgttcaacatgctccactgacacgttccaagatagtccatgatttttggcgacattactgatggattcaacaacactgtccaaccagcgtgtctcatcagagtcgttaacattcccatgaatatgcaacacgccc

SEQ ID NO: 126854 - DNA, 644 bp, Zea mays
  Clone ID: MRT4577_47159C.1
ggccgcttttttttttttttttttctttttttttttttttttttttttttttttttttttttttttttttttttttttttttttcttaaacacagccgacattaaattttcagggaaccacccaagcaaaaaacacaagggctgactcacaccccacaatatatttgcctgaataggacaaccaaaaagagtttcactcacgggggaactgacgaaacaaaaactcaagggccggggcaccacaaaatacaaatgtccaactgtccaccactttggcaacatatcaaatttttagaggggcaacttgaaatttttacagggtgctaggtaaccggcaaaacaaccattctgtccaccaaggatgaaaggcttttggtcccatcattaagtccctgaaaaaaaaaaggtttaaaaaaaaaaagcctttttaatcagttctctaaaaaaggctcaagcagggattacaattctccttctggcccaaaaagtggggacctgctcccaaaaagcaggaaaagccctccgtttgaaagttaaacctttttttaaaatattggggaccctaggctttttccaccaaaaacggaaagatcaggcccaagtgcttccccttaaatcccccccaggacaaccccgaagggttt

SEQ ID NO: 126855 - DNA, 739 bp, Zea mays
  unsure (1)..(739): unsure at all n locations
  Clone ID: MRT4577_4715C.1
gtaccctcgnggtctcgtgccgggcctaccaatggatccccatatggaaggcctgccaatgatccaccatatgaaaggcctaccaatgatccaccatatggacgaccttccagtactatagcatatggaagaccaaacagaagtgcacctcgtgatccttcagatgcatatcctgtagactacttctctaaaagagaacatcctagtggaggccctatgtttactagtaatgccccatcagctgcttatgagagatatgcagcacccacacactttcctactagagaacctccctcgactttcagtcatcgttcctatcgtgaccacatgcctactgatagctactctagtaggggtacacagaaattagacatcacgagagatggaaattcagatgcctatgattatacagaggctgctggacaaattcatggactggaggactatagaggactgccaagtgcttctggaaggttctcgagcactattgaactaaggattccaaatagctctttggagtctattggtggngttggcggggtcaatttagcagagatacgtcaggtatagaaggtatttattccatggacactgctatatgaaatgcattcccctgttatgattaggttttctcttccatgggncactgctatatgaaaagggtccttatgacataataagatttctcactaaaggtctacttgacaccagatttctggggcaagactgaggctacatg

SEQ ID NO: 126856 - DNA, 336 bp, Zea mays
  Clone ID: MRT4577_47160C.1
atccgccatttatttcgccagcggcagataatctacaacgggcagggtgcccagtctaccgagggtgaggtctctacatatgccatcctgactgctcagctggatgaggagctgggaggtacccctgttcacagccgtgtggtccaaggcaaggagcccgcacacctcatgagcctgtttggtgggaagcccatgatcatctacaagggcggcacctaccgcgagggtgggcatacagcccctgccagcacccgccttttacacgtccgcgccaacagtgctggagccacccatgctgttgtggtattgccttaacgctggtgcactgtactttta

SEQ ID NO: 126857 - DNA, 807 bp, Zea mays
  Clone ID: MRT4577_47161C.1
tcggttttttcaaagtacagcttgaagcctcttgttccacgcttgtctgagctcattggagttgaagtcgggatggccaatgattgcattggtgaggaagttgagatgttgtctgtcgatatgccagaaggtgtagaacttgtgctagagaaggttagattctacaaggtggaaaagtataacgaagctgagtatgctaagaagcttacatttgtaggtgacatttatgggaagaaaactcttggtatcgcacacataagcttatgttttaatcgagggagttaccaattattttaagcctcttattgatggcttatgttatttatatagaactttgtttttttttgtgggaaactatttttgagttttatgtaattttttttttgtaaactttttatttttttgtgttttttaatttttaatagttgttctttttatttttattatctggatattttacaattatatattttctttttttgttagtttaattaacttcatttttgttttttacattattttaatttttattattttttattttaatagattattttataatttttattatttttgatattattatattttttttttttttttacttatttatgtttttatattatattttttaattttatttttttttttttttttttttttattttatattatatttattatatatatttttatttttttttttttttaattatttttaaattttattaatattttatatattttttatttatttttatatgttttttttatatatattatgtttttatttattatttttttttt

SEQ ID NO: 126858 - DNA, 350 bp, Zea mays
  Clone ID: MRT4577_47162C.1
gggaaaccgggtaacaggggtaaatccccaagaaacccttcctttttaaaggatgggcccgggcataaaaaaagcttgtttggccggctaattaatacaggaaacaccccatgaaacccccattgggaaaagccttaggagacatgggttgcatccacggagaaggggggggggccccgtttcccaccatgcaggcttggaaggggctgaatgggtgcatcgggaaaccaaacacagggtcattgggcctgaacaacccgcccttttttgcaaacccttggaaacacatacccataacccgctttatccgggggagggcctttttccctaaggtaaacggggggggctag

SEQ ID NO: 126859 - DNA, 336 bp, Zea mays
  Clone ID: MRT4577_47163C.1
gagaacgcagactctacaactttacaataaataagggggtacaagccttttgaactaaggggaccatacaacgattacttacgaaagaattgcgtataccctacatagaaatttccccccctataaatagcacaatttttggacccttgggcaatccggccaccccctttggggttacacatataatgatttaatacaaaaaaaaggggacatttgactacccggtatatggtatatgcggcctatttacattgggctctttgccacaatgaaacaaaaatatgccttttatgttcttggtaaaactctgggtgggaccattcatattaaaacttt

SEQ ID NO: 126860 - DNA, 727 bp, Zea mays
  Clone ID: MRT4577_47164C.1
ggggcgcgtcagctgcccggggttcaaaaaggtgatcagcaaggcggacgccaccaagttcacggtcaagaacttcctgcacgcccagccatggatcgatcccacaggcacgccggtgaagtacgacctgttcacatgaggaccgatcactgcatacacgagtggaaaatgctactgctgttcagtttaagttcgcgttgtacttgtatgtatagtggctgctacttatgtgagttttgtacctgtactgtacatgaagtctcttttcttttatataccatggctaagggggtgttgactaagggcactgtttgtttacctcccagattatataatctggattaaataatcctaagaggcaaacaaacagtctagcttatttgctcagattatataatctaaccccttggattatgataatccataagcaagtgaggaggtgcttatttcagattatttttttctcacttcctcactaccctttcaagtttcctagaaattacccaccattgccattataatctaccgaatcgtttttgcgcctatcggatcggagaagcccgccgcccaacagaaacacgccagataatctgggtaaacaaacaggactactcagattatataatccaaattatataatccagattatataatcatccaaaaataatccagattatataatctattggggtaaacaaacaggcctttagttgtctctcgtatttgg

SEQ ID NO: 126861 - DNA, 2425 bp, Zea mays
  Clone ID: MRT4577_47165C.1
cccacgcgtccggtgcgatggaaggcagagggtgacggccaggaggaagcggtcaataagagacaggggaaaatttgcccaaaaaaggactagaataacagctccgatccgaccatgtcgtcgtcggcgttcggcgacttcggtccgctcaccgagcgccgccgcgccgaaaaggcgcggcagcagcgcaggcgcatcatgatcgccgccgggactatctccatcatcatcatactcatcgccatgggcagcgccgcggtcatgtacagcgggaagaagtcgtccagcgacggtggccacaagtctgcttccaaaggcaagtcgagcggcgggtcagactcggactcgggagcgggaagcggaatcggaagcggaatcggaatcggggtcggaatcgaagacgaatctgaaggccgtgtccaagagcatcaaggcgatgtgctcgcagacggactacacggacgcgtgcgagaagagccttggcaaggccgcgaacgccagctcgtcgtcgcccaaggacatcatccgcagcgccgtcgaggtgatcggcgacgcgatcggcaggcgttcgaccgcgccgatctgatcctgagcaacgacccactcgtgaagggcgccgtcgccgactgcaaggaggtgttcgcggacgccaaggatgacctcaacagcacgctcatgggcgtcgacgacaaggacggcatcgccaagcagagctaccagctgcgcatctggctcagcgccgtgatcgcgaacatggagacgtgcgtcgacgggttccccgatgacgagttcaaggccaaggtgaaggagtcgttcaacgatgggaaggagctcaccagcaacgccctggcgctcatcgagaaggggtcatcgctcctctccgtgctaaagggcggctcgaaacgacggttgctcgaggaggagggagaaccggcgcaagccgggcctgcactcgacaaggacggcatcccggagtgggtgcccgacagtgagcggagggtgctcaagggcggcggcttcaagagcacactcacgccaaatgtggtggtggcgaaggacggcagcggcaagttcaagaccatcaacgaggcgctcgccgccatgccaaagacctacgacggaagatacgtgatccaagtgaaggagggagtgtacgaggagtacgtgaccatcaccaagactatgaagaacgtgaccttcttaggtgacggctccaagaagtccatcgtcaccggcaagaagagcttcgccgacgggatcacgactttcaagactgcaaccttcactgcgcaaggcgacggattcatggcgatcgggatggggttccaaaacacggccggcgcggagaagcaccaggcggttgcgctgctggtgcagtcggacaagtccatcttcctcaactgcaagatggacgggttccaggacacgctgtacgcgcactccaaggcgcagttctaccgcaactgcatcatctccggcaccgtggacttcatcttcggcgacgcggcggcggtgttccagaactgcatcctggtgctgcgccgcccgatggacaaccagcagaacatcgcgaccgcgcagggccgcgcggacgcgcgcgaggccacggggttcgtgctccagaagtgcgagttccaggccgaggccgcgctccgggactccgggcgcccgcccatccgcaactacctgggccggccgtggcgcgagtgctcgcgcaccatcgtcatggagtcggagctcccggacttcatcgacaaggcggggtacttgccctggaacggcgactttgggctcaagacgctgtggtacgccgagttcggcaacacagggcccggcgccaacacggcggggcgcgtcagctggccggggttcaagaaggtgatcagcaaggcggacgccaccaagttcacggtcgagaacttcctgcacgcccagccatggatcgatcccacaggcacgccggtgaagtacgacctgttcacatgaggacacagctggaccggggatcggatcggagggttcggttcacggtggccggtgggggatcggaggccagcgcggcagcatgcatgcccttggttcgttgaatcgttgggtgtcggaggcaagggggaggaccgaaaccgatcactgcgtacacgagtggaaaatgctactgctgttcagtttaagttcgcgttgtattgtatgtatagtggctgctacttatgtgagttttgtacctgctgtacatgaagtctcttttcttttatataccatggctaatggggtgttgactaagaaaaaaaaaaaaaaaaaaaaaaaaaaaaaaaaaaaaaaaaataaaaataataaaaaaaataaaaataataaataaattacttcaataagaattctttaatttatttatattactctattcctaaccttttctttattacttttt

SEQ ID NO: 126862 - DNA, 405 bp, Zea mays
  Clone ID: MRT4577_47166C.1
agacccacacgtgcgctcaccccttccccctggactacaaaccgccttagaacatgaaatgcgggaacgtcatctatgggtggtcctcaactgcgtattgaaccaacccacaatgctcgaaatgtggacgatgcatatctcgctagaattgcacaattaaaccatcctctctgattgccccataaatatacacgtgccgtagctcgctacgggtatagatttttatgttacgcaacgcttctatttccgaccttagaaacaaaaatgaaatattgcatgctaaggcaggagaactaaaatctagcaaaccctttacatataccgttgagcacactttgattagccctagatgtatagatcttaacattgatgccttacacgaacacatggcttcaattatcaaca

SEQ ID NO: 126863 - DNA, 609 bp, Zea mays
  Clone ID: MRT4577_47167C.1
aattcggcacgaggccacgaccgcagtatcgccgccgccgtttcgtttccttatcgatcgtgcggcgcgccggcgggatatagtagctcgaggcgagagagagagagagcagcgctagccttccgttcccattcgcgcgcggccgccacgattccgccgttcccgcagaacggtgctcggaaggggcgcaccgccagcagcctctgatcatccttcgcggggaaggaacggccgggggtctcgagcccctgccggccatttcgccccgcctcgcgggattcccgccaagccgttggtgtagcgcgtggaaggcggcgatctcgggcagggccggatgctgcacaaatggaaggccgcggatggcggcgggtgtgccggcgtcgcgggcggcgtcgaccagcgccggcggtgcctggcggcgtcgctgtccacgctgatagcggctacgctggcgttccttgcctacgtcgccttcttccccgacggcggcgcgcacgggctgtaccggctgggggacgtgccaggactgcgcgggcggactgggcgagtttcccggcgacgaaggcggccgccggctgacggccctttgggcgcgcgcgcggcccgctc

SEQ ID NO: 126864 - DNA, 284 bp, Zea mays
  Clone ID: MRT4577_47168C.1
atgcccatacacctcctgtctggtgtcggtcggccacgtgcctacagtagctgagcaggggtaatggctgttcttgttctgctcggggaggacgtcacgtccccggatgacatgtgcgggcagcgctgcgcgatacccggaggtggtcctgcggatcttccccgatcagtactagagcatcgagaccgtcgagcgtcacggccgatgagtcggcatcgtacctgtcgtcaagacgccgaggcggcggcgatgcttgggttccccatacatcagcttgagacttt

SEQ ID NO: 126865 - DNA, 333 bp, Zea mays
  Clone ID: MRT4577_47169C.1
cccacgcgtccgcccacgcgtccggctcttgctgttgtggctaatgttgggaaacgagctatttcttctagatcggtggcccatgctcttcataatcggcattggatcactgacattgagacccctcttaatttgctagggctgcaacaatatcttagcctttgggatgctttaaggcgagtggtgctcactcaggacgcggatcgacatgtgtggattcatgctacctctgctcagttctcttcgaagtccagtgatagggcatattgcatgggttcgattaccttcgaaccatggaagaggttatggaagacttgggcttcacccacatgc

SEQ ID NO: 126866 - DNA, 158 bp, Zea mays
  Clone ID: MRT4577_4716C.1
ttttcaacacctcagacatctttagaaccaaatttgcttaaagtgacagactttaaatacaaatgctaatactatatcagttcattaagttgatattgaaggaaacacccaaacattacctaatggggccaggacacaaacaaaggttttttcaacac

SEQ ID NO: 126867 - DNA, 447 bp, Zea mays
  Clone ID: MRT4577_47170C.1
agttggggtgtttggtttgaggaaccaactttttctatgtgttcctccatcatgagacattgggatcttttcgatgcttctaggggatgtcatcattcctcatttttgtactcaacatttgcttgtgatgaatgattgatcaggtggtgatacgtgaattgattccattcctcatactgagcaaagtagattaggtttggatagttcattcaacattctgctcctcaaaccaaacacccgaactttacactatctctgaaggactctcatttccttgtcttgggtgacaaccggggcaccgtctatggcttgagtagctcctgggaaatcccatctgtcgaggctgacgctgactatgatgccgactccgccggccgctgcactgcctcagacaaggctgttgtgccccttaagggtgatgcctaaatatgtgttatcactgcccca

SEQ ID NO: 126868 - DNA, 212 bp, Zea mays
  Clone ID: MRT4577_47171C.1
tcgcccacgcgttcgcttcagccgtcgtcgctcgtagcaagcaggagcagcaaggatgccgggtggccacgggctgcgctcgcggacgcgcgacctgttcgcgcgcccctttcgcaagaaaggctacattccggtcaacaactaacttcggacctaccagatcggggactacctcgacctcaaagggaaccgggccctccacaaagggattc

SEQ ID NO: 126869 - DNA, 280 bp, Zea mays
  Clone ID: MRT4577_47172C.1
acgcggctaggtacgccttaggaattcaagactcgaccgacccgtacgcggacgagtgggctaaattcagatcctgaagatcaagaaccacagacattcaagacagctccagaagaaacgcgagatcagttggctgacgcactacatcaaaggtgtcgcgcaatggctgagagtgacacactgcagctccgatgaatcccgcgacgtatggccactagacccgctcgagtcgcccgacccgaagcgtgcccgctgaggtcagggcgtttacgagcactgt

SEQ ID NO: 126870 - DNA, 665 bp, Zea mays
  unsure (1)..(665): unsure at all n locations
  Clone ID: MRT4577_47173C.1
ttgggtacctcgaggccnggccgggagcctcccaagtcccaactcgacctgagccgattcggaaggacggtttgcctacctctggttccggcggccatggcggtggcggcccctggccagctcaacctcgacgagggcctccttaccctggagcagctggcccacggggcagcggtggcagtggctatggggctggagggccaaactaccaacagggtggcccatatggtacgtccggtccaggccgaggaccaaactactctcaaggtagtggttcccgcaaccaacagcagtatgggaactggcaataatgtggcagtattatgccattgatatgtatgtgtttgcagaatgcatttgcagcacctttgcactttaagcatgttgtgagatgtatgtcatgatagtactctaattcagtccagatgtctcagaagagctgtttatgactccagatgtagattatgattatcgagaaacgttttgtacttagaacccttgattcacttattagaagtatgccacaaagacctagcagagtttgctattagccccagtttcatacttcatatccaaattggaatcaggaacgcatagaagaagcctgaagttcagaaatgaaattttgttaatggttgtgtaaaaaaaaaaaaaaaaaagcggcc

SEQ ID NO: 126871 - DNA, 1917 bp, Zea mays
  Clone ID: MRT4577_47174C.1
ccggccggggtcgacccacgcgtccgcgacctgattcggaaggagggttgtagccccaccccctctggttccggcgcccatggcggtggcggtacctggccagctcaacctagacgaggccccgtcatggggctcccgcagcgtcgactgcttcgagaagctcgagcagatcggcgagggcacttacgggcaagtgtacatggcgaaggagacgggcaccaacgagatcgtcgcgctcaagaagatccgcatggacaacgagcgggaagggttcccgatcaccgccatacgcgagatcaagatcctgaagaagcttcaccaccagaacgttatcaagctaaaggagatcgtcacctccccaggcccagagcgggacgagcaagggaggccaattgacggcaacaagtacaaggggagcatttacatggttttcgagtatatggatcatgacctcactgggcttgctgatagaccaggaatgcggttcactgtgccacagattaagtgttacatgaagcagctgcttacaggcctacactattgtcacgtcaatcaagtcctgcatcgagacatcaaaggatctaacctcttgatagataacgagggtaacttaaagcttgctgattttggccttgcaagatcattctccagtgatcacaatggaaaccttaccaaccgtgtgatcactttgtggtatagacctccagagttgctacttggaagcacaaagtatagtccagccgttgacatgtggtcagtgggctgtatttttgcagaactgctcaatgggaagccaatattgcctggaaagaatgagccagagcagctgactaagatcttcgagctttgtggtacccctgacgacacaatctggcctggtgtcacaaaaatgccatggtacaacaacttcaagcctcaccggccattaaagagacgagttaaagacttctttaaacattttgatcggcatgcactggatctgttagagaagatgttgactttagatccatcacagaggatatcagcaaaagatgcacttgatgcggaatatttctggactgatcctttaccttgcgatccaaaaagcttgcccaagtatgaggcatcacatgaattccagactaagaaaaagcgtcagcaacagaggcaggcagaggaagctgcaaagcgtcaaaaacttaatcatcctccaccacattctcgcttgcctccaatccagcagccagggcaagcacatcctcaaatcaggcctggccagggtatgcacaatgtgcctcctgtggcagctgggccaggccatcactatacaaagccccgaggaccaggaggccctaaccggtatcctccgggtgggaatcaggggggaggctacaatccgaaccgtggaggtcagggtggtggctatggcagtggcccatatccccagcaagggcgagggcctccttatcctggaggtggaatgggtggaacagctggtccacggggcagcggtggcagtggctatggagctggaggtccaaactaccaacagggtggtccatatggcgcgtccggtccaggccgaggatcaaactactcccagggtggtggttcccgcaatcagcagcagtatgggaactggcaataacgtggcattgagatgtatgtatatgcagaatgcatttgcagcatctttgcagtttaatcatgttgtgattagtactgtaatacagtccagatatcgtaatagggctgtttgtggcaagcccgagcgttgccaaagggacccttagcatagtctcatttttacctcatcacaaaaccaacttaaacacaataatagtaaactttccgtatgaaaaaaaaaaaaaaaaaaaaaaaaaaaaaaaaaaaaaagtactctgcgttgttaccactgcttaagggcgaatttctatt

SEQ ID NO: 126872 - DNA, 161 bp, Zea mays
  Clone ID: MRT4577_47175C.1
cgcggcagtacaacggagcattcggaggacagagaaagtgtgaggatatgtgccgactggtacatcactatgcgacgatccttaaagactggtgctaggagtacccattcgggtgatcaaacttgcatgtgcgcccaaacttgcaaatgccaaggcgtgcg

SEQ ID NO: 126873 - DNA, 2096 bp, Zea mays
  unsure (1)..(2096): unsure at all n locations
  Clone ID: MRT4577_47176C.1
gcatttgagatgtatgtatanntgcagaaaatgcattttgcagcatctttnngcagttnnctcgaggccggcgggtaccggcccacgaccacaccacaccaggctcctcgacagtcgatagcctcccaagtcccaactcgacctgagccgattcggaaggacggtttgcctacctctggttccggcggccatggcggtggcggcccctggccagctcaacctcgacgaggccccgtcatggggctcccgcagcgtagactgcttcgagaagctcgagcagatcggcgagggcacctacgggcaagtgtacatggcgaaggagacgggcaccaacgagatcgtcgcgctcaagaagatccgcatggacaacgagcgcgaagggttcccgatcaccgccatacgcgagatcaagatcctgaagaagcttcaccaccagaacgttatcaagctcaaggagatcgtcacctccccaggcccagagcgggacgagcaagggaagccaattgacggtaacaagtacaaggggagcatttacatggttttcgagtatatggaccatgatctcaccgggcttgctgatcggccaggaatgcggttcactgtgccgcagattaagtgttacatgaggcagctgcttacaggcctgcactattgtcatgtcaaccaagttctgcatcgagatatcaaaggatctaaccttttgatagacaatgagggtaacttgaagcttgctgattttggccttgcaagatcattctcgagtgatcacaatggcaaccttactaaccgtgtgatcactttgtggtatagacctccagagttgctacttggaagcacaaagtatggcccagccgttgacatgtggtcagtgggctgtatttttgcagaacttctcaatgggaagccaatattgcctggaaagaatgagccagagcagctgactaagatcttcgagctttgtggtacccctgatgacacaatctggcctggtgtcacaaaaatgccttggtacaacaacttcaagcctccccggccattaaagagacgagttaaagatttctttaagcattttgatcgacatgcactggatctgttagagaagatgttgactttagatccatcacagaggatatcagcaaaagatgcacttgatgcggaatatttctggactgatcccttaccatgcgatccaaaaagcttgcccaagtatgaggcatcgcatgaattccagactaagaaaaagcgtcagcaacagaggcaagcagaggaagctgcaaagcgtcaaaaacttaaccatcctccaccacattctcgtttgcctccactccagcagcctggccaagcacatcctcaaatgaggcctggccagggtatgcacaatgtgcctcctgtggcagccggcccaggccatcactatgcaaaaccccgaggaccaggaggccctaaccggtatcctcagggtgggaatcaagggggaggctacaatccgaaccgtggagggcagggtggtggctatggcagtggcccttatccccagcaagggcgagggcctccttaccctggagcagctggcccacggggcagcggtggcagtggctatggggctggagggccaaactaccaacagggtggcccatatggtacgtccggtccaggccgaggaccaaactactctcaaggtagtggttcccgcaaccaacagcagtatgggaactggcaataatgtggcagtattatgccattgatatgtatgtgtttgcagaatgcatttgcagcacctttgcactttaagcatgttgtgagatgtatgtcatgatagtactctaattcagtccagatgtctcaaaaagatgtttatgactccagatgtagattatgattatcgagaaacgttttgtacttagaacccttgattcacttattagaagtatgccacaaagacctagcagagcttgctattagccccagtttcatacttcatatccatattggaatcatgaatgcatggaagaagcctgaagttcagattagcatagtctcatttttacctcatcacaaatgcaacttagactcaataatagccccccttccgtaat

SEQ ID NO: 126874 - DNA, 1817 bp, Zea mays
  Clone ID: MRT4577_47177C.1
aggccggccggggccaacgcccaacaccgaggacacgcgctatcctcttacatcaagctaccaggccccggccccggcccctgcccctgcctgcccctgccccgccgtagcccagcaggccagcaccaccatccggcagccgccgcgcaacgcaccacactaggctcctcgacagtcgagactcgagagcccaatcgtacccgacctgattcggaaggagggttgtagccccaccccctctggttccggcgcccatggcggtggcggtacctggccagctcaacctagacgaggccccgtcatggggctcccgcagcgtcgactgcttcgagaagctcgagcagatcggcgagggcacttacgggcaagtgtacatggcgaaggagacgggcaccaacgagatcgtcgcgctcaagaagatccgcatggacaacgagcgggaagggttcccgatcaccgccatacgcgagatcaagatcctgaagaagcttcaccaccagaacgttatcaagctaaaggagatcgtcacctccccaggcccagagcgggacgagcaagggaggccaattgacggcaacaagtacaaggggagcatttacatggttttcgagtatatggatcatgacctcactgggcttgctgatagaccaggaatgcggttcactgtgccacagattaagtgttacatgaagcagctgcttacaggcctacactattgtcacgtcaatcaagtcctgcatcgagacatcaaaggatctaacctcttgatagataacgagggtaacttaaagcttgctgattttggccttgcaagatcattctccagtgatcacaatggaaaccttaccaaccgcccttacagttgttgttgcaagcttcttatcacttcctggattggctgcagacctccagagttgctacttggaagcacaaagtatggcccagccgttgacatgtggtcagtgggctgtatttttgcagaacttctcaatgggaagccaatattgcctggaaagaatgagccagagcagctgactaagatcttcgagctttgtggtacccctgatgacacaatctggcctggtgtcacaaaaatgccttggtacaacaacttcaagcctccccggccattaaagagacgagttaaagatttctttaagcattttgatcgacatgcactggatctgttagagaagatgttgactttagatccatcacagaggatatcagcaaaagatgcacttgatgcggaatatttctggactgatcccttaccatgcgatccaaaaagcttgcccaagtatgaggcatcgcatgaattccagactaagaaaaagcgtcagcaacagaggcaagcagaggaagctgcaaagcgtcaaaaacttaaccatcctccaccacattctcgtttgcctccactccagcagcctggccaagcacatcctcaaatgaggcctggccagggtatgcacaatgtgcctcctgtggcagccggcccaggccatcactatgcaaaaccccgaggaccaggaggccctaaccggtatcctcagggtgggaatcaagggggaggctacaatccgaaccgtggagggcagggtggtggctatggcagtggcccttatccccagcaagggcgagggcctccttaccctggagcagctggcccacggggcagcggtggcagtggctatggggctggagggccaaactaccaacagggtggcccatatggtacgtccggtccaggccgaggaccaaactactctcaaggtagtggttcccgcaaccaacagcagtatgggaactggcaataa

SEQ ID NO: 126875 - DNA, 331 bp, Zea mays
  unsure (1)..(331): unsure at all n locations
  Clone ID: MRT4577_47178C.1
gaggaccgggcggaatttctggtcgacccacgcttaaccccgagaaaaagcccaacagtgttggtttgggaggaaacccccggacccccaaaggggagagangcagcacacacacagaagacacccgagcggcgaggaagccaacgagacaaagaagaagggaagcaccaacggagggcaaggcaaaaggcacgggaaccaaaagaagacggagaacccaacaaagcacacgcaaagaangacagacgcagcgacaacgaagaaaacaaacaaacggcaaaggaagccgaccaacaaaaagacggcgaccgaaaacgggacgaagaacgac

SEQ ID NO: 126876 - DNA, 495 bp, Zea mays
  Clone ID: MRT4577_47179C.1
ccatccccccaggtgtccacatccgtgattgatccatacatgagagtgctgtccacccactctctcttccttctcactgatgtggctgttctactctactacgatgtcctatatgacatatgacgacgcatcacttgacactagtactagcccgacgcgtacaccgacctaaacgacctagacgtcgatggcatataatgaggtgactgcttccctgatgaaatgaagcagctcattacggtgacgggaaagagatccacaactacctagccccctacatataggatccattaaatgcggaggggctacactgcaacaatatcggccgagagggacaaccacgaacacacgtgcggattcctattcaccaccctagcttcatgagcctatctgctgctgggcaaacgcgaaccaatggctgtcttagaccataacactatgcctggcatgagatgaactgcctacacgaattctcgatcgtagaataacctgact

SEQ ID NO: 126877 - DNA, 2813 bp, Zea mays
  Clone ID: MRT4577_4717C.1
cattgggacctcgaggcggcggggactccgaactccgttcaacccccctgcctttttgctctcctgttcaccccttgtgcccgcgctctctcgtggcgacgacttgcgcgaccgccgccaacgccaggcacctaggtcttcgtcggtcctttcttcagagacgagcacccaacagggggctacaagattggttttgatggattatgacaagtctagaagaagtaactccaagaagaggacacattccaattctgatgacggaaagagaaaacggttaaacactaggcatgatgacacatctatgttctctgagccaattgaaaccatctacaggatattgtgcccggtaaaaaagataggcagtgtcttgggaagaggtggtgacattgttaaggcccttagagaggaaactaaagccaagataagggttgctgattccattcctggtgcagatgagagagtaattatcatcttcaattaccaaaatgagcctgaaccgactgatgaagcagctgaagaaaaaaatagtgatggcttagggaacttcaaatcccattgctttgcccaagatgcgttattgaagatacatgatacggacgcgtgggcggacgcgtgggcggacgcgtgggctgacgctgccttttgctctccccttccaccccgtctgcccgcgcgcgctgtctcgtggcgacaactgggcgaccgccgccgccgtcgctgccgccgctacgccaagaagctaggtcttcatcggtcccttcgtcgagattttctccggcgacaagcacccagcaggggactacaagattgattttgatggataatgacaaggctagaagaagtaactccaaaaagaggacacatgtccatttgaatgacggaaagagatccagggcacactggaccaagcaaaagctgcccagagcctcctgcaaggctttattagtgcaaacagccggcagcaacagcagccctattcttctcgcatgccactttacccaagctggggatagcttctggtctcatggtcgtgtcagaggaaaacagagtcagcagggtttgtcatgtggctgtagatctcggactgcagattagctgtagcgatgatgttgttgaaggaggctgtttaacagtgcaagcaagataacttatacttatgccttaggacaagtaatattgttttcctctgatgaaatacttggtaacgatctgagattgtgtctgatgaaatttatgatgaagtcgctcatgatgaaagttctgaaagtgctgatgatgtcactgctcgaattttggttcaaggcaatcaagttggctgccttctaggaaaaggtggctccattatacaacaactacgaagtgatactggtgctgggatccgtgtcttgtcatctgaaaaccttccccagtgtgcacttcaaagtgatgaactggtgcagatatctggagcaccatctcttgtaagaaaagctctatatgaaatatctactcgtctccatcagcatcctcgtaaggaaaatagacctcttgaacaaataatagatgcaagcacacaaaggaaacacgagtctccaacactgcaacatgaaaatccaatgttgccgcacctgcatagtcatcatccacctccaatacccctgcttgacccatacagaagtggacctcagtatcctgttagtgaaactgaagagttttctatcagaatcctatgtgcttctgagctcattggttcagttattgggaaaagtggggctaatgttaggcgggtagagcagcagactggtgctcgcattaaagttcaagagattgacaaagatgcttctggagaaaggctgatcattgtttcatctaacgagataccaactgaaccaatatccccaacaattgaggcactcattttgctccacgataaagtaagtgcatcctctgagaaacaccattcaagtacaaggcttgttgtaccatcaaacaaagttggctgtattcttggggaaggtgggcaggtgattactgaaatgagaagacgaactggggctgaaattcgagtttactcgaaggcagataaaccaaaatacttgtcttttggtgatgaacttgtgcaggctgctggacaaattcatggactggaggactatagaggactgccaagtgcttctggaaggttctcgagcactattgaactaaggattccaaatagttctttggagtctattgttggtgttggcggggtcaatttagcagagatacgtcagatttctggtgcaagactgaggctacatgaggctcatgctggttcttctgagtctgtggtggagatccagggcacactggaccaagcaaaagctgcgcagagcctcctggagggctttatcagcgcgaacagcaggcagcagcaatcccattcttctcgcatgccactttacccaagatggggatagcttctggttgtggcaggggaaaaccgagtcagcagggttggctggagttatctcagactgcagattagatgcatcgatgatgttaatggtagctgtttaaattgaccgtgcaagcatgataacttatattatgccataggacaagtaatgctgattctctcatgaaatactaagtgacaagctgtctctgtagttgtatttgattctgaatgtttgaaccctactgttacaacggctgctattttaggtcagatttcagaggccggataattatgttatctgcagagttgggccaaaaaaaaaaaaaaaagccggttgaaaatggcttccacaaaaaaaaaaaaaaaaaagaaaaaaaaaaaaaaaaaagcggcc

SEQ ID NO: 126878 - DNA, 340 bp, Zea mays
  Clone ID: MRT4577_47180C.1
ttttcaagtgcaagggtgggctttgatgtatttttgagtgactccagacagttttgcaagttcttgcattggatatctgataatcacaaatgtattgcatttaatctttattctacagctctgaaggccatatctatgaaactaatatcctgaatcaagcatctatacctaactacttctctgagtatcccatacttatttcatcatggtttcaaaaaaaaaaaaaaaacctacgatgctccaaatggacaactcactataccactatatacatcaactagccatgtcatcttcttaagccattcaaaaaactctggaacggtgtgcccttcaaaaaata

SEQ ID NO: 126879 - DNA, 486 bp, Zea mays
  Clone ID: MRT4577_47181C.1
aggggaggacaaaaaggagcattttaaaaggggtgggttattttttttttttttaaaaggggggggggggggggaagataagctgggactacaagcacaaaaatgcccccggggagaaaaaaaatttagggcttaggaatggctgtttttttttttgacaccggacttgggaacctggagggtgggggacaccgagcttaacctaaaaagagctggtttgggcaaatcaggcctggggtagttgtaaataaccgggtttttaaaagccttgggcattttggggaactttttgggcataaaaaacttgggggtgagcttcgcaggggggttttgttttttgggcttgggaggagagaggaacaaaaccgagtcctttgcaggtgggtggatcgtgaaaatttttttgttcgccaaaacccagtgtttgaaggagtggattttgaaaaggttgttcggttccttggggaactgcactttgggattggc

SEQ ID NO: 126880 - DNA, 238 bp, Zea mays
  Clone ID: MRT4577_47182C.1
cgccgctcccctccgcgttctttttcgagcccctcttcgtcgaggcgaagctcctccaggagatgcgggccgaggagcgcccctcgcgcggcgccgtgcccaggatcgtctacctcgtctccggctccgctggggacggatccgcgctgcgcctgacgcttcatggcgctctaccacccggcaaacacgtacgtcgtgcacctcgacctctaggctcccgtcgccgagcgcgcctagc

SEQ ID NO: 126881 - DNA, 353 bp, Zea mays
  unsure (1)..(353): unsure at all n locations
  Clone ID: MRT4577_47183C.1
tatcttattcgagcgcgccaaccagctgggcccggtcgaacgaaactttttccggctttaccaanncccccccaccgaccaacaagggtcattggggagaagcccggattgttggaaagagaaggaactggcacccgaaactgctgacaacgacgagctataacgactgcccggggaaacaacaacaaccatgataaccgtaagggttcaccccaaaaaaacaacacaacccccgaggctctgctttacaggcattagagcgggaccacaaaattagaagtattttttaataaaaaagatatctgttgttagtcgaaacaaaaaaaaaaaaataaaataaaaaggggcggccg

SEQ ID NO: 126882 - DNA, 296 bp, Zea mays
  Clone ID: MRT4577_47184C.1
cccccacccaatggtttttgttaaaaaacaaccagggcctgtttttttttaaaaacggttggctgccttgaagggggccggtttttgcccggttcccccccaattttacgatacccgggcccttttggggggggccgaccttttgttgggccccggccccacaaccaaaggcggaactttttggccccccactccccaatgtttttttgggggcaattgttcccagggaccctccgttggggggaaaatccccacgcccctggggggggaggggccctttggggtgggcggcaaaa

SEQ ID NO: 126883 - DNA, 296 bp, Zea mays
  Clone ID: MRT4577_47185C.1
acgagccttcgtccttttttttttttttttttttttttttttttgggtttgggttttttttttttttttttttgaaaaaaaggacccgggggtttaccttgtaattcaagaccttttcgaaaaagcggcccatatttcgttataatgggtttgtttaaacctggagattttcagggttattgctaaaacctggggagaaattgtttttggttgaaattttctcccaatattcaacccgggggtttaaagcgaaaaacttggtgggccaaatgggtgggctaacaaaaattaattgg

SEQ ID NO: 126884 - DNA, 532 bp, Zea mays
  Clone ID: MRT4577_47186C.1
cttaccggcagcgagattgctccggtgaggtggccgagggtgtaggggaggtcctgagggtcacgacaatgtgcgggtcgctgtctgggatggtcagagtcggccggtccgcgtgcgcaggcgggggagctcgtcggtggcgaggagtccggcctatccagggcgaaattgttctttcttactggtcagagagcttcactgggtgctagggaagacatgggtgcgaggaatttgacaatggcttaccggagagctcggtccacgcgcgggggcgggcgaccgaagtctggcgagggtgatctcgggcttccggtgaagttctgccgggtccgagggcttggaaagcttcacgggcctatggcggagctaaccgaagcgcggacgcaacttgggggtgactggagtgggctggccacggcggccgaagctctgaaagcttggcgggcggtggcgcagcatgctcgggggcgatttccagtgatctctgacttgggcaagtttggagagcgtgaggggatgaatggccgaggct

SEQ ID NO: 126885 - DNA, 290 bp, Zea mays
  Clone ID: MRT4577_47187C.1
taaaaaaaaataaaaaaaaaaaatagaagcaataaacgcaataaaaaaaaatcaaaaaaaacggggagagtaaacaaagaaggggggattgcattctaacttaaaacgcatacaggtatgagtccggcacacgggcggtgcgcgccactggtttttcgaccacgcgcgatgaccaattgtgtgggtgggcggttcctgtggtactgagttgactggctatcgcaccgcgcgcatcaacgggtttaagctatcctgactcactactgtttcatctcgaatgactttcacta

SEQ ID NO: 126886 - DNA, 377 bp, Zea mays
  Clone ID: MRT4577_47188C.1
gtgaactaaataaggggggaccgacctaggggaacaagtttctgcattacagcacaacactcctagcagaccaaaccaatatcactcgtctcttctcattttagtatcaacaaacaaaagaagaggggaaaataaactatcactcagagcacaaaacccattcgactttcaggtacctttcacacacaactatcacacaacagttcaagatagactttacacggcgccttcctttgacagactcctttgagaagacgagcaccacctattgacactagaaccgttagtgaaggctagagcaagcattgagctgtgtacgtttgcaaaccgtgtgcagctcttgttgagacaaaaacaagtgcagaccacatcagtta

SEQ ID NO: 126887 - DNA, 517 bp, Zea mays
  Clone ID: MRT4577_47189C.1
tttttactagcaaatacatagtagaatacactagcaacatgttaacaccaagggagccaagatttttccctccttgccctccttgctctttcagcaagcgctggtacctctactattattccacaatgctcacaacaatacactctctacggttacagccgcgggatttcaacacccaagggggggggggtacatgctacatgaggccatcgtatcaagcatattacggtcattagcattaaccctccaacagacatatgccctattgcaacaaccatccttattgcatctgtatctccaaagaatcttgacacaacaactacaacaacagttgctaccaacaatcacttcaagtagttgcagtgaaccttgctgcttatctccagcaacaacaatttcttccattcaatcaactagctgtggtgaaccctgctgtctacttgcatgcacaacaactactaccatttaaccaacttgattgcagccctgatgccttcttactgcaacaacatcttct

SEQ ID NO: 126888 - DNA, 339 bp, Zea mays
  unsure (1)..(339): unsure at all n locations
  Clone ID: MRT4577_4718C.1
tcgnntccgatactagttccttcttggttgcatgctgtcagagggagggtgtacacagtagggccagtatgccgtcgtcgcgccgtgtcgaaatccgaaagcatgagaggagtcggcatatggccggtgatccgcgcggtctcggcgtcggtcgtggtcgtgcgtcgtcttggcgtgccgtggcggtgtgcgccgcgagccggcggtcggggatcactcgtacccggtgtgacttcctggcgctgcattgcggtgcggcggtccctggacgacatgcccggctcggcgttcttcgacgggtgggacttcacggccgacccgtgcgggttccccggcgtg

SEQ ID NO: 126889 - DNA, 562 bp, Zea mays
  Clone ID: MRT4577_47190C.1
ccggccgggacccacctccgacagtactcctaaacttgcgccgccgatgcctctcaggtaatgccgtgatggactccgggtccaccgtgtgtgcgaaccgcatcgaggttcacgcgcgtcagcacatgtgtgggccgtctctcctcgatcatagccaaggagctgctcaatgctcaaaacgtgtgcatcaaccgctgaagaggagatctcgcatgctcactgcggcacttctttccggcaaagcatgaaatacctccgcttccatccgaaagcggtagaataccaaaccgacacacgaccctatccacttccgcgacccctccaagattctggggcgcaacatccgcggaatgattccgcacaagagcaagaatcatgaggatatgtctgtggaggctcaagactcacgacgacgatccgccacagaactaccagaccgaaagaatggtcatccctggcgcgcttaaagttctgagggtacggtctggacacaagtactgtctcctcaaataggctcttatgaggtcgcctataactaccatgacaaattccttccacttga

SEQ ID NO: 126890 - DNA, 688 bp, Zea mays
  Clone ID: MRT4577_47191C.1
ggccgctttttttttttttttttcttttttttttttttttttttttttttttttttttttttttttttttttttttttttttttttttttttttttttttcctttttttttttgttttttttttttttatatctctttttatttttaccgggacaaaaaaaaccacggggggggaaaaaaaggcggattcaaacaaaccccacaaaaaaaaaaacgcgggccagaaaaaaggctacaagccaaaaaaacaaaaaaaaaggggaccgggccccactccccccccccaaaaaaaaaaaaaaggggggaaaaaaaaccgcccgttgccgcccacgacgaccccacggaaaatatggggggccgccggggccaacacccccccaaaaaggggggggaccccccggcggggctcaaaacccgagagggaaccccccgggggcctgaaaaaaacgcgcaaggccccccagaaaacccccccggggggcgggttcttaaaaaaccccgacagcagggggaggaaccccggaaaggcggcggttccattgacaaacagagggacctctttgaccatgtcctaaaaaaaaaaaaaggccccggggcagaccaaggaaacccaacacccttccaaaaatacttgggggggaaacaaacggggggaaaccaaaagaaaaagccgccccccccccaaaaa

SEQ ID NO: 126891 - DNA, 199 bp, Zea mays
  Clone ID: MRT4577_47192C.1
gcgcggcgctgcttttctctcagcgcccgcctcgagttcgagttctacaagcaggacgtgccccagcgccgagaccatcacgcagcagaccgcgcccgccgcgctccccacccactccggcgccggtccggtgctcctccgtctgcgcttccatgactgctccatctgaggctgccccacctcggtgttgatcgactcc

SEQ ID NO: 126892 - DNA, 256 bp, Zea mays
  Clone ID: MRT4577_47193C.1
ccggccagggtgctttcttacaggtggctccggcatgacagagccgatgtatactagtgctcgctgcaacttgatgtctgctgacgctcctatgtctgcgaagtcaaagacgtgtcctctctgaggagcgctccgacaacctcagacaacatggaggcgacaaaggtcgccggcctctagatcacaggctagaataagacgtcgtaggcccgcgtagcttcaactcggggtgaagtagtgtgcctaggatccccat

SEQ ID NO: 126893 - DNA, 331 bp, Zea mays
  Clone ID: MRT4577_47194C.1
cgcatgcgccctgctagtccgttattctgtttcttataacccaccccttccttaaatgtttttaatcaaaggacaaagaagtgtatcggacatctaatgagttaagcccttaagggcacttcagggagatgaagctatgctacttattgaaaccctaacacctttctattttagaacatcaaataaagttgccctttaggccaaccaagattcccctataactgagctggaacgcaacccagctggtaaccggttacgtgtcgtagactcgtagtcttccagccaattatattcatctttacaatcttcaatgacaactttggaatttttt

SEQ ID NO: 126894 - DNA, 190 bp, Zea mays
  Clone ID: MRT4577_47195C.1
atagcaggggtaacaacgcagagtacgcgggggctcaaaaaaaaaaaaaaaaaaaaaaaaaaaaaatttaaaaaaaagttctctgcggttgttactcactgttttggggcggtattctggggtattggttggtcgttggtgagctggtgtggcagtgttttccaaggtgtttgcactgttgtgggggggg

SEQ ID NO: 126895 - DNA, 483 bp, Zea mays
  Clone ID: MRT4577_47196C.1
gattggtggaccaggagatgagcataatggcgcagaagagtccttttggtcatttgaaagattgcacggatattcagcatatggccaaaacattgacaggtttccagctattcaatttgcaaaaagattcaccactacgaactctggaaccctccactctgcaagcactctatgaactcatctcactggtccatgatggtgctgaagcggttagccaaatggacaaaatagaagccacatcccagaataaatcctccaaccaaagagatgacacagatacgagtgctgctgcagacgattcatccctcttggacaaagatcctgttgcaaaaatcattttgccagttgaaccacttgaattgcggactatgctgcttgcaatggtgcatactttcccaaggacgttagaaaatttgattctcaacatgcttgggccagtaggagcagagatactgactaggaagtttgatgagatggatcaac

SEQ ID NO: 126896 - DNA, 287 bp, Zea mays
  Clone ID: MRT4577_47197C.1
aagtgtcacaaatgtatatataaaccaaccggataatgagggggttcatgcatttcacacagcattcacaaacacacacaacgatggatatagatgctgactaactggtccgaggcatacaatacatacatgtttgcctacgccgtatgaccataccacaacacgctagctgaggggcggcaattaatcagttgattagcgcacacgcgggatctatgcttcccgtaattggtgttgcgaaacgcagtcgattttaccgggtatgaccgggccttgggcgaaatgaa

SEQ ID NO: 126897 - DNA, 842 bp, Zea mays
  Clone ID: MRT4577_47198C.1
ccggccgggaaaaaataaaaaaaaaaacaagcaacacacactaggtacacgctctcacgaaagttctccattcctgcctgcatctagcttgttgagttcttacagttgcagaaatggctaacctcttgcaaacacctttccttgtacccttcctactttccatggccctaaaccttgtgtgcttcacggccactgtcagcagtgaggacgatcagttcgtctactcgtgcttctccggcaaaaacctcaccctcgacggagcagccgccgttacagcagacggcgtccttgagctgaccaatcgcacggtgcacgtcaaaggccatgccttctacccagctccatggcgattccgcaggtcccctggtgagacggtgcagtctttctcggtcacctttgtgttcggcatggtccccatctactccgacaaatgcaccgacggcatggctttcctgatctccccgaccaaggatttctccggtgcgcaggagtcgcagtacctgggcctcctcaacaaaacaagcgacggcaaagcaagcaaccacatatttgcagtcgagcttgatagcagcgagaactccgagttccatgacatcgacgacaaccacgtcggcatcaacatcaacagcctcacctcatttaggtccctttcagctggcttctacgacgacgacgacaagaacggtctcttccaaaacttgtcccttgttagccgcaaagagatgcaagtttgggtggactataatggcgataccacacagatcaacgtgacactggctcccctcaaggtcaatgtagccaaaccgtccaaaccgctactcacagctacctacaacctctca

SEQ ID NO: 126898 - DNA, 892 bp, Zea mays
  Clone ID: MRT4577_47199C.1
ttgggaccctcgaggccggccggctatctatctatatatttcgtatcggtcggccaggcccgaagaacgaagaaaccaagcagctaccaccatcagtccagcaacaatggcggcggcggaaccggtaccagtaccagtaccggcggcagctgccgggaccaacaataagatcaagacggtggtggtgctggtgcaggagaaccgctccttcgaccacatgctggggtggatgaagtcgctgaacccggacatcgacggcgtgacgggggccgagaccaaccacgtggacgcctccgacccggcctcccacgccgtccgcttcagcgacggcgccgagtacgtggacccggacccgggccactccatgcaggccatctacgagcaggtctacgggacgcccttcgtcgacgccgccacgacgcccgccaccccgccgggcgtcgccccctccatgtccggcttcgcgcagcaggccgagaaggagaggcccggcatgtccgccaccgtcatgagcggcttccgccccgacgccgtgcccgtgtaccgggacctggtgcgggagttcgccgtgtgcgaccgctggttcgcgtccaacccggcgtccacgcagcccaaccggctgttcgtgcactccgccacctcccacggcctcgtcagcaacgacagcagggcgctggtggctggcctcccgcagcggaccatcttcgacgcgctccacgacgagggcctctccttcggcgtctactaccagtacccgccgtccacgctcttctaccggagcctccgccagctcaagtacgccgccagcttccacgccttcgacctccacttcgcgcgccactgccggggagggcaggctgcccagctacgtcgtcgtggagcagcgctactt

SEQ ID NO: 126899 - DNA, 1591 bp, Zea mays
  Clone ID: MRT4577_4719C.1
cggtcgcgtggggcagactggtgctcgcattaaagttcacgagattgacaaagatgcttctggagaaaggctgatcattgtttcatctaacgagataccaactgaaccaatatccccagcaattgaggcactcattttgctccatgataaagttagtgcaccctctgagaaacaccattcaagtacaaggcttgttgtaccatcaagcaaagttggctgtattattggggaaggtggaaaagtgattactgacatgagaagacgaactggggctgaaattcgagtttactcaaaggcagataaaccaaaatacttgtcttttgatgatgaacttgtgcaggttgctgggcctccaactattgcaagaggagccctcacagaaattgcttcgaggcttagaactaggactttgagagatacaagtaccgccaataatcctccaccttttgccccttttgatgatcctcctgttgatatgcctagcagaaagttgtcactatatggagggcctgccactgatccaccgtatggaaggcctgccaatgatccactgtatggaaggcctgccattgatccaccattcggaagacctaccaatgatcgaccatatggaaggactgctgttgctcccccatttggaagacctgccaacgatccaccatatggaaggcctaccaacgatccaccatatggacgaccttccggtagtataccatatggaagaccaaacggaagtgcacctcgtgagccttccgatgcatatcctgtagactacttttctaaaagagaatatcctagtggaagtcctatgtttactagtaatgccccatcagctgcttatgagagatatgcagcacccacacgctttcctactagagaatttccctctgctttcagtcctggtgtagatcatatgcctcatcattcctatcgtgaccatgtgcctactgatagctactctagtaggggtacacagcaattaggcatcacaagaggtggaaattcagatgcttatgactataccgaggctgctggacaaattcatggacgtgaggattacagagaaccgacaagtgctaccggaaggttcttgagcactattgaactaaggattccaaatagttctttggggtctatcgtcggtgctggtggggtcaatctagcagagatccgtcaggtttctggtgcaagactgaggctacatgaggctcatgctggttcttctgagtctgtggtggagatccagggcacactggaccaagcaaaagctgcccagagcctcctgcaaggctttattagtgcaaacagccggcagcaacagcagccctattcttctcgcatgccactttacccaagctggggatagcttctggtctcatggtcgtgtcagaggaaaacagagtcagcagggtttgtcatgtggctgtagatctcggactgcagattagctgtagcgatgatgttgttgaaggtggctgtttaaccgtgcaagcatgataacttatacttatgccataggacaagtaatattgttttcctctcatgaaatactaagtgacaagctgtctctgtaaaaaaaaaaaaaaaaaaa

SEQ ID NO: 126900 - DNA, 533 bp, Zea mays
  Clone ID: MRT4577_471C.1
ggaaagggggaaatctcttcaataccttgtctggaagggccttcattccgagtacatgtgcaggacatgggaggattcctctttcctcatgccaaagcaaagggctaaatagacaccaccagagacgagaaatttgctgttttgccactctcaaatttgacagagacagatttattcaaaacttgttttcctaacactctctgctaaatatttggattacagaaatctgtactactgctagagccctaaagaaacagagcagcatcagtaatgccatttaggcctcagctccttttcttcctctgtcagctcttgataccggtaccattgcgacgctgctttgccgacaggtaatggaggacgcatgaagacctcaaccggtttgggcacatgtaccaccagatgcagctcaccgccatcataaacttcctcagcgctgtttgaaggcacacctgatggctccacagaaatccacccaagcccagagatcgcgatgtcacaggcaggcctatcacgttcctcatattttatct

SEQ ID NO: 126901 - DNA, 378 bp, Zea mays
  unsure (1)..(378): unsure at all n locations
  Clone ID: MRT4577_47200C.1
tggacctctcttgtccttgtgtgcttcagactgaactataagatctgatatcctatctgcttatatcccatgatagtctttggactcctcccgtatatgattgaatgactagaatatctcacttatagcgtagcacgtatacgtanataacattgctgtagatcactgaacagaaattattgtctcgcctatttctgacataacttatctgaagcaatatcgcnagtcacaaatagaanatgacaaagattggtatgaagagatctgtaatatctaatgaatatatataactacttagtgaaatattatcttagatttacgatccttatacatcttttctttcattgtgctggatatactacgataagaattcagaat

SEQ ID NO: 126902 - DNA, 777 bp, Zea mays
  Clone ID: MRT4577_47201C.1
tgctagtaagagctttggatgggaaaggcgtggttatcaggcgcggaacgcgaaagaagtctcgatggagatgattaatatgcacgaaaagcagcagtttatggatgacaaaaaactaattgcaattatatctgaagcagggtcagctggtgtttctctccatgctgatagaagggcaaaaaaccagagaagaagagtacacataacacttgaactcccttggagtgcagatcgtgcaatacagcagtttgggaggacccatcgttctaatcaaacttctgcccctcaatataggcttcttttttacaaatcttggtggtgaaaagcgatttgcatcaattgtggcaaaaaggctagagtctcttggtgctttaacacaaggagatcgcagggctgggccttctttgagtgcttttaactatgatagcaactatgggaaaaaggcattaaccatgatgtataggggaataatggaacaggattcttttccagttgttcctccggggtgttctgatgatgaaactagcatccaagaattcatcaatgaagcaaaagctgctctagtatcagttggaattattagggatgctttcatatgcaatggaaaagatccagggaagctttctggtcggattgtagattcagatatgcatgatgttgctcgttttctcaaccgccttttggggttgtctccaaacatccaaaacaggttgtttgatctttttacaagtatacttgatattggccttcacaatgcaaggatagaagggcagctag

SEQ ID NO: 126903 - DNA, 357 bp, Zea mays
  Clone ID: MRT4577_47202C.1
aaagatgggggcattaaacaaccaaaatggcccaaaacatagcccctccagttttgaagcatggaacgctgcagcaaaaaccggaccatgcaccccaggcccaggggtacaaaactgggtccaggaggggtacaaacaaaagtttcacagttggatgattttgaaaaaggggactttgctgcaccgaaacaccttaccccttgggcttgccaaaaaacctttgtttttaatggggaggttggaagccaccgcccccaaatttggacaatggggcaaaaaacttgagcttgatctccctcaaccccagcccgggaagttttttttaggagggaccgggggggggaaaccacctttttt

SEQ ID NO: 126904 - DNA, 225 bp, Zea mays
  Clone ID: MRT4577_47203C.1
gcgcgcggcggtgaacatgtaggtcatgtagtcggtgctgatgaaggggtcgttacggcgacagctcgacatcgtcactctgcagggccccctgccaccactttccatcctgccgaacccattgatcccactgacttgcctggggggggaggctgttgacgtaggatacgaggatggatggatttgaaacgagatcggtgacggggttcgcgagtgcccccgcgt

SEQ ID NO: 126905 - DNA, 762 bp, Zea mays
  Clone ID: MRT4577_47204C.1
gggaagggcactgacgcgctcggccgcgcccccaacacagagagaaggtctgctctccaccggatggactcccacggcaagcccaagcccgccggttcgacgccgccgacgccgccgaagccgccgaagccgccgacgccgccgacgccgacgccgccgacgcccgaggcgaggaaggggttcatgcgccgcatcttccctttcctcctagccgccaacctctttgtcgtagcttatgtcctcgtgcgggccaaccaaaaggactcagcaaagaaggacccaacgactgatcctgctactgcaactgctgggaagcctgctgagccagtctctatccccagaaaggagctcccaccaatccctgaagatgaccagcgcaagctctacaaatggatgctggaagagaagcggaagatcaagccacgcaatgctgccgagaagaagaaactcgatgaggagaaggcccttctaaaagagttcatccgagcaggatccctcccaagcttctaaaagagatcaagccatttgggtctcttgtgtctgatgttcagccaagaagatgattgggcctgattggattgtgtacaaacacagtactgtgctatcttgtaaactgatgtctccatgatgtagcctcctcgagttcaaaggttgtgtggatgcaaactagtgttgtgtgcattggttctagagattcttcaaggctaaaaaaactaaagtgtgtcaaaaaaaaaaaaaaaaaaaaaaaaaaaaaaagcggcc

SEQ ID NO: 126906 - DNA, 1014 bp, Zea mays
  Clone ID: MRT4577_47205C.1
cattgggtacctcgaggccggccgggagttcgctggagatagagccgagaacaagggcaactgacgcggtcaccctcgcccccaacacagagagaaggtctgctctccaccggatggactcccacggcaagcccaagcccgccggttcgacgccgccgacgccgccgaagccgccgacgccgccgaagccgccgaagccgccgacgccgccgacgcccgacgccgacgccgccgacgcccgaggcgaggaaggggttcatgcgccgcatcttccctttcctcctagccgccaacctctttgtcgtagcttatgtcctcgtgcgggccaaccaaaaggactcagcaaagaaggacccaacgactgatcctgctactgcaactgctgggaagcctgctgagccagtctctatccccagaaaggagctcccaccaatccctgaagatgaccagcgcaagctctacaaatggatgctggaagagaagcggaagatcaagccacgcaatgctgccgagaagaagaaactcgatgaggagaaggcccttctaaaagagttcatccgagcaggatccctcccaagcttatgagctcacccatttgggtctcttgtgtctgatgttcagccaagaagatgattgggcctgattggattgtgtacaaacacagtactgtgctatcttgtaaactgatgtctccatgatgtagcctcctcgagttcaaaggttgtgtggatgcaaactagtgttgtgtgcattggttctagagattcttcaaggctaaaaaaacttcagtgtgtcaaattcttctgttccattcctccgcaatttgctccgttgacaattttatgttctgtggctctcgtgtgatgagtgaactcatcgcgtgtgatgagctcatcgattgccatgtactgtattgttgagaccgcaactgggccccaaccctatttagaatgttcttaaaaaaaaaaaaaaaaaaaaaaaaaaaaaaaaaactcgagagagggccgcggtacc

SEQ ID NO: 126907 - DNA, 651 bp, Zea mays
  Clone ID: MRT4577_47206C.1
cttaggcgcgcgccccaacttccatcattttgccaaccccgcactcaaaaaaaaaggtcgaaacgaggccaccagctcaccgccgagcggaagcgacgcccagcaaccaacccctctcctcgtccgccgacgtctccccggaccatggccttccccaccgtgctgaaggatctgatgaatgctgactctcatgaatgtgtgaaagttgtggccgattcatcaaccgcgtggattactgactatgaccagtatcaattgactgagcttgatgttgtgtagcctaccagaacatgagatcatggtatcccaatgaaagacctgttgactctcgatgagagtgggaatgcagccagcgatatctattcaccaaagtctgaagaggtgcgtgaagtgaacgacaaactaaaagacttgcctggagtggtgaataccagtgcatatgaaaatggatgtattatgaaggtcaagctcatgaattcagatgagctcaattcgctcatgcatgatgacaagtactctaaatactgcgaagaatgtgaccattgaagaaatcgcagtgacttctgaggaccagaacctgattttcaagctttatcaattatcactggactatggtctggagaccagtaatgacaaattgtgaaggttcat

SEQ ID NO: 126908 - DNA, 1298 bp, Zea mays
  unsure (1)..(1298): unsure at all n locations
  Clone ID: MRT4577_47207C.1
gcaccagcagatcctacaggaacgctgaaaccaaatgaagtttgtgtgatacttgacagcggacaatactctggagatgttcttgtgtttaaacatcctgggctacattttggcgatatacatatcttaactgcaaggcaaattgatggactagagaagaattttattggatattcaaaaaatgcaatactttttcctacttctggacaaagatcattggctgatgagatggccaatagtgattttgatggtgacgagttctgggtctcaagaaacaatatgttactaaagactttcgagaagcgaagtgagccatgggttacaaaaggtttagcgcctgactgttggttagcacatatggaccgattattaacagaaggagtcgatcaagatgagaagaagtcaatcgtggaaaacatgattaaattagttgacctttattatgcggctctggatgggcacaaggtagatgttgatcgccatctgagagtaaaagcatatccacacttcatggagaagaaaggatttgaatcctaccattcttcatctatattgggcagaatctacgatgagactgaggaaataatagcgcagcaatgtgacgaacagatccagataacgacactgccgtgcttcagtgaggtggaggcaaccccggaatgcacctccctatgggaacaccggtaccaggagtacttgacaaagagcaggggccttttcgatctgggcaaggaagaaaagaacgacgagttccagaaactctaccaacactacaaacatctgctatacgacgccgacgaactggaggagacctcgcgggacctctcagacgtgttcatggaggcctgcgcgatctacaggatcgtgtacgagcgagcatggtgtaccaggagcgtcagcaggtgccgtttcgtgtggaacgtggctggagcggcgctgtgccacctccacgcgaccaagtacgcggcgcagcgcggggagaaaaccgcgctctgcccgctctcagttatccgccagctttacatctgattttttttttttggtaaagcagctgatttctgcctgtaaaatgaaacgggtgagctgatgcgtcttaagagaagtatatactggggctctcgatcaacttagtcaagagcttcacagttgctttgatttgatgaggttaatatagaattgctttcttgtacgtcaccagccttcaatcttaaagactcgttcgcatcttttgatacacagaagttgtgtaggtttgcccgannnnnnnnatctaaatgacatctggtacagatttattg

SEQ ID NO: 126909 - DNA, 627 bp, Zea mays
  Clone ID: MRT4577_47208C.1
acttcacaacgagaccccgaagagcaatgttgccggaagccgggccaccacgacagccgcggccgaaccctcgaactcgagagcccacacccacaaaaacagcagaagaggacgcggcacaagacagcacagcacggacggccgcccgagacgccgagggagcacctcgaacgtgacatgaggaaccaagtcgccacacacaccgctggctaccccgacgcgcaggcacacacacgcatgcctgccggtcgccacagcgccaacgcacgctcggccagacaacgcgcgaccagcgagcacaagctcggcaggctagacacgaccacacagtgacactacagccatcggccaggtgtggtgattgccacccacgcccaaggaagcacaaggacaagcagacggaagtaccgaggtgaagggaaaccgaaggatgggagtggggacgggagaaccagcaagaccaaacgcaccagccagacccagaaaaggtgcccaaacggcaaatagagcgacatcagaaaccaagaaccaagcgctgtagcctgcaggggaaccgatacagatgcaaagagccaggagcacgagagcaagaccaccaagagaagtgcaaggggacccacgcagcga

SEQ ID NO: 126910 - DNA, 606 bp, Zea mays
  unsure (1)..(606): unsure at all n locations
  Clone ID: MRT4577_47209C.1
nnccgtccggccaatagnntgattttnatggggtgacgagttnnctgggtctcaagaaaacaatatgttactaaagactttcgagaagcgaagtgagccatgggttgaactattaaaactgaaggagacccagcacaggcttagcaaacctggggatttaaatgaattgattctcgaaagagtgctatttaatgaatgcttgacgactatgtttatacccaattacacaaaaggtttagcgcctgactgttggttagcacatatggaccgattattaacagaaggagtcgatcaagatgagaagaagtcaatcgtggaaaacatgattaaattagttgacctttattatgcggctctggatgggcacaaggtagatgttgatcgccatctgagagtaaaagcatatccacacttcatggagaagaaaggatttgaatcctaccattcttcatctattttgggcagaatctacgatgagactgaggaaataatagcgcagcaatgtgacgaacagatccagataacgacactgccgtgcttcagtgaggtggaggcaaccccggaatgcacctccctatgggaacaccggtaccaggagtacttgac

SEQ ID NO: 126911 - DNA, 230 bp, Zea mays
  Clone ID: MRT4577_4720C.1
agccaccttttttgagcacagcagcatcatacaaaagagggatgcaagtgcaacaattgggcgacgatggaaaccaagatatttttccttcttatgctccttggtttttttacatggggtggttacgcgacaaattttccttaatggttacaaacttctattggtttccttttttccccatacctttcattaaattattggttcaagatgtgaaaacccaactttttaaa

SEQ ID NO: 126912 - DNA, 195 bp, Zea mays
  Clone ID: MRT4577_47210C.1
atgccaaacaattttgttcttaggatttttgcagcaaaagaaaaagggcttggagtgatgaaggcatcaaaggccttgatgacttcatcattcgagcagggtacctctgacaggaagcgattaggccaagtgaatgagctagatcaggccaatctagagaaaggagaggttcttgacacgtttgaattgtgttag

SEQ ID NO: 126913 - DNA, 497 bp, Zea mays
  Clone ID: MRT4577_47211C.1
tgaagtttgtgtgatacttgacagcggacaatactctggagatgttcttgtgtttaaacatcctgggctacattttggcgatatacatatcttaactgcaaggcaaattgatggactagagaagaattttattggatattcaaaaaatgcaatactttttcctacttctggacaaagatcattggctgatgagatggccaatagtgattttgatggtgacgagttctgggtctcaagaaacaatatgctctgcaagtttcaaccttcgccgttcgttagcctccccttctgggcttgctcccgaagttgctgctttcagccatcatctttgttgcttacgcatagacgaagcgcctttgtgcacttctttagccgaagcttagcttcgtctactaatgagaatattcctgaaatacacttgttaatgccgaagcaatatgttagacaagtcattgtttcttcgctaataagtgatcttcggcataagaggccccaac

SEQ ID NO: 126914 - DNA, 431 bp, Zea mays
  Clone ID: MRT4577_47212C.1
cttgagcgagtcgtcgcggtcgtacacgccgttgatctccgaccacgcgatgtcgtctccgaggcgcagctgcgtcgactccggcgggtcgccaccgaggtggtctcgcgaggcggccatggcaaggagacgctgaagagagagagaagcgcgcacgcgatggaggagttcggagttttgcacgcgccttgcctccgttttccagcgtgcgcaacgcatggttgactcgttggggtcgccacgtggattctttatatttacggttcctactacactatagcatagcatagaggcggagacgaaggaagatgtgtctcatggtctctatttgacaactataaaggtactccttctaaattgtagtatgtctcatgtgtctcatggtctctattcggaagatgtacatggcataatttaatgtcttttgttac

SEQ ID NO: 126915 - DNA, 259 bp, Zea mays
  Clone ID: MRT4577_47213C.1
gtccaagccatcgtcatcgtgaagggccttttctataaccttgctgaccacattgtcgagcacgttatcaacaacgcttgtgtcctactccaccaacttcttccactgcaagttaagtaggctccttctttgacctttacgtgtccctatgcatgataacgctcactaattattatttagtactcatcatctaaactattgctcatatctggttggatataaattttttctacaatctttcttttttttttttcacaaa

SEQ ID NO: 126916 - DNA, 2719 bp, Zea mays
  Clone ID: MRT4577_47214C.1
gccggccgggtcgggagggttttctgtagccgacctaggccacgcaaagtgcaaaacccagagccatcgctgccgcctcggtcgcgattcctaaaggcggcgatggccatgacgcggcgttctgcttcccatctcctatccgccttccggcccttctccctcctcctccagccgcacctcgtcgactcttcgccggcggccgcgtcggcgaggcgggcgatgtcgtcggcgtcggccctgcgtgcacgggacgagaaggatgtggcgcggtggcggtagtcgatgggccggatgcggaatatcggtatctccgcgcacatcgactccgggaagacgacgctcacagagcgagtcctctactacacgggtcggatccacgagattcacgaggtgcgcggccgtgacggcgtcggtgctaagatggactccatggacctagagcgcgaaaaggggatcaccattcagtctgctgccacctactgcacctggaaggattaccagattaatattattgatactccaggtcacgtggatttcaccattgaggttgaaagggcactccgtgttcttgatggagctatacttgtactatgtagtgttggtggagtacaaagtcagtcgataactgttgatcggcaaatgagaagatatgaaatcccaagggttgcttttattaacaaggtggaccgtatgggagctgatccatggaaggttcttaaccaggcgcgatccaagctccgtcaccacaatgcagctgtacaagtacccataggattagaagaggagtttgagggccttgttgaccttgtagaaatgaaggcttataagttcgagggatctagtggccagaatgtaactgcttctgatgttccattgaatatggaggatttagtcactgagaagcgtcgtgaacttattgaagttgtttctgaagtagatgaccagcttgctgaagcttttctcaatgatgagccaataacagctaatcagcttaaggcggctattcgaagagctacagtggcacggaagttcataccagtatacatgggaagtgcattcaaaaataagggtgttcaaccacttcttgatggcgtgctggattatctaccgtgcccgttggaggtttataactacgcccttgatcaaaacaaatctgaagagaaggtattattagctggaactccagctgaaccacttgtggcattagcatttaagctagaggaaggtcgttttggtcagctgacctatctaagaatctatgacggcgttatacggaagggtgacttcatatacaatgtcaatacagggaagaaaatcaaagttcctcgcttggtaaggatgcactctaatgagatggaggatattcaagaagcatatgctggccaaattgttgctgtttttggtgttgattgtgcatcaggcgatacatttacggatggaacagtgaaatatactatgacttcaatgaatgtccctgaacctgtgatgtccttggcagtttcacctatatctaaagactctggaggacagttttcaaaagctctgaatcgcttccaaaaggaggatcctactttccgtgtgggtttggatgctgagagtggccagacaattatttccgggatgggtgagctgcatctggatatatacgttgaacgtattaagagagagtacaaggtggatgcaaaggtaggaaaacctcgtgttaacttcagggaaacaattacccagcgtgctgaatttgattatttgcacaaaaagcaatctggcggtcaaggtcagtatggacgagtttgtgggtacattgagcctctaccttcaggttctgatggtaaattcgaatttgataacatgattattggacaagcaattccttcaaactttataccagcaatagagaagggttttaaggaagcttgcaattcaggctcgttgattggtcatcctgttgaaaatttaagaattgtattgactgatggggcttcacatcaggtggattccagtgaacttgcttttaagctagctgctatctatgcttttcgacagtgctacacttctgccaaacctgtaatattagaacctgtgatgaaggtggaactcaaatttccaactgagtttcagggcacagtaactggtgatatgaacaagagaaaagggatcattgttggaaatgagcaggaaggtgacgacaccattgtagtttgccatgttccgctaaacaatatgtttggatatgcaacagctattcgatcagcgactcaggggaaaggtgaatttacgatggagtacctggagcataatgttgtatcgcaggatgtgcagatgcaactagtgacctcataccaggcggccaagggcacagagtgattcttctttttacagaagacaaattttgtttgcgaacttttagtggcatcgacttcccggtcctctggacacgtcacaaatagtaggcgataattcaaactgtggtttcttagtgaaaatacaactgtgccgcaataattagcattcccacagtagaattgtacaaaacattatctagcaaatgcctgaagtttagtttgtaatgtcttggtaatgagaacatcttgtgcaatttctcctcaaaaagaaacatctaatgctaaactgtgaaggcatggatgttttggttactggtaaaaaaaaaaaaaaaagcggccttttgggtttctgttcaaactgtttgtttttttatatt

SEQ ID NO: 126917 - DNA, 423 bp, Zea mays
  Clone ID: MRT4577_47215C.1
gggttaaacggggggcaactgtatgaaaaggaagggaaaactaggtggagttaacgggttttgccgccgctgatcccgaacatttactttgacaggggggggaaggaaaacattggcccaggcaaattaaagaaccccccagacctggctaaaccaaagggtttacactttggacccccccctagctaattatttggggggggggggtaaccggccgccggggccgttgccactttaggccaacacggtacttgggggggggggaactaacgacgaccaaacatgccacattggttggataggtggtggactaccaaaccggcattaattagaagccccccctgttgacggggaacacctaccgggggggggggtggagggaattggtggcaaacccgacgccgttgtttttgttttcggggg

SEQ ID NO: 126918 - DNA, 497 bp, Zea mays
  Clone ID: MRT4577_47216C.1
ttttttttttttttttttcaaacatgatcataatataacattaattttccaaaaccaggtagagcaatagcaaatctacccaatagttcttttgtttgcaaagagtgggataaacaatattagggatacctattaggtcccatcatattaacctaagcatgtcacaatgattaacagaaacattattaggtagagataagtgatcaagggcacaacttgcctgagactcgagattcccaagtaccaacttggtcttcaagtgactcgtaacctcgcggagataatgccgcgaagatgcctgtccacggcaccatgcggtcctgatgcgttcttgaactccaacgacgaacttaccattctccagtcgcaaatcctgcgcgacgaggccaggagcaccctgcatgagccacgacgaagattctgggaggatttgggtccgcccgacagtgctaaccgaggttctccccaccacccatcacggcgtgcgcgcacacccg

SEQ ID NO: 126919 - DNA, 611 bp, Zea mays
  Clone ID: MRT4577_47217C.1
gggaccctcgagccggccgggctatcccgtaccggaccccaagttcgaccttaaagcctacctgggtacttggtaccaagtcgctggcacatcatttggcccaactgcaggcgccagttgcgtaaccgccaactacgcgttgaatgacaacggcactgttcgcgttctcaacacagcaacagtgggccctcaacccatcagcattgtcggtacagcgacaccagtcgattctgcatatggcgctggtggtgcctttgttgtcagcttccctggcacgccagacgctgaatgcccgggaccaaactacattgtgcaagattacgctatcgattgggccatcgtacagacacagaagtggaatacattgtacatactgagcagggagcgccagccagcctctgccagcattgatgcttggatcgagcgcgctattgcttttggctctgatgccaccgcgatatcgagattcaatcaaacccggctgcgatgtatgatggtgctgtagcgatgaaatcgacgcatttaagtgtgcatacttttatttacagaacctgttcctatactgcaaactttctaatactcgaacaacaatgacacctatcctatttccc

SEQ ID NO: 126920 - DNA, 230 bp, Zea mays
  Clone ID: MRT4577_47218C.1
gggggcacaaaaatggggggggctgtccaaaaaaaaccacctttgcccaacgtgcattatccacaggtggcttggacattggggcacggggcatactagcgctgtaaacacgttccctgcaaatacaatacatttacacaacccctgcacaggggggcagaccaccaaaggcccggggggcgggctgccttgtctgcctgctgttccccgctggcatgatcgaccggccc

SEQ ID NO: 126921 - DNA, 230 bp, Zea mays
  Clone ID: MRT4577_47219C.1
ctctacttctactcctgtctgccagcccgccaaacagacaagtccgcttcctccatttctcctcgcgttcctgaaagggtcgcatgcacactatgaaactgtcgtcactgcacaaattatccatgatgtttctgtgtgcgactaatgcgcacagctatgttcaagccgacacctcggatgcgcagtgcttgttcttttatctctaccagaatgttctatccaccccgggc

SEQ ID NO: 126922 - DNA, 332 bp, Zea mays
  unsure (1)..(332): unsure at all n locations
  Clone ID: MRT4577_4721C.1
gctctgtctacgccgctcgcgcatcctattgccctcgcgccaccgtcgccgccgctgcagcgagccaccgccctgccgtcgcctgaggtagacaccaagccaccgccatggggcgtatgcacagccgcgtcaagggtatctcttgcatcggcgctgatgtacattaggagtccttggacctgtcgtatgtgtgatgtcagaccaccactgggcggcgggggtacaagcttggaggtattgacaagcgagtgattgataggttcgtgaangaggccgtcgggatgaacatgcggtgattcangtatgcgtggttgcttgacaagctgatggct

SEQ ID NO: 126923 - DNA, 638 bp, Zea mays
  unsure (1)..(638): unsure at all n locations
  Clone ID: MRT4577_47220C.1
ccggccgggaaagaaaaatggctcaccggagaacgggaagggctcgtcggaagaaacaacttcgtgcgtggcagggacccctcgacacagcgacgagtgcggcgagacctccagctaggacatcggtcctttctccacggtgacaaatgatgcgacgacgagctctgcatgggacctctgctcgacggcgggcgcggcgccggggcgactgcgtgatgcaaggggtggttgctgcaaggttgagggacagagagcaggtgccgactgtttgaatgggactatgggagcggctataacggaccattgctaaattcttgcgtcgtggccatatagtgcggtagaggttgttcacacacggaagagatggtggtgggcctgcggcgcagcagccgagtgcggcgctggtgcttcccccacgcgtgctagcaggtagatatgaatatacatatatgtttatatgaatatatctatttatattagatcatgtcccgataatttaatttgatagtttttccttcnnnnnnnnnnnnnnnnnnnnnnnnnnnnnnnnnnnnnnnnnnnnnnnnnnnnnnnnnnnnnnnnnnnnnnnnntttttaaaaaaaagggggcaaaaaaaaaaaaaaaaaacccggggccc

SEQ ID NO: 126924 - DNA, 275 bp, Zea mays
  Clone ID: MRT4577_47221C.1
gtccaagcaaaccatttaaatgtgcctttgaactgcacccggtatgatatgcataggtaaatttgtagtttggtgacactctacttgttttgtttctgtagttggtggagcgggcacagttctgggtaaataatttggcgcatagtccccagccccacatttcaagaagagtcatcacagaagaagtctgctgcagccatcagtcgtcgaatcaatcataaacaatctatatgcaggcggacatgctttcatccaatcagctgtactggacgtag

SEQ ID NO: 126925 - DNA, 773 bp, Zea mays
  unsure (1)..(773): unsure at all n locations
  Clone ID: MRT4577_47222C.1
gtaccctccgngggctcgaggccggccgggacaccggcattctgctctgcacaccattgctagctgcaacgcactgcaagaaagagctagctagctagctcaccgtcgttacgaagatgatcaagctgaggtaccctaagaagctgttcaggaggagctcctccaagggcagcagcactaccagcagcagcagcagcgacggcgatgccgccggcagcgcccgcggcggggagatcgagtgggaggtccggccgggcggcatgctggtgcagaagagggacgacggcagggggcacgtggacgtcatcaccgtgagggtcgccaccggcttctcctggcacgacgtctccgtcgtggctacctgcacttttgtgtgggcgtgcaaaaaaacgattgcaggtgagctgaaggcggtgctgtggaagatgacagggctggagcctcgggagcagaggctcctgttcaggggcaaggagagggaggacggcgaccacctccacatgatcggggtgagggacatggacaaggtgctgctcctggaggaccctgccctcaaggacatgaagctccgggccgggctcacggcggcgtatcgtcagactttcatcagggtctagtagtaggcttaggcttgccacccccgccccctaattaactgtgatgcatgatagagagagagtaaaacgaaccagtatcttgttttcggctgctctgacttctgggtcggtgaacgactgcctgccctgttgaagagaagccactgcttgttgttg

SEQ ID NO: 126926 - DNA, 710 bp, Zea mays
  Clone ID: MRT4577_47223C.1
cccggggtccccaggagcccagttgcgtaggcactttccactgtgagttgtgacgccgccgtccctggctccttgctgcgtgctgcccttgtgcagttgtgctccttccttccttgccccatccacccctccggcgccctgagccaaatcgcaggctgccattgtgccatggacgaaggtgcgacgacgagcgactcgtccgctgccgagacatttgatccgcaggacctgattcacgccatcttcaagctggtgtggaggcggcgggcggggaagggggccggcggcggcggcagcattgaggacatcgatgcggagcgtgctccagagacatcgaggagaaatcggagcacaactgccaatgcgactgctcttaaagtcagctgcgaacttctacggatatttgtaacagaggctattcaacgctctgcttttatcgctgaagcggaggatggtgctgttattgaacccacccacctagagcgtgtgttgccgcagctgctcttggacttctgaggtaccccatggagcctccaaaagcatttatctaggcgtgtctgctatggaaggatacagatgcctggatgcatcaacagaatcttattgctgatctatgtcttgtaatctgtaaacacacgagatttctatatggctttataaaaatgcatgcatttcttggaaaaaaaaaaaaaaaaaattattaagctgtg

SEQ ID NO: 126927 - DNA, 321 bp, Zea mays
  Clone ID: MRT4577_47224C.1
aaattattattctttcagatcaaactattactcaactaaatcaatattggcaaaacaaacattattcaaaacatttaaccattaaatcatcacaaacaaatggctaatcaccataccacaatagtgctctacccatattattcatatttacaaagaaatgtagccagatagagcaaaaccaaatatccagtcaaggacaacatggataaagcaccctatacagtacaactctcaatgtcccatgatgtgtcaccagtggcacatttaaattcttccagaaggaagcaccacatgttcatgagtcatctgtaaataaacaaa

SEQ ID NO: 126928 - DNA, 382 bp, Zea mays
  unsure (1)..(382): unsure at all n locations
  Clone ID: MRT4577_47225C.1
gcttctcacccctctcacgttgcaggcgcgtcatcgtcgcctcccgaaccgtcctcactgccctcctgccaccagcgctgcccctactgcgggcgctgttgcctgggctcttgccatcngcctgcgcccactcctgcccctgtcgtcggcgtggctgcccagcctggcccagccaccagtggcctaggcaccgctggccacgaccacggcttggcccacaccagcttgggcgtggctggtctggggttgtctggtccgggcctcgctgctgtcagcccctatgctgtcggcgtgccctaggcgtcctggacgctgctacggaccttggcacttcctttcatnctgagtgcctacttcgcgcctcttttggccgaactacccc

SEQ ID NO: 126929 - DNA, 352 bp, Zea mays
  Clone ID: MRT4577_47226C.1
ctagagcgtgacttacgtgactatgatgtgtgatgtcgtcgtgaagctgcgggacacccatcttgtgccgggtttcactgctggcgtgtccaacgtcatgtatctcaagacgaatggtaattactctagataccgcgacgagtgcaagactggaccaggcataaaggtccttgatgataacatgctggtcgcatataatgatagcaatgacattgttcttgcgaaacttgggtgaccttaatttactataggatgaatgcccacttatctgttgagtgacctactatgagatcctgatgtaagctgaccgaacttgaagtcgtgaaaaagattgttgggacgacgccagctt

SEQ ID NO: 126930 - DNA, 105 bp, Zea mays
  unsure (1)..(105): unsure at all n locations
  Clone ID: MRT4577_47227C.1
cgntcagtggcagatgtacttcattctatttcatgaaatatgtatgtctgcgtgtgatgtactactgtggtatgctgtataaatgtataaacactacgctttatt

SEQ ID NO: 126931 - DNA, 327 bp, Zea mays
  Clone ID: MRT4577_47228C.1
agcaccacaaaagatcgcttaaaagggaaggggccccccgagatcacaaaaaagatcaggaaagggggtttttcctgggccccgatccaaaataacgaatacagaaaaacgacgctaatacgggctatttggtggggaactaaacattcatcaaaacctccgaaaagaagggtacccccgccccccacggaagcggggggcgaacaggaagtccttgggcaaaaaggggacccccttggcggggaaggggcaaaagttggggtcctcaaaaaggccaacaagggagggctctgcggcctcctggagcgccaacacggggggggtttg

SEQ ID NO: 126932 - DNA, 157 bp, Zea mays
  unsure (1)..(157): unsure at all n locations
  Clone ID: MRT4577_47229C.1
ccggaattcccgggtcgacccacgcgntccggctctgtcagctgccaacgcctttgcaatgcaaatgccctggccctgccccgggctggaaggcttgtaccgggcttgcccccggcttaaaacaataatggcccccgccggcttgaaccctaacccg

SEQ ID NO: 126933 - DNA, 360 bp, Zea mays
  Clone ID: MRT4577_4722C.1
attcggctcgaggcgagcccaaggccgctcgcgatctagaagagcaagagaagaagagctcagctgctgctgcggtgctgccggtgccgggcggagtttaacatcgcgccgcagctaactcaacgcagttaagcttctcctactcctagcttagccaatagccatggcgctggctagccaggtcgccgctaaccagccgccgccgccgacgctctcctcccccgcccgccgcctcccaagagccagcagcaacgctctgctgctgctccagccggcggccgccgactagtgaactcggtcgccccggaattaattccgggacgggtcctgcaggcgggaggacagctttaaatagtgagt

SEQ ID NO: 126934 - DNA, 310 bp, Zea mays
  unsure (1)..(310): unsure at all n locations
  Clone ID: MRT4577_47230C.1
ccattactggggaagacggcccgccggcacggaccgggccggaaggcccgggacgacccatattctcggcaccaccgagcaaggaanncgcgttgggcgacccggaggacacacacacccaaacaccaggggcagaacaaaggcagcaccaagctggacccggctccggcagccgagagcaaccccacgaaacagcagctcaacgcccccaacagctcccggaccgccacccgccaacaacgagggcctcgacaacgacgaccatgccaccccggccggcggccccaacgaagacgaagaccaggaaggg

SEQ ID NO: 126935 - DNA, 257 bp, Zea mays
  Clone ID: MRT4577_47231C.1
ggcaagtaatgcatgcagctggcatcaaattataaaaaggcccacgggtttgcacgcctgcggggggacgggaccccgcgacgaaagcattcatttgaaaaaacggaagctcaacaacaccaccagcaaacacaaaggcactttcaaccctaacgggaagcaactcaaccacatcaccatttgctttattataaacaaaccccagctggccaacgggaaaaggggcattatcctgggcaacttgccggacgcgtggg

SEQ ID NO: 126936 - DNA, 157 bp, Zea mays
  unsure (1)..(157): unsure at all n locations
  Clone ID: MRT4577_47232C.1
catccatctctgcctgtggctgtagtaacttnacttnataaattattnaggtagagtacaataatgcttgttatagtaacatatgtaatgtaatggatgtaagtgggggtacattttggtttgtttttaaaatgggggggggggaattgtttgtggg

SEQ ID NO: 126937 - DNA, 411 bp, Zea mays
  Clone ID: MRT4577_47233C.1
attcggctcgagttggagacccttttcttctacatccgtgtccagatggccgtggctggtccactgaagaggcacgccaattcatacgggattgtggagtggccaaatcagcatatgctgcacgaacataggctgcttgaaattagacacaaactaactaggtccatggatgttgctgacagaaaacatagaccgtggaatggatgccaggcctgttggctggtttgtaggagctaagtgcgagtgcactgacggaatgctatcaaagggagctggtaaaaggccacagcactatgggtgcccacggggggggacaccgttgtatgctcaataccaataccttgaatggcacgagcttgaacttgaagcatatgaagaagcaaagctgccgccagaaccaagaacgaccta

SEQ ID NO: 126938 - DNA, 292 bp, Zea mays
  Clone ID: MRT4577_47234C.1
gccgggtcgggcatatatgcaccaccatccagcagcatccagaatctacctagccgccgccgcagacggccccccatcggcgccaagagcacatctttgtgaagactctgacggcggagaccacccctgtggacgtggagtcctccgacaccattgaccatgtgaaggccaagatccaggaccaggagggcatcccctcggaccagcagcgcctcatcttccccggcaaccagctcgaggacgcgcgcaccctcgccgactaccaccttctgaaggggttctccctgtacct

SEQ ID NO: 126939 - DNA, 290 bp, Zea mays
  Clone ID: MRT4577_47235C.1
ggttttatttttgggccctgcatgcaatcgtttctgcacaccatttgggtctgagttccccccgtattgggcccagacacggaaagggtaaccagctaactgagctttggagcgtgtcttttcaacctagacattagctggggcgcgcgatgctctgtgcatgaccggtcctttcaaaacgggtaaacaccaggccgaaaaccctaggtgtcgaggatacctatgtggacttggttaagggcacgagccctgacacctgttcaaacagcgcccatcactggttgcctata

SEQ ID NO: 126940 - DNA, 396 bp, Zea mays
  Clone ID: MRT4577_47236C.1
acgcctagagcgacagcagggataccctacacacaagcaccagcgcgggcgcgcctctactcccaggtgctgagtagactgcagacgtggctgggcagacggtagcgctggtccatgcacggaggttgactactcacagcgcgtggacctagaggtctcgcccgcgagccacgaccatgataagcacgtagtgtacggcagcgcatgatcattctactccactcaacacggacacgacaggacacacctctaacggaactacctacgtagcggtcaggcgcctcagtgcagtctgacctatggtaaatgaggacacgatagtagacgaaatcctaccgcgtaaccacgctaaagtatgaatgatgcataactcgatcacgctccaggacgatctat

SEQ ID NO: 126941 - DNA, 400 bp, Zea mays
  Clone ID: MRT4577_47237C.1
cacgactctcggcaacggatattctcggctctcgcatcgatgaagaacgtagcgaaatgcgatacctggtgtgaattgcagaatcccgcgaaccatcgagtctttgaacgcaagttgcgcccgaggccactcggccgagggcacgcctgcctgggcgtcacgcaaaaagaagtcgagattcgtccgagaaaggtggccgggaaaaatggatcagaggacgatcatcatgtgctcggtcgtcggctctctcggggtgctgagtgccatcctggggttctcagccgaaggcacgaagctcaccatttcggacttgtatgtgggcggaggggtgtgcctgtacccgcagaagccggcgctggggttccccgactgcagctggcagcttattcatcctggaaca

SEQ ID NO: 126942 - DNA, 391 bp, Zea mays
  unsure (1)..(391): unsure at all n locations
  Clone ID: MRT4577_47238C.1
cccacgcgtccgcggacgcgtggngaaaaaaaaaaaaaaaaaaaaaaaaaaaaaaaaaaaaaaaaaaaaaaaaaaaaaaaaaaaaaaaaaaaaaaaaaaaaaaaaaaaaaaaaaataaaaaaaaaggggggtccctttttagggagacccaagtttaagtaccctggcttgcggattataactttttttttggggaaacctatgattaatttccttgtgcctctttttacaacgcctggtttgggaaaaccttggggttccccaatttattccctttgcggtcgatctcccttttgccagctgggttttaatgggagagggccgaccccctggcccttcccataatttgcgcagcttgagggggaaatgggccccgccttttgtgggctct

SEQ ID NO: 126943 - DNA, 1038 bp, Zea mays
  Clone ID: MRT4577_47239C.1
accctcgttttgccggccgggataaagattctgtcggaaagcaattatatttattttgatgcatagaaagagacatgaacatatccatgctacactgttctaaaacaaggtcaattaggcttcctcacttcccctctgacaagaacaaattccctttcaccattttccgaccaatcagtttgagcagcatagttaaaatttcagtatgttagtatttcaatcaatacttgatacttaatgcagtgcagtaatccagctacaccatgaactttatcccactacatgatgaaatttatctttgcagttaccataaatatgagagcattctcggtgacaaatagagcattttctattctctctatattaacaaaccatggaagacaatccttcgtaccaccttccctacttacctaccccaaacaacatcttgtcacaagatgacgtacttgtccttacaaccacgcaccagcgacatcattttccaaattatccacttctagcagccaaacaaacatggcccgacgattgctagcatatcccgatgtgccacataatacagaggcggatgaacactacacagatcagcttaacaagaaggagctatcctcaccatcgaaaatgaatttgtttttgcgtatctgtggagggcttcgtcacttttgaatgaaaaaaacatctatgtacatataaatcacttggtgaagcctgtgtcaggcatgtgggttaatccaacctctgggaaacaaatgctatcagctgctgacatatgctacttcaaaactgcttgatatgtattgcactctcagttccgtctactgttggtccaaactgcatctgtgtatatacagacgagttgtattaaactttctaaatctgtgtatagtaatgcaacctcttgaaaacagttgttagccctaaacacgtatgctattttaatgctacttaatatgtattgcaatttggttttcctgtacagaactgctacaattcacgttccaatattaatcggaagctactgcagcctagcaaaatttcctt

SEQ ID NO: 126944 - DNA, 392 bp, Zea mays
  Clone ID: MRT4577_4723C.1
cgcaccgcggttaacatcagctgatgcacactacaagcagaaggagatagatgagagggacaatcttgttgaggtcaccaaggagctgagcgacttgacacagaaagtaagcgagatattgatttggtaagaatgtgcaggaccttgagcagaagctgcagctagcttattatacgtctgacgaacaggcagtggatactgtggagtctagatcccgagaattcagcctggattcataacgagttcggacaagcataaagacaaaactcaggctgtctcaccaaacctaaccctgcaaggagtgcaagaaccttacggcatagtggcctctaagttcatcctgagtagctgcctgctgattgtcctaaccaaagtggttcttgggaaagcgc

SEQ ID NO: 126945 - DNA, 414 bp, Zea mays
  unsure (1)..(414): unsure at all n locations
  Clone ID: MRT4577_47240C.1
ggggggggggggngtgaggcanatgatctgcggcggccacaanatggatgccactacccccaagtctccaaggctcggnccgacgagatcgncaaggaagtgggctcctaccttttttttttggggnccaacccgcacatttttgtgtgggggggggtctctttcttcgagggtgacaacatgatcgggggggggtggggcctgtcctggtgcatgggccccaccctccttgaggcgctggacccggtcatcgagcccaagcggccctcggtcctgcccctggggcttcctctgccggacgtgtccaagatcggcggccttctgcccgttcttttccgccgccttgtatctgggctcctgaagcccggcctggtgttcacctttgcgcccgcgggcctttcttctggcttcaag

SEQ ID NO: 126946 - DNA, 1098 bp, Zea mays
  Clone ID: MRT4577_47241C.1
ttctggtcctcttcgcctctacgggtttgcagctgacgctctccatcctcccggccggggctccgttcctctttccctcctcccctccgtcttggttcttcacacctggttcttctgtctcccgttgtctctatcgtctgctccggtgaacccgcatcgttcctattccttgtgctgcttccgtcgtcggctccagtaaatcactttgttcgccagctcgagatcgtggacggcttgctaaaatcagttaccataaacatgagagcattctcagtgacaaatagagcattttctattctctctatattaacaaaccatggaagacaatcctcagtaccatcttccctacttacctaccccgaacaacatcttatcacaagatgacgtacttggccttacaaccacgcaccagcgacatcattttccaaattatccacttctagcagccaaacaaacatggcccgacgattgctagcatatcccggtgtgccacagaatacagaggcggatgaacactacacagatcaacttaacaagaaggagctatcctcaccatcgaaaatgatgaagcacacccaagttgacaaagtcctagattctataattccagaaaaatgaagcttgttacatcctcatgacatgcatgaaggaatttgcttttgcgtatctgtggagggcttcgtcacttttgaatgaaaaaacatctatgtacatataaatcacttggtgaagcctttctcaggcatgtgtgttgatgcaacctctgggaaacaaatgctatcagctgctgacatatgctacttcaatactgcttgatatgtattgcactctcagttccgtctactgttggtccaaactgcatctgtgtatatacagacgagttgtattaaactttctaaatctgtgtatactaatgcaacctcttgaaaacagttgttagcccttgacacgtatgctattttaatgctacttaatatgtattgcaatttggttttcctgtacagaactgctacaattcacgttccaatattaatcggaagctactgcagcctagcaaaatttccttaaaaaaaaaaaaaaaaaaaaaaaaaaactcga

SEQ ID NO: 126947 - DNA, 484 bp, Zea mays
  unsure (1)..(484): unsure at all n locations
  Clone ID: MRT4577_47242C.1
ttttgggcgaanagcttactaccgngcagcttgcaagaactgattatgcttacatataagaacctgaccatccagcaggtccaatctgcaaaaggagctttacactgtactctatattcagatagtacatgaagtaaaagcacatgaccatttgactatgtggcaacaacaacacttgactacattgttggcccaaaaacgacaatgttgatattttccttcatgcatgtcatgaggatgtaacaagcttcattttctggaattgtagaatctaggactttgtcaacttgggtgtgcttcatcctgtacataagtttgtggtaaaattaaaatgtatctgctgtttgtcctacttttttataatactctacattttcggtggtgaggatagctcgttcttgtaagctgtgtagtgttcatccgcctcgccacaaattgagaaggatcaaacgtcctgttgcacgagcttgaacgaaagagctga

SEQ ID NO: 126948 - DNA, 784 bp, Zea mays
  Clone ID: MRT4577_47243C.1
gccggccgttccgggtatcccggtgtgccacagaatacagaggcggatgaacactacacagatcaacttaacaagaaggagctatcctcaccatcgaaaatgtaagtattcgagtattataaaaaaagtaggataaacaacagatacattttaattttaccactaaaacttatgtccaggatgaagcacacccaagttgacaaagtcctagattctataattccagaaaaatgaagcttgttacatcctcatgacatgcatgaaggtataatactatatatactcctttgtgatacaaaacatattacccccccccacattatctttcactcgccttagtacccattaaacagcaacaaataattaggcaaacattgttagcacaactaatcctatcttcctctttatgtaaaggaatttgcttttgcgtatctgtggagggcttcgtcacttttgaatgaaaaaacatctatgtacatataaatcacttggtgaagcctttctcaggcatgtgtgttgatgcaacctctgggaaacaaatgctatcagctgctgacatatgctacttcaatactgcttgatatgtattgcactctcagttccgtctactgttggtccaaactgcatctgtgtatatacagacgagttgtattaaactttctaaatctgtgtatactaatgcaacctcttgaaaacagttgttagcccttgacacgtatgctattttaatgctacttaatatgtattgcaatttggttgtaaaaaaaaaaaaaaaaggccccta

SEQ ID NO: 126949 - DNA, 245 bp, Zea mays
  unsure (1)..(245): unsure at all n locations
  Clone ID: MRT4577_47244C.1
aattcggcacgaggctctactctcaccgcgcgcaagcagcaggctcaacgggtccgctanactcaacactgtacagcgccgcctagcccattagataggatgtgcgatctcattctaccccctctatgccagtcgacgcctcgggagccatccaaccgcacctcacccaccggcagctgtgggagagccgtcacaggcacgctcctgcacctcctagaggtgctctgcggtcctactatcattgc

SEQ ID NO: 126950 - DNA, 3683 bp, Zea mays
  Clone ID: MRT4577_47245C.1
gaccctatagaagagctatgacgtcgcatgcacgcgtacgtaagctcggaattcggctcgagctcagtaccatcttccctacttacctaccccgaacaacatcttatcacaagatgacgtacttggccttacaaccacgcaccagcgacatcattttccaaattatccacttctagcagccaaacaaacatggcccgacgattgctagcatatcccggtgtgccacagaatacaatagcatcatagaggtaccacacgcagggagatatagcaagggaatgaacatgcaaattcttaagcatgccctctaggcacccagacaaaccgtagatgaaggtgatgattgctcgctcgctcgcttttattttttggttcttctctctgccatcgaatgtcatgatagatttattgattaattaatgtttctcaatcttcaaggaggttcaatgcaaaattagatactctttgttttcactcaccttggaattatttgcactgttcgagtatgagttacaatattgtgctttcgattttggctgcaaacaaggtgtcttcagtctggaagagtagatgtttacttctcggtgaacatgcaagttcaatttttgtttggttgtatcaagatgttaatttactaatgcattgcttactaattttctttcatttgcatatgcaaaataatgaaatgtcaggactaaacttttacactaaatactggtttgcaatttcttgtggccacagaaaacgaacaatactgttgcaagtccttgtgtaccaaatcatgtctctaattcatgttagcattatccgcattttaattcttggatgactaattttgaccttacaactgcttctttatctttaggtcaggacaatatgcgagtcaccttagtattacattggccttagtaccttatttactaatatagagccaggatcaaaaatcacatttactgataggttgcatatattgtcggaactgtattgtgatgtttgttaccaatatgcaccattatgagtgaaatctgcatctaagctttagatcaggtattcttaatcagaacaaaaacattagtgaaacaacatctttcggtttgaaatgctttgtgacaagatctttcggtttgaagtccagtgcagcgaagttgaaaaatacttctgattcttacagatttggcaaaggaggtaattggcaattaatttagttggttattcattggtccactacatgatgtatagtgattacaattttgttttgtgcattgaatttacgtgttgcattaaagagttgaatctatgtttataatattttgtgacaggatctttcagtttcaagcccggttcagcgaagtttggaaattactactaatccttacaaatttctcaaaggaggttcggtttatttcagctcttttcgttcaagctcgtgcaacaggacgtttgatccttctacaatttgttggcgaggcggatgaacactacacagcttaacaagaacgagctatcctcaccaccgaaaatgtagagtattataaaaaagtaggacaaacagcagatacattttaattttaccacaaaacttatgtacaggatgaagcacacccaagttgacaaagtcctagattctataattccagaaaaatgaagcttgttacatcctcatgacatgcatggaggtataatactatctatactcctttgtgatacaaaacatattacccccacatattatctttcactcgccttagtacccattaaacaacaacaaataattaggcaaacactgttagcacaactaatcctatcttcctctttatgtaaaggaatttgtttttgcgtatctgtggagggcttcgtcacttttgaatgaaaaaaacatctatgtacatataaatcacttggtgaagcctttctcaggccatgtgtgttgatgcaacctctgggaaacacaatgctatcagctgttgacatatgctacttcaatactgcttgatatgtattgcactctcagttccgtctactgttggtccaaactacatctgtgtatatatagaccagttgtattaaactttctgaatctgtgtatactaatgcaacctctcgaaaacactgttgttagcccttgacgtatgctatttaaatgctacttaatatgtattgcaatctggttttctcgtacagaactgctacaattcccgttccaatattagttccaatattaatcggctactgtggcctagcaaaatttccttaagtctgctttatgtccatttatttatgtgctttataacgaatatccttcatataacatttccacgctacaatttctatccacttagatatacttacacacattctaaaatacaggtcaacaagcgcgcatggcgcgcacaatacactagttatgatataaatttgcatcatctatagagtaaggacaagtgatttcgctagtatgagacgattggttttggtgtaaaaggaaatacatcttttgtattatgtattgtattagaaaaaaccatgaccatgaaatagttacggttaagtccatataactcttttatgcgcttgttatttgtttgctatataatgacattctagtcttttgtcgaatgcattgcaagtaatgtaggaaaactagaacttcgatgtaaattacaaacatgtgaactaaacaaaccattatgccgtagttgacaatcatgttatttgaaaaatgatatcacaactatatttcacacaattgttgctccaaattatttttctataacagaaacctaatgtaggaatgtgtaggatatttgttttgcctgttaggtaaagatttgataagatgtttgctttgcttggtagggaaatatttgatgggatgtttgctttacgtgataggaaaatatcaacattgtcgtttttgggccaacaatgtagtcaagtgttgttgttgccacatagtcaaatggtcatgtgcttttacttcatgtactatctgaatatagagtacagtgtaaagctccttttgcagattggacctgctggatggtcaggttcttatatgtaagcataatcagttcttgtaagctgcacggtagtaagctattctccccatcaatattgcacactttaacttgttacccatatttagttcgtttgtatgtctttatagtggcttgttaatttacactactggttcttgcagccttttacaaattgatctttgttctcaatagatgattctcacccatacacttaatgatttctgccattaagtccttacactaaggatgatccaaacttgttacaatattaacatctgtttcaaaaacaatttttagagttgttatttttctgcatgtctacgtaatttgcagagcattcatctctattttactttggttgctgacattggtttgaggacgatttctggcttgacttcactagagagcatcaacagtggttggcaatctatttctggcttgacttcattgaagttcaatctattttgctacacgaatttagcatgtttatatcgttaatataatattattgttattgtgatattttgctacatgtattttggtatttgtcgttccatatctatgttttatattttttttattttcgtggcaatgtacgggcacagaagtatagacacatgcaatcatacaacaggtcactttgcc

SEQ ID NO: 126951 - DNA, 1400 bp, Zea mays
  Clone ID: MRT4577_47246C.1
cacttaaccctagggtgtcaaagtccaacccaagatgtgtagaactgatggtcacatgctcttcatatacgtgtacatcttagcagtgcatcaagcaacactccattacagctctgttcgtttagtccagattgaaggccggaatcattccaactcatcaagctaatacaaatttgtgaactattccaatccggaaccaatccagtaaagcattcaggaagaaccgaacgggcacttaagcggttgctataccaacttaacatcatattattgcagtactagtgagtgagtgtgttattatcagctcgatccggtttagcctctgtgtgatatgatatgaaatgacatccctgcccgtacgttttctctcgcgctctttcgtcacgggtggtcgtccggcaggctggccgcgtcgacgacgtacccgcggagcgacggcgtccgggcgggcaggtccggcttgcggtggcgacggttccgcacccggcgccgcgcgacgtagcggcgcagccagggggtgacgtcctcgctggccttgatcatgaggaagaagagcaggcggtagatgacgatcatgctgaagagcacggccaggtccagccacttggagcgggcgacgtcgatctggaacacggtctccaggatgaactcgccggggatcttgctgggcagcacgtcgtcctgctggccgtcgaacagcaggcccttgaggtcgttctggtactggccccgcagcgcccagtagtggaagctgatgtaggacatggggtacctccagaagggcttggggatgtcgtgggggagcctgaagtagcccgacaccagcatgaatatcccctggatccccgcgccgacgatgatgcccatgaggaagttggggatgacgctcgcgatggccatcatcaggctctccaccacggtgacgctggcgtagaggtccagcacgaagaagaggtagtgcgtgaagcccgggtgcaggcgcaccatgaagtagcacagcgtgcccgacaccagggtgatgaggaccaggaacggcatcgccgacaccgtgttgctgatcacgaacgcgaccacgccgtagtgcccgttcagcctctccctctgaaacaccttcatgtcctccacgaacgacgggaaccccccgatcgacatgaacgtgacgaagccgaagatgaaggaagcgcatgccccccgggccaggatagagctgtagccggtgccgacattgaagtatatagtcccgatgcaaatcgtgacgacgacatagatgatgagcctcagccagtagtacccgaaatccctggacatgttgacgaacgcccgcttcgtgagcgtggaccgcctgcatcaggaagctagcctggctccatccagagtccagcacagtccctttgagccgg

SEQ ID NO: 126952 - DNA, 334 bp, Zea mays
  Clone ID: MRT4577_47247C.1
ttctttttttttttttttttttttttttttttttttttttttgggttgggggtttttacaaaaaaaggtttatttttattcacgcaaggcaaacaccattcgattggaaacacacacacccccccacacaaattgacaaacatgttttggcttccccttcccttaaagctactgcttggatggaacgggaatcctgtagggaccggactttatgtcctcccacaaaaaaaaaaacagggccggaattaacttcccaaccttcccttttccgaagggtttgcccccccactcaaacacgggcataacggggaggccctttacaaaaaaccccatt

SEQ ID NO: 126953 - DNA, 532 bp, Zea mays
  unsure (1)..(532): unsure at all n locations
  Clone ID: MRT4577_47248C.1
ttcccagccaggtatcattccaaaagctagttcggttaccattgcctatcttttttctacagaacttgtaaacagtatctttaactttcagcagacctttccaaaaatacgaatcatcttgctttttctctaccataataagaggttttaccttaactgtatttcgacctaacgatattctgccaaagcccatctgaggtttctaacttccaaatccacttggcaaggaggccaatattcattttttccaagtcaatcacacccaaacccccttgatcttcagggagacacaccgtgtcccaatccgttaagtggtattttttggtcaattgaccgccctgccacaataatctttttctgtaaatatcaatttttttaatcagacttaggggcagaatacagggatagcatgtataaggaacgttcgaaagctgctgtcagcgagtgatcctaccccctaaaggcgcctctggggggacagtcctggntttcatctttattttaactattatttttgagtaggatttttgat

SEQ ID NO: 126954 - DNA, 380 bp, Zea mays
  Clone ID: MRT4577_47249C.1
attcggctcgaggaccatgctaccctgggtgttgtggacagatgcgttctcgcgccgctggactcgatggaggtcatagagaaacccctgcaccgctgccacagacctggggcccatgagccacatgctatagtcgtcccagagaggacaggcaacacaagcgtgaagaataggtcatcactaaccgcagacaagcgggccaaagatcctccagctatgattgcaggacaccaaaactgggcacaggggtaggagagcctggacctgaactttaccatgacagatgactgtggtttaatgagaaacagtggggcggatatggacacgatagatctcaagtacatacagggatgcacatttgagggtgcctctgatatttt

SEQ ID NO: 126955 - DNA, 120 bp, Zea mays
  Clone ID: MRT4577_4724C.1
attttacataaagcacttcataggcgtgtgtgggaacgtataatcagttgtgtcggtcagcataaaatgacgaagaagctctctagtgcacgatcatcgggaatatgcactggattccat

SEQ ID NO: 126956 - DNA, 232 bp, Zea mays
  Clone ID: MRT4577_47250C.1
actctcatcatgcctcggcgggaacgactggcctgggcatgcttcctgcaggtgcacattatgggccacctacacctggcagaaaaagccgccgacgacgacgctatgttcacctgcaggttgtcgctcgacagctccaaccgccacccgtggaaccaggagacggagaacggcttggaggacatcttggacccggagcgtgccagtgcgcaaccgccggacgcgtatacta

SEQ ID NO: 126957 - DNA, 260 bp, Zea mays
  unsure (1)..(260): unsure at all n locations
  Clone ID: MRT4577_47251C.1
gttgtgtcctagcgcngccgcngnccnaactcgcttgcgtgantgaaagctcgtcggttccgtccacgngagaagcgagngatggacanccacgtgnagttgctgttgtggtgaaggtgatgggnaggancggntccangggtnnggtgnnnnggttngngttaagttttggatgncnacaaccggtcatcatgnggaatgtnnaggggccgttcgcgagggtgactntcagnctgntcgagtccgagaggaggccagga

SEQ ID NO: 126958 - DNA, 418 bp, Zea mays
  Clone ID: MRT4577_47252C.1
gagctatgacttcgcatgcccgcctccggaggctggaattcggttcgagaccgggggccctccccacgggttgctcctgctgaggtcaaggaacatgtcggggggtccatgatagctgaagggatatgggcacactgcagattaaagctagggcggcatggacagcaaatcgctctcaagagtatactggcacatgaagatctcatatgtctggcatcatctcgaaacactgagaagactatggtggctgctgcattaggagagataatgaccagctgagagaagattacctggcttttgtaagagggctagaattgttagaaacctgaatacagatctactgagagatgactgctgcttctgagagcaaaagaggtgttttaccctcttggagtgatcgctgcgacagtatcttgga

SEQ ID NO: 126959 - DNA, 676 bp, Zea mays
  Clone ID: MRT4577_47253C.1
ttttttttctttttttttttttttttttttttttttttttttttttttttttttttttcggcacccctgctgtttttggaattatgaacagccagttggccaagcctggttttggttacagatcgcatccagctttagcttgctaaactgcagacgctggacagttaaaacgttggaaacaaatcatagctacttgctacctttatcccgggggggacattttctctatggagattgggagggcggctttcgggggccgccccctattttttgaaaccggttttttggccccctttgggttttttgggttcccttgggcccccgcgggcccccggttttttgggggtgggttggggggggccccccaaaaaggcttttttttttgccccccgggaaacctgggggaaaaatctgtggcttttcggggggggggggcgcccccctctttattttttcgggggggcgccccccttttttgtggtgtgttttttttttttgggggggcgcccccccccccccccgttttttggggcggcccccccccccttttttttttttttttcggagggggctctccccccccccccggggggggggggggggttttctcccccccagaacacccgcgggggggtgggtattttttttggggggtggcggggttgtttttttcccc

SEQ ID NO: 126960 - DNA, 314 bp, Zea mays
  Clone ID: MRT4577_47254C.1
ggaggacgcggccttagcgaggacgaggacgaagaacaaagctttattttattaaaaaaaaaaaaaaaaaaaaaaaaaaaagcttgttccttggccgggaccccgcctagggcggaagcaggggcgagcccccccccgggggggcgctcgggcctgcgtggggggggcccactgcgcccgggaggggggcgggttccagttcacgggccggcgtgggacacactgggtggctgggaaaatccaggggagccctgatttaacccacgtgtttgggctgataagaggagcgggcggtctattcgattgagattttg

SEQ ID NO: 126961 - DNA, 361 bp, Zea mays
  Clone ID: MRT4577_47255C.1
agctgggaacgcgtcgtgggcacccgtcataaattagtcttctttacgccggcgtgacggtgtacaagggggagatcttctagagccgggggccacctcatcaatcattcaatcaggtgcgtcagcatttctacccttagatgtacggtgcatgctaaaatgcatacccaccgtgccatcccccggggtgtacgccttgaggcccaggatcaccaacgggaataggaccggtgcaacagcccacgctaaccgcagtcctatcgttatcaggaagtcatacgggtggccatttctcgcccgagcactagtctcaagacttagtgtacatgtcataaaggagtcctaagcaactttaaaggaa

SEQ ID NO: 126962 - DNA, 167 bp, Zea mays
  Clone ID: MRT4577_47256C.1
cgaatggtctaggtgtttggacagatactaatggtcttgcatgaaaactgtataactttaaacgtgatcctgaaccactggtttctttaagcaactcagcagaccagttgagcgatgtgggagatggggctgccaatcacgaaagagatcctgtgaacctggaggac

SEQ ID NO: 126963 - DNA, 343 bp, Zea mays
  Clone ID: MRT4577_47257C.1
cccccagcgatctggacaaggccactgaaaatattaagatggacgaagatgagcagaatgcatcgagtctgacagaagatggaagcacattattacctctaccagtaccagtaccactaagcaatgatattgtaattatcccaaagatagtgagaaattttgatcaagaagagaaacagatccaggatttgaaaagtaacatgtccactgttaagtctttcatggagcagttaaaactgctgtactctgaagaccttaaaaagcttggtgatcatttgcgtattatttctcatgcggcttctgggtaccgcaaggttgttgaggaaaaccgcaagccttacaa

SEQ ID NO: 126964 - DNA, 375 bp, Zea mays
  unsure (1)..(375): unsure at all n locations
  Clone ID: MRT4577_47258C.1
ccccccccgggtgggtttttttttttttttttntttttttttttttttttggaaaaaaaccggaaacaatttttgacaagggggaaaaacccctttttggggggccagacccagcccggggcctttttacccaaggccggggttaaaaacgggttttgttttgaaaagaacctcaaattcccaaggttcagacaacctttccaaaccggggtaaataaacccatggaaaacccattttttgcccggttgatcccctttttttggggggcctcttccttttaggaaaggggcctttttttgcaacttgggacccctattttggccggtgggcttggcacccccgggggggggttttccccccagattttggggggg

SEQ ID NO: 126965 - DNA, 333 bp, Zea mays
  unsure (1)..(333): unsure at all n locations
  Clone ID: MRT4577_47259C.1
aaggggtgtgcttttcatttttttttttttttctttttttgaaaaaaaaatgcaacgntcattaatacataaatctcgaccatagcaacacaataaaaaggggggtagcacctttttttttatttttggaacacgggcagcttatttttttgggacacaaaaggaattttcatggcactataaaaaaaacgggttaatgtataatctcttaacaggtgggcgggaataacatgcttaaaaaaataaaaagaacacccttggggttgtgtcaagaaaacccctagcatttaaccctgttattttggtaacaagagggtcccatcccttgccttt

SEQ ID NO: 126966 - DNA, 289 bp, Zea mays
  Clone ID: MRT4577_4725C.1
cattgggtacctcgaggccggccgtgactcccacttctcgaaggtggcccctcttccgagtgctttcgccgcggtcatggcgcacctggccaccagccgcatcaccggcaccggaagctagcccggcgaggagcttgtgagtcgcgagcatctactacaaggacaaaacctgggacgaccaatgtatctatctagagcgggaccactgatgggcgccgacatcaccgccggctacacaccacgacgtgttgagagccagaggcaccaagctcgtctcctaccgcagtaa

SEQ ID NO: 126967 - DNA, 259 bp, Zea mays
  Clone ID: MRT4577_47260C.1
tttttggtggtttttttttttttattgggtttttacctggaacacatcacaacagccaacaacaaaaccgttcatagttcaaatgaaacaagagagggttccatcctaagggcaaaatttaatacgttaaataaattgcggcgatcacaaatatttaccagcttcgttttttcattgaaagtaacgcgagaagaacatccactctggaaatgggagccttctctaggggctaaaaagggtactgggcataaccaggcct

SEQ ID NO: 126968 - DNA, 537 bp, Zea mays
  Clone ID: MRT4577_47261C.1
gttcttaagagtgttcgtccagaatcatgtctccaaattcaacaagcatccatatgatcttttgagccagaacagaccaatacagattagccgaatggctacaccttctgaatatgtcgttattcgtcgtcagtatcagtgctcttcacaagaggaggttcccaagataagagcccaagatgtagtgtatggaagcatgaagacttgcggaaaatttgaggtcctattatggagatctccaatacccccctactatagctatgccagtacttatgagattcaagagccaaggactacaagtgccaagaggaagcgttctatgaaagatggagtcacattttgttaattttgccattatacatgtgtcatgtaggaacatagttttgttcattttttttctcggtataggatgccacaagttacagcacaggccaagtgtaaaaacatgtaaggtgtcacaggttacagttacagcatcattaaactgcactgctacattttcatatgtgaaatacaagtgcttatgtattctatttt

SEQ ID NO: 126969 - DNA, 227 bp, Zea mays
  Clone ID: MRT4577_47262C.1
tctttttcaaccggacatgcatgcaacaccctagtctattctcatagcaaaccaccgcctgaatcgggcagcaattcccagacgatcagggccacgtactgcgctgatccaatcgcaacatcattgctgatatcaaccagaatgcctgcaggctcaggcgaggatgagatcgccgtgctgccgcggcacaccaaggtgctgatcaccaacaacaaccgcaccaagtc

SEQ ID NO: 126970 - DNA, 205 bp, Zea mays
  Clone ID: MRT4577_47263C.1
ggaagtaacatagtgcgtaaaagatcagcactttaaatagacagctttcataatttgatcattctgcgtgagcaaaacactacgacggctttatagactaattcagttgttgtaccagtcaagaaaaagaatcgagaaagtaagaacaaagaagaagagtaggagaaaggttctactgctgctgttgcgctggattgcctgggat

SEQ ID NO: 126971 - DNA, 369 bp, Zea mays
  Clone ID: MRT4577_47264C.1
atgacgacgacactaggtggccacgcaggagcagacaagctgggtggcctactaggctacctatggcacaatagctggcgcgacccgcctgctgcactccctaatcgttcggcttcgagcgcgatgaaagctggaggctatggatctgcggtggagcggtccaacatcgacgtaggaacagggctagacaggaggcggtggagaaggtgccaccatcatgaagtgatcattgatctagaggatggagatgtggatgcatgggatggttcccgcaggaaatggaccctatccccgtttaccgttgagaaaagaatttcccctgtttatatcctcgtgcgggaagaaacttctgcatccccgttcccctaa

SEQ ID NO: 126972 - DNA, 727 bp, Zea mays
  Clone ID: MRT4577_47265C.1
ctctggctcccactcatcacatagctctccaatctccttttcagtgagtggcttctttggtggtttgtagctcttcctggagagctggaacactatgactgcaataagaagcccttccacgaccaagtgaccatcaatatggaccccaaagacgactgcgcgggcaagggggccattgaaggcagccgagacacgggcgagcaccgccgctgtggcattcacaacgggcaatgccatgtccatgtccccagaagcttccctcagggactgttagcgccctgaatctgcaaaccaagcagtttcaatcagccagatcggtcgccgaaccgggtgcggcgggcttaacgtgagggaactcgtgggttcagctgaacccccttcaaattttcgggaaacaaacagcccactatttactgcctcccgagaaaagggaaggaatcgatcccaagtccagtcggatctccgccccgcgctgccgagaagaggcggactaacagctacagttcctccgatgcggcgccgtcgcttcagcgggcggaggttggagaccttagtggcgcgctttcgcccggcgacgggtcgacgaatgggcccgggagccaggcgggagtaggcgccggtgagtcgggttcgagtagttgagcgatggattcgaggcgcggtggtgagtgtagttccgacgggggttgtatataacggtgggtgcggggacggagggagggagacg

SEQ ID NO: 126973 - DNA, 685 bp, Zea mays
  unsure (1)..(685): unsure at all n locations
  Clone ID: MRT4577_47266C.1
cctcgaggccggccggggaagaacatgcaattggtatactagtctcattgtacgagttccaacccccccccccccccccctttctaaatatnaacggtaagtagcttctccttgcatattntgagggaaaaacatgcaattagtgaacatttccatggtacaaacaatgagataaaatttagctctttgttaggaacttaggttggtgtttagaaggacaagcttggcatagtggtaagaaggcttccccactgagccaggcagcctctctgcattaaatgcagaggtaaggcttgccttggttatttcttcccagaaccttatgggagccatcagtagttggtctgtcttttttgctagattggtgtttctgttaaattatttagatgctcttattgttcacttttggacaattgatatgtggattgttttacactgtagcccctaagcttgcaaatatgtgtttcttagttttttttaattggtacttggtagttacaaataatgtgagataatttaaattgccattggctaggtcaagaaatagtacatatccttggattcgcatgaggttctctcaggtgtgtttgggaaaaattttactagcttatttagaccatgtttgggttatatatgcacagttgtcaaatctatggctgtcgtgctagttggaatgaaagcatac

SEQ ID NO: 126974 - DNA, 1230 bp, Zea mays
  Clone ID: MRT4577_47267C.1
acgcatcagctagaaaaaccaaccaattatgcagttatgctacaaccaacaacaaccagattgcgagagcaggaggaggcagcaatgctcaggattgcaaaaaaaaaaaaaaattaaaaacatttttttatgtcagaattttgttgatttacaacggaaacctgttgattcacaagtgtcagaaaaatgaaggggtcgctggttacatctcagacgccgcgtttgtcatctcctcacggaagcaggtgttgtcctaataacagaacattgttttcttctttctctgagccctggcaatctccttgctgtccatgttcgcgagcagttcctcttgcctgataagagcctcgtgcaaagccttctttgttacaattagttcggcttccaatgcatccacacgacgcacagcagcgttaagcaactcttctttctcgcaaggcatttcagaaggcttttcttgaagcatctggaccttctcttcaagctctcccagcctttgcaagaccacggcgaataggtcggcttcagcgaacccagggaatggcgaaggaggacggaattcctctttctggacggagtccggatacaatgtacagtagctttcttctgacccgcctttagatgacaatctcattgtggcaagatctttgactgatcgaaccaacattacaataaccataagacaagccatcagagttgcagcgatcttatcccaggggcggccagatggcttggatgcagttttcacagatgagtctgcatcttggggcacgaatggtgcctttcgtggttgctctctcttccatgtagcatccacggccttgtcaacaacaggtacatcatattcagggagacgagtagaaaagctagtagccctgaccattttgacctcttcacgaactggggtcaacttaggatgtgatgtgtaacttctgagagctttgggggacacagcatcatcaacttcttttgagccagactcagcagttgatgtgccactccctctcatctgtcattccacattaaagcatgtttttaacaaagcaacacattactaaacttttgatacagaaaattctggaaatgaaatcaatgaagattgattcaaaagttacgcaaggcacttcaatttgcataaatactaatttttcctcaccattggaaatagttacaatttgacgagcacaatgaaccccaccattggtatcagtacaatgggtaacaaataat

SEQ ID NO: 126975 - DNA, 412 bp, Zea mays
  unsure (1)..(412): unsure at all n locations
  Clone ID: MRT4577_47268C.1
ccgtccgcgcccctctcgatggggggcttcgtcccgcaagggtcnttacggcatcctcgctggcgcagnnctgctcctcacgcgaccgccgtnnctccgccctctaccgggttctccaaccccatccctcaatcgccacgcctcnntccgactccnnccgggcctcgcgcctcgtgcctcnngccgtcctgggcccttcatcctgggatgatcccattgtanntcattatcagcaccaagccacccacactatatttcgttttccctgggtnctgttcacagttgtgccttgagccnnntcagcatcggtnngtggcttgtgcctaaccacccaaggggannaaatcgttctggagggcctttagtggctgaccggcnntggcgtggtgnnngtttctctggacctggcgta

SEQ ID NO: 126976 - DNA, 1270 bp, Zea mays
  unsure (1)..(1270): unsure at all n locations
  Clone ID: MRT4577_47269C.1
aaaataacaaattataaatgtattgtaaaaagttaagataatgaatgagatataaatatttttttttttacagaaaaccatcaccatcactttgtgctttttatagaggataaaaaaagaaagcacctgactttcatgtttttaagaagatacatttactttgatcaaacatatcaagctctataggcttgaactctcaattctcacggctagttattcgacatttacatgtatcgaaaataagacaacaaaaagaaaatcatagcacattgataactaatgaacattacatcatatatttactgctgcagaaaactcgccacagtgacttagccacactgtcacgctcatagtacaacatacacctctagtgagatgccggctccatatgaacaactcaacttctttaatatcctctagacccggtttcttgtactcttgccaaattaaggtgctgacggtgaaggcgaggatggtggcttgaaatctggataattagggtatggtgactgaggtctgggcctagtagtggcaggagatgatcccgtggcagcgtctgctataggtgcagaattgaccactgctggtccttcagtcacggtgctgctagccttcgtctcgacttcagactccactgacggtggcgtaggggttgatggcggcttgagatctgggtaatttgtataaggtgaaagaggtgttggcgttgcaggatctgattccgtggtggcttctgcggtagcgtcctctgctggtgcagctgtttgtgtggcagcaacttgagtcgctgttgctagtgctggttggcttttagcatcgccaggtaaaggtagtagagcctgcccgatttcatttatttcgtcaataagctccttcggagcaaccttcttgttaaagaactcatcgatctgtttaagtgtcttttgtcgatcctcggcatacaagagtttggttaccactagctgaacaacagcagctgaccccaaaaactgtagcaaagtttcaatctctgtgtaggcaagtactcccaaaccagtagctgcagcgagaccaattgtcacaggcaaaccatctgaaccatccccaaataattcgcccaagtcaaagctgaatccttttggcggagccttccagggaaggttactgctcttccatcctcggcttccttctgcaccatccttcactgcaaaagcagctttgtaaccattggctgtcacaagctcagcaactagtcnggagttcccatcaaatttgtcaaggatgatcagcg

SEQ ID NO: 126977 - DNA, 329 bp, Zea mays
  unsure (1)..(329): unsure at all n locations
  Clone ID: MRT4577_4726C.1
aacataaaaaactgatacaaaaaaaactaacacaacaaaaaaaagactcccaaattaacaggaatggcgaagccattcgtcgagtggctccacacctccaattcttatcaagagcgggncnactagagaagaggccacgctgatctactgctaatggccgaacttgataatattatttcaatccctttcttcagcttgcctggagtcggtatataaaactgctaattgtcctttcgcacagcatactctcctgatgctgcatgtgtcgccctcagtttcgttgcctgttgcatgtcacactttattatggctcgctactatacaagtat

SEQ ID NO: 126978 - DNA, 324 bp, Zea mays
  Clone ID: MRT4577_47270C.1
accccgccccaggggccttccccgctttttgtttcccctgcctcccagttccgaatgtttttttttccccatagacccccgtgccagccaagttaaaggctttcccccttttcccccaatggcccctagtccccttggggttcccctctcttaaatgggctttgggacccctgaaccttttcccccgcccctcaatctttatttttttccgggggggggccccccgggaccccccttttctgcatgaaattggacccctcttttccccccgattcattctccacgatggcaaaatttcctccccttggattgccccccatttaa

SEQ ID NO: 126979 - DNA, 2247 bp, Zea mays
  Clone ID: MRT4577_47271C.1
cgagaaaggcgaccgccgcccgggcgccagcccactcaaaccctttggtctcctgtcctctcttcgtccaccgcgtcgtcgtctccctccctccgtccccgcacccaccgttatatacaacccccgtcgggactacactcaccaccgcgcctcgaatccatcgctcaactactcgaacccgactcaccggcgcctactcccgcctggctcccgggcccattcgtcgacccgtcgccgggcgaaagcgcgccactaaggtctccaacctccgcccgttgaagcgacggcgccgcatcggaggaactgtagctgttagtccgcctcttctcggcagcgcggggcggagatccgaccggacttgggatcgattccttcccttttctcgattcagggcgctaacagttcctgagggaagcttctggggacatggacatggcattgcccgttgtgaatgccacagcggcggtgctcgcccgtgtctcggctgccttcaatggcccccttgcccgcgcagtcgtctttggggtccatattgatggtcacttgggtcgtggaagggcttcttattgcagtcatagtgttccagctctccaggaagagctacaaaccaccaaagaagccactcactgaaaaggagattgatgagctatgtgatgagtgggagccagagccactatgcccctccattaaggagggggccaaaatagatgctccaacattggaaagtgccgctggaccacatacgattgttgatggtaaagaagttgtgaactttgcatcagcaaactacctcggtttaattggcaacgaaaagattattgattcttgcatcagtttcattggagaaatatggtgttggttcttgtggtccacgtggcttttatggaacaattgatgtccatcttgactgtgagtcaaagatagctaaatttttggggactccagactccattctttattcatatgggatttctacaatattcagtgtgatacctgccttctgtaagaaaggagatatcatagtcgctgatgagggtgttcactgggcagtgcaaaatggtctccatctatcaagaagcactgtggtgtacttcaagcacaatgatatggtttcacttgcaagcactttggaaaaacttactcgtggaaataaacgtgctgaaaagattagacgctacattgttgtagaatccatctaccagaattctggccaaattgctcccttggatgagattgtcaggttgaaggagaaatatcgattccgtgttattttggaggagagtcattcttttggggtgcttggcaagtctgggcgtggccttgctgaacattatggagttcctattgaaaaaattgatatcatcactgctggaatgggaaatgcattagctactgatggtggcttttgtacaggaagtgtcagagttgttgatcatcagcgtctaagcagctctgggtatgttttctctgcatctctgccaccttatcttgccagtgctgctgtttctgctgttaactatctcgaggaaaatccctcagttcttgcaaacctaaggagcaatattgctcttttgcataaagaactatcagatactccagggcttgaaatttccagccatgttctgtcacctatcgtcttccttaagctgaagaagtcgactggttctcctaccactgatctagaccttcttgaaactattgctgacaaggccttgaaggaagactcagttttcgttgtgacatcaaagaaatcaaatctggataggtgcaaacttcccattggaatccgcctgtttgtatcagctggccatactgaattagacatctccaggctttcctcatccttgaagagggtttctgcatcggttctttcagattacttttgatccacatcggattcccttaagccgaaagccatccattttctacgcgctttgtactctaggccgtgtgtgtttggtaaatgtacataacctgtatatttctacatgttatgaattgactttgttgcaaaataaaattttgtagaatggttatactccctcagttcttttttatttgttgcgttttagttcaaaaatcaactagcgagcaacaaatattcgagaacggaggtattatgttgagagtatagtgcgtttgtgctgtacatcttgctcttttccatgtagtgatgatttccctgaatccacatacgagcgtgttctcttttttatcggaagatgagcggacttacttttaaacaaa

SEQ ID NO: 126980 - DNA, 1543 bp, Zea mays
  Clone ID: MRT4577_47272C.1
ttgggtacctcgaggccggccgggaagtctgtactctactgtactgtatgcgttcggcgacgcgacgcgcgccggccgggattccgcggccacgacgagcacaatcctgttcgccacgccatgcctctccacgcccgcgcaccgccgctccgccgctcccaccttctactcaccgccgccaccgctcggctccgcccgtgcgcagcgccagcgaccaagccccgccgccgctccctcgtcctcgtccgcgcctccagctcggaccctccgcagcagcagctcaacctctccgtgctccgcttcaccctcgggattccggggctggacgagtcgtacctccctcggtggataggcctcggtttcggcgcgctcgtcgtgctcaaccacctcctctctgcgtccccgacacccgcgcagctcaggtccgaggctgtggggctgtgcctggccgcgttctcggcgacgctgccgttcctggggaggttccttgagggcgctgatgctgccagccgagtgccgttgcccgaggggagcatccaagtattcgtcatgtctgagaacctgtcagctgtgcagaaggaggacatggcgtgggcgtcgtacgtcctgctccggaacacaaacaccacgtctgtggtcatagcaattggggatctcttgtgcgtacgaggatactggaatccacctgcaaatacttcaaaatattccatgattgagtggttcaaaagtcagatgcagcaagtaggtcttgttgatttgagagatgctttgtacttccctaattcgtcaggaaagtttctcttacgctgtcaatcatgctgctctgaccagattctcagcttgcgaaaattctgccagatgggattctttctgtgctagcgcaacctattctgagtcctgatccagctaataatgaaacaaaaactgaaggtgtcatcctgttggcctccaatgcaaattatgcatatagtgagaaagatagggcttggataagaacagttgcagacaaatttcaacttgcttaatttagaggtaccaaagaaatgttgacagtcaggcagtactggaaaatggaccgggaaagattggggagtgtaaagtagactgactggtccaagaaggatttggagtcttggcaacgtggactgagcagaataagagagttttgcagttgggaggaaatcagcattaagctactgtttattagggttggcgctagttgaagcaaaatagtccagcaatagtttgttcagttggctagagactatgtggtgatgtgtttggtttgtctctgtgcctcttgctttggtatgtatgtctgattggatttggcattgaagcagaaaggctgctccagagattagtgacatgtgcaaagtagcaatgctgtcataatttacgcatgctccagtcaattgaggcagttgatcacctggctgcatttatataagcagtaaaagcatttttagttcaaaataaaaaaaaaaaaaaaaaagcggtcacatttcagattgcaaatactgctgatcaatcacattccttc

SEQ ID NO: 126981 - DNA, 444 bp, Zea mays
  Clone ID: MRT4577_47273C.1
gggggaaccccacacttttttttttgggtgcctgaaaagggccgactggattgggacaatgcgtttttagccacggggctggggagttttcccccaaaaccctttgggggggaaaaaaaaaaaaatttttgggttgaaaacaaacaccaattttttatggggtgcacccacattatgagggcccccatttttaaagtgggggaaaaaattttttggtggggttttttgggggggtgaaatgtttaaaccacttgggaaactcctttatgtaacgcgggcaatttttgttgggggcgacgtaaacaaagccctaacctttggggaaacccgggaaccctttaaaggtgtcccgccgaaaccaaacgaagttgccttgcacatttgatcccaaagtttttggtttcttaaaaagaaccatgggggccctgaattaaaataaccctt

SEQ ID NO: 126982 - DNA, 834 bp, Zea mays
  unsure (1)..(834): unsure at all n locations
  Clone ID: MRT4577_47274C.1
ctggccgggatcatcagcaccaaacgggaccagagacccgcgacgatacctcgcagacgacgaaaacggccccattgatcatccagctgccagagtcctacgatctttctgtacatagtgacctcgtgagacgcgttttctcgacgggagcccatccatactattatatcccacttttgaagaggtcacttgcgaaccgagtttctgcacagccgtgtacgaggatatccagatataaaactacaggtacatacctcgaacatccctagactcaacaccacgtcaaaatgtgtggtatcattgccgttatccacggcgaccccaagtcgcaatccgcctcggtagaggttcacgatgccctctacctcctccagcaccgcggacaagacgctgctggtatagtcagctgcagcgctggtggtcgttttcaccagtgcaagggcaatggcatggcctccaaggtcttccaggatggtgctcgtgtttccgatctccccggcttcatgggtctcggccatttgcgataccccacagctggcagcagcgcgaactctgaggctcagcccttttacgtcaacagcccgtatggtatctgcatgacccacaatggtaatctcatcaacgcccccgcgctgcgccagcgactcgatcacgaggcccacaggcacatcaacacagagagcgacagtgagcttatgctgaacatcttcgccgatgagctcaacgagactggcanagcacgtatcaacgctgatgactgctttgctgcgcttgagaggatgtacaagctctgcactggcggatgggcatgtacagccatgcttgctggggatc

SEQ ID NO: 126983 - DNA, 904 bp, Zea mays
  Clone ID: MRT4577_47275C.1
ctgtcgaatccctattcctctgttgcttattccgccgccgccaattctcttatgatctccgccttcgcctatccagtgcgtcctgcgacacctgtgctgagagcgacaagagatggtcgctgaggcagaggggccggctaatgccatcatgctcgaaactacctactatagcgtcggtggggggcaccaccaccgggaccagatcatcgagcgcgaccagcgcgaacgcggactcacacgcctaacaacgacggagctgtgacacgactaccggagcgtcctacatgcggtagatgcacgtcaaacataccatgttgaccatgaaccccatcaacaccgcttttgatgccaagcgtgtcattggcaggaggcctagcgatgcatctgtgcagagagatcttaagctgcgggccttgaaggttattgctgcgcccggtgagaagccaatgatagttgctcagcacaagggggaggagaaacagtctgcagccgaagagatctcctacatggttctcatcaagatgcgagagatcgctgaagcttaccttggcaggacgatcaagaatgctgatgctacggtccctggctacttcaacgactcacagaggcaggccacaaaggatgctggggtgattgctggcctcaatgtgctgcgtatcatcaatgagccaaccgctgctgctattgcctatggtcttgacaagaaggcaaccagcgtcggagagaagaatgtcctcatctttgaccttggaggtggtaccttcgatgtctccctccttactattgaggaaaggtatcttgaggtcaagccacagctggcgacaccatctgggggtgaggactttgacacaggtggtcaacactttgtcagagtcaagaggagacagaggatatcctggcacga

SEQ ID NO: 126984 - DNA, 620 bp, Zea mays
  unsure (1)..(620): unsure at all n locations
  Clone ID: MRT4577_47276C.1
cgaggaaatcaacagngtgtgttagcaaatccatagggaagtggnaaaactaagcagtggaactggattaaatcaagagcaatccctccaaagagctggagatacacgttggggttcacattataaaactctcaagagcctaagtcgtgagcttaactttttcattgataatgtgcgagctgatgaaagattttctagcttgatctctatttctgcacttgcaaggctgatggtggatacaacaaaacatacgagttttcctttggtctatcgacttctcaagctagtactggttcttccaatcgccactgcatcggttgagaggtgcttttcagcgatgaaaattgtgaagacaatgttaagaaatcgtattggagatggatttatgaatgattgtataatatgcttcgtggaaccaggatttctagccacaattccaactgatgatgtgatagttcgctttcataagatagaggaccgtacccgtagaggaaaaatatagaaggtatgtaaatactattgcaaaagcttatttgtcacaatatgttgcttttcttttttaaactatcgatgttatgcatgacatcatatttttcaacatgtaagttattatcaacccc

SEQ ID NO: 126985 - DNA, 789 bp, Zea mays
  Clone ID: MRT4577_47277C.1
atggatcctaagggaaaggggatggtggtcaacgacaaggagaaggagtccctcttcaatgagccaagggatgacaagcccaccgactcaggattgagtcacaagaagagggacgggaagaagaagaggcgcatcaagaagatcatctactacgacagcgacgcctcctcttcttcaccaagagaagacgacgacgaagactcggatgaatacaacaaggtgagcggcttggacaacgccaagcaaatttgggataccctcaagatatcacatgagggaaacgacgccaccatgatcaccaaaatggagttgttggaaggcgagatgggaaggttcacgatgatcaggggagaggagccaacacaaacatacaacaggctcaagaccctggtcaacaagattaggagctatggaagcataagatggatggaccacgacatcgtccgacttatgctaaggtcatccatggtaattgacccccatcttgttaaccttattcgtgagaatcctaggtacaccaagatgacgcccgaggagattcttggaaagtttgtgagcgggcgcatgatggtgaaggaggctcgatatgtggacgacgctctaaacggtccactccccatccacgagcctcaaactgttgctctcaagggaaccagcagcagggagacactaccaagcaaggtggcacaagtggaggctgctggcctcaacgaagatgagatggcgcttatcattaagcgtttcaagaccgcactaaaaggacgcaaggagtacccgcaacaagaataa

SEQ ID NO: 126986 - DNA, 1443 bp, Zea mays
  Clone ID: MRT4577_47278C.1
atggatcctaagggaaaggggatggtggtcaacgacaaggagaaggagtccttcctcaatgagcctagagacgacaagcctactgactcaggctcaagtcacaagaagagggatgggaagaagaggcgcatcaagaaaatcgtctactacgacagcgatgcctcttcatcttcaccaagagacgacgatgacgacgactcttcatcgaaaaagaaaatgcaaattcataagaatgcacaagctaccactgttttgctagcatctttgtgcagggatgaatacaacaaggtgagcggcttggacaacaccaaacaaatttgggataccctcaagatatcacacgagggaaacgacgccaccatgatcaccaagatggagttggtggaaggcgagctgggaaggttcgcgatgatcagaggagaggagccaacacaaacatacaacaggctcaagaccctggtcaacaaaattagaagctatggaagcacaagatggacggaccacgacgtcgttcgactaatgctaaggtcatttacggtacaccaagatgacgcacgaggagattcttgggaagtttgtgagcaggcgcatgatggtgaagaggctcgatatgtggacgatgctctaaacggtccactacctgtccatgagcctcaaaccattgccctcaaagcaaccagcaacagggagacgctaccaagcaaggtggcacaagtggaggccacgggcctcaacgaagatgagatggcacttatcatcaagagcttcaagaccgcactaaaaggacgcaaggagtaccccaacaagaataagacaaagggaaagcgctcctgtttcaaatgcggtaagactggtcatttcatagcacaatgccccgataatgatgatgaccaggaacaagaaaagcatgggaagagggagaagaaggtgtacaagaaggcgaagggtgaggcacaccttggcaaagaatgggattcagactgctcttcatccgactccaacgatgaaggactggcagcctcggccttcaacaagtcttcgctcttccccaacgaacgccacacttgcctcatggccaaggagaagaaggtaagcgttcgagatacctctaagtatactacttctagtgatgatgattctagtgatgatgaagtagattactctagcttattcaaaggtttagatagagctaaggtagaaaagatcaatgaattaattgatgctctaaatgaaaaggatagattgttagaaaaacaagaggatattttatatgaagagcatgataaatttgttagtgtgcagaaatctcttgctttagagattaaaaggaatgaaatgctatcctctgaattttctgtttgtcatgaatctgtctctagtttaaagattctgaatgatgatttaaatgttaagctagaggaagctaataaatctagttcatga

SEQ ID NO: 126987 - DNA, 874 bp, Zea mays
  unsure (1)..(874): unsure at all n locations
  Clone ID: MRT4577_47279C.1
cggccgctcgaggcggccgggcgggcctctcccgccgccgccacccgtgcctcctcttcctcctcgctctctcgcgcacggggctcgcgtccgaaaccctaacctcccaccatggcggctgaaggcggtggcgtccgggcgctgtcccagcgcgagcaggacatccagatgatgctcgccgccgacgtccacctcggcaccaagaactgcgacttccagatggagcgctacgtctacaagcgccgcactgacggcatttacatcatcaaccttggcaagacctgggagaagcttcagatggccgcaagggtcattgttgcgattgaaaaccctcaggacatcattgtgcaatctgctaggccctatggacagagggctgtcctcaagtttgcccagtacactggtgctaacgccattgctggcaggcacactcctggtacattcaccaaccagatgcagacttcattcagtgagccacgccttcttatcctgaccgaccccaggactgatcaccagcctatcaaggagtctgcacttggaaacatccccaccattgccttctgcgacactgactctcctatgcgttacgttgatattggcattcctgctaacaacaaggggaagcagagcattggttgcctattttggctgctcgccaggatggttctgcagatgcgtggtaccattctcccaggacacaagtgggaaatcatggttgatctgttcttctacagggacccagaggaagctaaggagcttgaggaagatgaggctttgggtgctcctgagtacgctgcagttgcagagtacactgccccagcgggagatacctggggtgctgaatggccagnagctgcagctccagctgctgccg

SEQ ID NO: 126988 - DNA, 615 bp, Zea mays
  Clone ID: MRT4577_4727C.1
gcacgaggcttctttcagaagatatcataaaatttataagtataggagatatgataatagatttgctgcaacaccttcatcttctaaaatactacttattaggtataggagatcggataagatatccggtgagatgctcttagaaacaaaagcaatattttcttatatatgttttcaatatcaaattctacttgctcatttcatttaataaagaatttagctttggtcctcattcagcagtctgaccataaaactctttacctctgttgccctaattaaatgatttagccatttgttttgaaaagctggcttgatctctgtgcggtcttatacagatagtaattaagatgaaagatggggaatgcccttcacccaaagcaatggccaagcaagttctatgctaccttgaagagaacggatatttgcaagcttagcatatgtattttgagaagattgatctgattcttgtgtgtccattacttgtggacacaataagatctgttgttggtcacatgaataaaaggcatcaacatgtaggaagtaacagaaggtacggttcattcagaaacggatatagaaacggatatggattcattcgtttcattgttgataaaa

SEQ ID NO: 126989 - DNA, 544 bp, Zea mays
  Clone ID: MRT4577_47280C.1
cttaaacacataatacgcaagaggatcaattttctattcacacgtgtcaggctgaatacaaaggaatggtatgtgataacagctctggacaaatcatatgctctggagctcttccaatatacgacaaaccgctagattttcttaacaacaacaccacatgatgatacacaattaggctcaagcgcaaatttatgttactatcagcgccagtgatacattgactgcacaaatgatatgagcaacactgcactatgcttccttgcagtacctttttccatctactgacactgcctctacatatctacctgaaggaaacaaatttcagtgcatcttatgttaacagtggatgcaattcattattgccactatacaactaaaaatagcactatagcattgatggtgtctctacaacctggcacatgactacataaaaagaagctacaaacattatattcaaaaaggctcatagcttgtgatgatgccatagcttgctaaccatgactctcatacagttcatcactactctagctaacttaacaaacta

SEQ ID NO: 126990 - DNA, 1744 bp, Zea mays
  Clone ID: MRT4577_47281C.1
atggatcctaagggaaaggggatggtggtcaacaacaaggagaaggagtccctcttcaacgagccaagggacgataagcccactgacttaggatcgagtcccaagaagagggacgggaagaagaagaggcggatcaagaagatcatttactacgacagcgacgcctcctcttcttcaccaagagacgacgacgacgatgactcgtctaaaaagaaaccggttaatcaaaactattcattttattactctcgtattccattcaattccaatgctcatttgctttcaatttctcttgataaacctccacactttgatggagaaaactactctttttggagtcacaaaatgcgtagtcacttattttctctccatcctagtatttgggagatagatgaaaatggaatgcatttcgacagtacggataaccatgtgtttattaacgagcaaattcataagaatacacaagctaccactgttttgctagcatctttgtgcagggatgaatacaacaatgtgagcggcatggacaacgccaagcaaatttgggataccctcaagatatcacacgagagaaacgacgccaccatgatcaccaagatggagttggtggaaggcgagctgggaaggttcgcgatgatcaggggagaggagccaacacaaacatacaacaggctcaagaccctggtcaacaaaattagaagctatggaagtacaagatggacggacaacgacgtcgttcgactaatgctaaggtcatttacggtaattgacccccatcttgtcaaccttattcgtgagaatcctagatacaccaagatgacacccgaggagattcttgggaagtttgtgagcgggcgcatgatggtgaaggaggctcgatatgtggacgatgctctaaacggtccactacccgtccatgagcctcaaaccattgccctcaaagcaaccagcaacagggagacgctaccaagcaaggtggcacaagtggaggccgcgggtctcaatgaagatgatatggcgcttatcatcaagcgcttcaagaccgcactaaaaggacgcaaggagtaccccaacaagaataagacaaaggcaaagtgctcctatttcaaatgcggtaatactggtcatttcatagcacaatgccccgataatgatgatgaccatgaacaagaaaagcatgggaagaaggagaagaagaaggtgtacaagaaggcgaagggcgaggcacaccttggcaaagaatgggattcagactgctcttcatctgactccgacgatgaaggactggcagcctcagccttcaacaagtcttcgctcttccccaatgaacgccacacttgcctcatggccaaagaaaagaaggtgagtgttcgagattcccctaagtactctacttctagtgatgaggattcctccaatgatgaagtagattactctagtctatttaaaggattagatagagctaaagtagaaaagattaatgaactaattgatgctttaaatgaaaaggatagacttttagaaaagcaagaggatattttgtatgaagagcatgataagtttattagtgttcaaaaatctcttgctctagagattaaaaggaatgaaatgctatcttctgagttatctgcttaccatgaaactgtgtctagtttaaagagtgtaaataatgatttaaatgctaagctagagaaagcaaataaatctagttcatgtgtagagcatgttagtatttgtaatagat

SEQ ID NO: 126991 - DNA, 245 bp, Zea mays
  Clone ID: MRT4577_47282C.1
tttttttttttttttttttttttttttttctttgttttggtgtgatgttttttttttttttgttttttttttggtttcacctccggggaaggagctggtcttaatcgtcaggggaattggagagaggggaggggaacccaatgagggggccctaggaaaaacaggccctcctcatacgcctataggatccttcaaaggcaggaagggcccgcccaggcagaaaaggtgggaaaacgccccccaat

SEQ ID NO: 126992 - DNA, 388 bp, Zea mays
  unsure (1)..(388): unsure at all n locations
  Clone ID: MRT4577_47283C.1
aaaaaggccgaggggggggacgacggaggccacaaagaagacgaagaaggccagggaggagancaacaacagggaggagcacgacaggaagagaggcaaggacacccacggccagaagaccgggcacaggacacgcaggaacgccaaggcgaagcaagagaacaccgacaacaacggcccgccccagcgcaagccggaaagagagcaccaggccaagcaggccaaggccactgttttttttttccacgcccaccacgncgaccgcggaaccgccgggggnaaanacaaacgggncggaagccacagcacnaggggagcgggggacgcaganancancaagacgacaccgggggagcaggaaagaagcccccgcagnagggggagcgaa

SEQ ID NO: 126993 - DNA, 353 bp, Zea mays
  Clone ID: MRT4577_47284C.1
gctagccacttcttaaacttttctttttctatcctgattctgctctctcggatggctcttttgatcgatcgaggctctttcccttcttcctctctctcgctctctctctctctatccgtgactgccatgtttccgcctgcgagctttctgcacgaccaaagcggcggaagaagagcacaggagctaagcggctcccatctggagcacgtggaggatgtcccctgcactctggacatgttctcgcacgaagcacggggctccctctagaccatccgcttctactgtgacctccattacttttactcgagactggcgcttacgtcagcacccgactcctgctcctgcgcgcgcct

SEQ ID NO: 126994 - DNA, 3083 bp, Zea mays
  Clone ID: MRT4577_47285C.1
aaggcttgcaaacctgaaaccttaatagcaccgctactgcattttctgacacagacagattccatatgcatcatcattcatcatcaaaagttcctcacttgacaaaataaatatgcttctgtattagccagtgcacccttgacaagctgcaaaaatgtggcttccatttgaaccatcaactgtaaacctgagcccgagcgtacaggcacataactgagcttttttgcaaacaagaaaaatatggggtcagcttcggtacaagcaaggcctcttcgaaacagaggtcaaactcagttcgcgtctaatttcttctcagcttcactgatgacctctagttgctccaacaaagcggtgagcttcctcatgtcctcctcctgtacgctctgtggagccttctcgcgatagccagaggcgtccattttctgcgccagtgcattctgtagcttttgaatctcatcttttttcttctttagcttttcacgttcagcgtctgcatttaaagctccttggagctgaaggtacacagacaagtctttgttgacaacagcagttgcacaatcggctggagtttcatcattctctgtcaggatcttgagatgtgatatggaagaaagatacacgattagagattgatagcactggattgtggcagcgatctcttggcctcggcaaagtgcaaaagcaggacgtctttcatttgaatctgttggtggcttcagagaccttattttgttcacagcatccaagacgatgtccatttcattttcaagtctgccattactccattcctcaacaagagatggatactgtgaaatcataatcgaacctttcctacaagaatctttgggctgtggaagacgctgccagagctcttctgttacaaagggcatgaatgggtggagcaagcgcagcccagtatccaggcaaatccacagggtatctctggaggcagttcttgctgattcaagctcttgagaatcgttgaagaagtaaggtttgatagcttctataaatacatcacatagctgatactgccaccatgagtatatagcagatgttgcgtcagacaacttatatgcttctaaagaggaaacggttttcccaacggccttgcccgagtccgagagtatccacttgcagattggtggcataagagacacatcaacagttgccggcggaatgtaatggtcacccagtttgcccatcgcaaaacggatggcattccataatttgttgcaccactgtctgtatccaaccaccctcttaatatcaagatttatcctgtcagactgggaagtgtacgatatcagtgcaaagcgtagagcatcggtaccacattctgctatgccatcaggaaaatccttcttcttcccatctcttgcaatgtttaattcatttggatccagattgccttcttccaaacgtttcagcacaccatcacgatacatgccatttatcagctgaaaataatcagcaacgttaccaggtgatttttacatctgtaagcacaggtgcatcccgaatcaaaaggcctgtaaataaaccttcagaaaaaggcacaacacccaccaagtttcattcccatcatcggcatccgtgttacccaaaagaagagaatttcaagtccagtttctagcaccgatgtagggtagaaagcacggaggtcagcggtatcagaagcccaaccaaagtactgttaaggggaaaagaccagatcaacaccaagtatccagcacatcagggtcttgatctagacgtaatttctttcctgcatactttttctgcgcttcaagatttgcatcgctttcgtttcttgcgactatccagcgatcatttgctgaaccaaggtctttttcccaggtcaccccctagtgtcacataccatgcgggtacatgatgtccccaccaaagttgccttgagacacaccaatcacgtatattttcaagccatccgtacccgtcttgctcatactgctggggaataatttcaatctttttcgtccttacagcgtcaaggcccgccttggccatgtggttgcaattaacaaaccactgtggttttatcataggttccactacatcattagttcttgaacaaacacccaagctcatttcattcttctttgtgtccttatacaaccccttttccttcagcgcctcaataacagcaactcgagcggtgaaccttggcattccatcaaattttgcacctccattgctatttatttttccatcgtctgtgaagatattgatgaattcaaggttatgccgctttccaacttcaaagtcatttggatcatgggcaggggtaatcttgacagccccagtaccaaaagtgggatcaactaactcagcatcacagattattttgagtcttcagccattgaaggggtggactgcgtatcttccatgcagatgtttatacctttcatcctcagggtgaacggctattgctgtatcacccagcattgtttctattctggtggttgctacaacaatctcatcaagtccttcctcgagcggataggcaaaagatatcaatacaccaaaatgtacaggattggcataaccagggacctttaacattgtttcttctttaagatcaatattatcaacttcattgtcagaaattacaattagaatcttgcaaacccaatacttaaatgcgataatcttgatatatcaggaaatccttatgtaacctaaccaaagcataaggtcatgcttacggtgtatgcttatccaataaaaaaatgtctcagtaccaatccctcaaagcggaacaaatgtatgattcttatactttcgtccgcccctagccatctctccatttgtgcctttccttaacacgtttttctcgccctgtgcatttccctgccctcgtcaacgcacgagtcccccgcccgcacacccgcgacagcgcggggaacgcagaagggcccgcgggcggcaccgacggggaagagcacgcggaggagggcggcgagggaagccgggcggcacggggggggcgggggatcggggggccgaggggaagagctccagtcacatttggaggtggcagaactataacaaatggggga

SEQ ID NO: 126995 - DNA, 214 bp, Zea mays
  Clone ID: MRT4577_47286C.1
gcgcctttagatgctatatctgcccatcactggcagcagcatcctaagatggtcaagctcctcacgcccggggggccctctgtgctaagtggacgcccccttggcgcgcgaacgccctaacttgggtcggtgcgggcggcagagcacaggcgccgggtgctagcttggatgccaatttacagtccttgacaatatacccaaattatggttaatc

SEQ ID NO: 126996 - DNA, 274 bp, Zea mays
  Clone ID: MRT4577_47287C.1
ggtgagacttgctaaagacaacgcgctgtctattaacctcaaggagccggacgggagactgaaacgcggaccggcccagattgccccttgtctaccgcacggggcagacatacgcatgctgcccagatgactgcagaggcggatggttatcagccccttttgcgaaaaccatgcatagggccccacgcatgctaagggcacgagggtttcttggccccgtccaactaggagtgggctgcggccaaacaaactcatatatgcctaagaaaagaca

SEQ ID NO: 126997 - DNA, 2692 bp, Zea mays
  Clone ID: MRT4577_47288C.1
ccacgcgtccgctctccggcatctgtctcagaatctttgcgcccgctgccgtccgccgctcctcctcccacaccggcgacctccgcccggtgttccatcctcccgcaccgcctcccgacgtccgcgtcgcccccacgcatccttaccttttgtcgattgcgcggtaccgtctaccccactaggcaaggcggtaccctccgcccagcgtagaggcgcgcctaagcgagcgcgtaagagctcctttttgaacacccttcctactgccgacggcagcggcgcatagaagaggcaatccgccggtttgatctgaagcatggacaaacaatctgatgcccaggggtcggagaaggttgctgaggagaagcaacttgatgagaaagagttagaaaggaagctgaaaaaagatcaaaaggcaaaagagaaagaagagaaaaaacttaaggcaaagcaaaaggaggcggctaggctccaggcacaagcaacctcagacggaacaaagaaggctgagagaaaacaaaggaagaaagctgtggaggatgaaaatcccaggatttcatagacccaaacactcctaatgggcggaagaaattgctcgcgcctcagatggccaaacaatacagtccaagtgcagttgagagatcatggtatgcttggtgggaatcatcaggatattttggggcagattctgcaagcacaaaaccaccatttgtcatagttctgccacctccaaatgtgactggagctcttcacatcggccatgcacttacagtggctatagaggatgctatgatacgctggcgtaggatgtcaggctacaatgctctgtgggtccctggagtggaccatgctggcattgctacacaggttgttgtagaaaagaagcttatgcgtgaaaggaagctcacaaggcatgacatagggcgtgaaaaatttgtttctgaagtactcaaatggaaagatcaatatggtggtaccatattgaatcaattgcgccggcttggggcttcacttgattggtcccgtgaggcttttacaatggatgagcaaagatcaaaagctgtaactgaagcttttgtcaggttacacaaggaaagcctgatatatagagattatcgccttgtgaattgggattgcacacttcgaactgcaatttctgacattgaggttgatcatattgatcttaaagaagacactatgttaaaggtccctggttatgccaatcctgtacagtttggtgtattgatatcttttgcctatcctcttgaggaaggacttggtgagattgttgtagcaaccaccagaatagaaacaatgctgggcgatacagcaatagctgttcaccctgaggatgaaaggtataagcatctgcatggaagatatgcagtccaccccttcaatggacgaaaactcaaaataatctgtgacgcggagttagttgatcccactttcggtactggggctgtcaagattactcctgctcatgatccaaatgactttgaggttggaaagcgtcataatcttgaattcatcaatatattcacagatgatggaaaaataaatagcaatggaggtgcacaattcgatggaatgccaagattcactgctagagttgctgttatcgaggcactgaaggaaaaggggttgtataaggacacaaagggtaatgaaatgagcttgggtgtttgttcaagaactaacgatgtagtggaacctatgataaaaccacagtggtttgttaattgcagcaccatggccaaggcaggccttgacgctgtaaggtcaaaaaagattgaaattatcccccagcagtatgagcaagactggtacagatggcttgaaaatatacgtgattggtgtgtctcaaggcaactttggtggggtcatcgtatacctgcatggtatgtgacactagaagatgacctggataaaaaccttggttctaacaatgaccgctggatagtcgcaagaaatgaaagcgatgcaaaacttgaggcacagaaaaagtatgtaggaatgaaattacgtctagatcaagaccctgatgtactggacacatggttttcatctggtcttttccccttaacagtacttggttggccgtctgataccgctgacctccgtgctttctaccctacatcggtactagaaactggacttgatattctcttcttttgggtagcaaggatggtgatgatgggaatgcaacttggtggtgacgtgccatttcagaaggtttatttacatcctatgattcgggatgcacatggccgaaagatgtcaaaatcacttggtaacgttgttgaccctcttgaggtgataaatggcatgtcactggatggtcttctgaaacgtttggaagaaggcaatctggatccaaatgaattaaacattgcaagagatgggaagacgaaggattttcctgatggcatagcagaatgtggtaccgatgcgctccgcttcgcactgatatcgtacacctcccaggttcttatggcacccagttgagttttttcatgtttaatgtagcatacatggttttatgcaatcccccccccttcagtctgacaggataaatcttgatatcaagagggtggttggatatagacaatggtgcaacaaattatggaatgccattcgttttgcgatgggcaaactgggtgatgattacattccgacggcaactgttgatgtg

SEQ ID NO: 126998 - DNA, 372 bp, Zea mays
  Clone ID: MRT4577_47289C.1
aaaaaaaggggggcggggtttattccgcccaaaagggccatcaacaggggttgggggagggggggccgaccccttttagttcccgaaaacgggggggggcccattggccgggggggaaggagaactagtcccggggagcaaacccccaaaaaataaagcgcagggcccccacgagggacacctggtcattgggccccccccccccccccctggggcttgggggggggtttaattttaagggggaccccaggggcctctggcctgggtgccctgagcgggaagccccccccctctcttgccacgggaacctggggggggggggagcccacccccctggggacggggaacctggtggggggctttttgtcctgg

SEQ ID NO: 126999 - DNA, 301 bp, Zea mays
  Clone ID: MRT4577_4728C.1
tctcttagatcggcggggtcccccctgtgttgggggtcttttacagagaggctgcgaaagcccctaatcaagaggatgtgcaggattcattctaaaagtcccattgtttttattattatgggctcaaggatcgttgcgattattggcatgggacgatcctgttgttcacacaattgactttggcgcgcccattgaatagcgcactttggttttacggggcgtatatgggcgaacctaaaaagaagggggtcccaatcgttctttacaagcatgtggggtaccaaataaaattggattgcca

SEQ ID NO: 127000 - DNA, 1853 bp, Zea mays
  unsure (1)..(1853): unsure at all n locations
  Clone ID: MRT4577_47290C.1
gggatgcacatggccgaaagatgtcaaaatcacttggtaacgttgttgaccctcttgaggtgataaatggcatgtcactggatggtcttctgaaacgtttggaagaaggcaatctggatccaaatgaattaaacattgcaagagatgggaagacgaaggattttcctgatggcatagcagaatgtggtaccgatgcgctccgcttcgcactgatatcgtacacctcccagtctgacaggataaatcttgatatcaagagggtggttggatatagacaatggtgcaacaaattatggaatgccattcgttttgcgatgggcaaactgggtgatgattacattccgccggcaactgttgatgtgtctcttatgccaccaatatgcaagtggatactctcagtgcttaacaaggctgttgngaaaaactgttacttctttagaagcatacaaattgtctgatgcaacatctgctatatactcgtggtggcagtatgagctatgcgatgtatttatagaagctatcaaaccttacttcagcgattctcaagagtttgaatcagcaagagctgcctccagagataccctgtggttttgcctggtgacaggtctgcgtctgctccatccgttcatgccctatgtaacagaagagctctggcaacgtcttccacagcccaaagattctagtaggaggaaagattcgattatgatttcagagtatccatctcttgttgaggaatggagtaatggcggggttgaaaatgaaatggacattgtcttggatgctgtcaacaaaataaggtctctgaagcctccaacagattcaaatgaaagacggcctgcttttgcactttgccgaggccaagaggtcgctgctactatccaatgctatcaatctctaatcgtgtgtctttcttccatatcacatctcaagatcctgacagagagtgatgaaactccagccgattgtgcaactgctgttgtcaacaaagacttgtctgtgtaccttcagctccaaggagatttaaatgaagatgctgagcgtgaaaagctaaggaagaaaaaagatgaaattcaaaagctacaaaatgcactggcacagaaaatggacgcctctgggtatcgcgagaaggctccacagagcgtgcaggaggaggacatgagaaagctcaccgctttgttggaacaactagaggtcatcagtgaagctgagaagaaattagactcaaactgagcctgtaccgaagttggtccccacatttttcttgtttgcaaaaagctcagctatatgttcctgtttgctcaggttttcaattgatggttcagatggaagccacacttttgcagcgtgtaagaatattcactggatgtacagaaccatatttttgggtgttcgattttgtcaagttagaaacttctgatgatgcaaatgggaagtctgtcacaatatgcggcagccgaaatctgttcatcaaatttattagaatggtctcaattgtctcactctgccgaattcggcacgaggctgagagctgcttcccattcattttactctgaacatgctgtgagggaatttcgtggtgcatggctgaaatctgttatatagagcatatgcaaatacgtctagaggattcctctctctgcccagttcgacattatccgtgcacgtatcctgccctttcaaaatgacaaaggtttctacggactaatttttagcctttctgttttagtccttaaattattaaatacagtgactaaaagagagattatctctattttagtccttatgtttggcaatttagagactaaggtgtcgtttgattcaaaaaagaaaaaaaaaaaaaaaaaaggccccta

SEQ ID NO: 127001 - DNA, 391 bp, Zea mays
  Clone ID: MRT4577_47291C.1
aacccagaacaatattgtttttgtgggggtggggcatagtagacgaggaccgttacagtggggaaaatgaaatgaagcatggaaagggcaaacaaaagaccaacacttttatttcttcatcccaacatagacttccttccttctgacaacttcatacatgtggtatgatacccttccccttgaatggctcacgtggcctacaattctttatggccgcaaaaaactggccgatcacgctcttgtagtctccggtcaccatgatccttgtggtcaattccaccttgaccggcaggccttagggaatggcctatcgaacagggtgggagatttccatgttcatcacgagatcgttgtcctccaccgctgcacggtacccgaaaactactaactg

SEQ ID NO: 127002 - DNA, 290 bp, Zea mays
  Clone ID: MRT4577_47292C.1
aaacgctcaacagctgctagtcgagctgtgtctgactccgatttctcggtgttcgatctatgtccaaaagttaatctgccttcgtactctcaaatggaatgctcaatatgtcgtcctctaatcaattttatccgactcggctaaatatctcatgtccgaaccgaactcaaaaccccgtatcgacagcaattttaagttaccaagattcgccttccctgactaaaaatccaaagccgatcaaatctcaggatgatttattttcgaatcacgcgtagggaattatttccgag

SEQ ID NO: 127003 - DNA, 340 bp, Zea mays
  unsure (1)..(340): unsure at all n locations
  Clone ID: MRT4577_47293C.1
gaattaactttttatttcatgtaggaaacgcaccttttattgactttaacgctgccgattgttttttaaaacttccttcacctcctttttggcgcacggggggaaacaaaccccctctctgtaggggtgtactacacgcgtgctgcataaaacaaaacctagaatatttcaaactttgaaaagaaataactttttttttaaccccattttaatgcccccaaagatagggctttgtggcctccccgctcaaaactcgtcactttggagataaggggggggcctccttcccaacctccctaaaaggaatgtgctcntggggtccccattttttattttttaa

SEQ ID NO: 127004 - DNA, 305 bp, Zea mays
  Clone ID: MRT4577_47294C.1
cgttcggggacacgagggcgcgaacagggacaaccaagatgacgcgctgtgctctgactctggccctactgctcctctgtgccgacggcacaccaggcggccgggccgtggtaccgcgaggcgccgtacttcaccaactcggcggcggcgcagagcccgccgccgttgcatccgaaagacacggacgtggcgtgctcgtcgcacgcggcggtgcacggaggcatgacgctggacgcgtcgtacctgcacggcaccatgggggtcgagctctccgtgctgcgccacgcgacgtgcccggagtgcat

SEQ ID NO: 127005 - DNA, 414 bp, Zea mays
  Clone ID: MRT4577_47295C.1
tggacctttgggctgatttatgtgcttgtttatgtgcttggattattcgtcgcgtgatactgaaggttagtattctagtgttgttgttactgctggttatgatggtagtgctcgggtatagcttgagaatccttttgagccaaagttcgaggaggccgtcgggacgacaaaggatcccgacgaattcggaatctccgtattaatcggctcccccgccggaggcatgaagcatacggcgacttaaggcgaattcggagccgctacttgaggaaagaaggcatagcggggaatagacccctcaacagaagaaacgtcccgacgttcccccctgccgtccacgccaacccccatttaaaaataaatctaggctacactcgtagcatcacaccaccaccaaaacacgcaacacggact

SEQ ID NO: 127006 - DNA, 364 bp, Zea mays
  Clone ID: MRT4577_47296C.1
ccggggcgccttttttttttttttttattaatagggaatgtatagattacacctgagaaatggttaactagttaggacagatggtcaatagccatacaaacttaaaatgcacacaaacgctacaagaagttaaacacatgagactagtctggatgaggttgaaagcccacgagtagcctctgaaacctaggagcatattacgggcccacgcagaacgggaggcttgggaacacacgaatagacaatggattatcaagattcaaaaacaacatgcccagtcagtgggggggcgatggctctggtaagcggataaagttgacatcaaacatgtctcccagggaagagctaccgctaggagcaccgt

SEQ ID NO: 127007 - DNA, 242 bp, Zea mays
  Clone ID: MRT4577_47297C.1
gtttcattgactaatctagtgactagtcagttatgggtttaatgtttggttttggttttataaaaaaaaaaaaaaaaaaaaaaaaaaaaaaaaaaaaaaaaaaaaaaaaaaaaaaaaaaaaaaaaaaaaaaaaaaaaaaaaaaaaaaaaaaaaaaggggcgggcaagaacaagtaacgctctccaaccctgaattaaattccttaccgcaccctgaaaacataccaacttttcttatatggg

SEQ ID NO: 127008 - DNA, 137 bp, Zea mays
  Clone ID: MRT4577_47298C.1
gttcagtgaaaaatgtttaagtgactgaaaattctggatagacctgatatgtgcatgcaattacaaaccaaaactcaaatgctaagatatttgttcattatctttcaaaacaacccattactcattaccatggttct

SEQ ID NO: 127009 - DNA, 836 bp, Zea mays
  Clone ID: MRT4577_47299C.1
caaagtcgcacctatcgatgcgcacgcgcacgcctgcctggggccgggcggcaaagctaagctcagccagagtcgatcatcacacggcgatggagccggccgccgacggcgacgacgtgcacgggcagcgacgggacggaggacaccacgcgccggtggtgtcgctccgggcgctgggcctggcggacgcggacgccttcatggcgtgggcgtcggacgaccgcgtgatgcggcacctgaagcggccgctctgcgccacccgagagcaggccgtggcgcagatcagggacaccgtgctgggccacccgtggttccgcgccgtctgcttcggcgacgtgcccgtggggcaggtgtccgtgtggccgtacgccgacgagggcggtcgcagggccaacctcggctacgccctcgcgcacgaccagtggggccggggcatcgccgccgccgccgtcaggatggtggtgggcacggtgttcgacgacctgccggggctggaacggctggaggcggtgacggacgtggcgaacgtgcggtcgcagagagtgctggagaaggccggcttccacagggagggggtgctgcgccgctacatcgctggacgccgcggcagcggggccagagatgcggtgatctatagcttcttgtcgtccgatgatcgtgcgtgacccggtgaccggtgtcgctatgctacctgcatatggttgtgtgtcctgtaatatgcgttccataaattgtgcaagatagaaatggactactgcgtataatgtatctctaagtgcataaacaaggtaaacaaaaaaaaaaaaaaaagggcgccgctcgcgtgctagaactag

SEQ ID NO: 127010 - DNA, 388 bp, Zea mays
  Clone ID: MRT4577_4729C.1
gccgcgggtgtgcgcgaggtcgggccgtacccgccggggctcaagcctggcacggcgcgcgcggtgtgcgtcggcggcggggagaaggtggttgtgacgggcgcgcttgatggcgagggcggtggtgggcggcacgcactgtgggtgttcgatgtcaagaccaagagctggaccgtcgtgcgcccgccgcccgagttcgccgggttcgtcttctccgtcgcgtctgtccggatctgactgagcatctgcatcttgcttcgcaccgttggtccgtccacggccatgagacgtgaaggaaaggaaaagtctactagtacaagtagtatactagtacatactactagtatgtccgtgcaccgtttcgtgcatgtacgccaacttgtctgtc

SEQ ID NO: 127011 - DNA, 146 bp, Zea mays
  Clone ID: MRT4577_472C.1
ccacgcgaccgaacacgcgtccgggtgcttctggtttcgcacccattcgcctgacggcaagccttactggatcatcaagaactcgtggggccagaactggggggaaaaccggtactacgggatgggcacgggttccaaccttccca

SEQ ID NO: 127012 - DNA, 253 bp, Zea mays
  unsure (1)..(253): unsure at all n locations
  Clone ID: MRT4577_47300C.1
caccgatcacttcctcgccccaccactaacaacggaggcgccgcgcancgcagtccctgagcacacctccgcacacctgcagcccatccttcgacctcaaccgcgcgcgcatgtatcccttctgctgcccgcagcacgtaactacctcgacagtcggccccttagcccccaaggagtcgtgcctgatcgctccggtacctggcgggattccttggatggatcggacaccattgaccatccggccaggctgccc

SEQ ID NO: 127013 - DNA, 350 bp, Zea mays
  Clone ID: MRT4577_47301C.1
gaccagacaccatctgcacattatgtgttgctttttttgggtgcaacatactactgatccaaacctatacatgaagaacacgttccagggcatacgccaccgagcgagagactgagggagcgtgagagagagcgacacccaggcataccatctgtgcttggtgcaccaagagcgaaaacagccatgttccatgccaccatgcactagatctctacggtctgcgcatgctgcctcactactgagttgaccgatgggcaccctagcactgacagagtgacccggctttacatgcatcattgatcccgctgcaaggagacgacacgggacttactgttctgctgggcatgccc

SEQ ID NO: 127014 - DNA, 1084 bp, Zea mays
  Clone ID: MRT4577_47302C.1
gccgagtgaactggacaagataccgagtagaatagaatagcgaagaagaaggatagcttgttggattgagttttgaacatcatttttctatttttactgatgcttatcaatttagttaatctcttggagttgctcttataaatgcgcggcgatcaacccatgaagcaaacctcgcatgcatggtggcgttcacgtggttgttggcgcggccatgatgctcttgctggacgaggagctggtcagcctcagtgccctcatggtgctcgctagcacccaagcctagctccagtggctccacgagccggtgccccttgtgctcccgccgttcttgtcgttgggtgccgagagccagtaggatgacgaaggcggggccgcagtgcctaggcagccaccgaagaactcgacgcacttgacgcggtggtgctggtcctgttcgtgttcctcgccgacgccctggtagcctagcgcgtccgcggccttgggcttggccgcttgggggcttgcagtgagactgtgggagtcgacgcggtggagcgtgcagccgccaaagccgatggagaggcgctccaggccaggaagtctcccgagaagctgtggctgtcgcagccgactgagcgcgacctcgccaccttccgtccgaacgacggcgatgacaacgagccctcggcccctcgctgcggcgggagggtgtgcgagaacagaaatacgtgagcgcccgcatgaaagaagggagatggcgaggcggacgagctagccaaagatgccgagtgaactggacagataccgagtagaatagaatagcgaagaagaaggatagcttgttggattgagttttgaacattatttttctatttttactgatgctcatcaatttagctaatttcttggagttgctcgattgtccattctctgaatgccaagtttccttttttttcccaggtggtccctgatcgccggtcatttgcctggccgaactgacaacgagatcaagaaccactggaactcgcacctgcgcaggcgcgggcgggcgggcgactcccgcgacgacggcgtcgtcgtcaacatcgacctcgtcaagctgccc

SEQ ID NO: 127015 - DNA, 141 bp, Zea mays
  Clone ID: MRT4577_47303C.1
gggggctgtccgtccacacagccggtcgtgttttccgctgtgtaagcatctccaacgaacaccagacgtcgcctagcgagctgtgcatgccacctcctacgaagccggcggtcgccgccggccatcggcgcggaggatatg

SEQ ID NO: 127016 - DNA, 414 bp, Zea mays
  unsure (1)..(414): unsure at all n locations
  Clone ID: MRT4577_47304C.1
gngcaaaaaaataaattgcatgcgatatctaataaataagcctggtcaaattactcatacataagcgtcctcaaaattgtggctttgatcatatacatatgatctttctttaagggggactattacatctgcgacatagaaaaccttgattgctgacacacagactgaccctacctcaaaaattggacccttgcctccttgagcagctactggataagaaaaaatgaggggaaaagggtgcagcttcattgacattcctcactaaggggcatttctcgacatctgactgggcaaaaaggtgtctgtggcgtatctggttcactgagaaagctgccagaaaaattttcatcctgcatattgactcatacatcaccttactgcctcgagtttgcttgcttggtcgtaatagaacat

SEQ ID NO: 127017 - DNA, 636 bp, Zea mays
  Clone ID: MRT4577_47305C.1
gtagcttttaaaacagtcatatcttggacgctggaattcaatgttagcccatattagtcacattttgtttgatacaacgttggttatgctaatgttttttacttaaataaatatataatggcttaatgtatattcaatctattttccaattaaaagcaatttacgttcttaccatgaggggggtttagttgatattaatatgtttaattttgacttcagtaggctttattaaataaatttgcttagtctacatacgacacatttaatatcatatttaggatgcaatattttataaatataatatgactaattacaaaatgcggtttccagtcaaactataatttggattaaagtcaaatctaaaatatctcccgcaaatgatctatactaattaaaaaccaaattagaaatatagttttacgcgtttaatcacgtaaatctttcgaaagttatattttttccttgcgtgaccgagtagcgcgctctatttcgtattgcatatttttatattttatcttgtatggtgtaatgttcttatgcaagtatatgtttgcttgtgcctgtttgtattcgttgcgcgtcacgaatagactgcaatccgttctgagcttcgaggaatcaactgtcaaacttcga

SEQ ID NO: 127018 - DNA, 903 bp, Zea mays
  Clone ID: MRT4577_47306C.1
ccttcgtgtccgcccacgcgtccgcccacgcgtccgctcagctagcctcctcgccccctttcccccggcctccccttcgtcactttccactatccaaagcttcttcgctcctgcttcccttttcacaccaagcaggacctgccggtgccaaacgcacgccgcatcacacagaagccaacaaggttgagaagagactgaggaggtcagccagccacttgcccacctccgagctgtcccccatgacaccaccgccaccagcaacccaagtaccaaacgactgggccgcagtcccgcaatagcgtcaagatctcccctttgacctcccccttcgccttccggccatggtctgctgccatggcggccggcgccgcagcgccgcgctcctattcttggccgtggccgtggtcgcctgcgctgctgctgcggcggcgcaggagcccaacaccgacgcctacttcgtctctgggtttttctccaagctgggccgcgccgcgccgtcctcgtccggcgccaacggggtgtgctcctggtccggcgtgtcttgcgacggcgcggggcgggtcgtggcgttcgtggccgccgggatggacctggccggcgccatcccggaggacaccatcggcaagctcgcgcgtctgcaggtcctcgacctcagcggcaaccgcctgaccgcgctgcccaacgacctgtgggagctcggcgcgtcgttaggcgcgctcaacctctccggcacggccatccgcggtgcgctccccaacaacatcggcgacttcgcgcgcctcaaggtgctcgacatctcccacaacgccttcaccggcgcgctgccgcaagcgctcggctccatgttcggcctgcaggtgctcaacgccagccacaaccagtttccagggacaggtcccaacg

SEQ ID NO: 127019 - DNA, 372 bp, Zea mays
  unsure (1)..(372): unsure at all n locations
  Clone ID: MRT4577_47307C.1
tttctattcaattaaatctggganataggtgttttttttggttttttcctacaaaacaaccttccaccccaaaaccccatcccaaaacaaacaaaatgtttatccacacacaggaaataaaaccccgttttcaaccaaaatccaaaaccgcccgtttttttaaacccttagaaaacaaaattttacagcccacaaaaaaaaccccccccctgcattcggggcatataccaaacttttatacccatgcccctaaaaaaaccttaccaagattatgcaatcccttactcccgaaaaaagggttttttttagccctccccaaaacagaaggtttaactccttcccatcaatcccggggctgaggaagaaaccccc

SEQ ID NO: 127020 - DNA, 549 bp, Zea mays
  Clone ID: MRT4577_47308C.1
attcggctcgaggcacagagtatttttgacagataaataccgcccagaatcttgctgcataattgcaaattactacagtctgaagggtcagcatgagaaatcagtttcatactttcaaagggcactaaagcttaatcgaaagtacctctcagcttggaccctgatggggcatgagtatgttgaattgaaaaatagtcctgctgcaattgatgcctacagaagagctgttgatattaatcctagagatttccgtgctttgtatggtcttggtcaaatctatgagatgatggggatgccgctttatgcactttattacttccggaaatcgccatacttgcaacccaatgatgctcgcctctggattgccatggctcaatgctacgacagtgatccacttcaaatgattgaagaagccataaagtgctatgagagagctgcaaacagcactgacactgaaggaatagcacttaaccaactagcaaaactgcatggcctgctgtggcaatccgtggaagctgcattctactacaagaaggatttatagagaat

SEQ ID NO: 127021 - DNA, 963 bp, Zea mays
  Clone ID: MRT4577_47309C.1
aacccatccaacttcccaaacgaaccacgacacaaaccggcggcaaatcagcttcctggtgcccgaccgggcccggaacagcacacgaatccaaagaacacgaaccggcagttcagcttcctgtccgagacctcggggaggcctgccctctcggctctcgcgttaccgatcgaggcgtggagagaaatggcggcggcagcagcaacaagagcaggagcgtggggcgtggcgtggctcctggcggccaccgtggcggcggcgctgctggcctcggcgtcggcgcagtccgggtgcacgaccacgctgatcagcctgtacccgtgcctcaactacatcagcggcaacgtgtcggcgccgccgtcctcgtgctgctcgcagctcgccagcgtcgtgcagaccaacccgcagtgcctctgcgccgcgctcagcggcgactcctcgtccctcggcggcgtcaccgtcgacaagacgcgcgcgctccagctcccccaggcgtgcaacgtcaagaccccgccggcgagcaagtgcaactctgctggcggcggcagcgctccgggcgccgcgacgccggccacgccgtcggccggcgtaccatcgaccgcaggaaccggcactggatcgaaggcgacgccgacggccccgttcctgacgtccggcgccgcgtcgacccggggggcggtgagcctggtgctggcattcgcgactgttgccgtctacggcatctcggccgcgtgacaatcttggctcatctagctctgttgcccacggcgtttggggatacagacattcgacattcaggatttgtggtgtcactgttccgcattggttgagcattgtcgagtatagataattgggcgtcgcatttgtattattgcttgtatttggctgtcacaataaagaacaccgttttttccttaaaaaactcgagccgtaaaaaaataaaaagaaaaaaaggcggcccta

SEQ ID NO: 127022 - DNA, 421 bp, Zea mays
  unsure (1)..(421): unsure at all n locations
  Clone ID: MRT4577_4730C.1
gccgacaacgccggcgctgagtacctccgaggtctgggcctggccggccgcaccgacccggacagcttccgggcctgcgtaccgctcgccacgcacgcggacatggagccctacattgcgcgcatcgccgacgagggcgacacctnccacgtcctcaccgccacgcccgtcacctccatctccctcagctccggcacgacgcaagggaagcgcaagtacctgctgttcaatgacgacctcttcaagtgcgctatgcagacaggccagactagcttcgctttcaggaacagggctttccccgtggaagacggaaagtcgctgcagttcatttacgccagccggcaattcaagaccaagggcgggctcacggcgacgacggcgaccaccaacgtgtaccgtcacagggacttcaaggcccaca

SEQ ID NO: 127023 - DNA, 498 bp, Zea mays
  Clone ID: MRT4577_47310C.1
tcgaccgcattccttgctttggcagctgctggcggcggcagcgctccgggcgccgcgacgccggccacgccgtcggccggcgtaccatcgaccgcaggtaaggcgacgaacaactgtgctcatcaatcatcatacggttcagctgtccacggcttctctcttacaccacacgaaccgatgcaggaaccggcactggatcgaaggcgacgccgacggccccgttcctgacgtccggcgccgcgtcgacccggggggcggtgagcctggtgctggcattcgcgactgttgccgtctacggcatctcggccgcgtgacaatcttggctcatctagctctgttgcccacggcgtttggggatacagacattcgacattcaggatttgtggtgtcactgttccgcattggttgagcattgtcgagtatagataattgggcgtcgcatttgtattattgcttgtatttggctgtcacaataaagaacaccgttttttccttgtt

SEQ ID NO: 127024 - DNA, 230 bp, Zea mays
  Clone ID: MRT4577_47311C.1
acccaaaaatacaccacaacataattgcttcacccacgatatggtcaacattggcattgcgcccaattccatcaggggggatagaagcttttgctaccagtagctggggatcaacacacggcacacacgtacttttacccacatacaagcatgcccaacaacacagattccatgggcatggtgttttttactcatgggaatacatgcttcttttccctttttccggactc

SEQ ID NO: 127025 - DNA, 312 bp, Zea mays
  Clone ID: MRT4577_47312C.1
ggctctcgcgttaccgatcgaggcgtggagagaaatgtcggcggcacagcaacaagagcaggatcgtgggtcgtggcgtggctcctggcggccaccgtggcggcggcgctgctggcctcggcgtcggcgcagtccgggtgcacgaccacgctgatcagcctgtacccgttcctcaactacatcagcggcaacgtgtcggcgccgccgtcctcgtgctgctcggaggtcgccagcgtcgatcagatcaacccgcagtgcctctgctgcgcgctcagcgtggactcctcgtccctcggcggcgtcatcgtcgac

SEQ ID NO: 127026 - DNA, 578 bp, Zea mays
  unsure (1)..(578): unsure at all n locations
  Clone ID: MRT4577_47313C.1
gctcgaattccgttgctgtcggttgtcttctaggtttccctttcttcctcttctctgcccacttctctggacgtcgcggccgcgctgaacggcgagctatttcttcgttgcggcacatcgttgcgatttgagccggcgtcgagctgggaaatagggggtctcggtcggccaagcctgcaacctatcgcgccacttcctctccttctgcagcatactgtagagtcatctatcctataagggatcgttcacagtggcctcattttgatatggaccctgttgtaaaaggacctttagcaaaacgaggtgttgccaggcaaaggaaattacgaatcaaaggttgtctagaaggtgggagtaaatctaagacaaccactaaagaaggtggtaggcaaatgaaaagaggtcctatacgatgcaaaaaatgtggagaccttggtcacagacaaacaagttataagtgcccactaaacggnaccaagaaaagaaataggaaacagaggagccgcaagtatgccggtgcaaatgaaccttcacagaccgacattcaggcacagaagactatatatgatagtagcctt

SEQ ID NO: 127027 - DNA, 161 bp, Zea mays
  Clone ID: MRT4577_47314C.1
aacaccagcagcaggaaatggcgatggcaccgccagcagcaaccctagctattcgtggctcgtgccctaaccactttatctctaaaagacattttttgttgctcgccaacgaccaccattcccacacttttttttttttttttcccctccttacatcacct

SEQ ID NO: 127028 - DNA, 348 bp, Zea mays
  unsure (1)..(348): unsure at all n locations
  Clone ID: MRT4577_47315C.1
aattttagaactttcttcttcagacatggtcnccaggatttctactgttttggtncannaaaccctttgagaagaaacttcagttcttttctgaatgcgttcatagggtggcaataagagctcaagtttggtgaccaactcaatgacatcatccttggcagctctttcatccgcattaatccatctcgcaaggaaaacagtcagatgatagcccacaatacccatcacacactgcgcattctcattcagccaaaggtctcatatagcctctacttttgcagcactttccaatgttttgactgcatatggatcgcacagcccccaccacagtaagtcatccccaacaac

SEQ ID NO: 127029 - DNA, 274 bp, Zea mays
  Clone ID: MRT4577_47316C.1
gtctggctctagtgttttcactgaccatttttattagagcctatgacccgctactctgattgatggccgggctatactctgaagcacagcttattggcctgtcaggatacacagaggagggtttttcaatttttgacattggtgttggacataacacatatgacacatcttcggcgcactactatgggcaatctcatagtgctgatctaactgagtacacgtgaccgaataataattgcctaggctgacacagcacgctgtgcggcctgaaacc

SEQ ID NO: 127030 - DNA, 1565 bp, Zea mays
  Clone ID: MRT4577_47317C.1
tgtatttcctcgccggccggcgcatctctccgggcagaccggcccggcggcccccatgggttccgtgcaggtgagcgtgtcgccactgactccggagcgtccgtccgtcccccatacggccacgcctctgggtctcccgcgctgccatggacgggggaagagagcagcaggcgccgccggagtcgcagcccggtaagaacctcatcaagatcccgtcctatcaggaggtcttcggcaccggcgcctccacctcttcctcgaagccgccatcctacaaccctcctgtagccacctccgccgccgccgccgcttcatcctcctcgtcgtcctcgggatcattctcgcaggctttttctttcctcaagtcctccgagttctactcacctccgccgccgcctccccagcccaccaccaccccgaggccgactcaagctagcccctcagcgccgactccccaaagcaagaactccattctcgtcagtcataggcagagagggaaccctctgctgaagcacattaggaatgctagatggacgttcgccgatgtcgtgccggactatgtgcttgggcaatcgtcatgtgccttgtacttaagtatcaggtaccatcttctacatccagactacttgtactatcggataagagagctgcagaagaatttcaggctgcgtgtcatcttgtgccatgttgatgttgaagatgtaatcaagcctttgcatgaaattacaagaacagcgctgcttcatgactgcacccttttgtgtggttggagcctggaggaatgtggtcggtacttggagactattaaagtatatgaaaacaagccagctgacagtattcgtgagcacatggataacgactatctatcacggttgacgcacgggcttacatccattcggcatgttaataaaacggacgttgtcacactcggttcatgtatttgcagtcgctctcacagatcatgaatggttctatggacgagctggctcgatgcccaggaatcggtgagcggaaggtaaggcggctctatgataccttccatgagccgttcaaacgggttcctgcccgaccacgaccaaacctcgtagtacccgataccccggaccgggagaaagcaaaaggccaaccttcgtctacagatggcagcagtttgcaagatgcggtagagaagccagatgcgtcgaagaagacgaagaaaggctctgatgtaagatcagccctcaccgttgcctttgccaagtattcggagaagatccgcagtcagggccgcgatgcgccaaacgaggccggtgagagtactggcggctcgaccgtggaagctgagagggcgggagactagatttagctgtaggatggttaacggtgctggagtaatgctagtttgttccttcctgttgggtgcttgttgttgtgactgggccgccgatttgcgcgtgcggcaccagtatttcccgcggcgtcctaggcatgtgtgttttttttaggctaaagaggggccagagaatcttcaacgatatcgaaacatttaagtgagcttcctagacggtggcagccattccatcacc

SEQ ID NO: 127031 - DNA, 456 bp, Zea mays
  unsure (1)..(456): unsure at all n locations
  Clone ID: MRT4577_47318C.1
cggacgcgtgggcggactcgtgggatagccttcaatctaacaaagccaccgcttaggctgagttcgctgatggcatggcccgggtgagcaaggcagcaaatggcagcagtttgctggccaattgttccttttagccttggcacctgttatttttaaatctttatgaattttgtctctttattttgcccaaaatacccttttcatatttcggactcatagaacttcaaatgtctcagtgctgcacatattatggagctgcaggacttcaattgtcttgtagcctagtttcagttaaaacatggtaatttggatatttcgtcatgattacatcggtatttatgttggtgtcgggcaattacatatattttgtgtttaaaagttagccctgggaatagtgaaatcctggctatgccaccggtatagtttggacatangcaacaacatattgtctcatat

SEQ ID NO: 127032 - DNA, 475 bp, Zea mays
  Clone ID: MRT4577_47319C.1
aaaaaaaaaaaaaaaaaaaaaaaaaaaaaaaaattaaaaaaaaaaaaaaaaaaaaaaaaagggaagaaaaaaaaaaaaaaaaaaaaaaaaaaaaaaaaaaaaaaaaaaaaaaaaaaaaaaaaaaaaaggggcccccctttttaaaaaaccaaattttacttccccttccttccaacgtaaaactttttttttagggcccccaaattcaattcccttgccccctttttaacaccctcttaattgaaaaaacctttgctttcccaaaattaatcccctttaaacaaaatccccttttccccagttggcttattacaaaaaagcccccacccattcccctttccaaaaatttccccaccctaattgcaaaatgaaaccccccttttacccccccttaaaccccgggggtttttttttttacccccaatttaacctttaaatttgcaaaccccttaacccccgttcttttcgttttttt

SEQ ID NO: 127033 - DNA, 1229 bp, Zea mays
  Clone ID: MRT4577_4731C.1
caacaccctgcggcgattcagcagcagcagcctatgccgcagcagagcaatttccagggctttggtggtgttaacccacagtaccagcacctcgtggccggccttaatcacttctgcaggaagttaagaacaataaccacgtgaaagcacagcaactgcctccagatgcacctaaagcgagcggcggtcttgcaccaggagttgctattcccaacgttgctgctgctggggagcagggacagcatatcaacagtaatacccgtgaccataacggcgcggtgaagggtgctgctccagctggtactggcccaagcaatgtgatcaacaacacagccagcatgccccccggcagaaacaacagcttcaagtcggtgagcagcagtccagctgctgctaccggtggcattgcggtgaactcgaaggtcgacgactccttccatcaactggaggacctcgacctcgacggcttgatcacaaacgaactgatggagagcgggttgttcggcgccggacaagggtggtgagcatgtcccaccacgcctcacactactatcgagttccttcaccgaaagcgccaagcaacaatataagctttgccacccttctctttctggagtttttgtgttgacagtttcagatgatcgtgccatatacaattatgtaaggtagcgagttggatttggcttgggagtcgggaacggcgcaatctatagagctgttagcgtgtgcgtatgacatgttgctgtggttatcattttcatgctatggaggagtgtcgattatagtctcctgttgtctggcacggcgtgagtgtgtgtttcccatggttctatgaaatcaaattatagaagaaacaagatctaatgtttaggaatcgattctcaatgattcaaaaaaaaaaaaaaaaaaaaaaaaaactcgatccctatcttagttcttctgatctagagtatatatgatgtgtatacacaattctactgtttcggatcccccaccccccaccaccatacttgggcagcgcttttgtgatttctctcgcagccataaatagtgctgcataatttgctccgttttggctcgcaccgcggcgtggctactgatagggctactttcggagctacaaaaccggaatctgtacccacgactactggaatctgcacccagtttcacctctttctttaatcaattgggccagattcgaacaaaaaaaaaaaaaaaaaaggccccta

SEQ ID NO: 127034 - DNA, 280 bp, Zea mays
  Clone ID: MRT4577_47320C.1
acaacgcaactgctcagctccactccctcacgctccctccccacgacctccacttcgccccattcatcgcacaaccgaggatgataaatggtgaccatgcgacctccacttcgccccgttcacttcgctccctacctctgtgttcgagttcgcgtggacgccggagccacccgaagagagaggaggaagcagcgcgcggacgccagatccgaagacggctcgccgctaggacgttccttttctgcctctatgttagagcgcacgcgtacaccggagccgg

SEQ ID NO: 127035 - DNA, 825 bp, Zea mays
  Clone ID: MRT4577_47321C.1
gccaatgtggcatcaaatgatgtctggttgtcacagaaagtcagcttcatggatgaggccacggccataactgcagcatcaaaagctatacaagagacccaggaagcactaggtgcaagtgcaaaggaaataggaaatgcagttagggaggcagttgacagggtgaagaaaggcagtaggctggtaatgggcaagttccaagccccagcagagggtactcacaacctcacctctttttgtttgtgcgacgcttggataggctgtgacacgaagaccagcttcaagctcaaggtcctgaagcgcagccgtgctggaacaagaggccatgtgcctgaagaagggccagtggctgctgcagaggatggtattgaggaggaagaggaggaagaggaagaggagtatgatgactatgagagcgagtacagtgatgacgaggaggacgcgaagaacaagggggaagggaaggggaaggttgtgaacggatcggcccatcaaggggctgaatctgatattgattcaggcagcgatgagtaattctatactgtgttatgttgagaaaggaacgtagaggttgacaccatctgtttttttttttaaaattgaacgtatcccctccattttatagatggtcatagttactcagttttgtttactaataagttgagattgattggttacaaaagagccgagcaaaactagcttactatctcgagttgacctgaagactgcatggtcattctccaaagtgcaagcgtttcacccatgcctatcacctgtgtggtgtatgttcctcacatttattccgaatggcactgctgatttctt

SEQ ID NO: 127036 - DNA, 1288 bp, Zea mays
  Clone ID: MRT4577_47322C.1
acttcctcctctctgcttcagtacgtactacgtagtgggctgagccagaaatgggcgcgtcgttggctagaagcgttgctcttcttactctgctgctctgcctatttcttccgtgccatgggaagctctcgaccaagttctacgccaagtcgtgccccagcgtggccgccatcgtgcggtcggtgatggagcaggcggtcgccaaggagcccaggatgggcgcctccatcatccgcctcttcttccacgactgtttcgtcaatggttgtgacgcgtccatcctcctggatgacacttcgacgttcaccggcgagaagaacgccggagcgaacgccaactccgtccgcgggtacgaggtgatcgacgccatcaagacgcaggtcgaagcagcctgcaagggcaccgtgtcgtgcgccgacatcgtcgccttggcgtctcgtgacgccgtggacttgctcggaggcccaacatggaacgtgcagctcggccggaaggactcgcgcgcggcgagccagagcgcggccaacgccaacctcccgggcccaggctccggcgccgcgtccctcgtggccacgttcgcggccaaggggctctcggcgcgcgacatgacggcgctctccggcgcgcacaccgtggggcgcgcgcgctgcctcttcttccgcgggcgcatctacaccgaccagaacgtcaacgcctccttcgcggcggcgcggcagcagacgtgcccgcagagcggcggcgacggcaacctcgcgccgttcgacgaccagacgcctgacgccttcgacaacgcctactacacgaacctgatggcgcagcgcggcctgctgcactcggaccaggagctcttcaacggcgggccgcaggatgcgctggtcaagaagtacagcggcaacgcccgcatgttcgccaccgactttgccaaggcgatggtgaagatgggcggtcttgcgccggcggccggaacgccgacggaggtcagattcaactgccggaaggtgaattgagaatggctggcattcagagacgggatgacagggggagttgtctgaattctgaaacaaagcactaaactgtatctttccctttcgttccaagatcaagtctttggttcctgggcatgatacaagtgaaaataattaagacaatcttaaaatgcttgatgttcacgccatatacacagagacgtttttcctgttctatatttttttccattgaaaccatcctttagaacaatacatgtatcgactgtgaataatagagctcttttccgaagtctcgtttgaac

SEQ ID NO: 127037 - DNA, 225 bp, Zea mays
  Clone ID: MRT4577_47323C.1
gcggaggctggagcaggtattgcagcgctcattgctcctgcgatttcagaacagaggtaggctcgaattgaagagtgccgcaagacgtattggttggtctgagtccacggagtctgattggtgactctcgtagacactccgttcagtcattctcggcaacttcggcggatgggcatgagtccttgacgagtttgtacgatgctgttgagtccatcgatcctacag

SEQ ID NO: 127038 - DNA, 2504 bp, Zea mays
  Clone ID: MRT4577_47324C.1
gatttcatggtaggggacttagacgtggtaccactaccgcctacaggctacagcccaccgcggcaccgctgaagacaccccaaaacctatcccaatcggccgcgcctccgtccgtggctccgcctgccggcgacccctcagatccgcgcgccccgtaccacctcccgccgcctcactgccagatccggccctggctccgcaaaatcctgcgacatcgcagacgagccgggcgggagagcggaggtaggtcacagcagccatggcggccgcagaggagaacagctcgctgttcctgatttttatactcaccatgatcgcgctgcccctcgtgccctacacgatcctgcgcttgtgtcgcgctgcctccgagaaggcgaagaccatccactgccgctgctcgggttgccaccgctccggcaagtaccgcaagtcgatctacaagaggatatccaacttctccacgtgcagtaacctaaccatccttctgctctggattgttatgatattcctggtttactacataaagcttgttagccgtgaggtccaagtttttgagcctttcagtattcttggactggaatctggggcatctgaatctgatatcaagaaatcatataggaggctttctattcagtaccatcctgataaaaatcctgatccagaggctcataagtactttgttgaatatatatccaaggcatatcaagcattaactgatcctatatctcgtgagaattatgagaaatatggtcaccctgatgggcggcaggggttgcaaatgggcattgctttgcccaagtttttactaaatattgatggtgcatctggtgggataatgcttcttggaatagtcggattttgtatattattgcctttgatgatagctgttatttatttgtcaagatcgtcaaaatatactggaaactatgtcatgcatcaaactctgtccacttactactactttatgaagccatctcttgctccaagcaaagttatggatgtcttcatcaaggctgcagaatatatggagatgccagttcgacgcagtgatgatgaaccccttcaaaaattgtttgtagctgttagaagtgagttaaatctggacttaaagaacattaagacagaacaagcaaagttctggaagcagcatccatccctagtaaagatggaactgctgattcaggcacatctcactcgtgagtcatttgctttgaccccagcacttcttaaagattacagacacatgcttgaacttgcacctcgtcttttggaagaactcgttaagattgcagttctaccaaggaatccccatggttttggatggctccggcctgcaattggtgttattgagctttctcaaaatattgtccaggctgttccactcagcgcacgaaaaactagtggaggtaactccgaaggaatagcacatttcttgcagctgccacatttcacagaagcaactgtgaaaaagattgctcgcaagaaaatccgtgccttccaagaactttgtgacatgtctgtggagggtcgtgctgcattgctcacacaagttgctgggctttctgaagaacaagttcgggatgtggagcttgtactggagatgattccttgtattgaagtagacatcaaatgcgagactgaaggtgaagagggcattcaagagggtgatgtcgtgacaatgtatgcttgggtctcgctacgacggcgtaatggactgactgctgctcttccccattgtcccaacttcccattccacaaggaagaaaacttctggctgcttctagccgatgtggcatcaaatgatgtctggttgtcacagaaagtgagcttcatggatgaggccactgccataactgcggcatcaaaagctatacaagatacccaggaagcactaggtgcaagtgcaaaggaaataggaaatgcagttaaggaggcagttgacagggtgaagaagggcagtaggctggtaatgggcaagttccaagccccagcagagggtactcacaacctcacctccttttgtttatgcgacgcttggataggctgtgacatcaagaccagcttcaagctcaaggtcctaaagcgcagccgtgctggaacaagaggccatgtgcctgaagaagggtcagcagcagccgtagaagatggtattgaggacgaagaggaggaagatgaagaggagtatgatgactatgagagcgagtacagtgatgacgaggaggatgagaagaacaaggggaaagggcaggggaaggtcgtgaacggatcggcccatcaaggggctgaatctgatatagattcaggcagcgatgagtgattctacactgtattatgttgagaaaatcatagaacttaaccccatctattttttttaatttgaacatatccctattaagttgcatgcatcaatctaacccaaaagtttaatccgataagagttgtgcaattcacttatattatattccaaaaaaaaaaaaaaaaaaaaaaaactcgagggggggccc

SEQ ID NO: 127039 - DNA, 443 bp, Zea mays
  Clone ID: MRT4577_47325C.1
cgccagcgcaagcacatttcagagggggaggaagccccatagcaagagagagcgcaaatctcccgatttcgttttcgcctgaaagtctttggtagcgtggagacccaaaaattttttttcttttgtgcggagacaggtgaaaggaggaggatagctcgcgtccattggatctgaatcgtatggctgagagtaaaaaggatgaggtggaccgatcgcaggccacgtttccttccggctttaatatataggaaattagtacaaattaggttacatttgtagcataagactttggtctatccgtatcaacaaatgtgctcaaatgaaaagttttttattttactttgtaccttaattaattcaagtagttgatgtggttggatatattcttcggccccgattaataatatatatgtgattgatgcccatcgtgtcgtttgttgtat

SEQ ID NO: 127040 - DNA, 296 bp, Zea mays
  Clone ID: MRT4577_47326C.1
tgcattgcaggagcaggccgcccccaccccggcatatgtccttggatcgccaagcgacagtgtcatggacggacaccgggaacgtacactcgctcccacggggttcctccgtttgtcttggcaggagtccagtagacgcgggaacttgcttggtttagcatctctgcttcgcctgtaatgcgcccacttttgagcttcgcggtgggcagcccgtggaggacgaggagcggtgggtgcagtgcacacaccaagccagagggttaactgcacgagtttatcttatttctttctttctg

SEQ ID NO: 127041 - DNA, 782 bp, Zea mays
  Clone ID: MRT4577_47327C.1
tgtgatgaaggtggaactaaaatagttgccacgctcctgcatcaatcatggcaaggacaccgaggacgacaattttacaccttgtcctaaccctctgcatcctctcggctcaaaacacgccctctttagcttccagtgcaatcgatgaattccttggctgcctctccgcggacatcccgtctcgcctcatccagaccccggcaaccccgtcctactctgccctcctgctgtccaccgcctggaacctccgctacatcctgccggacacctcgaagcctatagggatcatcgcggccaccgagcacgcccacgtgcagaccaccgtgcgctgcggccgccgccacggcgtccgcgtccgcgtgcgcagcggcggccacgactacgagggcctctcctacgcctccgtccacctccacaaccgagcccttcgcggtgctggacctcgccgctctccgggcgatccacgtcgacccggcgcgtgctgaggcgtgggtcgagtccggcgccaccgtcggcgagctctactacgccgtcggcgccgccagccgctcgctcgggttccccgcgggctcctgccccaccatgggcgtcggtggccacctcagcggcggcgggttcggctcgctggcacgcaagtacggtctctccgccgacaacgtcctcgacgccgtcgtcgtggacgccgacggaaggctgatgaacaggagcaccatgggggaggaccacttctgggctctctgtggcggaggcggcgagagcttccgcgtggtgctgtcgtggaa

SEQ ID NO: 127042 - DNA, 202 bp, Zea mays
  Clone ID: MRT4577_47328C.1
ccgccgccatgtctaccgcccagtcactcaaatccgtggactacgaggtgttcggaagagtgcagggtgtttgcttcagaatgtatacagaagatgaagctaggaaaataggagtggttggctgggtgaagaataccagcaaaagcaccgtgacaagcccagtgcaggggccagaagacaaagtcattcccaattaggcttt

SEQ ID NO: 127043 - DNA, 342 bp, Zea mays
  Clone ID: MRT4577_47329C.1
gacgatgacgatagccgccgtgctctgcctgctcctcttctctggccgtctcgccggggcggataagactttccgcggacgcagaggcggaggctacggcgggttggaggccggtggccgaggcggcggcggctattccaccccgagcgaggcggcgccatacacgcctgccgctggggagacgactaccccttcctcaggcggcggttactccactgctagcgtggcggcgccatccacgcctgccgctgaggagacgacgacgactccttcgccaggcggccgtggataccgcggtgcaacccgcaaggcttcctcaggcggcggctgactggaccccga

SEQ ID NO: 127044 - DNA, 1386 bp, Zea mays
  Clone ID: MRT4577_4732C.1
aatacatgcatgtaacatccatgttactatatactagtacaaaataaactacaatacacacacacatactcctagctagctatatatatattgccatgttgtttgcatcgaccggccgggccgggcattcgttctgagaacaagaaagcttacattatgctaagcaattgcggaggattctttggaaccggccgcgtcgcgtagatgacacatcaattcattggttgccatgtcaaggtcgagccaaatgtcctcttgtgcgcgttgcgaatgccgtctccatgaaagattctttgtttaggcgtgtggcgtgtccacgaccacctgcggtagctctcactacaacgacgtacgcgatgacagcatgctcgcatgcccgcaggtgtccaactggttcatcaatgcgcgggtcaggctctggaagccaatggtggaggagatgtacgtggaggagatgaaggccgagggccaggacggcgggggccagcagcaggtaggcgtcgccgtcgccaacaaccctaaccctagcagcgccggccacgcctccgaggcggctgaggacgatgggcgcggggacagcggcggcggcgccgtcgtcgaccggaagccgacgcgggcgcagctcctgcacgacgccggctcgctcgcctcggtcgtcaacatcggcggcggatcgcgcgcgggattcggcatcatggaccacctcgacttcgacgcctacggcggccaccacgcaggcgccgtgtccctcactctgggcctgcagcagcacgactcccacgccgacggcggcgccggcggcgtcaacatcgcgttcggcgcgccgccgcccgcgcaccaccacgggtacctgttcgctccgacggcggcggcggcaggccatcagatgggcggcggcgtgcacccgggactacaccaccacgtccagttcagcggcgccggcgccggcatcgacggcgaggcggcgcacgggcaggagcactaccggggcctgcagggcggcggcgggttccacctcctgcgtgacctggccgggtgatcgatctgctccatccacggcccgtgcatccgcggtcggccgcgcgcgagctctagctgcgactccgagtgagctgagcgatggggacgtcgtgccggcgcctagctagctaccgggtgtccgcgccggattcatggcacgcactcgatcgcgcgtgcgctcatccggccacagcggcgctgtgtacgtacgcaccggatttgtttggcttgttgcttgcctggctcgtgccggtctccatcggtctcgatcgccgccggcggcggcttggccgggcccgggtctagctggctagctagctgccctagttatacataatatatgtatttgtagcgtgtacagatcgg

SEQ ID NO: 127045 - DNA, 415 bp, Zea mays
  Clone ID: MRT4577_47330C.1
agcttcaagcagtgttagttgcaacagagctactagtaagtagcacacaacaacgacaatggcttccctgaaggcctcgaagcccgccggagttgcagcgcagggcaaggagccggcacccaagctcagcgagacggcgacgaagccgtccgccgccaagagcggcggcgtcaagaaggctgagcagaagccccgggaaaccaaaaagaaggtgaagagcagcaaaccggcggcagccaaaaagtgacagtgtgagatgtagtggagcttcttcgatcgcatgagggtctccatgctatgttattatgaattataaatccagtccttcctttcttgtgtcttccatgtgacggtgtgtgcgtccctatgtgtgatgactgatgaattaatactacaaataagacgttgtaattgt

SEQ ID NO: 127046 - DNA, 265 bp, Zea mays
  Clone ID: MRT4577_47331C.1
ggaggtcgctgcggctgtgggaaatgctggcgcgcgctgcgcgacgcacttgggcccttttgctgaggggctctctactggcttctggccgcgctccgcgtcgcgcctcctctggattgccccgaaacaccgtggtactgttcgtgccgcagcaggaggcctgggtggtggagcgagtggtccgattccagcggatcctggatcctggtttgaacatgtcatccctgtgttagaccggatccgatatgttcagagtctcaaggaa

SEQ ID NO: 127047 - DNA, 397 bp, Zea mays
  Clone ID: MRT4577_47332C.1
attcggctcgaggctagcgctaatagctttgtaggcatggccaccgccgccgcggctagccttcttaagaactccttcgcgggctcccggctcccggacggcacgcggaccacaccggcgttcctcgtggtggccaccgggccgcgcggggccggcgcggggcccatctgcgcgtacatgtacatgtcctcctccaacccgccctacgacctgacgtactgccggctcagccccatcaaggagtccatggtgttccgcgagatgacccgtcgatacatgacggacatgatcacctacgccgacaccgacctagcgatcgtgggcgccggctacgcggggctgtcctgagcggaccagctatccaaggaccccgccgagagcatcgtcatcgaggagc

SEQ ID NO: 127048 - DNA, 890 bp, Zea mays
  Clone ID: MRT4577_47333C.1
gcccgttctctgttggccaagcttctgctcctgaacttaacatgatctacaagacccgcggcataatcttacagagtagatatatcgtatattaaatacaaactaaactaggccattattcacagctcgatccatcaacatgccctggctccactccaccctacctaccgtctcctactctcctccaacacacagcaggtcgaccagtcgtcgtccggccgtcagtactcagcagcatacatgccgccggtgatggagccgaacacaatgtcttccagatcgaacgtgtcgtcgtaccccaagtgcgccacgcccgagaggccgccgccgccgaaccagtgctgctgctgctgctgcagctggaggccagacgtcacgtcgccctggtccgggccgggcgtggcggtccgcaccgcctcggccgtggcagcggagctccccgccggggtgaggctgctaagcacctcctccagctccagctcctgctcccgctcgccgccgccgccgccgccctccagctgcctcgggggctccgcaggcagcacggcgcccttgtgtccggcctgccggttgctggcgttggccgccgcgaagctgcgggaccccgggtggaggtcgtcgtggctgcggtggccgggtcccggcaggtgtgcgcgccgatgtaggtgaccgtgtaggcgtccgggtcgtcgtcgcggcgctgcacctgccgctgcgccgcgcactgctggtcgtgcttgtgcgtgcaccggaagtaggccctgcgccgacgccgagcatcatcgacggaaatcagtacttctggttgggcatattcggttctactatgatggatcgtcgatcgatcgatctcgatcaatgaaccccggccggcctcgaggtacccaatg

SEQ ID NO: 127049 - DNA, 200 bp, Zea mays
  Clone ID: MRT4577_47334C.1
caatgctatttcttcttttctaatcttacaatatgagtcatgtcagagtcagttgcatcacactaggcactaacggagagggagccatgaccacacttggcagctccagggcgggcagggagggagctggccatttgaagagagaaggaggttgtcttgctctatagctacaggacacaaggaacgcgaagcgcgtaggg

SEQ ID NO: 127050 - DNA, 633 bp, Zea mays
  Clone ID: MRT4577_47335C.1
gggaagcctctgcagcacaggccagccgaacaccggcaagtcaactcttctgcgcgtcccattcacgacttgctgatatctttttgctttgcctgcatccggatctccttctccaactggtctctcattcagcccagcttcgcctttgacccgaggaacaagacagatcctcaggagaagatcgcagttctcacaattctaatcaggaatattcttgattccatggctggcacaacaactgttgtaggatgggttgtttcacctattcttaggaaaatgctttctctggtgcagtcctatgtatcaagtcagtacaactggaagtctaatatggtgtccgacctcaagaatttggaggctacattaatggaggtactcctggtagttgatgaagctgaaaggcgacatttaaaggacaggaatcaggtagcattgttgtgccaaatgagagaagcagtttgtgacacagaagatgtgttagataagtttgactataaacttataagagaaaaagttgagcaccaaagcatggctaggagcatagttgcctcttcgctttctcttggtaagcgtttagttggccttgacaagttgagatcagaactacatatggttatcaaaagcatggccaga

SEQ ID NO: 127051 - DNA, 722 bp, Zea mays
  Clone ID: MRT4577_47336C.1
cattgggtacctcgaggccggccgggctcgctccgatgctcgcctcgagacatccctaagcatatcagttgatttatcctctgtagccatgtctaagttgcagcctgattctgtcatggatgccatctccctcattgttgtggacggcttgcgttaacatcacgaagtctccctgtatcactgcgctagactctcccattcggtctcgcatgaattatgatccgcacaaagacaagcgtctcctgggatctgcccagtctgccccatatgccctcgtacccaagatgaatgtgtgcatgcttgtggcatgcccaccatgttcaggcatgccgataatatgcgacttgactacatgcatgttgaggctctcaagagaatgaacaacacacgataaccttggtaagaggcttgacaagaagtaccatgctttcttgcgatcacagggcatcatcaagcacatgtccccgtctccttggtgctggtctcaacaacgcacgctagttcccgaccctgactactcaccaggaatccctcgagtccgaggtgaacgagactatcgcaaccgtcaagctccagctcaagaaggatctttggcatgggctgttgactggtgacaacttggacatggacgtacaagcagatccagcagatcatccacatgaacgtcgacttgcttgtctcccttctgaaacaagaactggcagaatgtgagatgcctctac

SEQ ID NO: 127052 - DNA, 244 bp, Zea mays
  Clone ID: MRT4577_47337C.1
tcccgcgtgtttttttttttttttttgtttttttttttttttttttttttttccaaatcaacaaaccttcattccggaaagagtacttaaaacataaccgcataaaaattctcatctctctcaactactcccatactttctcacctcccaccccctatacaatacacatcccctcccctttcacgacatctccataacttttactccattatctcattacaaacccccttattagtcccctaat

SEQ ID NO: 127053 - DNA, 467 bp, Zea mays
  Clone ID: MRT4577_47338C.1
cacaatcattcccatcccaccttcttgcgagcacagagagtgtgggagagcaggcctccgaaatcgttgtccgcagagctaaacttgcacgggtgtgtgggcgatcaggtttttggggagcgtactcgtgactgctcacttcgtccgtttggccaacgctgatcaggttcctcgtcactggcgctattcgagggactgcactgcgtacatctgtctgcatcgactgcatacgactacattgaacatacacatgagatgtctcgtgtgaatggagccactgttgccttgagcatcggtccctccgcacggtacactctgttcttagtatttgtgcatattttactgttgtttactgtttatgtgagtagtgatacacatatgcacatatatatcgtcacatatatcactgtgattttctggattaaattaaaactgaaaatgcatatttctctaacagtttgtacttc

SEQ ID NO: 127054 - DNA, 357 bp, Zea mays
  Clone ID: MRT4577_47339C.1
atagatgctaaatttattttatttttttttagacaccagggcccacacaattttagaaaaatttacaaaccaaaacttccaaaaaaaggggaaaaccgggaaaccccaaaaagaatcaaaccgcaacacgccgaaaaaaaaaaaccttatttgacacacttggcccggggaaaaaactcccaacccccgttttttaaaaacttctaaaggactcataaaagcccatctccaggggaataaacctggaaccccaggccgtaaaaggccgcctttgacacacggggcggggaaaaaaaaggagtgataaatgcccacctgccccgtaaaagaaggggaaaaaacaagtgggggaaaaac

SEQ ID NO: 127055 - DNA, 2219 bp, Zea mays
  Clone ID: MRT4577_4733C.1
ccgccgcgcttttgctgatccgtgtgctctgtgtgtgtgtgcgggcgcgcgcgcgcgcttcaacttgaagaagcgcgggcgatcaagatggcgcacgaccccagcctgggcttcgcggactacttctcggcggcggcggcggcggcggcggcgggcgccacggcgatggacgacgacgtcggggcgtcggagctctatggcctgcatgccgacgacatggagttcctcggcatgcgtgggctggccgccatgccccccgccgcggcacaccaccagcaccaccaccatcacggccacagcaaggccggtgcgctcctcgacgacgacgacgcgggggtggggccagacgtcagcggctccgcggacgacgccaccatgcgcttcctgagcgagcagcagcagcagcagcagcaccaggcgccgctgtcgctgtcgctgtgccggccggacgtgacgacgacgttgcacgagcagcaccacctcgccggcggcggctcctcgtcccggtaccatcaggagcagcagccggcggcgtgggtgcagcagcagcagcacgactactcgccgtcgccgcagatccaggccatggacgcgctggagctgcagcggctcaaggacaagctctacatcatgctggaagaggtggaccggagataccggcggtactgcgagcagatgcgggcgctggcgggcgggttcgaggcggtggccggggagcgcgcggcggcggcgtacacggcgctggcgtcgcgcaccatctcgcggcacttccggagcctccgggacggcgtggtggcgcagctgcaggcggcgcgcagggcgctcggggagaaggacgtggcggtgcccgggatgacgcgcggggacacgcccaggctcagggtgctcgaccagtgcatccgccagcacaaggcgctcacccaggccgccggcatgatggagagccacccgtggcgcccgcagcgcggactccccgagcgcgccgtcaccatcctccgggcgtggctcttcgagcacttcctgcacccgtatccaagcgacgtcgacaagcatatcctggctcgccagacgggcctctcacggagccaggtgtccaactggttcatcaatgcgcgggtcaggctctggaagccaatggtggaggagatgtacgtggaggagatgaaggccgagggccagcaggacggcgggggccagcagcaggcaggcgtcgccaacaaccctaaccctagcagcgccgcccacgcccacgcctccgaggcggctgaggacgatgggcgcggggacagcggcggcgcagcagccgtcgtcgaccggaagccgacgcgggcgcagctcctgcacgacgccggctcgctcgcctcggtcgtcaacatcggcggcggatcgcgcgcgggattcggcatcatggaccacctcgacttcgacgcctacggcggccaccacgccggcgccgtgtccctcacgctgggcctgcagcagcacgactcccacgccgacaccggcggcgtcaacatcgcgttcggcgcgccgccgcccgcgcaccaccacgggtacctgttcgctccgacgacggcggcggcaggccatcagatgggcgccggcgtgcacccgggaatacaccaccacgtccagttcagcggcgccggcgccggcatcgacggcggcgaggcggcgcacgggcaggagcactaccggggcctgcagggcggcggcgggttccacctcctgcgtgacctggccgggtgatctgctccatccaccaccgcccgtgcatccgcggtcggccgcacgcgagctctagctgcgactccgagtgagctgagcgatggggacgtcgtgccggcgcctagctagctaccgggtgtccgccggattcatggcacgcactcgatcgcgcgtgcgctcatccggccacagcggatttgtttggcttgttgcttgcctggctcgtgccggtctccatcggtctcgatcgccgccggcggcggcttggccgggcccgggtctagctggctagctagctgccctagttatacataatatatgtatttgtagcgtgtacagatcgggtcgcgatcgagcagtttggacgcgcgcaggtgcagctagtactagtagctagcccgccggaactgcgtagttgatcaaacacgcattgcatgcaggttaattgcattgtttatcaaattcttgaaggattcgacgacgtacggccc

SEQ ID NO: 127056 - DNA, 420 bp, Zea mays
  Clone ID: MRT4577_47340C.1
acctacgcgtgcgcaagttcgatttataagccctacgcacgggctctgtgtgcgaaggcagaagctacctttattggaggaaggaggagaacatccagggagggggctgtttgtaccagccgccgatctaatggcactgcggatgaggcacccgacgtctctggactgcagcgaagcggacaaagaccacctcccggggtactgcaggtcggcgctctcggtgttcaaggccaatgaggagcatatcgagcttcgcaagattgaagtccgggagaaggtgttcgcccacctcggacgcgtcgaggaggagtacaagcgactcgcctttatcaggcatgagctcgaagggatggcctaccctacaaggaaggaagtggagtctataaagagctgatcgacactgtgaaccgtcagctcaag

SEQ ID NO: 127057 - DNA, 2343 bp, Zea mays
  Clone ID: MRT4577_47341C.1
cctcgagggcccggcccgggaaaaaaaaaaaaaaaaaaaaaaaaaaaaaaaaaaaaaaaaaaaaaaaaaggcggccaattcggcacgaggaacgcgatctgtgcagccctggagacttgggatttggccctcgggaaggggcaggtagtaacgtaggctggcgctgcaggctgcagatcaaaaggctctcgcctcggcttggcagtcggcactccctctccaccgcgctgcaggggcgacgcaaggccgagcgctcctcgatccagatccaaggtaggagatggctctcacgagaattggcctcgccggcctcgcggtcatgggacagaaccttgccctcaacatcgcggagaaagggttccccatctcggtctacaacaggacaacctccaaggttgatgagaccgtgcagcgtgccaaggtcgaaggaaacctcccagtgtttggtttccacgaccccgcgtccttcgtgagctccatccagaagccccgtgtcgtcatcatgctcgtcaaggctggggcgccggtggaccagaccattgccacgctcgcggcgcaccttgatcagggggactgtatcgtcgatggtggcaacgagtggtacgagaacacggagaggagggagaaggcgatggaggagcgcgggctcctatatcttggcatgggcgtctccggaggagaggagggtgcccgcaatggcccgtccttgatgcccgggggctccttcgaggcatacaagtacattgaagatattcttctcaaggtggctgctcaggtacctgacagcggcccgtgcgtcacatatattggcaaaggtggatcaggcaacttcgtcaagatggttcacaatggaattgaatatggtgacatgcaacttatcgccgaggcttatgatgttctcaagtcggtgggtaagctcacaaacagcgagctgcatcaggtgttctctgagtggaacaagggtgagctcctcagtttcttgattgagatcacggccgacatctttggtatcaaggatgacaagggtgaaggctacctggtcgacaaggtcctggacaagaccgggatgaagggaactgggaaatggacagtccagcaggctgctgagctttctgtagctgctcctacaatcgaggcgtccttggactccaggttcctcagcggtctgaaggacgagcgcgttgaggcttccaaaatcttccaaggtgactactccactggcctaccggtggacaaggcacagctgatcgaggacgtgaggcaagctctatatgcctccaagatctgcagttacgcgcagggcatgaacatcatcaaggccaagagctcagagaaaggatggggcctcaaccttggtgagctagcgaggatctggaagggagggtgcatcatccgtgccatcttcctcgaccgcatcaagaaggcgtacgataggaaccctaaccttgccaacctcctcgttgaccccgagttcgcccaggagatcatagacaggcaagctgcctggcgcagggttgtctgccttgccatcaacaatggcgttagcaccccaggcatgtctgcaagtctggcctacttcgactcgtaccgcagggataggcttcccgccaacctggtgcaggctcagagagactacttcggcgctcacacgtacgagagggttgacatgcctggttctttccacaccgagtggttcaagattgcgcgcaactccaagatctgaacatggcctcgtgtttgcatatgccagtatgccaccgtgtcgagtaatcaatcatattactgcttgcagggaggaactgtgtttgatttttattttccatgcgcaatgcttaatttaggtcaggaagtccaaagtctctcccattgttttcctgtaagagctaagcagtaccagatggagaaccttatatttgctggaacatgaataaaagcatttgacatgcttgtgtttaaaaaaaaaaaaaaaaaaaaaaaaaaaaaaaaaaaaagtactctgcgttgttaccactgcttgttgatgccaagacagacaagcctgcgccaggcagcttgcctgtctatgatctcctgggcgaacttggggtcaacgaggaggttggcatgcctggttctttccacaccgagtggttcaagattgcgcgcaactccaagatctgaacatggcctcgtgtttgcatatgccagtatgccaccgtgtcgagtaatcaatcatattactgcttgcagggaggaactgtgtttgatttttattttccatgcgcaatgcttaatttaggtcaggaagtccaaagtctctcccattgttttccagcaaatataaggttctccatctggtactgc

SEQ ID NO: 127058 - DNA, 189 bp, Zea mays
  Clone ID: MRT4577_47342C.1
ttcagatcgcgagcgccgcccttttattattatttcgcagaggattaaaatgatttattgttttcaaagggaaaaaacccaaatggctatatcaataaaagggtctcccagaaatgccatttcatccaaggggaaaatttgaaatatgaacaaattgctccgaaaacaggctgtccaaactcatcatga

SEQ ID NO: 127059 - DNA, 382 bp, Zea mays
  Clone ID: MRT4577_47343C.1
agggaaccagtccgaggggggtttttcaagtccccggccaatacatcactaatggggataatggttttttttcataaaaaaaaacgttctactcaatcctgtttctcaacatcaatccaacaacctaaacccccttcgagggccatagatttattgacactggcaaaaacaagagccgctaactttgaaacaagaacttacacaagctcacctaatgctgcacaatacaaaacctccctgtgctctaacactaaaagccccagatctgtaatctgctaaaggctctctacatgctctgcttgaaccggaccccatatatatcatccagaaccttcttagtaatctcacggtcttccttatgtcctgtgagtatccctccaat

SEQ ID NO: 127060 - DNA, 2799 bp, Zea mays
  Clone ID: MRT4577_47344C.1
cctgcgggcgtcgggactctgatcctttattcttcacctcccaaccaactttctcagatttagccgtgcctagctcaccgtatcaccatctctggacgcatccggcccgtttaccatcgacgcgtccttctcacgtacctgcttctccgcgcttcccgctttgcaccccagccccattatgctgatagcaagagcccggcgctgggttttcatctcccgttctccccgcgtgatctgtctcgtgcggcaaggcgtacgcgtcctttccctcccgctctaaggcaacaggcgccgtcgccctaaggcaggtgcccaggtattcgtcggtcccttcgccaggcctccctcgcttgccgccaacgagcacccactagactgtagactacaattgcatcctgaagaataaaatggaccaacatgattccatggctgactcaccaaggaggcggcacaaccttttgcgtgacaaggtccaattggtgaaaaggaaagattcagatcgctatgagatcgtccgcttccatgatccattgtcttttgagaaaggcttctttgttgtgatccgtgcttgccagcttttggcacagcacaatgacgggataatatttgttggtgttgctggcccctctggtgctgggaagactgtgttcactgagaaggtggtcaatttcatgcctgatgttgctgtgatatcaatggacaactataatgacgcaactcgcatagtcgatggcaattttgatgatccacgtctgacagactatgacacactgctggaaaatatacatggtctgaaggaaggaaggtcagttcaggttccaatatatgatttcaagtcaagctgccggactggttatagaacagttgatgtccctagctcccgaattgttatcattgaaggtatttatgcactgagtgagaagttacggccagtgatagacttgcgtgtttctgtcactggtggtgttcattttgacctagtcaagagggttttaagggatatacagcgagctggccaggagcctgaagaaataattcatcagatctctgaaacggtttatccaatgtacaaggctttcatcgaaccaggtttggagaccgcacatattaagatcatcaacaagttcaacccattttcagggttccaaaatcctatgtacattctaaagtcaccaaggtctctaggacctgagaaaatcaaggctgtgcttggtgatgatcatacggaaagcaacgaagaaacttatgatatatatctgcttccacctggtgaagacccagaagcatgccaatcttacttgagaatgcggaatagggaagggaaatataatctaatgtttgaggaatgggtgaccgacaattcttttatcatatcaccaaggatcacttttgaagtcagtgttcgtcttcttggtggtttgatggcattgggatatactatagcagctatactgaagagaagcactcgtgttttttctgatggcaaggcaactgttaaaattgattggctggaacaacttaacagacaatatatacaagtgcaaggaagagatcggctttatgttaaatctgtagcggatcagttaggtttggatggttcttacataccacgcacatatattgaacaaattcagctggagaaattgattaatgatgttatggcgttaccagaagatttgaagacaaagctcagcatcgacgatgagctggtctcaagtccaaaggaagccttttcccgtgtttcggctgatcggagaaacaaacttatgaagagtggcctatctcaatcatattcaacacacggagacaaaaatattgtgaaattgagtaaactaacagaaaccaataggaggtttggtggagggcgggcccttgaaccgcctgctatcaaccagggtgcaatcacccagctttcagaacagatatcaacattgaatgaaaggatggatgagtttacctctcgagttgaagaactcaactcgaaatttacagtgaaaaaacatttgcccagtcagcagaacttagctcttccaaatgatgcttgcaatggttccacgcctacaaatctctttgtctctcatttaggcaatggtactctgatacctcattcttcatcatcaaaccaactttcaaaggattccccgatgatagaagagattatgaacataacaagaggtcagcgccaggttatacatcagctcgacaatctgacaaatctgcttcacgagcatttggtcttaacacgccagactaataataccgccagcaggaaccgggtgctggatagcgacacactcatctgtccacttatttgcctgactgttgccagtatcggttacttcatgtttaaaggtctcagtaggggctgaccaaagtgagttggcccaaacatgtgctccgaggctcaccaccaagttttggcagaactggagctaaaggaagacagttcttgcaccgtttacatcaggaagatcatatctaacagcttacggtcttattaagacaggtaaacccatataccagcacatggaacaaagctttcgcttttcagggagttattactcccaaacgcagaaaatggtgtaccagaagcatacacttctgtaacaggcactggcagttcccagtgccaataaattttggaggttaaaataatgctcagataatgtcgaagaaattatgagagatctataagtttaactgaacattgtcgttgtctgtgtcgtgatttctgagtgcgagcactatctcatgatgccatctgaattcacgattctaaaaaaaaacccccaccccccc

SEQ ID NO: 127061 - DNA, 264 bp, Zea mays
  Clone ID: MRT4577_47345C.1
ccccaatttaaaatccgtttgacaagacctgcagttgaatttttaaattttaaattcctggggcctactttaattgaacggggaactgttgccactaatttaaaccgttttgcaattccaatcctttaattaactaagggcgttgggaattaataattaaaattgtttaattaatgttattaatttttttaaatgggtctatttacctactatgtattattatcgaattaagaggataaaaaatataaggattatgaatatatg

SEQ ID NO: 127062 - DNA, 240 bp, Zea mays
  Clone ID: MRT4577_47346C.1
ggtcgtcctttttttttttttttttgctccagggctagcggataatgcatccgaggaagggtggtccctccctacacggaagacatacatggtgcccggtggagactaatcagccatcctaccctgaaacaagccacaggccatccctgcatcttgctaggattcctaatatcagcaaggaagtgcattatttaatactctcactcctagtccataacaaaaagccgggttcgggggaac

SEQ ID NO: 127063 - DNA, 206 bp, Zea mays
  Clone ID: MRT4577_47347C.1
aattactcacaaaaactcgcatcttgatttaagtttgaaatccggcaccagacggacaggatcgacggccgagccatacccgtcgggaagccaagaggacgttcacacgaaccccaggacactcaggcgattttttttacgacggggttaaatgctgatgcatttgacaggatctaatttactcgccgcctctattatattgagta

SEQ ID NO: 127064 - DNA, 352 bp, Zea mays
  unsure (1)..(352): unsure at all n locations
  Clone ID: MRT4577_47348C.1
acccagcgagcggggcggcaacagnncacnngcgcagggccccncccagagaaacaaggccccgagggccangacnacgccaggcggacggacacgaacncagcaggggcagccaggaggggggggggggcngacngaancagggngaacccacgcgccggagcgccgggggncacccagnnnnncgggnaacgggcangaggcggaaggccnncgcgccgngcgnccgcaccccggcagggcncaggccgggcgacaagncgnaagcacgggcagagcngcccgcggcgggaaagggccanccgcgcacgaagccacacaacaaacgaggccggaagcgaaagggggaagc

SEQ ID NO: 127065 - DNA, 285 bp, Zea mays
  unsure (1)..(285): unsure at all n locations
  Clone ID: MRT4577_47349C.1
ggggtcttatttcattctttggattttgtgcttttccgggggagggggcccctccaaaagaacaaaaaccagggcgacgnacgcccttttttgttgctggcttgtgtcaagcacacccttttacatgaggctgtccttccgttaaatctaccaaatggtccttaaaacttaaggccataaaactagtgacagggtccgacttccccacgaaaagatcgaaggttgtttatgggggggggaactgggcgctttcgtttaccgccccgcgctaaaataattggtttt

SEQ ID NO: 127066 - DNA, 405 bp, Zea mays
  Clone ID: MRT4577_4734C.1
ggatctgaagcattgacgtttctgggcctacaaaatttcagccgggttcaggctttcaggggggaaaaacataccatactggttgccatacactgggtggaaacccaaaactgggaaaagcctagcgtacaccattgggtgtgggtgtgtgggggggggggcaacattggcttaagccactctaaatcgccaagccttcgccatttttttcccgagggtttgagcagcaactgcaccccccgaggggagcaaaccacacactgtttgccgcacccttgaaaccattactcggggcctcagggccctccggacacaatttgctgccatttccttggaaaaaactacggggcggggggggactttttttccgggcaatgggtgccttccttgcatttggctttggat

SEQ ID NO: 127067 - DNA, 209 bp, Zea mays
  Clone ID: MRT4577_47350C.1
tttgaggcgcatcatacgacgcgttcgggcagccaggttacctgccggtgatcctgttccttccagcctttgaagtcctttaaaagattgcctaacttttcctccccgaatgccttttggtcacttcaatgaaggaccggattaaccctatcccataccagtacgttattgctcgacaagggaatgagaagattgatagtattctaggc

SEQ ID NO: 127068 - DNA, 575 bp, Zea mays
  Clone ID: MRT4577_47351C.1
ccggccggggcgagcgcatctgctcgggcttccccgccccgtccaagagcagcgccgtctcgtcgccatgggtctgcaggaggagttcgaggagcacgccgagaaggccaagaccctgcctgccaccacgacgaacgagagcaagctcgtcctctacggcctctacaagcaggccaccgtcggcgacgtcagcaccggtcgtcctggcatcttcagcctgaaagagagagccaaatgggatgcttggaaggctgttgaagggaaatccaaggacgaagcaatggccgactacatcaccaaggtgaagcagctgctggaggccgccgccgcatccacctcctaggctactcaagggaaaacaaaaaccatgatccgcagtcgcatatacgtatacatgttgtcatgatatacgctcgccaataaatcttatcattgttgtactgcttggtatggcttctgatgccatatatactcatcacccttcaaactaaggctgtaaactcttgcgaaaaaaaactggatgtccctgtgtggtactagcatatgctgaaaaaaaaaaaaaaaaaaggccccta

SEQ ID NO: 127069 - DNA, 141 bp, Zea mays
  Clone ID: MRT4577_47352C.1
tatgtcatatatcgatcgtcagtgtgacggcatggttgatctaatattctcagtgcaagctatctgatcctgcagtgctgtgaccatatgcaacacgctgttggagcgtggacgtgaattcctcactcaaagtgacatggt

SEQ ID NO: 127070 - DNA, 648 bp, Zea mays
  Clone ID: MRT4577_47353C.1
attgggtacctcgaggccggccgggatcccacccgccgccggcgcgatcaagatataaccgaaggcgaggctccgctccggtcaccaacgcctacgcgcaggcgtgcgaattagaaatacgatgacaaccacctcatgaaaaaggcaccccttgcacccatctcgtcaccgaccgacagcatgcctctccggtccatcatatctttgcatccttcaacgacgccttacttctatcactgattccgctgggaccctaaactcctgccgtccacatcaccagtcgcgatgataggtgaaggctgaccgccacacatcgactccttaggctgcctcatgcttcgcatgctcaagacgtgaaacatggacttgcagggagcttcgggattactgcactgaacattaagatacgagcctccggatgctacccgacaaatacccctggacctgaagcccaatctgacctcagaccgcttgatcgtacctggatagagaaatacgacgcattgaaagtacctaaaaccgtgaccaactgcacagctgtcataaaagaactggataggagctgaactaagttgcaagcaactcgtgtgcatggcatatgtcgcatcgtgcccgctgaacattataatagctagccctctctgacca

SEQ ID NO: 127071 - DNA, 106 bp, Zea mays
  Clone ID: MRT4577_47354C.1
gcctcgagtcttgtcgcggcatctccaagaaggatgtgtttagtctgaggcgggaaatccacattcccagcacaggctctgtggagatggctgtggcagtgttcat

SEQ ID NO: 127072 - DNA, 446 bp, Zea mays
  Clone ID: MRT4577_47355C.1
caagccagcagcacggagcaatcttataataacatccattatcatcatcatcttaggtagctcctggatcaggggagctcgtcatctttggaacggacgcgaagaagccattcctagtagttggagttgtctcagttgaaagctctgactgactgcagctgatggaaccaaactaaagcacagagctgacctcaagctggacaggtgcacactttgtcatgatataggagtcactccaaagcacaatgtaatcatggacataccacttaccatggacgtcggtagaatcgtcaaaggcggacagctgattcagttcgagaaggaaagctatgcgagaatcggggtgatgccccgctatggcgacgcagattcagctgtctggtttgatgtagaaccgttctgcatgttccatcttgtgaactgcttcgaagaaggcgacgaggtcg

SEQ ID NO: 127073 - DNA, 623 bp, Zea mays
  Clone ID: MRT4577_47356C.1
ggccgctgagcctggttgccttccggtcggcagcttggcttgctcgctcgggctcgcccgcgacgacggcgtgcttgctcggggcgacggcacggagtctgcgcgcttgcctgcggcagcggctcggcctgctcgctcgggctcgcccgcggcggcgtttcggcgtgcttgctcggggcgacggcacgaagtctgcgcgcttgcctgcggcagcggctcggcctgctcgctcgggctcgctcgcagcggcggttcggcgagcttgctcggggcagtggcacggagcatgcgcgcttgcctgcggcagcggctcggcctgctcgctcgggctcgcccgcggcggcggttcggcgagcttgctcggggcggcggcacggagcctgcgcgcttgcccgcggcagctgctcgggctcgcccgcggcggcggttcggcgagcttgctcggggcggtggcacggagcatgcgcgcttgcctgcggcagctgctcgggcagcgacgtggcctgtaggtcgacttggcccacatctgcatgtagattgcagagcggtgtcgcggtagtttggcctgcttcagctgcggtgtcgcggtggctggcttttgctcgcggctgtggccgcatgct

SEQ ID NO: 127074 - DNA, 1318 bp, Zea mays
  Clone ID: MRT4577_47357C.1
aaactaaaaccctttggagcattgatcatgcacattttatggataatgtacatggcacgttaagttgatatacaacatgctaatatttacataccatatacagcagtacagtagtacaccactacttagaacatgttaaaccactacgtgttcagtaaaataaagaagcacaacactgcactacacttactttacaggttacgctaaacatcgtacatgccacacacacacgatcaaggttatgcaagtttaaagttttccttccttacatgaaaaaaaaggataaacaagttctaaacttaaaaacgtttggcaggttaaggttatggccactggagtctggaggaacaaacccccgagccagagcggttacggttcgccaggccacgtcacaacatcaggccgagccgctcgctggcgacgtcgcacttgacaggcgcgatcccaacgcgaccgcgctccaggtcgtactcgacccacaggttcatctggtggtggtgcccgatcacgtacgccgtcaggggcaccatgtccgcgttcccgaacgttaggcaccacacgccgtcggctccccggcgctcgccggggaccttgtacagcagcctgtccccggccaccgacatctccgcgccattgaacagcagggtcacgggcgggagcctcgccgacggcggcgggcgccccgctggcacgcggaagcaggtgtcgagcgcttcttggaatgcaaagctggggtcgccgagcgcggggaggaggggcttcgtttgtttcaagaactcggctttcagggcggagtatgcatccccgaggaggaaggtgaactgcgtgccggagtccaccatcgtctgccctgcgccggtgtggtccggcgcgagaaccgacggcgggatcggcaggggcttgccgccgacgcggatgccgaggagctggacggagtaggccacgcggtcgaagtaggggagcggcggggtgggctggtacagcggcgtgtagttgagcggcagaaaggggaggtcgctgtggccgaggagcagcacgccggcgtcgtcccggtcggagatgcagtacgagaagcggcgcgtgctggcctgcgtcacaaaggagagcgtgcccctgttcatgcccagcagcccggccgtcgcgacaccgtcgggggaggagtcatacgcggtggacatgcacccgatcgcggaccgcagcggcggcgcgtcgccgacggcgaaaacgtcggtggcgagcgcgccgtcggagccggacccctcggcatgcgacagcgactcgcgaaaccggctcccggccggcctcgaggtacccaatg

SEQ ID NO: 127075 - DNA, 387 bp, Zea mays
  Clone ID: MRT4577_47358C.1
cgagcacttgcgggcactcatgagtggatgcccgagccgcccttttctgatctctttcgtgaccgattggatcgattcctgataggcacccaaggccgagaagaatcccgcgtgagaagaagccttctgaggagaaggccgagaagaagccaagggcggagaagcgcgtgccgagcaaggagggctgcgtgactaagggaacgaagactgctatgaagagcgtctagtcttacaagatctacattttcaaggagctcaagcaagtgcacccggtcattggcatctaagccaaggccatgttcattatgaactccttgatcaacgacatcttcgagaagctcgccttcgaggccgcgaagctcgcccgctacaacaaggagcccacca

SEQ ID NO: 127076 - DNA, 521 bp, Zea mays
  Clone ID: MRT4577_47359C.1
cgcctcgccgcggctggcgcgttggcttccaagatgttgtgcctccttgcgcttcttgcgctttgtgcgggcgctgctgtgcgtccattgttccacattgctcacttgctcctagttccattgttccgccgttccttccaccggctccttcattgggggggggggcgggccgctgctgctgcctctcggctcccttctgcggttgcggcgagcgtcttacagcctccaattgcccgattggctcagctgtccttggcgcatctgacagttcggaccatcgcagcgcatcggcgaccgctgttcctaccagcactgagctcccttgccctggtgaaccctgtcgccttcttgcagcttcggctggttgcatcctacccacttgctgtctgcaacgtggttgcgaaccagctccgtcggctgctgcgacagttcctgccagtgcttagttccctggtcctggtgaaccctgccggttgcctacggccgcttcctctgctctcatgtagccgccttgctgtggc

SEQ ID NO: 127077 - DNA, 418 bp, Zea mays
  Clone ID: MRT4577_4735C.1
ctcacgcgtccgtatcctagttcctaccttcgtcgccgatgccggctgcgagtactggtgcgctcatctagacccagttcaatataagcggcaagggaagctgcagcaaaagctccgacgagaacctatagcttggggtttcagctggggataaagtggcgtcgaccgaggcggagacctagggagagcataggggatgcgatagggagagatgaatcaatcaatcgattcgtctgctgacgcccctgctaacgaccctactactatcctgacgatcatactgtcttttggcgttctttctccggctcttgttcgttagactgtggaacaccaggtgaagcgtcttcagaagattattcactatattagagtagatcgggtactggttcatggttagaatgattggaagaattaggtt

SEQ ID NO: 127078 - DNA, 2601 bp, Zea mays
  Clone ID: MRT4577_47360C.1
cccacgcgtccgcccacgcgtccgaaagaagttgctgggccaatggaggactgtctcattgtattaagaagaaagaaggttatggggccagaaaacagcccaaacacaggagcctccttacggaggatgaaaacatgaaaacataaaaggactcataaggaacctataaacaacatcctcacatcaagtaagacagggagagagaaactagactgcagggtgccgggcagccaaggcccaagttgtttcgactaaaaaggctttgttgtgttttcttgcaactttcctgcatttgattcctgtttccatcatattagttttgaagtagtagtttttttgttgacatttgcaacatctcttgttctttgcttttttactatacacgatgtatttttgacagctgttaattggattcaactaactgaatatctacctttcatggcgctccggcacaattcggcacgcgacgtgtccggcttggattctggaaaaccactcgttgcttctggaacaccaccgcgaaagcaaaggaataacgagccgaggaaatggccacgcggtcactcacctccgcacttccgctctccagaaccccgcgcgtcccctcgcatcgtccctctctccgccgactccaaaccctaacccgcgcgcttacctcctcgtcccctcaggccatggcgtcgtcccctacccccaagaaggtgctggtcccgatcgcgaatgggacggagccgatggaggcggtcatcaccatcgacgtgctccggcgcgcgggggccgatgtcgccgtcgcttccgtcgagccgggggcgacgtccgtagctgcctcatggggcatcaagcttaccgccgacgcgctcctcgccgacctcgcggacgatgagttcgatctcatctctctaccgggagggatgcctggttcttcgacttttggagagtgcaaagttttggagaaaatggtcaaaaaacatgtagagaagggcaagctttatgctgcaatttgcgctgcaccagcaatgactctaggaacttggggtttgctcaatggcttaaaggcaacatgttatccttcgttcattgataaacttccttcagaggtacatgctgtggaatcaagagtgcagattgatgggaagtgtatgaccagtcgtggaccgggaacagccatggagtattctgttattttggttgagcaactatatggaaaggaaaaagctaaagaagttgctgggccaatggttatgcgtcctcagcatggtgtggaattctctatgaaagaggtgaattcaactagttggaatgttggtgaaacaccaaatattctagtaccaatcgctaatgggacagaggagatggaagcaactatgataattgacattttgcgtagggcgaaagcaaatgttgtggttgcctccttggaagacaagctagagattgttgcatccaggaaggtgaagatgattgctgatgtgctgttggatgatgctcttaaggagcaatatgatctcattctgttacctggaggtctgggtggtgcagaagcatatgcaaaatctgataaactaatggatctgatcaagaagcaagctgaggcaaatagattgtatggagctatatgtgcctcccctgcgattgctcttgaaccacatggcctactaaagggaaagaaagttacatcctatcctgctatgtggaacaaacttgcagaccaaagcgaatgcaacaacagagttattgttgatggtaacctaatcaccagccaaggtcctgggacttctatggaattctcgcttgccatagtggagaaactctttggacgggagagagcccttgagctggccaaatccatggtttttatttgagttgaaatggtacgtgtacgtattaggtttctggagtatgtacttgtgtaaatcgaggcatgctatgttctttttcttgtggaatgtacttcaaatccccttttaaatagaaataagacgaacgcttgtaatgtgtttcatatgcagtaaaaggtttgaggcaaacattaagcgaagacaaaaaaaaaaaaaaaaagaggctcatacgcgcttgcgccgcatcgtcgacgccttggactgaagttgtggcacaaaggtgtctcctcgggtttcttgcttgtcctcgttgcatgctagcttgcgagtttaggagtttcttagcgctgtttatgtgtagtagctgtgatggatctgtgatgtagttgaagcggacaagccttagtgttttcccacccttgtatttgcttaaaaggggagtttcttatgtagaagaggttgcacgtctttgtaaaagaaagaaaacaaattgtcgctgctgcttctaaaatcttttgctcgaagttgtcttgcctgttgcacgtctgtcgcctacttgtctccttactttcatgtatcacgcttttaatttgtttgattttatgttctgatgaaagtgacatgtatactactgataacctagggatgttagaagattagcattgagttctcataacaattatgtttttgggctctggacttgtaattccttgaagagagagaacacaattgtcactgctacattacagacttatacatcatt

SEQ ID NO: 127079 - DNA, 213 bp, Zea mays
  Clone ID: MRT4577_47361C.1
cttccgttcaattattaaagcaacccgaagcccaacctcctaagccatcctccccgtggccggaggttgagaattgtggaattattttagagaccatgccatgttcatggcctataatactccacaaggtgttaagcacacgcacacacaaagtaacgccgaagctctctcgatatttctctgcacataaaaaagattctctctggggatgat

SEQ ID NO: 127080 - DNA, 183 bp, Zea mays
  Clone ID: MRT4577_47362C.1
aatgttcacggcgccctttttttttgaccaaagacaacctatttaatgcatttaggtttcatatagaagatggcccccaaactgcccattttaacgctgtcagattcttaactaaaatactccaggattttgtaattaacgaaaccacatgtatttttccaagtataccttccctttcttaaa

SEQ ID NO: 127081 - DNA, 604 bp, Zea mays
  Clone ID: MRT4577_47363C.1
aggagcaatatgatctcattctgttacctggaggtctgggtggtgcagaagcatatgcaaaatctgataaactaatggatctgatcaagaagcaagctgaggcaaatagattgtatggagctatatgtgcctcccctgcgattgctcttgaaccacatggcctactaaagggaaagaaagctacatcctatcctgctatgtggaacaaacttgcagaccaaagcgaatgcaacaacagagttattgttgatggtaacctaatcaccagccaaggtcctgggacttctatggaattctcgcttgccatagtggagaaactctttggacgggagagagcccttgagctggccaaatccatggtttttatttgagttgaaatggtacgtgtacgtattacgtattaggtttctggagtatgtacttgtgtaaatcgaggcatgctatgttctttttcttgtggaatgtacttcaaattcccttttaaatagaaataagacgaacacttgtaatgtgttccatatgcagtaaaaggtttgaggcaaacattaagcgaaaaaaaaaaaaaagggcggccgccaccaaatctttttgctcgtttgaagct

SEQ ID NO: 127082 - DNA, 712 bp, Zea mays
  Clone ID: MRT4577_47364C.1
gggtacctcgaggccggccgggacccacccacgtttttcacccaaatccacgagcacctcccccatcgtcctcacggacctcacgcgccctgcccctctcgctctccgcctccccgccccacacccatcgccacccaccagcacctccggcggcccccacccccgcctcctccccgcgtgtccgcggtctgcacccggcgtccctcgcggcgttgacgcgcgaacgtcccgtcgcccggtgagtaacggagagaccgaaccatgagcggaggggtggaaccggagaccccgccgggtagcagcggcaggagcgggggcagcacgcccgtcggtggcaagccgccacgccaccacctcacgtctatccgccactgcgccagcatcgcccgcatcgccgccgcctccgccggattcgggctggattcggggacgctcagcttgatctcacctaccgcagacatccatccgggcttcttgcctgtgttcaggtcggggagtttcgctgatattggacccaaaacgtacatggaggacgaacatgtctgtgtggacaacctggttgagcacctcgggttctatggcccgggcatccctgcaccgggtgctttctatggggtgtttgatggccatggtggcactgatgctgcctgttttgtccggaaaatatactggagttcataaccgaagattgccacttccccaacagcatcga

SEQ ID NO: 127083 - DNA, 202 bp, Zea mays
  Clone ID: MRT4577_47365C.1
ggactcttggttttaccttttaatttcgtaccgtttcctgttggcttaccagttttccctagagcggggggattaacccgggaattaaggacggcatagtgggggcctgcgagaatttgttatggggtgacaattccacacatcgggacaatccggaagcaaaaagggtaacggcgggaaagcgtaatgggtgaacaaaccc

SEQ ID NO: 127084 - DNA, 277 bp, Zea mays
  Clone ID: MRT4577_47366C.1
attcggctcgaggtgaagtttcccaacgagcgtttttttcgccctcccttaccatcgacgcctgagaggaactatatagacctttttggggcaccaattcacaagctctacattcaaggtaagtcggtcaacccgcgtctatacggctggtctttcaaccacatcctcaggtggcccctgcctttctttccttgggggcccaccagtttgagaaatctacctacaagaatctgaaccacctgtacctatttccacaaaccgatgatagtatgcctaa

SEQ ID NO: 127085 - DNA, 234 bp, Zea mays
  Clone ID: MRT4577_47367C.1
ggaatgcccgctcgacccacgcatcaggttcttggtgtaataaccccaagaacagcactgcgcacccgcgcttggttgacattcatcacattgaaattcatggcagtgggcagaaattaaattgcatcagaatcccagaggactgtcgcattgctttgtattgattaaacagtcggtttcccattgtctgtaacagttctgactcggttgttcgtccccggggaaggcccccga

SEQ ID NO: 127086 - DNA, 422 bp, Zea mays
  Clone ID: MRT4577_47368C.1
aaaccacatgcgaatcgtatattgcctcttagtttatacatgtgaatatatgaaatatatgatgcatgtgttactagaattttcttattgtttttagtagcatatagtggtgggtttcgaagaacaatatggttttatggatccagctcaatagaataaggatcagttggattgcggtacgaaatcggagttcatacttcatataactatttcttattcgtgctgatattttttggtgttcatgtacctattcattatgcgtcgtttgcttggtacttgcacatgattctgtcgaattgtccgttacatggctcacaggttttggccccagttcattgatttgcttgttggtaccgctattgaccatccaatgcagtgttctcaaggtccaaagtacgtggaccttcagttggtgtaatcag

SEQ ID NO: 127087 - DNA, 2427 bp, Zea mays
  Clone ID: MRT4577_47369C.1
gccggccgggtccccggcttctgcacagcgtccccagtaaaatgtaccccgaaaacccccacctccgcttcctcctcttcctcgccgtcgcggcagttgccgccggcggggctgcggcgaacaccaccctcaccgcgtccctctccggcaaccagatcaagatcatctggtccggactcccggccccggacggcctcgactacgttgccatctactcgccgccgtcctcccgcgaccgcgacttcctcggctatctcttcctcaacggctccgcctcctggcgcggcggctccggggagctctccctcccgctcctcccgacgctccgcgcgccctaccagttccgtctctttcgctggcccgccaaggagtactcctaccaccacgtcgaccacgaccagaacccgctcccccacggcaagcaccgcgtcgccgtctccgccgacgtctccgtcggcgaccccgcccgccccgagcagctgcacctcgcgtttgcggatgaggtcgacgagatgcgggtcctgttcgtgtgcggcgaccgcggggagagggtcgtcaggtacgggctgcagaaggaggacgacaaggagtggaaggaggtgggcacggatgtgagcacgtacgagcagaggcacatgtgcgattggccggccaacagcagcgtcgcctggagggatccgggattcgtcttcgacggcctcatgaagggattggagcccggaaggaggtacttttacaaggttggtagtgacacaggaggatggagtgagatatacagcttcatttcacgtgacagtgaagccagtgagaccaatgcttttctatttggtgacatgggaacttatgtgccttataacacctacattcgcacacaatctgagagcttgtccactgtaaagtggatccttcgtgatattgaagcccttggagataaacccgcctttatttcacacattggggacatcagctatgctagaggttattcttgggtctgggatcatttcttcagccagatcgagcctattgctgccaatactccataccatgtctgtataggaaatcatgagtatgattggccatcacaaccctggaaaccatggtgggctacatatggaacggacggtggaggcgaatgtggaataccttatagtgtcaagttcagaatgccgggcaattctattctacctacaggtaatggtggcccagacaccaggaatctttattactccttcgactcaggcgtggtgcatttcgtctacatgtcgaccgaaacaaattttgttcagggaagtgaccagcacaacttcttgaaaacggaccttgagaaggtgaaccgaagtagaacaccgtttgttgtttttcagggccaccgccccatgtacacctcgagcgatgaaaccagggacgcggctttgaaacagcagatgctccagaatctggaaccgctgctggtgacatacaatgtgaccctcgcgctatggggacatgtccacaggtacgagaggttctgcccgatgaagaattcccaatgtgtcaacacttcatcaagcttccagtactctggcgctcctgtgcatcttgtgatcgggatgggcggccaagactggcaacctgtatggcaaccgaggcctgatcacccagacgtccctatctttcctcagcctgagcgttccatgtaccgcggtggcgagtttggatacgccagacttgtggcaacaagggagaagctaacactgacttatgtggggaaccatgatgggcaggtccatgatatggtggagatattttctggcctggtatcccccagtaacagtagtgttgctgaggcggtggatggaaccaaacttggcacaggagtcagcaccgtgcggaaaatttctccgctgtacttggaaatcggaggcagtgtgatgtttgcgctgctcctgggattttcctttgggatacttgtcaggagaaagaaagaagctgcacagtggactcaagtaaagaatgaggaatcgtagtagtgttgccaataccgtgagcctggtgcagtggtggtgatccaaacttgtgtgggtgtaattactggagtagaacctaacaaagtgaaggcatttctgacttcttggggggctccgcgtcctcttggtacaactagtgtattgatagtcttgggaaatgaaggttctgatcgcatatctgttgttgtaatagttcaatgtataagcatgtaataagtgatataatgttcacattgctttggttgacacaagtgtgtaacatgtgctaccacaagtgattctgggcgtcctttgtagttgaaccatatttgttttatgatcctgcttttctgtatcatctgcctgcttttgttagcagatgtacggaatcttctgtacttggagtttatacctaacaacatacttatatatttatattacc

SEQ ID NO: 127088 - DNA, 253 bp, Zea mays
  Clone ID: MRT4577_4736C.1
cgcacgcgtgcgcgtactcgatgtgcacgttggagttcttgcctcgtacgaggttgccgctgggaggccacttcaatcatactaggtgtcgttgctgttcacgagggacgtaatcgccactagatccggaagaaagcaaccatgcgcaggacgacccttaacatctgccttgtatccctggagatgagaaagacattatgttcaactcttcaagtctggtctaccggctttgatccacagtgcaaggtacgga

SEQ ID NO: 127089 - DNA, 551 bp, Zea mays
  Clone ID: MRT4577_47370C.1
ggttggggttttttatttttttttttttttttttttgggttttttttttttttttttttttttttttcccaaaattaaacgagaactttatgaaatatcccctccggggacccacgaaaaaaaaaaccatcccctttttctgatggaacaaaagatggtccccgtcaggcccccccccaaaggaccaacaggacctaaattctccagctcgggaagggcccggggctaaccatgtaaaaacaaataacccgcagggaacccgcaggggggacacaaggccctattttccccccagaaatattaagaggccccaaaaaaagcgggcgccagaacatccaaacccataaaaaatggggctctatggcccccttggggccccccgacgggggccggctggctcccccttttcgacctctttctaatccttggcgcccctgcttccaaaaccggggggaacgggggcctgcggcttcttcgcctaagcgggaggggtaaaaggggccaccgggttcttgcccccaaacaggatcttgaaaagaacggaaacgaac

SEQ ID NO: 127090 - DNA, 399 bp, Zea mays
  Clone ID: MRT4577_47371C.1
ttgttgtggagaactgctatttcattaactatttaactcttaaatacgttaattagtacatatggccaggtgccatgccaagtgctgaagtgctagctctgaatatcgccatccaggcacccaacgctactgctgtgtttagcgaactcccttcttgcatttgcagccttgcaggtaaaaaccaaacaactcagtgctgcttgcctccctgctgcaaagcgaccaagccaaagtaggttccagagcgaccgctggccattagagacgtatgcgtgcccttctccaccaccactcccctatcaagcacagctatggtatcgcagccctggatggtgctgagcctgtgcgccacgaccacgctagtccggccaaccatcaccctgtccagcgcctgctgga

SEQ ID NO: 127091 - DNA, 425 bp, Zea mays
  Clone ID: MRT4577_47372C.1
ctgtctcaaggacagtatgctgaagatctcctcgagcgtgcaggaatgacgaactggaaacctgttgccacccctgccgacacccaacagaaggcatccgctggcgatggcatactgctcgacgacgccacttcataccgtagtatcgtcggcgccctgcagtacttgacgatcacccgtccggacattgcctacgccgtgcagcaggtgtgtctccacatgcacgcgccgcgggacgtgcatctcaccatgctcaagcgtattctccggtacatcaagggcaccatccacttcggcatccagctgcgcactgcctcgccttcgacgatcactgcatactccgacgccgactgggcaggctgccccgacacacggcgctctacatcgggtttctgcatcttcttcggcaactccctcgtctcatg

SEQ ID NO: 127092 - DNA, 241 bp, Zea mays
  unsure (1)..(241): unsure at all n locations
  Clone ID: MRT4577_47373C.1
cagacttacaggcgcctttattttctcgaccccgaccccngcgtggaggggctcctcgcccaaggagcaggagcaacatcagcacttgatggggttccgcgcgccgaccgtggcgctcacgctccccaagcacaatgccaagtgatctgcttgctgcccattgacacctcgccacagaagcgaaacccgaggtgatactacgtcacgccggcataacaattttgttgattgggcaacacca

SEQ ID NO: 127093 - DNA, 551 bp, Zea mays
  Clone ID: MRT4577_47374C.1
gacccacgcgtccgtgaacttctctgtgttctattacgagatcctcaattctcctgatcgtgcctgtaacctcgccaaacaggcctttgatgaggcgattgcagagttggacactcttggtgaagagtcatacaaagacagtaccttgatcatgcagcttcttcgtgacaatctcactctctggacatctgatatgcaggatgatgctgcggatgagatcaaggaagcagcagcgccaaaaccgaccgaggaacagcagtgatcttttgagtgaaactgctagttttcttctagggtttggaatttcttctctttctcgtccatatgtttttcttaatccatctaagaggtcgctcttgccatttcgctcatcttcaaaagcttattcattcatcatatttgtggcaagtctgaaccatcaatcatctttttatctctttttaatttattttctcttttcttatttctttgttgttatcgatttcaatgtctgtgtaatcgaaacttgctttcttttctcatcaatttgaagatcataaagtctcttgtct

SEQ ID NO: 127094 - DNA, 350 bp, Zea mays
  unsure (1)..(350): unsure at all n locations
  Clone ID: MRT4577_47375C.1
ttttgtctttnnnnnnantttttttttatgttaaatttaaggaatatttcaccgaaacactacaaatataaaaagaaaaagggttcgttacttagcaaaacaatgctgcaaggaaacttggggaacaacacaaaactgccaaatttcttttaacgtcaccactcatcaaaatcttaaaaaaagcatcacagcatcacttgctagcttacaaaaacagaaacaatgataaaacagaagatagcttttaaaccctaaccttccgacgcaaaagccggccaaacccgacgctaaaaaaccgagcttggggccgaaaccagtgcctgcgcatggcgttgaaccagatggtaatg

SEQ ID NO: 127095 - DNA, 561 bp, Zea mays
  Clone ID: MRT4577_47376C.1
gtgcgagccgacgacgtccctccatcctagtcgaaccacaccacactgccgccgcgtcccgtgctcccgggtgagatcgagcgcgagtagccagccgacgatgagccgcctcgtttcccggcggcacctcgccgccgccacggccctccgacgatcccccgccgcgttcgcttccaggtggctgcacacgccggcatttgcgacggtgtcccccgaggagatctctggctcaagccccgcggaagtgcagaattttgtgcagggaaaatggataaagtctgctaactggaactggatagtcgatcctttaaatggcgaaaagtttatcaaagttggtgaggttcaggggtctgaaataaagccatttgtggagagtttatctaaatgcccaaagcatggacttcacaacccacttagagctccagagaggtatctcatgtatggagatatatctacaaaagctgcacacatgcttggtcaacctgaggtcttagatttctttgctaagcttgttcaaagggtttctccgaagagctatccacaagctcttttggaagttca

SEQ ID NO: 127096 - DNA, 430 bp, Zea mays
  Clone ID: MRT4577_47377C.1
caagatgaaaccatgtttttgttcgctgcagcttttttagttttgcctccgggccttggcttgattgggaccttagtaaggttttctcagtttagcctttaaccaaatgccgggtccagattgggattccttcaaacaaatgcgaaacggttgccttccttccgaagtttccaagatggggattccaattgggggggggaccaccagagatgttccccgacccccctgcccctgtggcttttccaacttttaacccaaattaagaattcaaaatactttcgcccccccatggcccaccccctgcgtgacctcaggagtgacgtcttcgtccccctggcgacgggggaatccatgcttcatccacttgtttttttttttgaaaaatcctttgacgggaaactgcagtcctaccagtttccaccttaccttt

SEQ ID NO: 127097 - DNA, 250 bp, Zea mays
  Clone ID: MRT4577_47378C.1
cccacgcgtgcgcctactcactctcactcctacactcactaccacacccctgaggaccgcgttcccccgctacacacgaggggactatcgacacgactattcacaccctgagtcgctccttgactcgatactggaccataaacagcaccactagctgcttcactgggtccttccggaagccccgccaggactgggtgcccctcaccgtgaccgtcaccggcaccggcacctgcaccggagggaactcacg

SEQ ID NO: 127098 - DNA, 515 bp, Zea mays
  Clone ID: MRT4577_47379C.1
caaaaatcatgatgcttcaatgcaaaatatttacagctatacatcgcgttactccgatttttttttcagatgaattttactcaccagtcgtcagcatgtacaaagcagtaagtaggatagtgttttttactatcacgggttcaccagtgctaataggtgacgtttcatacagaagtggacgatgtacatgtgcgcctgcggccggcctactcctccctgggtatccaccggctccaccagatgcttttgcgctggctgttgagctcgtccatgctctccttgatcgttctcatgatcttcctctgcaggcgcagcacggaggcaagcgcgttccgctgggtgctgcttttctttggttttatttccatctgtaagaatatgagacccaagctatatatgtcgaatctggcaggaaggttcagctgccacaggactggagacaaaggtgttgcaactggaacagaaggagcagacgggggttgggtgctcataatatatgggtccggagcagcata

SEQ ID NO: 127099 - DNA, 456 bp, Zea mays
  Clone ID: MRT4577_4737C.1
cccctcttaatcccgcgctcatgttcttaacgcttttttttctcctttttttaaaaaagtttgttttgtttttccaacgaaattatttttttgcatgctacatgaactcgctgttccaaaagttttaaagcaggggtcacaaaaaccctacgggctttttgctgggctgaaccttccctgaaggccttctaaatctgttctttgaatatcacagcagcagcttccaaaaaaaatttttttgccagttcagggcttttggcatgcttttgggaatgggcttcatccccatcaaaatcatttccatccctggccatgggatcgttttccactagcctggggggagcacatgattgacccttcaatgcatgggcttttacacacagttttgggcactggccataaagcctccaagctcgcaacgttatgaagtagtcctcaaactgatcaagatcgatt

SEQ ID NO: 127100 - DNA, 278 bp, Zea mays
  Clone ID: MRT4577_47380C.1
atattattataataaattattttatttggcaagcatactgtatacaggagtgccaagcatactcagtattctcatacaactcagtctgaacatgcgacacaatcctatgccaagccttcccactgcccatcattccatcattcccaaggtaaaccctgccacgttccgcacatcatctgaatcatgttcggaacgtggcagggtttaccttggcaagcatactgtatacaggagtgccaagccggacgcgtgggcggacgcgtgggcggacgcgtggg

SEQ ID NO: 127101 - DNA, 679 bp, Zea mays
  Clone ID: MRT4577_47381C.1
gctgagctccccacgcgttcgcggacgcgtgggcggacgcgtgggatcggatgggaactcctcacctcgatggtccggtacaaagcacggcagaggaccagtgctaaggccgcattggcacacccgtacttcaaccgtgaagggctccttggcctctccgtcatgcaaaacgtacggctgcaactgttccgcgcaacccagaaggactacagtgaagcagcgcggtgggttatcggcctcatggcaaggtcaggaactgaagatgtgggaggctttacagaagcacagcttcaagagcttagggaaataaaaccaaagaaaagcagcacccagcggaacgcgcttgcctccgtgctgcgcctgcagaggaagatcatgagaacgatcaaggagagcatggacgagctcaacagccagcgcaaaagcatctggtggagccggtggatacccagggaggagtaggccggccgcaggcgcacatgtacatcgtccacttctgtatgaaacgtcacctattagcactggtgaattggtgatagtataatacactatcctacttactgctttgtacatgctgacgactggtgagtaaaattcatctgaaaaaaaaatcggagtaacgcgatgtatagctgtaaatattttgcattgaagcatcatgatttttgaaaaaaaaaaa

SEQ ID NO: 127102 - DNA, 260 bp, Zea mays
  Clone ID: MRT4577_47382C.1
agacagcgagcgaacacacctgagctgagaactagggtcatgtactgctagattgagagctatggtacggtgtaacaaggtacgggagagagagagagagtaacatactagtctcgggcacaaggcacggcatttttccggctgcattatatagggaacggatatgggggcgacctagctagtattaccatgacagaaaagataaggggcaatctataatggtgattgtgaccctggacgcgctgacgtaaaagaacctt

SEQ ID NO: 127103 - DNA, 3234 bp, Zea mays
  Clone ID: MRT4577_47383C.1
cttgatttctggacggaagaagatgattatgaattgaccgtgtcttgtccgggagtctgagagtgagacactcggagcagatcctagccacggaagcaatcgatgcttccccaccacgttaatcttcccgtaaccacaaattatctcctcgtcttttttttttttagatttttttagggggggggcaaataaccaaagctttattgcaaacgagggcattgttacaaaatacgttctatgacggacacgttccaacatatatattcaacatcttaagggggccgtttggccaaaatcaccatatctacgatcttaacttcttatgtatcggcaagccgcacttttcagccagaaccatctatacctacaaaccctgcttgttccccactccaagtcgcaacaaatctctttaccgtcccgtgtctcctcaaggtcgggaaaaatccgaaatggccgctagtggcctcggtctctccacctccttcctccccggccacgacaccctcctccggcgccggcgccggcggccggcgggccacgccgccgcgtcgttccggccggtgacggcggagctcggcggcgtcgcgacggagctgggccgccagctggtggaggcggtgggcgtggggctcccctgcaccgtcatgcagtgcggcgacgtcatctaccgcagcacgctcccccggaacgacgggctcaccatcacggcccccggcgtcacgctcgcgctcgctaccgtgtcgtacctctggtccacgcccggcgtcgcgccggggttcttcgacatgttcgtcctcgccttcgccgaacgcctcttccgccctaccttccgcaaggatgacttggtatttgggaagaagcttggggagggcgcattcggggtcgtgtgtaaggcttcactggcgaaccccgaagcggcgaagaagcaaggggatttggtcgtgaagaaggcaacagagtatggtgcagtggagatttggatgaatgaacgtgtcaggagggcatgcgctagtagctgtgcggattttatttatggcttttgcgagacaaaagcaaaaggtaagggagctgaagaatattggcttatttggcgttttgaaggtgaggatacactttatgatctcatgcaaagcaaggaattcccttacaatgtggagacaaaaattcttggcggtatccaagacttgccacagggaatagcgagagagaacaagatcattcaaactctgtatgagacaactcttatttgctcttgacggacttcattcgacaggaattgttcacagagatataaaacctcaaaatgtgatattttctgctttgtacatgatcacgaaccttcaaaattattgatcttggagcagcagctgacttacgggtaggaattaactatattcctaaagagttccttttggatccaaggtatgctgctccagaacaatatattatgagcacacaaaccccgtctgctccttctgttccagttgcaacaactttgtctccagtcctgtggcagctgaatcttcctgacagattcgacatatatagcttgggtctcatattcttacagatggcattcccgtcactacgaactgatagcaacctcatacaatttaatcgccaactgaaaagatgtgattatgacttacaagcttggaggaatctggtggagccacgagcgagtgctgagctccggaggggctttgacatcatggatttagacggtggtatcggatgggaactcctcacctcgatggtccggtacaaagcacggcagaggaccagtgctaaggccgcattggcacacccgtacttcaaccgtgaagggctccttggcctctccgtcatgcaaaacgtacggctgcaactgttccgcgcaacccagaaggactacagtgaagcagcgcggtgggttatcggcctcatggcaaggtcaggaactgaagatgtgggaggctttacagaagcacagcttcaagagcttagggaaataaaaccaaagaaaagcagcacccagcggaacgcgcttgcctccgtgctgcgcctgcagaggaagatcatgagaacgatcaaggagagcatggacgagctcaacagccagcgcaaaagcatctggtggagccggtggatacccagggaggagtaggccggccgccggccgcaggcgcacatgtacatcgtccgcttctgtatgaaacgtcacccattagcattggtgatggtataatacactatcctacttactgctttgtacatgctgacgactggtgagtaaaattcatctgaaaaaaaatcggagtaacgcgatgtatagctgtaaatattttgcattgaagcatcatgatttttgagatcagctctctgcttgaatatcctgtgatgcttcagcttccacccttataattactccaaatgacaagttgtctaaaaggacaagatcatgcagttcataatcaccgattctggtgattcctgtggtgatttcagagctttcaacgacatgatcagcaaacacacggatatgttctttagttgtgtcagacaaaatgatcaagacatgcccttccactttaacgaccatgccagtagcaccttcttggacacctgagatcaccttgacatggtcaccaggcttgaaatatttgcaaagctccttttcattgaaggctaatgttttcgggagatcagatatttttggcctgatgtgaacggtttcatcctctactttttcaacccatccctccagatttttcaagtcgcctttaataacaatgacagcatcacccttcataaaatgcccttttttcctgtttgcaaatagagtagacaaactagccatgtcgccattcatgtcatcaccaggcttcttaaacttctcaagctcatcgaaagtcggttgaatattgtttttgtggattgatttagtggagacagatttgtacaagaaaccatctttgaacttcaaattatcaacccactcaaagtactccccagattctttatctcgcctccgttccacacgaatatgcatctccctcgcctcatcgatattgaagaatcgtggtggtgggacaaatgctttcttctttacagactccccttcaagtttactagccaaagcttgtagatctattctagggatcagcttcacgtctactctttgacgtacattatcaacatcaacaaccttagcaaggtcgcctttatatatgcccaatttcattcgaacccaag

SEQ ID NO: 127104 - DNA, 1960 bp, Zea mays
  Clone ID: MRT4577_47384C.1
agggcattttatgaagggtgatgctgtcattgttattaaaggcgacttgaaaaactggagggatgggttgagaaagtagaggatgaaaccgttcacatcaggccaaaaatatctgatctcccgaaaacattagccttcaatgaaaaggagctttgcaaatatttcaagcctggtgaccatgtcaaggtgatctcaggtgttcaagaaggcgctactggcatggtcgttaaagtggaagggcatgtcttgatcattttgtctgacacaactaaagaacatatccgtgtgtttgctgatcatgtcgttgaaagctctgaaattaccacaggaatcaccagaatcggtgattatgaactgcatgatcttgtccttttagacaacttgtcatttggagtaattataagggtggaagctgaagcatttcaggttctgaaaggagtgccagatagacctgaagttgtgctcgtgaaattaagagagataaaaagcaaaattgataggcgctcatcagctaaagatcgttctaataatattatctctgcaaaagatgtcataagggttgttgaaggagcatgcaaggggaagcaaggacccgtggaacacatacacaaggggatgctgtttatttatgacaggcatcaccttgaacatgcaggctttatttgtgcaaaagcgcaatcttgccttcttgttggtggatcaaccggtggccatcgaggaaatggtatggacacagttgatgcacggcttggtgctttgagatcttcagcaagcattctgcaatctccaggaaggctgcccccaagaggacctaatatgaattatggcggaaggtttggaggcggccgtggtggtaagggtgtgatgccttggtgggtaaatgtatcaaaattaaatctggaccttataaaggatatcgtggccgtgttaaagaggtgactggtgcactcgtacgtgtagagcttgattcattgatgaagattgtcacagttaaaagagacgatatcgctgacacacctacagtcgcgacgccattccgtgaacctcgttattcattgggtggtgaaacaccaatgcacccgtctcgaacaccacatcatgcttatcagactccaatgcgggaccctggagcaacaccaatacatgatggaatgcggactcccatgcgaagtcgagcctgggctcctatgagtcctccaagggacaattgggaagatggaaatcctgctacttggggtagcagtccagcttaccagccaggaaccccacaagctcggccatatgaagcccccacacctggatcggggtgggcaaatactccaggagttagtttcaatgacgctcctactcccagggataactatgcaaatgccccaagtccatacgtgccttccacacctgttggtcaaccaatgacgccaaactcagcctcgtaccttccaggcacacctggtggtcaaccaatgaccccaggcaatgctgggatggatatgctgtccccaataataggtggtgatggtgaagttgcatggctgttgccggatgttttggtcaatgtgttgaggggaggtgatgacggccctggcgtggttagggaagtactcggggatggatcttgccgggttgcacttgggtcgtcgggcaacggtgacgtggtgacggtccttgcgaacgaggtcgaggtcatcaggccgaagaagagcgacaggatcaagatattgaacggcaatttccgtgggtacacaggaaagctcataggtatagatggttctgacggaatagtgaggcttgacgaaacatacgaagttaagatcttagatatggtgattttggccaaactggccacttaagatcttagatgtatatgttgtaacgtgtccgtcatagaacgtattctgtaacaatgccctcgtttgcaataaagctttgcttatttgcaccacactactgaaaaatgaat

SEQ ID NO: 127105 - DNA, 655 bp, Zea mays
  Clone ID: MRT4577_47385C.1
ctgtggtgccactgatgtcaagtcaccagaaacgattcttgagcatgagcatgtgtcgatgctcttttttccctgagtcgtatcatttggcttgggggtttgaattatcggattgccctatcatactgcttagctaaagcccttgtcgaaatgcataagcaactgttagagaaagatcagcttcagatagagtgaagatgcgggtgcattttccagggatggaaagaaggcatgattaatttcctccgatatataaatactcattcaactcggatcgtaactctggtgcgatcacattatgtggcctcttgcagtcgtcctacatccgaggagagtctcgcttctctgaccacagaccagtgtacaaccttttcatggctaaggttgagagtgcccgccacagaagatcgaacttatccttgatcatgatctccggtgttgagggaacaatgatagattgatatgaggattgcaggtgtaatcatgtgtataataacccttttttattttcctctgtccctgtggtgtagtacatgaaaagcaaaatgatgcctgcatttgttgtgcttattgctattaaatatttttctaattctaacaggtcacagccttgcttcctagttgtagctggaatgcatagtgttatacttttatc

SEQ ID NO: 127106 - DNA, 1096 bp, Zea mays
  Clone ID: MRT4577_47386C.1
cagaagaatcggaggatgttggcttactctactgttggtacacctgattacattgcacccgaggtggtcacttggtgcaataatgttcgaaatgcttgtggggtatccgccattttattctgaagacccaatgtcaacatgtaggaagatagtgaattggagaagtcatctaaaattccctgaagaggccagcctttctctagaagctaaagatctcattagcaagctattgtgtaatgtggatcagagaattggaacaaaaggtgcacatgagataaaggcacatccatggtttgcaggtgttgagtgggaaaaactatatcagatggaagcagctttcattcctgaggttaatgatgagttggacacacaaaactttgaaaagtttgaggagactgctcctccaatgcaaacttcatcaaaggcaggtccttggagaaagctgagctaaagaaaacgaacaacaagccaaagcgaccaaccatcaaatcattatttgagactgctgatagtgaagaccagccttctgatggcagttttctgaacctattacccacacaactggagctgccagagagccttgagccctctcctcactccagtatctcttctgaggattcccaagcacggaataggtagcaggtgtgttttctggcacctgccagcttagtccaacaaaagcaagacatagaggcctttcacctagtgatggattgctatctgcaggtctctattcagaggacaagctccataaagtttgcttttgaagagatgtttgtggtgctcagcagccatctaatgtacattgtcctgtacattgttactggtttccaaagttcctttggcaacgacacgaggaggttggttgtcatatagaggaggaggtatttgttctctcctgtaaatccttggattctttgagtttctgagatttattctttcgatatagcatgccaagggggtatgctgcctgtttcctttttacgtgcagaaatctgcatttctacatcgttgttgtaagatttgagacagtgtaaagaaattgcaagtgataaacaagcgaccgaaaatgataatgaaaatgctatttttcttc

SEQ ID NO: 127107 - DNA, 260 bp, Zea mays
  Clone ID: MRT4577_47387C.1
agctggtcaaaggagacaagcaggatggatggatggatggatgaatagatagatggtgtttgcatgtaaattgcagagaaaacaaaaccaaagctgattggaaacaattaattgtgggtgtctgagggggaaggtcgcagctttgggcagctttgagaagcggtacaagagctctgtgcctgtgtgtccagccctggagccagccagtgcatttattttaagctcttagaacaactccttggcccaggaatggtgaaccc

SEQ ID NO: 127108 - DNA, 2414 bp, Zea mays
  Clone ID: MRT4577_47388C.1
ggcagtcgtcagcaggtatggactcagccagcagccagcagctgcgaatccaagccgactgggatggccactccggccgcagtgctcccttgcttggagcgcgagtttaccccgagcaaatcgcggcggcgctcgtgcccgtgcctcccgcgtcgaaccctagtgcaactaccagatccggagatcccgcgcgggcgcgggcgggacaccaagcttctgactcaactcaatccccgcacctgccaatgccaccccctcggcgctgatccgatcccgccgccgccgacactcgcgggcccgccccatggattccgcccggagctggctccagaagctgcagccgcgggacaaggacagagagcggggcgccaagacgccggcgccggcgtcgcccaacggtggcgccggcaactccgcgaggatggccgccgcggcgggggaggaggcgctgtctagcgccaccaagcagaaggtggcggcggcgaagcagtacatcgagaaccactacaagtcgcagatgaagtcgcttcaggagcgcaaggagaggcgttggatgttggagaggaaactagcagatgcagatgtatctgaagaagagcaaaacaatatcctgaaagatttagaaaaaaaggagacagaatacatgcgcctacgaaggcataaaatgggcgttgatgactttgaattgcttaccattattgggagaggtgcatttggggaggtgagactttgtagagaaaaagctacatccaatgtgtatgcaatgaaaaagcttaagaagtccgaaatgttacgaagagggcaggttgaacatgtcagagctgaaagggacctccttgcagaggttgatagtccttacattgttaagctgtactgctcatttcaagatgatgagtttctgtacctcattatggagtaccttcctggtggtgacatgatgactttactcatgcgcaaggacacactgactgaggacgaatctaagttttatgttgcagagacaatactagcaattgaatctattcacaaacgcatttatattcatagggatatcaagcctgataatttgttgctagatcgaagtggccacttgaagctttcagattttggcttatgtaaacctctagatagcagttgcttcccaaatctgagtgaccttgactatgcagcaggtaagagcaccaatccatcatcagatggtgataagcaatccagtaactctactgcccccaggcggacacaacaggaacaactactacattggcagaagaatcggaggatgttggcttactctactgttggtacacctgattacattgcacccgaggtactcctgaagaaaggatatggaatggaatgtgactggtggtcacttggtgcaataatgttcgaaatgcttgtggggtatccgccattttattctgaagacccaatgtcaacatgtaggaagatagtgaattggagaagtcatctaaaattccctgaagaggccagcctttctctagaagctaaagatctcattagcaagctattgtgtaatgtggatcagagaattggaacaaaaggtgcacatgagataaaggcacatccatggtttgcaggtgttgagtgggaaaaactatatcagatggaagcagctttcattcctgaggttaatgatgagttggacacacaaaactttgaaaagtttgaggagactgctcctccaatgcaaacttcatcaaaggcaggtccttggagaaagatgctttcctccaaggacgtgaactttgttggctatacctacaagaactttgaaattgtgaacgatcctgagcttccaggaattgctgagctaaagaaaacgaacaacaagccaaagcgaccaaccatcaaatcattatttgagactgctgatagtgaagaccagccttctgatggcagttttctgaacctattacccacacaactggagctgccagagagccttgagccctctcctcactccagtatctcttctgaggattcccaagcacggaataggtagcaggtctctattcagaggacaagctccataaagtttgcttttgaagagatgtttgtggtgctcagcagccatctaatgtacattgtcctgtacattgttactggtttccaaagttcctttggcaacgacacgaggaggttggttgtcatatagaggaggaggtatttgttctctcctgtaaatccttggattctttgagtttctgagatttattctttcgatatagcatgccaagggggtatgctgcctgtttcctttttacgtgcagaaatctgcatttctacatcgttgttgtaagatttgagacagtgtaaagaaattgcaagtgataaacaagcgaccgaaaatgataatgaaaatgctatttttcttctaaaaaaaagcggcc

SEQ ID NO: 127109 - DNA, 822 bp, Zea mays
  unsure (1)..(822): unsure at all n locations
  Clone ID: MRT4577_47389C.1
ttgggaccctcgaggccggccggggaccatacactttgaaaagtttgaggagactgctcctccaatgcaaacttcatcaaaggcaggtccttggagaaagatgctttcctccaaggacgtgaactttgttggctatacctacaagaactttgaaattgtgaacgatcctgagcttccaggaattgctgagctaaagaaaacgaacaacaagccaaagcgaccaaccatcaaatcattatttgagactgctgatagtgaagaccagccttctgatggcagttttctgaacctattacccacacaactggagctgccagagagccttgagccctctcctcactccagtatctcttctgaggattcccaagcacggaataggtagcaggtgtgttttctggcacctgccagcttagtccaacaaaagcaagacatagaggcctttcacctagtgatggattgctatctgcaggtctctattcagaggacaagctccataaagtttgcttttgaagagatgtttgtggtgctcagcagccatctaatgtacattgtcctgtacattgttactggtttccaaagttcctttggcaacgacacgaggaggttggttgtcatatagaggaggaggtatttgttctctcctgtaaatccttggattctttgagtttctgagatttattctttcgatatagcatgccaaggnggtatgctgcctgtttcctttttacgtgcagaaatctgcatttctacatcgttgttgtaagatttgagacagtgtaaagaaatttgcagtgatnaacaagcgacccgaaatgantaacg

SEQ ID NO: 127110 - DNA, 285 bp, Zea mays
  unsure (1)..(285): unsure at all n locations
  Clone ID: MRT4577_4738C.1
ctaccacatcattttgaaaggaccatgagcaactataagcaaagccataagaagtggtttgatcgatatattaggggtagctcttgattttgttaacattaagataaggtgactttttccccctgcttttaggattaaaatcanagatacttctatatttttatcactatagatcatagttattatacaatgtagtgagtcctgcatgggtactcgatgtgtaatgaaacctgaaataataagataataagaaaagcaataattttctaaagctgtgctgtcggt

SEQ ID NO: 127111 - DNA, 1550 bp, Zea mays
  unsure (1)..(1550): unsure at all n locations
  Clone ID: MRT4577_47390C.1
gccggcaattcggcacgaggcgcccactcgcacaaaccacgacaaagttgcgatgctccatgctccacgtcacgacgccgcatctaaccctccggcgactcatcgccggcgagccggtccgccacgccatagcctcgtcctgaagcgcacttaatcctacgtctcgttcctctctcgcccccggtaccctccataggcatgggaatggggtctgcgagagggggcgcagggggatggctccccggcgagcggtggcggcgggtcatcttcctcgctctggcggccgtctcgttcctcatctcactcatactcctcttcctatccgcgccgcgtctccgcctcccaagtgtcgtcctgccttacaccaccgcttccgcttctgccgtccgccgcgggcccggcgagccgccctgcctggtgtacctgctgaccggcgcgcgcggcgacgggcgccgcctcctcaggctcctcctcgcggtttaccacccgcgcaaccggtacgtgctccacctctccgccgacgcgccagacgacgagcgcctgagcctcgccaccggggtcgtcgccgcggcgcccgccgtgggagcattcgagaacgtggttattattggcaatcccaccgccgggacgcccgtggggtcctccggactcgccggcacgctccgcgctgcggccgtgctgctccggctccacgctgactgggactggttcctcaccctcaatgccgccgactaccccctcgtcacacaggatgacctgattcatgtcctttcttctgtcccaagggatcttaacttcattgaccacaccggtgacgttggatcaaaagaacctgagaaagttcaacaaattatagtcgatgctggaatttacttgtcagggaggaccaacttctttcgaggaacacagaaacgagcagctcctgaggcttttaagttctttacaggttctccatgggtcatattaaaccggcaatttatagagtactgcattcttgcttgggagaatctccctaggattcttctcatgtacttcaacaatgtaatacaacctcaggaagggtatttccagacagtcatctgcaactcactggacttccgtaatttcactgtgaacaatgacttgaggttcatggtgcaagatgattccgctcagaaaaagtcccttttcacgagcagggaacattatggtcacatggtggatagtggggcacccttcgcaaggccgtttcaggagaatgatcctctgctggaccagatcgacggcaatatactcaagcgttggagccatggaccagttcctggtgcttggtgcacaggaaggaagaggtggttcagtgatccatgttcccagtggggcgatgtgaatgttttgagaccaggtcctcaagcagtgatgttgcaccaatatgtaaatcggaccttagaagaagcaaagtctagcagcaattcatgcaggcggtagcagcattggcgtccagaacctcatgtcccatggttgaanagctttgagcttttccgcttatncacttaaggttctccactctgctg

SEQ ID NO: 127112 - DNA, 458 bp, Zea mays
  Clone ID: MRT4577_47391C.1
gctacctgtgatcaaccatttttttttggaaaaaccggaatgcctactatcattatcagggggggcccaccatctcaaccaaaaaaactcactgaaccctgccgcttatttgcagcaacaacaatgggcacccacccaggttggttctggctacggggatcaacggcaacttcaaacatggaaccaaaaggggcccaatgaaccccgctgctaaaggggagcagggaatatcccaaccatttagccagaaagctgcaacaagccgtgcttccttaaggacacaggaacaggtgctgcctttctaccaacaggttgaagataaccccgcaaccctaatacaacgacaacaatgggggccctttgttcaactggataagacaaacccagcagactgctaccaacaacacatcattggaggggccctcttttagattgcttattagccggagttcaataat

SEQ ID NO: 127113 - DNA, 1036 bp, Zea mays
  Clone ID: MRT4577_47392C.1
gacccactcgtgcggtcggcccttttttttttcttttccatggataaagaacatcagtttctcatcgtgtattgaacattacattagtttcccgtgacaaaaaaggacatgagggaaaaaacgatgaagatacaacaagaaatcgaaaccttctcatgctgttagattggttaactgacctacacaatttgtcaaacaactcaaccaagcactacgtgagggccttattatacaagtgtgttcaagcacatataacagcttgagcgactagaagcatgcgcgagctcatctctaagctttgagctctttattcatctaccctccaccgtgtgtatgctatctatggccagcatatagtggcagtaccgtatgaatgtgcgtgcatgccagacaaccacggtattgggtggtatacgtatacgtacctctccgtctgccggcgcagcggaacgtggcgagcgcagcagactagcacttccagcaggaggcggcaatgacgggcttgcccttccagccgaggacgaggcaccccttctcctcagcaaccgtgtacccgccgccgccggcgttctcctccagccactcccgcgccctggccgccatcctgatcggcatggactggaacccggcgcggctcatgcggcggcgccactggtcagcgcgctcgtgccgctccacgcgcgccgcgccctcgcagccgaccacgttccggatctccgcgccgaagtggaactgctccacgcgcgcgcggcgcgcgtcgtagcgcgggagcgccgcgtccagcgcgtcgaacacggccgcgtagtagtggagcgcctccatgaaccggcccaggaagaagggcccgttgtggccggcgtcctgctccacgaggacgaacgccttgggcgacaacttgcggatggtctggagcacggagttgagcgccccgcggctctccttcaccacgcagtgcagctccaggacgctgttgatggccacggcctcgtcggcggcgatcccgaggtcgtcgatgtgcaggctctcgagactgcgg

SEQ ID NO: 127114 - DNA, 1893 bp, Zea mays
  unsure (1)..(1893): unsure at all n locations
  Clone ID: MRT4577_47393C.1
caccagccgntccgccatggaagagctgcacaaccagtcatgagtcaaccatgcacatttcatacgattccagttgcctattagtcacactgtcagtcttactttgcattgatagttgtactgtcaggaataatagattgaggctccccttatttattgataagtaatgcacatgccaaaacttgtgctgttgctatacttatatctgttaaagtgtgcacccaaacatataggtctgttgtagagcctgtgccaaatgatgttcatgattacaaaatttctgttatacatcactcttgaatgctataatatatcatggttattctggttctccaaataacttttatcttctacagaaatctgcttcggtgcttcattaattattccagcaagtcatcattgtgtgattatcctcattaattgatggagatcattataaatctttatgcttttccctgatgcagacctgattcatgtcctttcttctgtcccaagggatcttaacttcattgaccacaccggtgacgttggatcaaaagaacctgagaaagttcaacaaattatagtcgatgctggaatttacttgtcagggaggacaacttctttcgaggaacacagaaacgagcagctcctgaggcttttaagttctttacaggcatttcttgctctctgtgcttgctttgttttcattggtcttaataatttcctcaccaatttatctcctccgtaataggttctccatgggtcatattaaaccggcaatttatagagtactgcattcttgcttgggagaatctccctaggattcttctcatgtacttcaacaatgtaatacaacctcaggaagggtatttccagacagtcatctgcaactcactggacttccgtaatttcactgtgaacaatgacttgaggttcatggtgcaagatgattccgctcagaaaaagtcccttttcacgagcagggaacattatggtcacatggtggatagtggggcacccttcgcaaggccgtttcaggagaatgatcctctgctggaccagatcgacggcaatatactcaagcgttggagccatggaccagttcctggtgcttggtgcacaggaaggaagaggtggttcagtgatccatgttcccagtggggcgatgtgaatgttttgagaccaggtcctcaagcagtgatgttgcaccaatatgtaaatcggaccttagaagaagcaaagtctagcagcaattcatgcaggcggtagcagcattggcgtctagaacctcatgtcccatggttgaaagctttgagctttttccgcttatccactaagggttctccactctgctgaataaatagctgccacatgtctaagctgaaacaagcactcgtcgcacctggaacaaagccatggagggatgttcttttctgatattttcatgatgactatcatagtcacggatcaggagtttcactttggtctgtgattaatctgtgcaatccccatatttggctcatataacacttccaggcgctgataataggctgaagcttatataactactgttgtttatatgttgcggttatttgttggacagcttatattcatgctagtagatcaagttacgaatcccttatgctcccctgttgtgaggactgtagactgtagaacaagggattttgttacttgttagtcttactgaattcatgttgtgctttggacttacataatatgcctagtcctgtattgtacctaaaatgagactccagtcatctcagtttacctttgaggggtgtttggaagcatattattttttgcagtttcaaagcaatactatggtctttaagaattaaaaaaaagggggggggggggggggggggggggggggggggggggggggggggg

SEQ ID NO: 127115 - DNA, 381 bp, Zea mays
  Clone ID: MRT4577_47394C.1
atggccgccggatgcagtcctcacagattgatcgacatgatcgatggctggcagtccgctcaccatgccatcgtgtccaagcttgcggagtgcctggaagttgacatggccatacctctcgtgccagcaccatgccacatcctcgacgcgcgcagtgaggcacaccggagcggcgatattcatgtcgaggaggtagagtcggctcagttaccgcagcactttggcgagcagttgccgctgcaggtcgaagagatgcaggatcccctcctcgatgacgaccttcaaaccctcctcatctgtcacacccggtttcgaaagataaaccgaatgcgaaccatgtacgtgccaggatcagaactcacgtacacaacgattacataa

SEQ ID NO: 127116 - DNA, 244 bp, Zea mays
  Clone ID: MRT4577_47395C.1
ggggagcacaaagtagatagggttcacgagcggtacaaaagtggacacgattctaggccagttaacatcctaacaaacggggcaagggcaacatcgcatcatgaggccgcaagggtgacaaatcagggtaactggtctcgcctccgaggcaagaatattgcagtagtcgggggtcgtccataaaacaataacacaagggcctatctggtgaagccggaggtccacccagatcaacacagaccat

SEQ ID NO: 127117 - DNA, 1023 bp, Zea mays
  Clone ID: MRT4577_47396C.1
ccctccgaggccggccgcggcgagctgactgcgtgcgaaccgaatagcgcgtccgccgccgccgctccctctccacctctattttctgcccctcgcctcccccataccggggcccggtaaccagcatccctcggcagccgctgccgaccgatccgtgtccgtgcgagacgcgggagggattggcgccggaggctgaccgggatgttctccggcgactggacgccgccgtgcggcagctgctgcaccaagaaatacgcgagcctcgtgcagatcccatggagggtgttctgcaagaaggggtgcaacgcggacggcgacacctgggacgagtgcataggaaaatgtactgaaatatgctacaaagatccggtgttagaagatcgccagtggagcgcttacattgaccgatctccagggcaggatagttactctttggaatgcttcaatgcttgtgtgtctggctgtggattcagatttgacatcccaacggagaaggtcgaagaaatcaagcccaataggccatccaaaccatcagctcctgaacctgaagtgaaacaaactaggaatgcagattgtaatgaagatgtgccgtgcacgtcagcctagtttgagtgttggcgtgcctcaaattttgtaaagccaatgtgcttctccgttgtatttctactcgtcctattttcccatggaaaactcacgggaaactttatctagcttagctctagtttggaaactcaaatcccttcgtggatggaaggggtttgagggacaaattagtttattttcatcttaatcccttccaatccccgggtgatttgagtttacaaactagcctttagagtaaagatttaccacattggcaatgaaagatgatggcctgggaactaggtgaagatttactgcattggtggtgataagtaatggcctgaccctgatgagtatagtaattcgacgatgtaatggtcttgagtttatattccatgcatcacacatttcaatgactcgtgatcatggtaatgaagtact

SEQ ID NO: 127118 - DNA, 423 bp, Zea mays
  Clone ID: MRT4577_47397C.1
aaatttattttttttttttttttttttttttgtgtgttttttgtggtttttttgtttttagccgcgaacaaaaaccttggtcatttttttttcggctcggttcatagggggggccaccaaagcgaacaacaggggtcccaacaactaatccaaagggagaacggcccctaacacggggacagaagcgaacgggcacccggttctttagatgggtaagataactcggccgaagccaggaggggcccacacataaggcccttcaggcggcgtcttcgccgccggcgaagccgccaccaccacccttgggccgaccggcggaaccgccaccggcttcggaggcggcggcaccacccttgggccgaccggcgtagccgccaccggcgtataaccgccgttacggggcccgcaccataaccccccccg

SEQ ID NO: 127119 - DNA, 262 bp, Zea mays
  Clone ID: MRT4577_47398C.1
gtcgctactggacgacgactgggaccagacacaccatagcctctccaggcaaaggacactgcctgcagagggtacagagccacgggcatcaaaggcattcgcatatactcaggccgacgccaaagacctcgccggcctgcgcaactacgccatatcgctcatcctacgacaccgcaaacgtgaagacacgtgctagaccaattggccacaagcgcctcgatggaaaactcaagaggactgagcaacgtgcgcctctactacc

SEQ ID NO: 127120 - DNA, 848 bp, Zea mays
  Clone ID: MRT4577_47399C.1
gggagaaagtaagtggcgtacgccacaccccctccccctgtatctacacccattgaaacgtttattgtctgacaatctccgacgcgacgcgcaacgccccatgcaaatccctacgtcggtcgatcgatgcgcacagaaggagagcttgtcagcaatggtaacaacgcagagtacgcgggttatgttaagtaaagtaaagtaaggacagcaagccagtaatgagaataagctcttcatcttagtttccgctttcagacaagtacagcgtccacttttctcatatttgcaaattgcagatcttaatcttaataggatgttggctaaaataagggagggatcggatccaaatacgcagtgcaagatgaatggccgaaagaaagattagaaagtatgccctcgattgggctgtgaccgacacactcacattgagtcgccgatacaggtagtggtcagtctgcgcaaagccataataccagatatcggaaagcgaagcgtggtgctaacatgactaaaaaaacgattcggaaatctggaacgaagagaagttagtaaataggccttttgggaagcccttgatcgagtagtgaaagcatttgatccatcagatcagtgcttgatcttctacttatacttaataggttcaagacctaaataaaggaatgaaaacagctgcaagatccgcttacttctttctcttagtcagctctatctcatattgcctacgagctctcgtagtatctcacagcagtatcgaataatgaaaagaaggaagctctattgaataagccaaggatagagagaggcccccttaaagaactatttgagaaaaggaatatatctccaggtta

SEQ ID NO: 127121 - DNA, 483 bp, Zea mays
  unsure (1)..(483): unsure at all n locations
  Clone ID: MRT4577_4739C.1
tttcgaattcttcccccctctccgatactcgacgcgcaccgatgcgggcgatgtcgtcggcggttaatggtatgctgcggccacggctgctcggggcagcgcgcgttcgcggcggaattttttttgttgcccgttcttcgttctaattcttttttctttgagttgtgcccagagatcgaaaggtgcgttgatttgatttagtttttttaattacncgagcgcccgtggtaattaattatgtacgtacttatatatatatacattacgccgaagaggaaggagcactttgtataagagaggaatggggaacgtacttatgggtggggggccagtgtgtcagcgtctgcctgtctgtactgtacatggcttataggagtcacatgcagagagggagggccctggctttgcggtggcattcttttggtacatggatcaagaataaattgaatttgattcttggtgtttggaaagaggtgtacaccc

SEQ ID NO: 127122 - DNA, 366 bp, Zea mays
  unsure (1)..(366): unsure at all n locations
  Clone ID: MRT4577_473C.1
aaaacgggaatcccggggcccaaagcattatcaggaatcccagcacccaaacgggggaaaccccaatcaagcgggggggccggggggtccacagacccccccctaacccgctaaataaaaccgggggcggtccctggtaaactaagcccccccctcagaccccccccctttttttcagacccaaaggacccgcccccgggggggccccccatgccggggggggggcggcccacccgcccctaccagagggatctaggggggctgtccccagtcagggcccttgccccccttggggggggggccctgggggggcccccccttttggggggccttggcgacgttcatccccttnacgacctggccgaa

SEQ ID NO: 127123 - DNA, 2157 bp, Zea mays
  Clone ID: MRT4577_47400C.1
cctcgaggctctggccgggctcgcggcagcagcaactgcagtggcggcgcctacccccgcgtgcctccgtctcccgctcctcttccgcgccccgcgctccggcttctgcggatctcgtgcagtgccaccactatgggagacgagacctcgacctccgttgctcctcaggagcaggaatccactgtggctgggagtgtcaagcaacagctctccaggctggtcctttcatccctccagactacattgcccgatgtggaggtagaaccgatggttgaagtttcagcaaagttcgctgactaccagtgcaacaatgctatgggattatggtcaaaggttaaaggatctggaacaattttcaaaaaccctaattccattgggcaggccattgccaagaatctgccgtcttctgatattattgaatctgcatctgttgctggacctggttttgtgaacattaccttatcaaaccgctgggttgcacagagaatacaagatatgcttgttaacggcatcaagacttgggcaccagttctgccagtaaataggacagtggttgatttttcatcacctaatattgcaaaggaaatgcatgtgggacatttaaggtctacaattattggagatacattagcacgcatgtttgagttctcgaatgttgttgttctgcgcagaaaccatgtgggagattggggtacacagtttgggatgctaatagaatatctttttgagaaatttccaaattggcaggagataggttgccaggccattggggaccttcagattttctataaagcatccaagcataggtttgacagtgatccagactttaaagcaagggctcaacaaggagttgttcggctacagggaggggaggataaatatcgagaagcatggaaaaagatttgtgacattagcaggagcgaatttgacttggtctacaagcgcctaaatgtggtgcttgaagaaaagggggagagtttctataatccttatattcctcaagtgctggaggaattgagtaacaaaggcttgatcaaggagagtgagggtgcccgagttatatttattcaaggtcatcaaatccctttgattgttgttaagagtgatggtggcttcaactatgcctcaacagacttaactgctctttggtatcggctcaatgttgagcaggcagagtggatcatatatgttacagatgttggtcagcagcagcactttgacatggttttcagtgctgcaaagatggccggttggctcccagatccaagtgaaaagaagtttccgaaaacaagccatgttggatttggtcttgttcttggttcagatggcaagcggttccgaacccgcagtactgaggttgttcgattggtagagctacttgatgaggctaaatctcggagcaaatcagaactactacaacggctcactgaaaatggcaaaattgttgactggacggatgaggaattagatcaaacttcagaggctgttggatatggtgctgtgaagtacgctgatctaaaaaataacaggctcactaattacacatttagttttgaacaaatgctgagcgataagggaaatactgctgtgtaccttcagtatgcacatgctcgtatttgttccattattcggaaatccaacaagaacgtggaagagctgaagatgagtggagccatttctctcgaccatccggatgagcgcgtgttggggctgtatcttatccgatttgcagaggttgttgaagaggcatgcacgaatctacttccaaatgttgtgtgtgaatacttgtacaatctatctgaaatgttcacaaaattctataccaactgccaggtggttgggtcgccggaggagacgagccggttgttgctttgccaggcgactgctgttgtcatgcgacagtgcttcaacctgctcgggatcacgccagtatacaagctgtgattggctgcatgttcgattaatacattcaacatgtagaaaccccaattcatcatggttgcagttttggtcttgtaacctagttgaggcagttaacataatctactgtcctgtttgaaaacagaaggaactcaaaaggttgtatcaaaatgtgcttgcagagtttctgttactgttaggctagaattgcaaaaaaaaaaaaaaaaaagacgacgc

SEQ ID NO: 127124 - DNA, 426 bp, Zea mays
  Clone ID: MRT4577_47401C.1
gaattcgccaacaaccccccaaagccgcaagcgagagagaggaaggaagaaaaaaaatggcatcgtcggcccgcgccgccgcctccgccgcgagatcggctctccgccgggcgcccctcgccgcctcctcgtcctcttcagctgccgggatcctccacaggtcggcggcggcgggcctggagacgcggatgcccctgcacagcgcggcgtcggcggcgcgcctcggatcctgcatcacccgagatggcgacaatgctttctcatggaactccaggcgcatgttcagttcaaatgagaaacatctgcctgcaatatctgacccgaaaattgagactgcatttaaggatttgatggctgctagctggaacgagcttccaggttctcttgtggaggaagcaaagaaagcagtatctatggctactgatg

SEQ ID NO: 127125 - DNA, 374 bp, Zea mays
  Clone ID: MRT4577_47402C.1
gtcatacacttgtatcgtactcccagctctcaaactgggacaagtgctcctcatgggagggcttcaaggtgtcaccattcaccgcaggagcgaggacattcagcttcgaatggctcttggtggtggcagtggccttccccgttgtgctgatcgacgaggttctcaaatttgtggggcggtgcctgacagcgcgtgcccggaaacaatcagggaagaggaaggcagagtagatgctagtgatcatcggtatttagaatctgtagtgccacggggaatcgatattcaatgtgacacccccattgtttttgagctgctaagggctctcgatcctttcagagtgttttaggttgggaatatgaccgtgcatgacaggc

SEQ ID NO: 127126 - DNA, 4362 bp, Zea mays
  Clone ID: MRT4577_47403C.1
cccacgcgtccgtcttaagacaacagggtggccttctcttctccagggcagagccaaaacacaagcaggagatagttagactgctcaaagaagatggtgaagtggttgcgaatgactggcgatggggtgaatgatgcaccagctcttaaactggccgatattggagttgcaatgggcattacagggactgaggttgctaaagaagcttcagatatggtacttgcagatgataacttcagtactatagtcgcagcagttggtgaagggaggtctatttacaacaacatgaaggcttttattagatatatgatctcctcaaacatcggagaagtcgcgtccatattcttgacatcggctttgggtattccagaaggtctcatcccagtgcaacttctatgggtcaatctagttacggatggccctccagcgacagctttagggttcaacccacctgataaagacatcatgaagaaacctcctcggagaagtgatgactcgttgatcacgccttggatcctgtttcgctatatggttattggcctttatgttggggttgccacagtgggaatcttcatcatctggtacacgcatggcagtttcctgggaattgacctggctagtgatggccatacccttgtgtcgtactcccagctctcaaactgggggcagtgctcctcatgggagggcttcaaggtgtcgccattcactgcaggagcgaggacattcagctttgatgcaaatccatgcgattacttccagggtggcaagattaaagcaacgaccctctctttgtctgtcttggtggcaattgagatgttcaactcactgaatgccctgtcagaggatggcagcctcctgagcatgccgccatgggttaatccatggcttcttcttcgccccctcccgctcctcacctgcaccatccgctcggtgttggcctttatggcgcggttccataaaaaggagttcttaatccaacagggacgccttttcttctgcagggcagtgccaaaacatgagccggaaagagcaatactgctcaaggcagagggtttcgtggtgcccatggttgttcactaggtgaatggctgcggaggctctccccagtcgtagaggcgggttgcaaccttcctcgcgagaccgtgggagggaagggggtatttaactgacggcggggcggggctgcgcgctctcgcggcagcagcaactgcagtggcggcgcctacccccacgcgcctccgcctcccgctcctctcccgcaccctgcgctctggtcactgtagaagctcttattcctccaggctcctacggttctcgtgcagtgccaccaccatgggagatgagacctcaacctcggttgctccccaggagcaggaatccactgtggctgggagtgtcaagcaacagctctccgggctggtccttatgtccctccgggctactgtgcctgaggtggaggtagaaccgatggttgaagtttcagcaaagtttgctgactaccaatgcaacaatgctatgggattatggtcaaaggttaaaggatctggaaccagtttcaaaaaccctaatgccattggacaggccattgccaagaacttgccttcttctgatattattgaatccacatctgttgctggacctggttttgtgaatattgtcttatcaaaccgctgggttgcacagagaatacaagacatgctcgttaacggtatcaagacttgggcaccaattcttccagtaaagagggcagtgattgatttttcatcacctaatattgcaaaggaaatgcatgtgggacatttaaggtctacaattattggagatacattagcacgcatgtttgagttctcgaatgttgatgttctgcgaagaaaccatgtaggagattggggtacacagttcgggatgctaatagaatatctttttgagaaatttccaaattggcaagagattggtagccaggccattggagaccttcagattttctataaagcatccaagcatagatttgacaatgatccagaatttaaagcaagggctcaacaaggagttgttcggctacagggaggagaagagagatatcgagaagcatggaaaaagatttgtgacattagcaggagtgaatttgacttggtctacaaacgcctaaatgtggtgcttgaagaaaagggggagagtttctataatccttatattcctcaagtgttggaggaattgagtagcaaaggcttgatcaaggagagtgagggtgccagagttatatttattcaaggtcatcagatccccttgatagtggttaagagtgatggtggcttcaactatgcctcgactgacttggctgccctttggtatcggctcaatgttgagcaggcagagtggatcatatacgtgacagatgttggtcagcagcagcactttgacatgtttttcagtgctgcaaagatggctggttggctgccaggtccaaacgaaaagaagtttccgaaaacaagccatgttggatttggtctagttcttggttcagatggcaagcggttccgaacgcgcagtactgaggttgttcgattggtagagctacttgatgaggctaaatctcggagcaaatcagaactactacaacggctcactgaaaatggcaaaattgttgactggacggatgaggaattagagcaaacttcagaggcagttggatatggtgctgtgaagtatgctgatctcaagaataatcgtctgactaattacacatttagttttgaacaaatgctgagcgataagggaaatactgctgtgtaccttcagtatgcacatgctcgtatttgttccattattcggaaatccaacaaggatgtggaagatctgaagatgactggagccatttctcttgaccatccagatgagcgtgtgttggggctgtatcttatccgatttgctgaggtggttgaagaggcatgcacgaatctgcttccaaatgttgtgtgtgaatacttgtacaatctatctgaaatgttcacaaaattctataccaactgtcaggtggtcgggtcaccggaggagacgagccgactgttgctttgccaagcgactgctgttgtcatgcgacagtgcttcaatctgctagggatcaccccagtctacaagctgtgatcggctgcatgtttgaagtttgatttatacattcaacatcgctttacgtagaaacccattcatcatggttgcagttttggccttgtaacctagttgaggcagttaacagactataatccatctccctgtttgaaaatagaagcaactcaaaagtttgtaacaaaatatgctctgcagagtttctattgatccattacattacgtaggccatgtccgtttcttttgggctgcatttcttgatcctctacgtgcctttcctggctcaagtgtttgggattgtgcccctcagtttgaacgaatggctcttggtgatagcagtggccttaccagtggtgctgatcgatgaggttctcaaatttgtggggcggtgcctgacagctcgtgcccgaaaacaatcagggaagaggaaggcagagtagatgctagtgatcatcggtattagaatctgtagcgccacgggaatcgatattggatgtgacaccccattgtttttgagttgctaaggtctctcgatcctttctgagtctttttagactgggaatatgacagtccaggacaggcaaggatattctataggactcataatcagatcgcattgaacacactgcattcttttcgttgtaacaaatgctggtgctgtgaacatgctggagatacagcaatggctacctgacgctttttcgctatgatggtgcgctatatatgctactactgttctgttgcgaattttctgacatgttgctcactgctcagtaatatatttgttagagccgtatgttcagttatgtttgcttgtgagattcctcttgtgcagatgaaatccgcagcatggctattgatcatatactgctgtacacggaggatgcaagattattttagcttcacctgccctcctcgctgttgatcatctttgaaaaaactctcctcatggacataccatcgaggtcccccaagttcgctgccacggtggcctctgtcccgtcgctgacggtagactggttgcgatggaatttggacgtactcctggaaactagctgcgtgttgtctgtgccagagctgtccggcgacgcctcctgcccctgccgcgcgagctcgaggcaccagagcacgtcccctatggcgggccgctccacgccgtactccgcgaggcacttttccgcggtgtcgacgaacttcttgagcgactcccgcagtatcgacccagcgatccgctggtcg

SEQ ID NO: 127127 - DNA, 1122 bp, Zea mays
  Clone ID: MRT4577_47404C.1
acttgctgttgatgacgagcgtcaaacattaggtgaaccctggaaaccttctgttacaaagccaacagaggtgggcatgcagtccaagaacaataagctcgctaatgtcgtgagcctgcttcagaagctccagcagcttagcgtgagcaaggatgaggacgcacctccggtcgaccatatggctttcctgtgcgagacagaaagcccggaccaccgttacgtgtctgagatactgctggcctcgggtcttctgatgaaagagctaggttcaggacaggcaggcctccagctccagctccactcctctggctacccgatcaaccctgacttgttccacgtgctggagcaaagaaaggcaggatgggccagcatacctgacggcatccaccagagcagcaggagcggcgccaagtctgatcccaagagagcgcaccggaagctggtgtttgacaccgcgaacgagcttctcctccagaagtttgagaaggaaaccacagtttacgcggtcagttcctccaccggagcgaaggatcatccacctgcaaaggctcttagcgggcagcaactgctgaagtttgtatcttcagaaatcgaaggcatgggtacggagcgatcgtccacctgccagatggaaggaggcgtgatacctgacgcagagatcctgcagaggctgcagggatggacgagcttcagcagggagctccctgggatggtgctggagatcgagaggtcggtattcaaggagctggtggacgaggtggtgcatggggagtctgccgacggcccggagatgaaggcggcaggcaggcggagaaggcggcggctctttgcttgatatggtttgtgtgaccatcaccatgcaccgggcgggttgtccaagtggatgggcctgatcatgctgtaactttgattgccgtatgaactttttttctctctctctcaagagagaggtgcacaagttgtactgttgtagtataggcagcgcagatttgcagaggcatgaaaaatgggcattcgtttgtgctgtatagatactctgtataccattgcttttttattcctcgcgtttcattggggatgatgctatttcagtaaagaagtgtacaaatggcagggttcatc

SEQ ID NO: 127128 - DNA, 277 bp, Zea mays
  Clone ID: MRT4577_47405C.1
ggcctacctatcccgagagacctcggggggccccttcttatccgggggcgtcaacattcaccacccctaccactaattcggccgtatcctacataccctacgatgttacgaccacctgacaacaaccgtatcgcttttgtagccccacatccaggtgtacaagaagctaatatatatcctcgtccacatgaaccccctgatcctggatgaaaacaacccacatttagattggatgtactaataaatttacttacagtttatcatagagctatttaat

SEQ ID NO: 127129 - DNA, 563 bp, Zea mays
  Clone ID: MRT4577_47406C.1
agcagtggtaacaacgcagagtacgcggggtcaccactatctacccaaaccaccagtgccgacaatctcgcgtagaggagggcagagcatcactggagttggccgcttcatcgatgtggcaactgcggtgctgtaggagactcgacgtcggccgagtggtgtacacctggatcttttgctggccgatttggtgtctggggtgccagggggagctcgtcggcaacaagaatcgccgcgcgtccgccttgtatcgtggacaaccacccgctgtgcttacccttcgacgagcaagtgatcgaggatcccggtacccagcaggtggaaattgctgagcatgagctcattgaaggagaagaagaggtggtccaggaggagcctttcaacgaagagtacaggcttatctaggtggcgtctcccattcagctttatggcgccaaggaataatgcttaattcgctttattgttatcatctatttttgtaagacttcagctatataataatgatatttgtgacgaaaaaaaaaaaaaaaaaaaaaaaagtactctgcgttgttaccactgct

SEQ ID NO: 127130 - DNA, 250 bp, Zea mays
  Clone ID: MRT4577_47407C.1
aatacaaaacaatcttattccacaaacatcatttatatcaacatctaatcttcccatcaaatacctatatattctatcatttttcaaaaacaatcttcacaatttaaactcaaaaccatcatcatctctttctcatcctaataactacccaaacttatttaaatactaacacatccccctcaacatatatacatctttttcctataaataaaacatctatccacctacccttaatacattattcatacta

SEQ ID NO: 127131 - DNA, 280 bp, Zea mays
  unsure (1)..(280): unsure at all n locations
  Clone ID: MRT4577_47408C.1
angcatcncagnnccacagncncanncancgggggncaaggcagcaannagcaannaccggaaggcaancgangaangccnncnncncaaaccgccnnncacaacaannnnngagnaccnncagnnaccacaaanggnggcnacnncnangaanngcnnggggcaccgnggaaggggnnancnngcngcngcagnnnccgaccccnangnnccangggaaagnanggcnaaacanaaaanngagncagcaggcggcccnnngaacaagcaacncaaccaa

SEQ ID NO: 127132 - DNA, 396 bp, Zea mays
  Clone ID: MRT4577_47409C.1
gcttaattcacttttagtttttcattaaattacccaatacggtgtcgtaatccggaccaaacaccctaaagttgaggaaaaaggccccaaagggggccaaatatccgcccaacaacaaaaaagtgggggggaaccgaggccataaagcgcccaaaccgggcacaaaagtccacatggaattaaacaagggccaggggagccccaggaaaaaagcgaaacggaacggggctggagcaaaaaaaaagccgaaccgggtggaaaaaaaaaaacggaagggagggaaaaactcaaaaaaggcgccccggggagcccccaaccccggccatgaaggaaaaaaacccccttaggcgcccggcggggaccagggaggggcccaggaacccccccaggaccccg

SEQ ID NO: 127133 - DNA, 600 bp, Zea mays
  Clone ID: MRT4577_4740C.1
ggaacaaaggaattcctgtgttaaccagcgttaaatacagagcctaacttacaacgtcgtagctattgcaacccattcaaacacattccagaagggggcatggtaaactagtatacatattacatatattataccgatgctttacacaaatgtcatgcactgacactcctggacactcgaccgttattagtacctaccactacagctgccacctgtctttccatcaccctcaattgtttatcaaccctgcatatggtgtgcttcgttcgcttgttgcacagcgcattttaaaacctccatgaaaggaacagatcaaaagcgacaactagcagcgcatggcgatcagccacgaatttaaaaacttgcagttgcaagcaaccaccacttcaacaattagcctaataaaatgcactgatcaggatgtcaaaacaaattggactcgtcaactgcctgcctgcgctaatgttcctgttttcaccaatcgctcagcatcatcggtaatggtacaactatttcaatcccagcaaatcggcaaaaccaatcccaaaaatcataaacgatcgaaccatgcgatcgtcgatgatgtcgtagagaaaactg

SEQ ID NO: 127134 - DNA, 806 bp, Zea mays
  Clone ID: MRT4577_47410C.1
gaacaggacggggctattgttcatctatttataggcacaggacgcagcctgtgtaaaattacatccatgcccttgacatttaatattgactaagggataatctatcgaggactagacagccttttcccctttaagtcggtttcattttccactgctaagccgaagcttttccgtacgtagcttcgaaactggttcatccttctcccagaccgcacctttcatatcgtgtacaccttcatcccaacgccgaaagtccctgtgaatatattatacttggaaaacatattagtcatgtttttgaggaccttcggaagatgaaggcccccaacagtagtaatactctagaatgtccacatttatgagaaaattaccaaaaaacaaacatgaaaaggctagcaacatcatcatacaactgattgtgcccacaaaaaacatacgttgattagtcttgcttatatgagatacaggggaactaatctattcccctgctatctccagcagctctcttatctcattccccatctcacctcctatttcaaacttctatgcatttgttagaactctggttgctaatcagcaaatggtcaaagggctcctttgctaaagtaaggagcaatgctgctgtagaacaagaaaaggagcatcactaacaagtggagaatggcttgctcaccgaggggcgtgaagagttggagaccctccggcatcactaacaagtcggcaatgttagctcctcaggatgcccgagttggcagcgatctcagggatggaggagaggaagcccgagcgttgaatgagagatatcc

SEQ ID NO: 127135 - DNA, 491 bp, Zea mays
  Clone ID: MRT4577_47411C.1
taggaattcggcacgagctctggcacccccggctgctctggcagcggcaccgacgacagcccagcagttccagtacagcggcaggctggttccttcttctcccccggctgctgctgctgccgatcagaagcccggcttggcctagcgacaaccaacatgcatgcatgaatggccgctagacaacaaccaccagtctctcaaccacgcacgcacgcaagcacctaccttcttcaattccttcggtacacgatcgagtcatacatcatgcatgcatctctctgctagtaggtaggtcgctctctgcttgacatgtacatcatgcatgcatgcagtctacgtacgtacgtacgtacagatagagtagtggtacttactgatcaccatgcatcacctcgccctgcacgtacgtacacttgcatgataatgattgatgatgatgagagacttgactaacttgttgacggcggcgatcgatgtgtgcgctcactctg

SEQ ID NO: 127136 - DNA, 447 bp, Zea mays
  Clone ID: MRT4577_47412C.1
tccgaaaagggggagaaaaacatactagactcaacataaaaaaaaaaaaaaaaataaaaaatcgccaggaaaccgcgcatacaaagataaagagaaaacctgaataccatcgcccctatggtccccgccgatcttaaatttagggccccccccggggggggggattctatcttgaccttattcaaacaccacaccttcagggggggcccggaaccccatttcaccctatgtggaatgaaataaacgcgacccttgcatccctttcttttaaaagatggccactctggaaaaccctggggttaaccaaattaatacagttgataaaaaatcccctttaacgacattggcaaaaaattgaaagggacatcacaattgcccccttccaaaaatggatactaccctaaatgggcatatgaaaatgttaccctttatttttaataaaaagtg

SEQ ID NO: 127137 - DNA, 474 bp, Zea mays
  Clone ID: MRT4577_47413C.1
gcacgaggtcgatcgccgcctcctgctcggcttcttcccacctgcggttgcaccgatcacccagggagggacagggcagctcgccgctccaactccgacgaccggccggccatgagctaccaggctcctcctgccggcaccgcaggtacgtacttgtgacgccaggtttgttaaatcatatcctcagcaagatgcagcctttattacggccagcatctctgatcgatcggttttgtttcggctgtatagcctacccgccgccgggcacggcctacccgccgccaggtcagcaggcgtacccgccgcctgcctacggtgcgccgccacccatggccgccggcgggtacccgcccccgccgcctccgcagccgcaggactccaagcgcagcaacgacggcttcttgaaaggatgcttggccgcgctctgctgctgctgcatgctcgacatgtgcttctgagattgagttgccgtca

SEQ ID NO: 127138 - DNA, 408 bp, Zea mays
  Clone ID: MRT4577_47414C.1
ctaattaagggaaggaaataaagctccgtcgtcgagccgatcgacgaccaccatcaccatgtcggcggcacggcggtgcggcggccggcggcggctggagagggcggcggcggcgggagacaacgccaacggatacgtcgagactgaccccaccggtcgctatggacggttcgacgagctcctgggcaaaggcgccatgaagtcggcgtaccggggcttcgacgaggagcgcggcgtggaggtggcgtggaaccaggcgagcctcgccgacgtgctccgctccccggacgccgtgcagcgcatgtactcggaggtgcagctgctgagcgagctccggcacgacggcatcatcggcttccacgcgtcctgggtggacgtgcccgggcgcagcttcaacttcatcaccga

SEQ ID NO: 127139 - DNA, 183 bp, Zea mays
  Clone ID: MRT4577_47415C.1
atccacacccccaccaaactaccgaagcggaagggggggaaaatccacgcgacgacgacgcgacgatacgaagggaagggtcgcaggagcgagacatgtccccacccgggtccaaactctagccacctcccccgtcagtgtccccagatctcgctgcagtctgacccgcctcgcttcgatgtg

SEQ ID NO: 127140 - DNA, 288 bp, Zea mays
  Clone ID: MRT4577_47416C.1
ctcactagctcacatatcttcccttgttcagccatacctgtcaccagtggtgtcttcaatgtgcgaaaacacagtcgtttaaccctacaggatccaacacgcaatcgcaacaggcatcttaccatcatcacacttgatcctcaaacaaccgtcagccctattacaagaataacctttaggtccatttgacagccacaaaacatcactgcacatcaactacaacaacttgagctagcaaaccttgcttgatactctcaccaacatcactgtctcccaatgaaccaactg

SEQ ID NO: 127141 - DNA, 111 bp, Zea mays
  Clone ID: MRT4577_47417C.1
ggagaatactgatggttcacagaagatatctggcgatagtttatagaatgtgtacgaatcttttgtgagcgaatgacaccattggttcgattgaagatccctttgaccagg

SEQ ID NO: 127142 - DNA, 386 bp, Zea mays
  Clone ID: MRT4577_47418C.1
aaaaccattggggccgggaaacccatcgtccctatctctttttttttcattgggtacaacgggcacaaccccttggaccatttaaaccaattggtgaaatccaccaaaaccccgtaaacacaagacctaaaactcctttttaaccagacccctggggaacatggcaagtttgataaattaatctcgggaatctcaaaagcatgacccccgtgacccttgtgatcatggcgagcagaatgttcaaaaccggccccgaaaagcctttaattacttttaaaacgtgatccaccgggtcccctgactcactggacttattggctttgccgcctttggcaccaaacccaacgggcttaatggactttttcgcatcacccccagcgccggtc

SEQ ID NO: 127143 - DNA, 839 bp, Zea mays
  unsure (1)..(839): unsure at all n locations
  Clone ID: MRT4577_47419C.1
gattcaacagtgtcgtcagatcccactcctgctcgccattgctcggtgatttggtgcggtggctccacggccctcgcctccacctcacacggtcctatgcctctcggcgctgctctctggctccaggcggcacaccattccctccctcgttccttgactgcaagttgccaaaagcggccggatctacgagcgcggatccttcgaggcagctagacgcggcggatcctccactatggcagctcgtccctcaaagccgacgcctcagcaggctcagcgcccacgcccaccaagccgcctgcgcccaccaagccatccgcgcccatgggcccggtattgggatgacccatggagacgtgcgcaggcgcgtagcatctacaccatcggcaaggagcgcgggtggtcgcgatgggctccactgcggagacggagacagagaaggagcaggaggaggcagcggcggccagcgaggagctgcccgtcatgccctgggccaactccgttgcaaggtgacctgcccgtcatttcccgttacgcgttaaatcaagtgattattggatgccctgggccacctctgtaaattcccattaatcatttccctttaaatcttgattattggaatgcaattgaattttaaggatctaaacgggatgtaagcacgatgcaagccgcagcgaaagcataaaaaggaaggaaggttcgcagagtcagtgttcctgttcaggtcacaaatgaaacaagtgattgtatacgcagaaggtcaaccgtcctcccagcctcactcactcattccaatttcgttcccctctttgtctgnntctggnncataattgcatgcggac

SEQ ID NO: 127144 - DNA, 2115 bp, Zea mays
  Clone ID: MRT4577_47420C.1
ttcgttgcagctggaattggaagacgagccctatgtggttgacgacgaggaagatgatcccgaggcggcgaaggggaaggctccaagtaagaagaggaagctcccgcctctgttcagcccgggtgctcattaccactggaagctttgcggcgccaatagcggctaccactatatcccctgtgtggatttcgatggggatgggaggcagaggcaccatgaacgcagctgccaaaggtctcctgtgacatgtttggtgtcactccccaaggaatataaacaacctgctccatggcccgagaggaaggacaaggtttggtatgggaatgttgggcatcctaggttgtcaaattatgttaagggccacaattggctgaaccacagtggcgagtacttgatgttcccaccagatgaatgggagttcaaaggtagcgcaagacattatgttgaatcaattgacgagatggctcctgacatcgactggggtaaaaatatacgcataatattggatgtcggatgcaaaagcgctggctttggtattgctctactcgagaaagagtgataacactatctttaggccttacaaatgaccaaacagaccttgcgcaagttgcccttgaacgtggcatccctgcaacagttggcagtctgggatcgcgaaaatacccttccctagtggtgcatttgatgctattcactgtggtgaatgcaatataccatggcattctaatggtggaaaacttctcctagagataaatagaattcttcgtccaggaggatacttcatcatctcaagcagaagtgctgacctggagagtgaagaaggaatatcagcttcaatgaccgcactttgttggaatgcaatagcttacaatagtgacgatgtcagcgaggctggagtaaagatatttcagcgaccagtctcaaatgaggtatatgatctgagagcaaaaaaggatcctccattttgcaaggaagagcagaacaaagctagtgcatggtatactaatatcaaacattgcctgcacaaagcacctgttggtatcgaagaaagaggcagtgactggcctgaggagtggcccaagaggctcgagagtttccctgagtggcttggggaaacagaaacaagggtggcttctgatcataaccattggaaggctgttgttgagaaatcttatctggatggattgggcattgactggtcaaatatccgtaacataatggatatgagggctgtatatggaggatttgcagctgcactggcatctaaaaaggtttgggtcatgaatgttgttcctgtgcatgctgcagacaccctacccataatctacgagcgtggcctgatcggtgtgtatcatgattggtgtgaaccatttagtacatatccaaggtcctatgatcttttacatgctgaccatttattctcacgcctgaagatcagatgtaagcaacctgtctcaattgttgttgagatggaccgtattttgaggcctggaggttgggctatcatccgtgataaactcgagatccttgacccattggagacaatcttgaaatcactgcattgggaaattgtcatgaccttcagaaaggacaaggagggtatcatgtctgtaaagaaaacaacatggcgtccataaactgagctcagattcacaaggctccagcataccattttttgcactatactgctgtcgatttccccggattgtgagacagccattttgtgaatctggggtagatgtacaatatttgttcattcatctcatgacaatatgctcgccgcatctctgtcgggtagtttaagcccagttggatggttggttgtggttagcgttacattgatcaattctttgaagcagcatccaagacgaccagctctagtttcagaaaaagagggcccttcgattccataaacagggttgtacgagatacaagattgtttcttgttgtttaaaaatgtaacaatatagatatatgtaaaggttgtcactgaattaactgcttggtgatgttgtaagttgcaacaatccgtgaagattcaatgcatgaattttcttattgcaaaaaaaaaaaaaaattggttgtggttatttttattaaaaaaaaaaggggcgg

SEQ ID NO: 127145 - DNA, 125 bp, Zea mays
  Clone ID: MRT4577_47421C.1
acgtgcttcgacaactttggtgacaaggtgaagaattgcatcacctttaatgagccccagagccttacttcattttcctatcgaaccggggtctttgctccaggacgatgctcaccgggactaga

SEQ ID NO: 127146 - DNA, 421 bp, Zea mays
  Clone ID: MRT4577_47422C.1
gcggaagggctgtagccggcagtagagcagtctcggcgctcgacgctcgggggcggcagagacggagagacgagcggatttctatacgtcagctcgtttcggccccgcttgggggcttctcctcggcgtcgtcgctccctccgccgcctcttcctcttcgtgtcgagcgctacagagaaagctcgtggacgggcaacgaaccaacggcgttttcatacgcggaaccatcctcttcgttttcggattgcagtacgtgctacaatatcacatatctcgggtttatccgaagagggggttattcacctagctttcaccaccagtgattttgcggacgacggcctatggttcccaaatcaccgaccgatcgacgacgccattcttctccccggcaacataagctcacccatcgacctcatcagtg

SEQ ID NO: 127147 - DNA, 232 bp, Zea mays
  Clone ID: MRT4577_47423C.1
ctctaaatctatgagagaatgctgtctaattacattcatcaccggctattttactcatctcgagttctctttacatcaattacccaggctcttggctccaatgttgtcttactacatctcattcccgttcgccctattcgtcatacattttatctagcttcataggtaccatttgattacaccatctgtcgcctacacctacgactcctcctcaacatccttacttcctccc

SEQ ID NO: 127148 - DNA, 1116 bp, Zea mays
  Clone ID: MRT4577_47424C.1
gcccaatgaactagacgaattgctcactgctgtgccgtctgtggaccgcggaaggcggcaagccggcagtagagcagactcggcgctcgacgctcgggggcggcagaaacggagagacgagcggatttctatacgtcagctcgtttcggccccgcttgggggcttctcctcggcgtcgtcgctccctccgccgcctcttcctcttcgtgtcgagcgctacagagaaagctcgtggacgggcaacgaaccaacggcgtttccatacgcggaaccatcctcttcgttttcggattgcagtacgtgctacaatatcacatatctcgggtttatccgaagagctcacccatcgacctcatcagtggtgtgattgattcacgttacaacatcttctgcacggtgggctgttacccagagaatgtttttggagtgggttgttttccatagtacggaaaaatcatcaacacatcctcatacaagcttctgactgtattgtccacttctttctttggagacatatcaagttgtttggtgataatggatccaaagcattcggctgaagtgtccaagcatttagacaagcaaaatcaagcactaatggaaacatatcgagcaatgtcccatgagttgcataaactgcaggtagaagaagagacaatcatgcgcaagttgtatgaactgatgtccgcggaagggcttcttccaaagcgcaagaaagaaaagcaacatggggaaaatatcgtgggttcaactgagagcaaagaacaggaaccataaattcttatgcgacgagtaatgtgatatgacatcaatgccattttatctggagagttggtgcttgttaacttctgtatagcagttctctatcatcacaactctgcgaccactacatttaacttcacagtttaaaatttaacctgagtattagttccgtgaggaattacttacagacaaacataatcattccttttgctcggggttattcacctagctttcaccaccagtgattttgcggacgacggcctatggttcccaaatcaccgaccgatcgacgacgccatccttcttcccggcaacataagctcacccatcgacctcatgagtggtgcgattgattca

SEQ ID NO: 127149 - DNA, 310 bp, Zea mays
  unsure (1)..(310): unsure at all n locations
  Clone ID: MRT4577_47425C.1
ggctgggctggaatccaagcgattccaaggacggtgtggctggaccccancaggaagcaggtgctgcagtggcctatcgaggaggtggaagctctgagagaaaaaatcggtcactctcaaaaacagggtaatcaaggcaggacatcacgtctaggggaccgggatacaaacggaccaggctgacttggaggtgagcttcaaggtgtctccggcggccctggccggtgcctaaaccctggacccggcgctggcctacaacgcggagaaactgtgcggcgtgaaacccccggacctcaggggcggcgtgggg

SEQ ID NO: 127150 - DNA, 803 bp, Zea mays
  Clone ID: MRT4577_47426C.1
ctcgaggccggccgggaggcatagacagaacgcaccctccagtaaagtccccatggctgctttctggttgctgctgctgttcgtcgccagcgcagtccttgttcttcgtacatggagagctcaaagcttcgtcaacaaggcgcggcaggcagggccgaggtacccgccggggctggagccgtacccgctgatcgggcacctgccacagttcttggctaaccggcaccgcgtgctcgactggatgaccgaggcgctcgcgcgccagacgaccacgtgcacgttcgtgctgcgccggccgggaggcgtgcggggtgcgatcaccgcgaacccggcgaacgtggagcacttcctgcgcaccagcttcgaccactaccccaaggggccccggttcgcgtcgctgctgcacgacttcctcggccggggcatcttcaacgccgacggcgaggcctggcgcgcgcagcggaaggtcgccagccacgagttcaacacgcgctcgctccgagctttcgtggcgcgctgcgtgcacgccgagctacacggccgcctgctcccgctgctgcgccgcgccgcggcgtccggctcccccctcgacctccaggacgtgctcgagcggttcgcgttcgacaatatctgccgcgtcgccttcgaccacgaccctcgccagctcccggacgatggtgacgacactgcggacagcagcttcgccgatgcgttccgcgacgctgcgaatctcagcgcgggccggttccggtacgcggtcccggggttctggaagatcaagaaagcgctgaacttgggttctg

SEQ ID NO: 127151 - DNA, 1590 bp, Zea mays
  Clone ID: MRT4577_47427C.1
aggggccggccgggccggggtgttcaaaaaaaaaaaaaaaaaaagcccaatgaactagacgaattgctcactgctgtgccgtctgtggactgcggaaggcggcaagccggcagtagagcagactcggcgctcgacgctcgggggcggctgaaacagagagacgagcggatttctatacgtcagctcgtttcggcccccgcttgggggcttctcctcggcgtcgtcgctccctccgccgcctctttctcttcgccccgagcgctacagagaaagctcgtggacgggcaacgaaccagcggcgtttccatacgcggaaattgcagtacgtgctacaacctacaatatcacatatctcgggtttatccgaagagctcacccatcgacctcatcagtggtgtgattgattcacgttacaacatcttctgattacctcatcagtggtgtcattacgtcgaataatttgattggcacgaggatttagacaagcaaaatcaagcactaatggaaacatatcgagcaatgtcccatgagttgcataaactgcaggtagaagaagagacaatcatgcgcaagttgtatgaactgatgtccgcggaagggcttcttccaaagcgcaagaaagaaaagcaacatggggaaaatatagtgggttcaactgagagcaaagaacaggaaccataaattcttatgcgacgtgtaatgtgatatgacagcaatgccattttatctggagagttggtgcttgttaacttctgtatagcagttctctatcatcacaactctgcgaccactacatttaacttcacagtaaaatttaacctgagtattagttccgtgaggaattacttacagacaaacataatcattaatagtccttagggactgagtcaacgtctgtcaattctcagatgcctaatgtggtcagcacaatgtttaagtttgtaagatggatggctagttggctagcagctgggtatgtcctttctcttccctttcttctgcacgcaagcacccaaaccctaattgtactgggttcgtcctgcacgcttaagatcgatcttggttgacgataggacttgttgtccagtattagcttgtgaattgagtgtaaaagcaactccaagggactagcctgatccttttgtaaaggagacatatcaagttgtttggtgataatggatccaaagcattcggctgaagtgtccaagcatttagacaagcaaaatcaagcactaatggaaacatatcgagcaatgtcccatgagttgcataaactgcaggtagaagaagagacaatcatgcgcaagttgtatgaactgatgtccgcggaagggcttcttccaaagcgcaagaaagaaaagcaacatgtggaaaatatagtgggttcaactgagagcaaagaacaggaaccataaattcttatgcgacgtgtaatgtgatatgacagcaatgccattttatctggagagttggtgcttgttaacttctgtatagcagttctctatcatcacaactctgcgaccactacatttaacttcacagttgaaaatttaacctgagtattagttccgtgaggaattacttacagac

SEQ ID NO: 127152 - DNA, 300 bp, Zea mays
  unsure (1)..(300): unsure at all n locations
  Clone ID: MRT4577_47428C.1
cgaaccgaaatacccagccaacagccacaaccctcgcgccacgcgcccacgcccactggccaccgccccacccccacccgtgcccgtcccgtgctagcttagctctcggctctcgccatggacgctgcggagaggaggctggctcgcgtcgctgcccacctcgttccgtccttcccggtcccacacgccaccgggcctcccctcgcgcggtgtcccgcggcagcgtcctcgtcgtcgtcctcgccggcgggggacagctacaggcgcgtgcacggngacgttccgtcgcagccaccggag

SEQ ID NO: 127153 - DNA, 2459 bp, Zea mays
  unsure (1)..(2459): unsure at all n locations
  Clone ID: MRT4577_47429C.1
atctctgactgctcttgtcgttgcacaccttccttttgcgtggaaatcggttctggccttcaagcctgtaaagctcccccctttctgatccacaccatcgctgctgcgcctgcgcggcctgtttgcatttcatagccagaacccactcttttccttccttgttttgcgctaaagcagtccaattagcatcgctcgctcataagtctgttggaggcagcattgagctatttctgcaaccaagtgtgtattccttgcttcccgcaatccaaagctgcctccttttctcggatccaaatcccgcaacgttttcgttggcaatctcgctggtgcttgtcaagctctaagcctgacaccgcccccccccccccccccccaaccccaattccagcaccaaaatcccatctttttgcttgctggtgctggtgattccgtggccagtccgatgggggcgcttggggacaggctgcgggccttctccacgaaccggtggctggtgttcgtcgccgcaatgtggctgcagtccatggccggcatcgggtacctcttcggcgccatctcgccggtcatcaaggccgcgctgggctacaaccaacgccaggtggccgcgctcggcgtcgccaaggacctcggcgactgcgtcggcttcctcgccggctcgctctcggccgtgctgccgtcatgggcgatgctgctcatcggctccgctcagaacttcctcggctacggctggctctggctcatcgtcaccaggcaggcgccggcgctgcccctctggatgatgtgtgttcttatctatgttgggaccaacggtgagacattcttcaacacaaccgcacttgttacatgcatacagaacttccccaagagcagaggtcagacagtgggtattatgaaaggatttgcgggccttagcagtgcaatcttgacgcagctgtatgcagtaatgcacacaccagaccatgcaacacttgtcttcatggttgcagttggtccatcgttggttgctcttggcctgatgtttattattaggcctgttggaggtcaccgccaggtgcgtccatctgacaagaacagcttcttgttcatctacactatctgtttgctcctcgcctcatatcttgtcggcgtcatgctagtccagatttcatgcactgagcgacaatgtgngtggtattctcactgtgcttcttctcatactttctggtntaccaatcatgatccctgtgaccttgacactgtcatccaaaacacaacatccaattgaagaggctctcctttctgatccatcaaaaggagagacaagcacttcacaagagaaagaggatcaaccagaggtcattttaagtgaggtggaagaggagaagcctaaggacattgattcattacctccatctgaaaggagaaagaggattgaagagttgcagaccaagttagtgcaagctgcagcaaggggtggggttagaattcggaggcagccacgccgaggtgaaaacttcaccctggtgcaggcattggtgaaggctgatttttggcttatttggtggtcgctcttacttggatcaggatcaggtctgacagtgatcgacaatatgggtcagatgagccaggctgttgggttcaaagatgggcatatttttgtgtcattgacgagcatatggaatttccttggtcgtgttggaggtggctacttctctgagattattgtcagggaacacacatacccaaggcacatagcgctggtaatttgtcagatcctgatggctgttgggcatttcctcttcgcaatggcttggcctggaactatgtacgttggaaccttcctggttggactcggatatggagctcattgggctattgtgccagctgctgtctctgaactttttggcgtaaaacacttcggtgcaatgtacaacttcctcacagtagctaaccccgcagggtcactcgtcttctcaggccttattgctagtaatttatatgactatgaagctgagaaacaagcgcagcgccgtcagataacatcactgacatctccaagattgtttcacagcatgggttttcttgcagatggaacactgaagtgtgaaggagctgtctgcttttttgtgagctcactgattatgtcagcgttctgtgttgttggagctggcttaagcctcatagttgtttacagaactagaagggtttatactcacctctatggttcaaaccgcacatgaaaattccacggagataggatatgccatttcctcttgttccatgtaccatagcttttgcatatatgtgtcatacatacacaaaattaaagtttgcctgtatattctctaaacatttgagaggttttaccacacgaactgctgttcccaaatagaaatttatacacgcctcatgtgtcggatagctagactgtagttcaagcttggaccatgaattctgtaataaaggctttgtactacgac

SEQ ID NO: 127154 - DNA, 278 bp, Zea mays
  Clone ID: MRT4577_4742C.1
gcaatgcagaagaacaacatagagttgcttcctgacctgtacagcaattttgctcagttcatatatgtggcaagtcatagcattattcaggctaaacaagtctttgtcgacggaataaatcgtgcaccttgtaaaccattgattaagggattcatacagttcatgagtacacatggagggcctaaagacatacctcttcttgattctgttatttctaatgccgtgactccaggatctgacgtatccacagctttaagcagagaggaccgcgaagatat

SEQ ID NO: 127155 - DNA, 154 bp, Zea mays
  Clone ID: MRT4577_47430C.1
agcacctgctccagctggagtccggggccgacatagtgaaggcgcacacggagtggcgcccgaagcgggcgcgtggcgaggggagcttgaggggagcttcgggggttttccggccgagaatgcatgaatgaaactcccacctggagccgaccgg

SEQ ID NO: 127156 - DNA, 249 bp, Zea mays
  Clone ID: MRT4577_47431C.1
attgggcagaacacccggggaaacctttattttattcccgcccttttttttgggaaaatttaaataattccgcgccttaaggtcagggggaaaaaaaaaatttttaaagggcggaaaacaattgggggtgagggaaaaagtaacaaactgccggttcaatttaggggggcggttccttggtaaaaaagggtgcacaaaggggattggcccgggcattaaaaaccatttttggcactctatggggtcgcc

SEQ ID NO: 127157 - DNA, 364 bp, Zea mays
  unsure (1)..(364): unsure at all n locations
  Clone ID: MRT4577_47432C.1
cattcttttattactgatgatgacggcacanaggaaaggaatgatgttttttttttggtgaatcnnataaacaggacgatcaacaagggttgaagcaaaactttctataaaaaaccatggaggagacatattatgctgtgaccgcccaagcatgccaaccttccatgcacaataacacagtgttttagacagatgttgaaaaacccttgtatacactgaggcataatttgttgcaaggaaacaatttatttccctgaattgcaagtataagcagcaccacaatctcatcaaccgagagttggaaccttcaccaggagaaacagccactgtgaattatgtgaccccgccacattttgacactttt

SEQ ID NO: 127158 - DNA, 419 bp, Zea mays
  Clone ID: MRT4577_47433C.1
gcggtcgtcctttttttttttttttttttttttttttttatacaccacgactcggaatatatataaatcccaaaaccagaaaagaagcaagaaatataaataacaggacgaaggaatcaatcgtctcaccaaccttttctagctggccatctggaggctggagctatagctatgcgacatggctacggtgttcggttcgccgaccctggaagaagatggctgtcaccatccgccatgtgtgcgtggtgtcgtgtcgcggtccaccgattgcttgcccaccatgcagcatcactgccagttacagacttacagttcgagcgagcgatactgtcctcggagtcggccggagcgccgccgcatcacacggcacaatccgcggcgacggcgacgtcgtccttggcgtccctggacttgtcagc

SEQ ID NO: 127159 - DNA, 284 bp, Zea mays
  Clone ID: MRT4577_47434C.1
atcgggcgcccggcgaccctgaggcggttcaggcccatgtgctgggctgcttctcccctgctgagcaggagctgctgcctctgttgctggatcgagccaccgacctgatcttggaccacatccgtgagcgaaccagtgggccctcactggggccgtgacactagtggccatggctgcctgcctgactgtagtgcccaccaacccagccactgccacagagctgccacgccagccttggtatctactttttatacaaatctcctctagactgttccaggctgcct

SEQ ID NO: 127160 - DNA, 571 bp, Zea mays
  Clone ID: MRT4577_47435C.1
tcttcctctattgacttttttctgcatgccgattctctgcagcgctcgtcgcctaggacttagcctggctgcttccagtacaggacttgatgatgtccatcggcgtgtacagtgtggtgtaccaccttcaacagtacgcccatagaccttgtccccacctcctcacgcactaccgaagaaccggggaaagttacgatacggaatcctggagaccgactcccggatgtatgcctcgcgagtgctgacagctgacattatgccgatgaagaccactgttgagcgatatatgatgatcagagtgtaagtatacacaccttgaatgctccttttttttatagccccccctccgccacatctgtcgggtgtccaacagatattgactgctgcgcgtgtcaatctcctacaccgtagatgctcttgcgatatgcgatattactgagggatcatataacctgatcgacgccagacgcttgctgatggacatcaagctgctcccctcatggacgattagcaacatccttgtgattgaggatgttactcagtccccattgcagatgattctaatgatgcg

SEQ ID NO: 127161 - DNA, 190 bp, Zea mays
  unsure (1)..(190): unsure at all n locations
  Clone ID: MRT4577_47436C.1
gggcccccagaccatgggggaaagaaaacatctgggaaaacccaccagggccaacgaagacccaccccgaccgaggggcaaaaacaaaatacgggggcaagcaaaaaccggcggcccccccgtggggggtgggccactaaggtgggggcacctntggcgcgaggcgggccctttggccactccctccata

SEQ ID NO: 127162 - DNA, 349 bp, Zea mays
  Clone ID: MRT4577_47437C.1
aaaaacatgtggggtttaaaactttcttttttttttactcaacaacgggaacagaatacattaaaaccccccggcccaagaattaaggccctagctgaccccccttttattatagattaaacgcaaccaatttccttacaaaaccctaattccatgaccatctcaaatagcctgaccttccaaaagcccaaacccatatagattgcatcccacgggactggaacaccccttattacaagggcagatgcccagacctagtttatttcacaattttgaagcaccacgccctcaattcccgaaaggcttacttaggattttttaaacgggggctgtactcttggagggattt

SEQ ID NO: 127163 - DNA, 571 bp, Zea mays
  Clone ID: MRT4577_47438C.1
ccccgcgtccgcacagctggaccgccacctggtgttccccctgctggagttcctccaggagcggcaactctactcggagtcggagatcctggaggccaagatccgcctcctcaacgacaccaacatggtcgactatgccatggacatccacaagtccctctacgacaccgacgacgtgctcgaggacatggtgaagcgccgagccgaggtcgtctccaggctcaggtcgctcgaggaggccgcagccccgctcatcgccttcctccagaacccgctcgtcgccccattcagatagttcctgaccagattgaagttgtgtatcagtatgccaaatttcagtttgagtgtggtaactactcaggggctgttgattacctttaccagtatcgtgctttgtgcacaaacagtgagcgaaatgtgagtgccctctggggaaagctggcagcagaaatcctaatgcagaactgggacgtagctttggaggaactcaactgcttgaaggaaataattgattcaaagaacttctcatcacctctgaatcagctccagaacaggatatggctgatgcatt

SEQ ID NO: 127164 - DNA, 622 bp, Zea mays
  Clone ID: MRT4577_47439C.1
agaacttgttgagcttggcccagaaaaattaaaacaggctttatctgctcaaggtttgaagtgtggtggtactgttcaacagcgtgcgtatcggcttttcttgctgaaggtacttgaatgctatacagacaaatgcacaccatcttattaggtatctagctactacagttgttgtcaacaaaaggagaaggaatatgcttaaagagttgattaaggtcattcaataggagcaccatagctacaaggatcccgtaactgaatttctggaatgcttatatgttaactatgattttgatggtgctcaacagaaactcatagagtgtgagcagggtgttttggacaaagaaagcttgtaccttaaaacaggaggatacaagaagctggagtggttgtctgaaggcttttgaactgcttgaagcattagtgtagctttggtgcttttgtgactgatcaactctggagcagctagagtgatgtagttgtgggcttttgaacaatagctggagtgatatgaaatattagtgatgtagttgtgggcttttgaactgcttcaagctggagtgatgtcgttgtggtgcttttgtgactgatcatctctggagcttttgtgaatgatctagct

SEQ ID NO: 127165 - DNA, 275 bp, Zea mays
  Clone ID: MRT4577_4743C.1
tgtatccatagggaggcgctgcaaccatgcccattgtcttgtaggatgcactctaatgaaaaataaaatctccgaaatactatgttgacttaaactctatcaaagatgctcgagcgacatatgcgatatttgcatggactacgacgcccccatcgctctctttttactcgagcgagaatccagcgtatttaattacatggtgataaccaccgtcacacatggatctaccaacgtctgactacgagacttgacaaacatgaccacttatgactata

SEQ ID NO: 127166 - DNA, 2654 bp, Zea mays
  Clone ID: MRT4577_47440C.1
attgggtcattggaggccgcgcgggccgactcgcgaataaaatatactcccaaagaattcggcagcgccgaatgaagaattaaaaagcccccctaaaactgcagaaaaccagggaaacccgagaaaatcgagtatactgaagccatcgagagcagctttcttgcaactcccatggccctataaggcagagagagatagagcaagcgagcggggagaagagattgagcattgctggtggccctgtgctttgagagaggagagaggacttgaggaataggcaggaggctttgtggtggagcaatggcgacagcggcctgggccgcatggctgctcatcctcacgtgcttcggcgcttggaccccgcggcaaatcttggttgctgcagccaccgacgcgaatgatgttactgccctcaacacgctgtttaccagcatgaattcgccgggacagctgcagggctggaaggtgagtggtggcgacccatgcggcgaatcgtggcagggcatcacttgctctgggtcctctgttactgcaattaaattgccgaacttgggcctctcgggaaatctggcctacaacatgaacaccatggattcattagttgagctagacatgagccacaacaatctcggtggtggccaacagattccatacaatcttccaaataagaagcttgaaagactcaatctggcagaaaaccagttctctggatctgtgccatactcaatttcaacgatgcctaatattaagtacctaaaccttaatcataaccagctatcaggagatatcacggacatattttccaacctcccaagtttaaccacagtagacctttcctccaattctcttactggcaatctaccacaaagtttcacttctttgtcaagcctgaaaacactgtatttgcagaacaatcaacttactggttcaatcaatgtacttgcaaatcttccccttgatgatctgaatgttgcaaacaaccgcttcactggttggattcctgaggagttaaagaagataaatagtctgcaaactgacggcaactcttggagcacaggctcagcaccaccaccaccaccatttacagctcctccacgttcgcgcaaccgtcgaaagagcccaggccagcactccaatggaagtaacaactcgagttcaggtggaagctctagcataggtgctggagccatagcaggcattatcatatctgttcttgttgttggagcacttgttgcattcttcctgataaagagaaataaaagaaaaagtgcaatgccagaacactatgaacaacgccagcctttcaattcgttcccttcaaatgaagttaaaaatatgaagccaattgaagaggctaccactgtagaggtggagtctttgccttctcctgctgcagttaacctgaaaccacctcccaagattgagcggaatcaatcatttgatgatgatgattttgcaaacaagcctgttgccatgaaaagtaatgcagcagcagcaccagttaaggcaactgtttattcagttgctgacctacagatggcaacagatagcttcaacatggacaaccttattggagagggtactttaggacgtgtgtacaaggcacaatttagtgatggaaaggttctagctgtgaagaaattaaacagtacaacactgccaaggcaatcatcagatgatttctatgagctggtgtcgaacatttcgaaattgcaccatcccaatctcagtgagcttgtgggctactgcatggagcacggacagcacttgcttgtttatgatttccacaggaatggttcactgcatgatatgctccatctctcagatgattataacaaaccacttagttggaattctcgtgttaagattgcgttgggctctgcacgtgcactagagcatcttcatgaaatttgttctccatctataattcacaagaactttaagtcgtccaatattttactggacaccgagctcaatcctcacatttctgatgctggacattcaagttttgttccagatgctgaattccaggcttcagatcaggggtctgggtatagtgcccctgaggtcgagatgtccggtcagtataccctcaagagtgatgtctacagctttggggtcgtcatgctggaactcttgacaggccgtaaaccatttgacagttctaggccccggtcagagcaatcacttgtccggtgggcaactccccagctgcatgacattgacgccttggaccagatggttgatccggcgctcaagggtctttaccccgccaaatccctttcccgttttgcggatgttattgctctgtgtgtccagcctgagccagagttcagacctccaatgtctgaggtggtgcaagcgctggtgcggctcgttcagagggccaacatgaccaggagaatgctagatggcgaggaggcttctcggcggccggatgaccaggaacaggaattcgtctaacaagctactgaaacaatatacacatcatgtgctgtacctgcaccatcttaatgttgtgactgttgataaaacagggaaaacagctttgtcgacttccattcagtatatattacaggttttatttcatataacgaaatatatatgttattttttagataatgggaattgaaagtttctggcctttgtttcac

SEQ ID NO: 127167 - DNA, 1795 bp, Zea mays
  Clone ID: MRT4577_47441C.1
aggtcggatcctacggagcctacataacccttcccttcctcgcttccctcctccccgcgccgccataccctcgaacccgagaggaaccctaacaccaaaacgcccccggaggcagctaggagagctcgaatcaccagccatgtcggagcacgacctcacggcgctgatggcggcgcagctggaccgccacctggtgttccccctgctggagttcctccaggagcggcagctctactcggagtcggagatcctggaggccaagatccgcctcctcagcggcaccaacatggtcgactacgccatggacatccacaagtccctctacggcaccgacgacgtgcccgaggacatggtgaagcgccgcgccgaggtcgtctccaggctcaggtcgctcgaggaggccgcagccccgctcgtcgccttcctccagaacccgcagctcgtgcaggagttcaggcccgacaaacagtacaacatccacatgctccaggagcgataccagatcggtcctgaccagattgaagctctgtatcagtatgccaaatttcagtttgagtgtggtaactactcaggggctgctgattacctttaccagtatcgtgctttgtgcacaaacagtgagcgaaatgtgagtgccctctggggaaagctggcagcagaaatcctaatgcagaactgggacgtagctttggaggaactcaaccgcttgaaggaaataattgattcaaagaacttctcatcacctctgaatcagctccagaacaggatatggctgatgcattgggctctgttcatcttctttaaccatgaaaatggtagaaatgggatcattgatctgttcttccaggacaggtacttgaatgctatacagacaaatgcaccaccatcttattaggtatctagctactgcagttgttgtcaacaaaaggagaaggaatatgcttgaagagttgattaaggtcattcaacaggagccccatagctacaaggatcccgtaactgaatttctggaatgcttatatgtaaactatgattttgatggtgctcaacagaaactcatagagtgtgagcaggttatactgaatgatccattcctgggaaagcgcattgaagagggaaattttgtcagtgttcctttgagagatgagttccttgaaaatgctaggctttttattttcgagacatactgccgtatccatcggtgcatcgatatcagcatgcttgctcagaagttgaacatgagctacgatgaggccgagttgtggatcatgaatttggttagaagctcaaaactggatgccaggatcgattcagtatcaggaactctcatcatgacaaccaatcacgtcaatgtccatgagcagattgttgagagcttgaagggccttaatatgaggacctacatgctcgcaaagaacatcgttgagccagctcagcaggcaactcggtgaggatagcagacttcacagttttgagacgccaaggactagtttagagacaactgtaaacttttcgagctctattgtgtggcattggatttcaacacctggaaggtggcttgccgtttgatacagcttggagtattatgctgacattttcaatattttgtaatcggaacttcgtaacagtggatccttctcaatgtattgctattattttatgctgacaaaaaaaaaaaaaaaaaaaaaaaaaaaaaaaaaaaaaaaaaaaaaaaaaaaaaaaaaaaaaaaaaaaaaaaaaaaaaaaaaaaaaaaaaaaaaaaaaaaaaaaaggggggggcgcgttttaaaagaac

SEQ ID NO: 127168 - DNA, 654 bp, Zea mays
  unsure (1)..(654): unsure at all n locations
  Clone ID: MRT4577_47442C.1
taccactgtagaggtggagtctttgccttctcgctgtgcagtaactgaaaccacctcccaagattgagcggaatcaatcatttgatgatgatgattttgcaaacaagcctgttgccatngaaaagtaatgcagcagcagcaccagttaaggcaactgtttattcagttgctgacctacagatggcaacagatagcttcaacatggacaaccttattggagagggtactttaggacgtgtgtacaaggcacaatttagtgatggaaaggtaaagaactatgagttaccaataatgtgttattcaattcttttgataagaaagattggactaaaatatattgaaccagttgcacaaatgaaaaattggaacccaatggtccctactagttcagctttcctgtcatattcttgttttttacatgctactaaatattttttagttatgcaatgtggatcgggactagatgatatagattaccttttttcattttactctaattaggttctagctgtgaagaaattaaacagtacaacactgccaaggcaatcatcagatgatttctatgagctggtgtcgaacatttcgaaattgcaccatcccaatctcagtgagcttgtgggctactgcatgnagcacggacagcacttgcttgtt

SEQ ID NO: 127169 - DNA, 657 bp, Zea mays
  Clone ID: MRT4577_47443C.1
aggtcgtcgccctcgcccccaccttcggagctcggagactcggagtcttcccccacccccataacgtcctcttccgtgctctgcgttgccgcctgcgggcgccgcaagccgtgcgtgcccgcgggttccccgatttggtgctgtttgcaactgcattctaccagagtccctcaagatcaacgcggccggtcatgacccagcttctcgagctgaagatagcgagagaaaaatgctgacaagttccttcagttgcttctgttcaatctctctatgccaaagacatttctcaacatcttcgccgtctctgcgttcctccgcgaacggcacttcttgggataccaagcagtccaattctacccgactgaagaagagctgacagttgaggtcctgtgtatcatatttaactcatgaggcacaaggatccttttttgtcagcaatctcttctacgaccttcatcagagaaggatgaagaggtattgattgataaggtgtttttgcatactcgagcgtcggatccagctgtgcttgaacatctgtacagagattgtgtagaaattatttcttacatttgaatttgaaatacagtgagctggaggaaactccaccctagacttttggaaaaaaacaaactccaaaaaaatcattgatgggtgccg

SEQ ID NO: 127170 - DNA, 1798 bp, Zea mays
  Clone ID: MRT4577_47444C.1
ctccgaggtcttcggccgggaaaaaaaaaataactcccttgccctcctcgcttccttcctccccgctccccaccccctcaaacccgaaaggaaccctaatcctagccgcacgcgggaggcagctaagagagcttgaagcaccagccatggcggagcacgacctcacggcgctgatggcggcgcagctggaccggcacctggtcttcccgctgctggagttcctccaggagcggcagctctactcggagccggagatcctggaggccaagatccgcctcctcagcggcaccaacatggtcgactacgccatggacatccacaagtccctccacggcaccgatgacgttcccgaggacatggtcaagcgccgctccgaggtcgtctccaggctcaggtcgctcgacgaggccgcagccccgctcgtcgccttcctccagaacccgcagctcgtgcaggagctcaggcccgacaaacagtacaacatccacatgctccaggagagataccagattggtcctgaccagattgaagctctgtatcagtatgccaaatttcagtttgagtgtggtaactactcctgggctgctgagtacctgtaccagtatcgtgctttgtgcacagatactgagcgaagtgtgagtgccctatggggaaagctagcagcagaaatcctaatgcagaactgggatgtggcattggaggaattcaaccgcttgaaggaaataattgattcaaagaacttctcatcacctctgaatcagctccagaacaggatatggctgatgcattgggctctgttcatcttctttaaccatgaaaatggtagaaatgggatcattgatctgttcttccaggacaggtacttgaatgctatacagacaaatgctcaccatcttctgagatacctagctactgcagttgttgttaacaaaaggagaaggaatatgcttaaagagttgattaaggtcattcagcaggagcagcatagctacaaggatcccataactgagtttctgcaatgcttatatgtcaactatgattttgatggtgctcaacagaaactcgtggagtgtgagcaggttatactgaatgatcctttcctgggcaagcgcgttgaagagggaaattttgtcactgttcctttgagagctgagttccttgaaaatgcccgactgtttattttcgagacatactgccgtatccatcggtgcattgatatcagcatgcttgctcagaggctgaacatgagctacgatgaggccgagttgtggataatgaacttggttaggagctcaaaactggatgcaaggatcgattcagtgtcaggaactcttatcatgacaaccaatcacatcaatgtgcatgagcagattatcgagagcatgaagggccttaacatgcggacctacatgctcgcaaagaacatcgtggagccagctcagcaggcagctcggtgaggttagcggagtacagttttgaggcgccaagaactagtttagaggtagaggtctattgtgtggcagtgaattcgtcaccgggattgaacacatgggactgggaggtggcttgccgtttggtacagcttagtatgctgacattttcaatattttgtactcggaatttcgtaacagtttatccttctcaatgtatattactattaatgcctgtttggatcacattaattgaaacaaatatctagaaattgtttctcattttattattaggttacttttcaactcctgagaaccaatcagggcattaatgtaatgaatgatgatgctacaggatccttctcttc

SEQ ID NO: 127171 - DNA, 124 bp, Zea mays
  Clone ID: MRT4577_47445C.1
gaacgaacacacgatccctcatatatctggaaaacattccccgtctgaacctgacagtagcggtctatccttatacaactcgcgtctgaaccatagtgggcataaatggttcacatgctatagt

SEQ ID NO: 127172 - DNA, 897 bp, Zea mays
  Clone ID: MRT4577_47446C.1
cgggagaattaaagagcccctcgaaactgcccgggccgagggagacccgagaaaggcgagtatactgaagccatcgagagcagctttcttgcaactcccatgtccgtataaggcagagagagagagagagcgcgagagagcgagcgagcggggagaagagattgagcattgctggtggccctgtgctttgagagagaggacttgaggaataggcaggaggctttgtggtggagcaatggcgacagcggcctgggccgcatggctgctcatcctcacgtgcttcggcgcttggaccccgcggcaaatcttggtcgccgcagccaccgacgcgaatgatgttactgccctcaacacgctatttaccagcatgaattcgccgggacagctgcagggctggaaggtgagtggtggcgacccatgcggcgaatcgtggcagggcatcacttgctctgggtcctctgttactgcaattaaattgccgaacttgggcctctcgggaaatctggcctacaacatgaacaccatggattcattagttgagctagacatgagccacaacaatctcggcggtggccaacagattccatacaatcttccaaataagaagcttgaaagactcaatctggcagaaaaccagttctctggatctgtgccatactcaatttcaacgatgcctaatattaagtacctaaaccttaatcataaccagctatcaggagatatcacggacatattttccaacctcccaagtttaaccccagtagacctttcctccaatttctctactggcaatctacccacaagtttcacttctttgtcaagcctgaaaacactgtatttgcagaacatcaacttactggttcaatcaatgtacctgcaaatcttccccttgatgat

SEQ ID NO: 127173 - DNA, 1573 bp, Zea mays
  Clone ID: MRT4577_47447C.1
acaccagttattcctcatgggccacgaggtccaactcaccataattcctccagttatttatcttagctcctatatttcgttgcatgcctgaccggctgaccctattgtgaagggactgatattttacatctacttatggagcatgtctgatggtcataatgttcaatactataagtactgagaacctcgaggccggccgggctcctgtcgtcgccctcgcccaccaccttcggagctcggagactcggagtcttcccccacccccataacgtcctcttccgtgctctgcgttgccgcctgcgggcgccgcaagccgtgcgtgcccgcgggttccccgatttgtagtttatttacggaagtttacaattgatcaacaagacttagtccaaccctacttttcaaatcactatggttaccctttcctacagctgggcaagcgtagaatgtcagtcataatgttgggctcaaagaaggaaaggaatctcagcatgcactttcaatcagaccagaaatcttctgctaaattttgtttgttttcaaaagtccaatctgccagcccaccaccagggaatacactggtttatctaaatgtgtatgatttgacaccagtaaacggctatgtttactgggctggtctaggggtatttcattctggcattgaagttcatggtgttgagtatgcatttggagcacatgactattcgattagtggagtttttgaggtggaacctcggcagtgtcctggtttcaaatttcggaaatcaatatgcatgggaactaccagcctggatcctctccaaatcagagagttcatggagattcagtcagtaaattacaatggtgatacctaccatttgataagtaaaaactgcaaccatttctgtgaggatatctgcaaaaggttgacaggaaattttattccaaaatgggtgaatcgacttgctagaatgggtgctgtttgcaactgcattctaccagagtccctcaagatcaacgcggccggtcatgacccagcttctcgagctgaagatagcgagagaaaaatgctgacaagttccttcagttgcttctgttcaatctctctatgccaaagacatttctcaacatcttcgccgtctctgcgttcctccgcgaacggcacttcttgggataccaagcagtccaattctacccgactgaagaagagctgacagttgaggtcctgtgtatcatatttaactcatgaggcacaaggatccttttttgtcagcaatctcttctacgaccttcatcagagaaggatgaagaggtattgattgataaggtgtttttgcatactcgagcgtcggatccagctgtgcttgaacatctgtacagagattgtgtagaaattatttcttacatttgaatttgaaatacagtgagctggaggaaactccaccctagacttttggaaaaaaaaaaaaactccaaaaaaatcattgatgggtgctgcctctggagtccgaagtgatatttcgcctgtggtagtttgcaaatttggccatttttatacccttgcctatataaagttttatagttttgttttggttgc

SEQ ID NO: 127174 - DNA, 254 bp, Zea mays
  Clone ID: MRT4577_47448C.1
aaaaaaaaaaaccctgttcccccattggggataagcgttgggataggtccccacatagccccttataggggtgcccttttttgtttagaccaaacttttgggggttctgaaagtcctaaatagggggcctcctggcttttaagcaagcccctacgtttttccaagccttggctgactttgggctatggcattcgagataccccgccctttactttccgttggggggtaacatttttataactgggggcaggttc

SEQ ID NO: 127175 - DNA, 383 bp, Zea mays
  unsure (1)..(383): unsure at all n locations
  Clone ID: MRT4577_47449C.1
cagagtcccaattcacactgaacttacccccggatcgtgtgacttttattgtgtgcggtcaaactacngtgaccaatccaataaccaaatatgcgctgaccatgactcctctagccctgagtttggaggaactgctacctccaaataagcagacatacccgaacataatgatgcttagatccgctctggtggtatcttcccttattattgctctgtccgttccattttttggtaagtttgtccgttccctttagattcaaaagactttccttttttcttttttatctgactctctgctccaatggttgttgagccttttcaggacttgtcatgtcactggtcgggtcttttctcaccatgtttgtggcctatattctaccatg

SEQ ID NO: 127176 - DNA, 820 bp, Zea mays
  unsure (1)..(820): unsure at all n locations
  Clone ID: MRT4577_4744C.1
cagggatgcgacaaggtcttcatgagtgaacctcagtgcagcatngtatttagtcaagtccccagtgccagtatcaagtgagatatcggcaccaactgcaacagccttagtaccaaaggcagcagagaggttgactacaggattggctgtcagaccgatgcttgcattaactccagcataatcatgcaaatactggagctcaacctttccagatctctgatcaggaacagcaaagcttaagatggtcttcagccctggtgttgcaatctcatcaacagtaattgttgtaatgatatttgactccgagtttgctttcacatctatggtcatgttcttgttctttatctgtgattggatctcgccaaggatcaggtcagctttctttgtgctagaagcagttacagcgacgccattggaggtgtaggtagtgagggtgaacttgtggtcagtctggtagtccttgtacagcagatccctggtcttcttgccgatctcggtgtagaggcctggcccgaccatcttcacgccggtgacgacgcgacgcgacgaggtgcggcggcgtggggatgctgcggggtgggagtttgggggcaggatgattgggaggcggcggataggtcccggccggccgggatcgtcgcctctcctcccgcggtcagggtaacgccgcgtgtctcccgtcgcatactcgctcacacccatggccgcaccgccggccgcctcgctagtggcacgcgccgccctcccgccgcgccttcgcccaaccaccgcttctccccttggccccaccgtcctcgtccccggcctcgagggacccaat

SEQ ID NO: 127177 - DNA, 250 bp, Zea mays
  Clone ID: MRT4577_47450C.1
ctcttttacaccatatcctataatggcgaactcaccggcgccgtcttatgctggcgttcctggctcttgggctagcgctcctcctctccgccaccggccaggcgagcgcgcagaactgcggctgccagtcgaacatgtgctgcagcaaatgggggtactgcggcacgggcaaggactactgcggagatgggtgccgctctggcccgtgctacggcggcggcggcggtggaggaggaggaggcggaggtgg

SEQ ID NO: 127178 - DNA, 414 bp, Zea mays
  Clone ID: MRT4577_47451C.1
ggatgggaataaacaggtaccagggacaattgtgaaacaaacaaaagcacacgttcaccaaacaaaaattccaactcgttacgggttctatcacttgagtgtcttgaagcatgggaggggctgtaacttgggcaggtttaccgaccgtggaggggaccctttcttggagcatttgcgttgatgggggcgatgcaagctgcaagggaacgccaccttccgctttaactgggagagggacttgcgggttttgaccacgcttcaggactggccgcggatcttattacgggccaagcagttggtgaagtacatgatttgcgtctggcagctttctggggcggtcgcgccgccggagtatttcgcggcaacccgtgccagcggacacctgggcggaccccttggttgaccccggaattt

SEQ ID NO: 127179 - DNA, 252 bp, Zea mays
  Clone ID: MRT4577_47452C.1
aaccatgtggattgaggggtattggggtgtattaaggccttgttcggttatttccaatacatatggattggatgagattgaaaaaaattgagaagaagtttgacttgtttaggattcaaactcatctaatctcactcaatccacatggattgagagctaaccgatcaaggcgtaaggtaaattttgactagttgtggatttatttcctctcaatccacatggatttggaaaaaaatgaacatcataatattt

SEQ ID NO: 127180 - DNA, 387 bp, Zea mays
  unsure (1)..(387): unsure at all n locations
  Clone ID: MRT4577_47453C.1
gtctctttgaggatcggttttgtgctgacggcaaactccttggacaactacacggccgaagcaagcaaggacggccctcgtcaagaactcaagacgcgcgtttcaagccctgcctgttggtgtggggggcatgacctcgggagacagcgcgcggccatgcatcctgatccggaatggggggtcgcgccgtgcgccgntgcccatccccacgcccgccgcatgctgcctccatctgccctcgatcgggaactgaggccgtgaggcgtacgaaatgcttaatcaaacacagtgatgcgcgggcgctcatccataggcgtacagcggactgatgcagcatccatggacgtnctgaccacgccatcaatcaagcaaaaatgaaaccagcaa

SEQ ID NO: 127181 - DNA, 333 bp, Zea mays
  Clone ID: MRT4577_47454C.1
gtctaatagaacacaacaacatttttgtggcttgccagataataaatgagatcaaacagaccaagatttcatattgaggagtgcttaggtctcagtgaagtacaggttctgtagattttattgggagaaactgaggactaggccctgctttacgggcaatgaacagtggggcacacacgagacatgttccctctgggatgggctcccctgacatcaggctatgaagcagacagctgtacacacactgtactgtttaacacacatgggaagtcattattgcacatgccactcggtcactgtctctattttagattgagaaccaggagggttgag

SEQ ID NO: 127182 - DNA, 203 bp, Zea mays
  unsure (1)..(203): unsure at all n locations
  Clone ID: MRT4577_47455C.1
acccacgcgtccgcccactcgtccgcccacgtctttctgactcttgccggatcatctgggtcgggggcactgtctcctgcgcgcgacttcnctgaccccatccgatggtccaattcaccctggaggcttgtccaggtctcctgggatgacccggacctgttacatatcgtgaagagggcgagcccatggcttgttgagctgat

SEQ ID NO: 127183 - DNA, 303 bp, Zea mays
  Clone ID: MRT4577_47456C.1
gccgcgcgtgcggttcctcagttacatgggtggggattattcctacagaaccctttctttggtggagaaactattaagtgtggtgttgttagagcctatcaaaacaagtgaaacattaaacgggtttggtatagcaaaccagtgctcaatctcactaccaggagggtgatagatttttgacaagagacaaattgcgatagccttatagaagcatgctaaacatttgggtcgggtgggggcagacaaaatattttcattgtgaagagtgggggtagcataacaaaagcccctgcttttacataa

SEQ ID NO: 127184 - DNA, 211 bp, Zea mays
  unsure (1)..(211): unsure at all n locations
  Clone ID: MRT4577_47457C.1
ttcgacgcccccctcccgcctcccctgnactttttctcccacccccacgggggggggggatgaacggcacaaanatcaacaagagggacttggatctatacaaagcgctnaccaaggacttcctgttcaatttcaccgtccctcaccgcgagcccaactacctccatattccgccagatgtcccctttatcaaaatactttttttgggggg

SEQ ID NO: 127185 - DNA, 501 bp, Zea mays
  Clone ID: MRT4577_47458C.1
gcttggacctttgggctgatttatgtgcttgagacaaccggaagtcgtcctagtcctccgatcgcgctccatatcagcaaacccgccgctcatactacgacataccaacattcctccaaaactcacatcgtacggcatcccacacaaaccatcccgaccgcacataccactcaaacaacatatcaaaggcaaaaaaatgacccccccacgaacctagccaacctgcacacacataaaaacaaagcaagaaacgcgaccaagcccgaaacgccagccccatgaccgcgttatccggcccacgaacactcgcgcacgcatccccaagagcaaaataatagtacgccaaggttcaagcgtactcaagccacctcacacccaccgactacaaccaataacaaaatatgaggaggtcgtaaaccgccctaccacccctcctcctgcttgacgcagtactttacccacgcgcgtctctctttccaccccgccgacaaacaaccaaaa

SEQ ID NO: 127186 - DNA, 274 bp, Zea mays
  unsure (1)..(274): unsure at all n locations
  Clone ID: MRT4577_47459C.1
gggttactattaatcagctggatccaagattccctttacgagnaatgagattccataatccaaagattgtttctctactaaaacgtttacggttctacattcctcagatacttcccaacttggagaaggtgagtgtatcttgatgacgatgttgtgatgcaaaaggatttgactcagcagttatccatagagctacacagcaatgtcattggagcagtggtaacttgtttaaagtcgtttcatcggtatcacaagtatctagatttttcgcatc

SEQ ID NO: 127187 - DNA, 1445 bp, Zea mays
  Clone ID: MRT4577_4745C.1
gcacgagggaaaataaactagggtttagccggggccacacggcaggctccacggcgtggttatgtccgcctttattctccccccactcgtctgcttcgcctccacctatccgccgcctcccaatcatcctgcccccaaactcccaccccgcagcatccccacgccaccacacctcgtcgcgtcgcgtcgtcaccggcgtgaagatggtcgggccaggcctctacaccgagatcggcaagaagaccagggatctgctgtacaaggactaccagactgaccacaagttcaccctcactacctacacctccaatggcgtcgctgtaactgcttctagaatgtctcatggaggaaaattttcggtcgcctgtgtagcgctctgttaaatgagcaaccttcacaataattcaagctcggtagaattctgaacttgtttaccatgattgatggtgactgtcaactgagttaggggagggaagaccatcttaagctttgctgttcctgatcagagatctggaaaggttgagctccagtatttgcatgattatgctggagttaatgcaagcatcggtctgacagccaatcctgtagtcaacctctctgctgcctttggtactaaggctgttgcagttggtgccgatatctcacttgatactgcaactgggaacttgactaaatacaatgctgcactgaggttcactcatgaagaccttgtcgcatccctgaacctgaacaacaagggagacagccttactggagcctactatcacaaggtgagcgaattgaccaacacagctgttggggcagagcttacccacagcttctcgaccaatgaaaacaccctcacctttggcgggcagcacgccctggacccactaaccgtcttgaaggcccgcattaacaactctggcaaggccagtgccctgatccagcacgagtggaggccaaagtcgctggtcaccatctcggccgaggtcgacacaaagaccatcgagaagagctcgaaggttgggattgctgtggccctcaagccctgattggttatacagaccattttttccccttctaagttcctagcatgactgtttgggtcagatcagatcagctggggaaaacaaaactgttggggttcctggcatctttgtttgctgtagtcagttgatttaatgaactccgaaatgtctcatggaggaaaattttcggtcgcctgtgtagcgctctgttaaatgagcaaccttcacaataattcaagctcggtagaattctgaacttgttaacgatgattgatggtgactgtcaactgaggtaggggaggttctgttttcagcaataatttttctaccttgtggtgtcggggactttacgcaatcgattcatgtgtttttgtggtgcagtatttaattaatgtcaagcgttttttattgcaatttaaaaaaaaaaaaaaaaaa

SEQ ID NO: 127188 - DNA, 262 bp, Zea mays
  Clone ID: MRT4577_47460C.1
ttttttttttttttttttttttttttttttttcagataactggggacaagaatacagatccaaagccaaggtacaaaaggctgttgctgctgctgctgcaactcatgtttcaagtacaaaatgttttatctcagggatcaacaaaaaaagagaatacgacgtagcatgccatccaattcattatgttcttctgttggtaaaacctctgaacagcaagacgacctttcacgcgcgacagactttctcgacgaacctgtcgaag

SEQ ID NO: 127189 - DNA, 160 bp, Zea mays
  unsure (1)..(160): unsure at all n locations
  Clone ID: MRT4577_47461C.1
ccgggnngggtcatctggcttaaatacctgcaatatatatactgtaaacatatatctaataaatagaaacgggtgcatctttctatgaagtattgaagtggatgaaggtgcgttttaccaaaacagtttgtaactttattctaataaagcttcctcttgg

SEQ ID NO: 127190 - DNA, 1145 bp, Zea mays
  Clone ID: MRT4577_47462C.1
cgtgcaaaacggaacatatccataatttagtatagcaaaaaaaaagtgttactaagctcaatgtagattgtgcacgaagctaacgattgtatggctagggcaacaaagtaacagagacactgactgtccagtgtccagccaccatgagaagacagtcctaaaatcatcctttcgctcgcctccagaattaggaaactattatgcatctccagtacgtcggtatggcatgaaccgatgatctttggaggcattcttcttccgtcgcttttccatgaatgcatcaagctttcctgcctccttgagctcgttgtacttgttcatcagcttcctttcgcgaagttcagatttcttcagatagtatggtcgttttccagcctttgctgcctccctctctttcttgatatgctcacgcaagatttccgattcaacgttctttggaggatgagacttcacctgcttatcaatccacgtgacacgactcttcatttctccaatggcatctgggtccttagatttcttaatcattttttgcagtctttctttttcagcaggaaagtcttcatcaaataagaaattgtatcttttcctaaacccttctttgtcaacagatccatatacaggctcaaatcttggatcccttccaaccttcttgggaacctgtatcacctccctcaatttcggtggccgcactttcgtgcttatctccataggcctcctcttgctaaccctgcgagccttcttctccgcggctgccttggccgcagaggtggctcgcgccagcgacccgtcggccctcgcgcgctgcaactctccgaagggcacgtctgcgagcgcgcgctccagctcccgctcccgctccgcgtcctcgccgccgctctccgactccgactccgacgcggacgacgaggggacctcctcgccgtcgctcgattcgtcggcggcgctggcggattcttcttcgcgttcgcgcttggtagacgtagaggcgatggaggccgagctggaggctcccgtgcggcggcggttggcgcctctcatggctgcggtgatggtggtggcggcggcggcggcgaggatttgcttcgagcgtcacgtgctcgcagtattacgaaacgaagctcaggttcgcggacgcgtgggcgggg

SEQ ID NO: 127191 - DNA, 278 bp, Zea mays
  Clone ID: MRT4577_47463C.1
ggcatatgtgctgtctgcaactatcgcacgtggggggcataatttgctatggttgcccaccatgactgatcaacagccgggcgcaactgcaagtggcgatgcctacaaagacatgcatcgcgaagacagtatacacagggagacacagtaggactagaatcagggagccatgatgacaaacctgaaggtcgggactaacgcgaccttacgcatacccatgctcgtgcaggacgaactgaaactggccgacacccatatcgcactgacggaggacaccc

SEQ ID NO: 127192 - DNA, 215 bp, Zea mays
  Clone ID: MRT4577_47464C.1
gggcgtgcgcgcggcatcgcggctgagctcgcatacccagtcaatgacggcgccaacccgacgaaccctggccccacacccctggcccgagcccggcgtccccgagcgcgacagcctactactggggcactgacagtacacctgcttttgctgtacgagctccggatgactgtttcagctggggctgctctcgcttcgactgcgcgctgtggtgc

SEQ ID NO: 127193 - DNA, 654 bp, Zea mays
  unsure (1)..(654): unsure at all n locations
  Clone ID: MRT4577_47465C.1
cgagaatgcactgggccaacctggctccgataccaattgttggaaccggaccgccgacacacgacgtgtccgtcggggccgcccgcacaaacggcgcgcccacccaggctgtcgggccgcgacacacgcgcccgcacgtatagcagcgggctttaggtctcttgggccaacactcccccaaaaagctagcctgataggggttgcaccctcaaccttataaaccatgctaccacaccctcaccacacaatgtgggactatttccaacattcacgcccagtcttcattctgcagattcatgttcgggtgctaaccctgcagcttggtgtcaagcacctcagaacagatcttgcccatggtctggtagaaggtggcgaggtcggatagctggttcacgttcatctccgccatgagtgcccgcgccgccgcctcgcgtacgccgttcaccttgacgctgttgaggtaccccgacgcgttgcgcgccgtggcgcccatctgcttcagccgcttctcctgccacgcgctcaccgacgccgtgttcgactcgagaaactcggcgccggcttcgtggtcgcgcttctccgccggcttggtgtggctgtcggataggtacatgtccatggcgagcgagaagctccggnggatgaccttgcgcc

SEQ ID NO: 127194 - DNA, 1066 bp, Zea mays
  Clone ID: MRT4577_47466C.1
ctcgaggccggccgggttttctgaccatccaaagagacccggtgatgaggacccacagccaccatttaacatgctaaggaatgttttagatatgaatgctcactttggtggatttaatgctgctttactgaaggcaggaaagtctgtatgggtgatgaatgttgttcctacagatgccccaaactatctaccgctgatatttgaccggggttttatcggggttcaacatgactggtgtgatgcatttccaacttacccaagaacatatgatatggtgcacgctgatggttttctatcacttcagaagaaccacaagcatagatgttctactcttgacatattcttggaagttgaccgcatcctacgcccagagggctgggtcataatccgtgacgctgcccctcttattgaagcggcaagatctgttgttactcaactcagatgggacgcccgtgttttggatcttgacatagccagtgatgaaaaactactggtctgtcagaagccgtttctcagaaaataatgagcatagtagacactgacacaagatatgaacttattctttcaccctacacactgttacaattgttgtctgagcacaactgagtacaaagtttgggtaaaaaacacgggaagcatgattcagcaaacttgtcatgcatcaccatggaacagcaaggtgccattaaattgatcggtcaagtgcatgctgcagaaacaggcttggtggctaagctttccaggccaaggttttattgccaggatatagagatgaagccataaaaattactttagtagtgaaaccatatccaataaagagatgctgctgcggtgtacataatcgccgccaatgtgccatataggtataattgattttttcccttgttacaatttctctccttttttctgtaactgtgccaatttgttttttttgtatcttgtatgtaaattggttggtctatatactgatcatcccagactacagcctagtgaaatcaatataattattatttggagatgaaaaataagccagagcaaattaaaaaaaaaaacaccaaaccaacgc

SEQ ID NO: 127195 - DNA, 1833 bp, Zea mays
  Clone ID: MRT4577_47467C.1
atggtgcattgtgctaaatgcaatatcgaatggaacaaaaacgatggcattttcttggttgaagtgaacaggcttttgaggcctggcggatattttgtatggacatcgaatttgaatacacatagggccttgcgagacaaagaaaaccaaaagaaatggacagccattcgtgactacgctgagggcctttgttgggagatgctgtcacaacaagatgagacaattgtatggaaaaagacgaataaaagggaatgttacaaatcaagaaaatttgggcctgagctatgtggccatgatccagaatcaccatactaccaaccactaagcccctgcatatcgggcacaagaagtcagcgttggatccccattgaacaccgtaccacctggccatctcaggctaggcaaaacgcaacagaactggacatacatggtgtgcatcctgaagtctttgctgatgataattcaagctgggacaccatggtgcgaaactactggtctttgctatctccacttatattttcagaccatccaaagagacctggtgatgaagacccacaaccaccatttaacatgctaaggaatgttttagatatgaatgctcactttggtggatttaatgctgctttactgaaggcaggaaagtctgtatgggtgatgaatgttgttcctacagatgccccaaactatctaccgctgatatttgaccggggttttatcggggttcaacatgactggtgtgatgcatttccaacttacccaagaacatatgatatggtgcacgctgatggttttctatcacttcagaagaaccacaagcatagatgttctactcttgacatattcttggaagttgatcgcatcctacgaccagagggctgggtcataatccgtgacaccgcccctcttattgaagcggcaagatctgttgttactcaactcagatgggatgcccgtattttagatcttgacatagctagtgatgaaaagctactcgtctgtcagaagccctttctcagaaaataaggagcacaagcacagtagacactgacacaagatatgaacttattctttcaccctatactgttacagttattgtctgagcagaactgagtacaaagcttgggacgaaaacacgggaaggtgccattagattggttagtaagtgcatgctgcagagaacaggcttggtggcaaagctttccaggccaaggttttattgccaagatacagagatgaagccatgaaattactttagtggtgaaaaccatatccaataaagggatgacgctgcggtgtacataatcgcggtcaatgtgccatatagggtttttttggccatttaacgttagtcggagctactgaggtgagctggtattgctctgtggcttcaacctcccgtgcttttgtggaggattgcgcgtccagttcatcttagctgtagtttggtatctgccacaagcccacaaccaagtgggctgccccattgccacggtgatgtgccaccttaatccgaagggattagcttgtcattcttccgtggtttggaccatccccttttgcctgcttgtatgtttaactctgctaatactctgggccagcataaaaagaaattaactagaaaatggtaacaaagggttagatcgtgtttaatagtttacccatatgtgttcgtttgaccttaatccaaaacggcttttactgtttttacagtgttctgtctctataaattacagcagcagcagtccgaacagttgactttaatctgaaacgaacaacctaggtttgaatatgatttatgagtatatggatcggtaagcttctggagatagcttt

SEQ ID NO: 127196 - DNA, 550 bp, Zea mays
  unsure (1)..(550): unsure at all n locations
  Clone ID: MRT4577_47468C.1
cttcgccgtcgccctcgccctcgcgcgcccctcctacgccgcccccgtccctctctttcaccaccggcggccggcggctcccgctgccgctgcttcgaggccgtcctcccctaanacagggaatcccccgccgccaaccccgctcaccgcactcctccagtccgcagctccggcggcgacctcgccgtctcgctgccccgccgggcctcggcccaccgccgagtcacggccacggctgccctgaaaccacagacttcgcctgcgacgagcatccgtcagctccaaagtgccaagggagatggatgataccttagctaccataaggatgaaattgaagaagcggaagaaaggcaaggatagtaatgattttgatgcagtggctgaatgtggacccgaggttccggcattggttcaacaggaaggtgaacgggctgttgttgatataggtgatggtgttgctgatgagaagagcaatttgaatgtcgtgaaactggaggggagtgatgtttctgggaaatgtgctcagggtttggatgatttgggggttgaa

SEQ ID NO: 127197 - DNA, 679 bp, Zea mays
  Clone ID: MRT4577_47469C.1
gggaccggcggccggagcacgcccgccgactgggcgtcgtctcgtcttcgtgaaggtcgacggcgaagaaggtggcgcctctgggcgcttcaacttctggttatcgagacggagtcgatcgtggcggtcagtgaattcttccgctgcaatgcttgacggagcctaagacgtttatgtcgacgctgctcgcccggatctggtctgccggctgaaccgctccctatacggcctcaagtggacaacgtggacatggaagaactaactcggctggattgatggaagagatttttttttccactcgcactgaagagttgagagatgcagaggtatcaggtcgataagcacgaagtagtggcaaaacaggaggccacactcctcaatctccctgttctaaaaagtgcgcctcaaaagaggagattgccctcttcagccttttgcaaaaggcgcctttatttctctgcgcggtggatctgtaggtttggcctcttcggtgagatctgagtaagcctcagtttgttggtaaagattggttagttgggtggggttaagccctcaggtgatcgttggaagcttaactgctaagcaactgggtagcaagagaagacatttggctttccaaaattttggcagcgagcatgccaatgggcaaaagctgacaccggattattacttatagaaa

SEQ ID NO: 127198 - DNA, 347 bp, Zea mays
  Clone ID: MRT4577_4746C.1
tggaatgattttgggcgtacgtgatatggaaaaggatgcccgaatgtatagataatatgggcataaaaaggagtccacatgccgagcgggagaaaactaaagcttcctatacacttcaggcacaaggaatgggctggtagagcgaataacagtatattatcaaccagctacacacaaaaactggcacttatacaagatgtaagaacgaccaaacaattcaataatatgattggtgcactgcaattaaatgacgtacatgatgcattaattgtatgcatgatctctgttgtttgcagggaggggaccaacaatggacctgtactaagggccttaacgttgactcaacc

SEQ ID NO: 127199 - DNA, 475 bp, Zea mays
  Clone ID: MRT4577_47470C.1
gttcttgggctacaagatccattttctttggaaggtgagaattacagtttgcaagtgacgcatttcagcaacattgagcaccaaacgcggctctgctctggaaacccaattcggttcattgttattcgggtaggatggtacgaatccatggaggcacgtgagggttccgggatctaaacgaagctgggacccaaaaggccaggtagagaaaatcctacatgggctacctttgggttcagggtcctgcggtgttcttgaacttgtgccggggcggcttgtacaggtgagctacttcggggaccaaagggtctgccgggttcggatcagccaccagtgaacagatgggcagacgcaccctggagagaggttgtgcccgacacaactggatctttaagaaggtgaggcaaatgctcccgttgctgccgattttgggatggaacaccttacggcggaatgccacctttgggggtttgaa

SEQ ID NO: 127200 - DNA, 442 bp, Zea mays
  Clone ID: MRT4577_47471C.1
ggataaaaagcttttatttgaaaacctgaatcaaaacggcggggctgggaccctaaaaaagcaacacaaacactgtgaataaaccaacccacccatatatatgggggggccaccgggaaaggggggggtacaaagaatttaagggctaatctctaaagaattccctaataggccccagggcaaaaattccttttcaggccggaaacaacggggggaaacgggctcgaccaaccatcccgaaaaggaagggggggaccgaaaaacaaaaactctgaacacaagccggggccagccaaaaaaaaaagcttctcagcccgggctgggaagaaggttataaacagggaggcactaataaaaacaggcccaagggccacaaaaatcttccctgggaggggaacaaggccagctttccccgggttttgccgctcactttcccccacaa

SEQ ID NO: 127201 - DNA, 236 bp, Zea mays
  Clone ID: MRT4577_47472C.1
cgttcacatttattctcagcatagacaagcagcaaagatggtctgcgaccaaaggccatcggggacgaccctcgatagggaggcagaaatatgaacggtgcccctggacgctggatccatgctggttttggacacggttgtctttttgtgtttaacttatctgctgccgtcctgtaacgaattcgctaagttttagttcttttgtgctttgttaagaatataaacaatgaggtttc

SEQ ID NO: 127202 - DNA, 232 bp, Zea mays
  unsure (1)..(232): unsure at all n locations
  Clone ID: MRT4577_47473C.1
ccacccgtgttgattttttgaggntaaggggcgtatttaactcaggggcatagacaaagcaacctttaagggaaattatgagcacctactgccaagaaagtcctatgaagtacccaaaaaatagcttatgaagaatacgggcaattaccagctgtggaattttagccagcaagtggctcgatgatcccaaagtgaagcataatgaaaactttcaaaatataggtaaaagaag

SEQ ID NO: 127203 - DNA, 362 bp, Zea mays
  Clone ID: MRT4577_47474C.1
acttctatataacttatattatattttttttttttcctaagtaaaaattaactcaacttcccattacatttcctctccactatacttcatctcaaaacaataaaccacataccaatttttaccataaaccttcccatcccctacttaaaacattccttaaaaaccaacacccaactaaaaatacctaccctactacaaacaaatttaattccacaagaactactaccacatacccaaacaatacctttaaaaaaaacctcaaagattcactaatttataatcacaaaacatccttcctcaattcctttattcataaaaataacctcaaatataaatctacaccaattacgataaccctttta

SEQ ID NO: 127204 - DNA, 457 bp, Zea mays
  unsure (1)..(457): unsure at all n locations
  Clone ID: MRT4577_47475C.1
tccttcgagctttttcacgcatgaaaccctaatgacccggtgcagatcttcgccttcggggtgcttgtccgaacccncattgggccccccgggcctgaattttttcccgggccccttccgttgcttggggctcaagacaaaccacctgtacctcctgtttcccgtttcggggcctgccccttattttcattccttggcttttccctacctcttttttttccttccttttttctgggttcctttatcctattatttcttttcctttaatttaaattttnnataatatatttttttttatttagtataatttccttttatttccatttttttttctttttttacattctttatttttatattttttctttttttattttctttattttattactaattttcttatattattattttttttttttattatgatttattcatattttttttatatttttat

SEQ ID NO: 127205 - DNA, 373 bp, Zea mays
  Clone ID: MRT4577_47476C.1
ctaaaacatagctaaaactgtggttttgaaaaaatagagtctaaaagtctaccaaacactgcattaagaaaaataatacagtatcttaaatactacagtattcttaaaaaacagagaaggccatatattaagaaatggtgtagttacatttatgaaaagatataattgttactcttttaaaaacaatttataactataaattatactattaagctgtaactgtttttttaatttttacgcatgagaagaaaccgcgaatcaaggtcggtttcgatgagcccggatcataggtgcaaggcatcgaacccgtgactattctctccttggcgtcgtcgtcgtccttgttggcgatggcaatgtcagggccgctggt

SEQ ID NO: 127206 - DNA, 312 bp, Zea mays
  Clone ID: MRT4577_47477C.1
ataaagaaatcgagctttcatggccataacctggaaggtgtgggagaaaggtgaaataatcgttttcgatcctaattaacaccacccctgtgctttagttgtttaacccttttgccgcggaggaagttaaccaaacatgaggaatcctccttaactaactttttaaggtaaccgtggggcacgcatgcatgattaatatatgactcacactcttattgacatactgttatctaacgatgctataggcacttccctatgaggttggaatagcttgcgatgccggaagattacatatcctaaggggaaaaacac

SEQ ID NO: 127207 - DNA, 2339 bp, Zea mays
  Clone ID: MRT4577_47478C.1
gggctcggcctcccatcgcatggccaccgcactgacgtgacgccgccgagggattgaggacccaagacctccagctggaggaatcgggagaggaaggagcggacgcgcgcccttcgccacgtcttgcgtcgtcggggggcccggcccttcgccgacgacgacgagcacccaccacgtacgcccgccacctctccctccccttcatgccgcaccccaaaccctaatgttgctgaggaacagagatgtcgacgacaggcgaaatcctgaggtcggagctatcttccaggacgccgccgttcggcctgaggctatggattgtcattggcatctgcatctgggtggcgatcctcttcatcataggcttcatgtgcttctggtccatataccggaggaagcccaccaagtcgtccttcgacagtaccaatgacatcccggtgtcccagatcccggacgtctccaaggagattgcggtggacgaggtgcgtgagcacgctgccgtgcagaccttccatgtgcacgagagctgccgcgcgctggccgtgcaggagaagccctgcgagaaggattccgggagaatgctggggcacctggtcaggagcaagtcgagcgacgctgataatctcagccagtgcagctcggcggcgtaccagtgcgagagggctgcaagctcgtactctggcgacgagggcagctcgggcaacgccaggaggcagtatcccactgtctccgcgtctccgctggttggtctccccgagttttcgcatctcggatggggccattggtttactctcagggatttggagcatgcgaccaatcgcttctccaaggagaatgtcattggggaaggtggatatgggattgtttaccgaggtcgcctcgttaatgggaccgatgtcgcaattaaaaagctccttaataacatgggtcaggcagaaaaggagttcagggttgaggttgaggcaattgggcacgtcaggcataagaatcttgtacgccttctaggatactgtgtcgagggtatccacaggatgcttgtgtacgagtatgtgaataatgggaatttagaacagtggcttcatggtgcaatgcgtcagcacggtgttcttacttgggaggcccggatgaaagtcgttcttggaattgccaaggcgcttgcttatttacatgaagccatagaaccaaaagttgtacaccgtgatatcaaatcgagcaatatcttaattgatgaagaattcaatggcaagctttctgattttggactggccaagctcttgggtgctgggaagagccatatcacaacacgagttatgggcacattcgggtatgtggctcccgagtatgccaatacaggtctgttaaatgagaagagcgatgtctacagttttggggtgctactactggaagcagtgactgggagggatccagttgactatggtcggcctgctaatgaggttcatctggtggagtggctgaaaatgatggttggcactagaagagccgaggaggtggtggatcctgacatggagttgaaaccagcgattcgtgctctgaagcgtgctcttctagtggcactgcgatgtgtagacccagatgctgagaaaaggcccactatgggtcaggttgttcggatgctcgaggcagaagacgtgccttcacgggaggaccgccggagccggagaggccacagcagccacgcagacaacgagtccaaggcaagctcgagcgctccatcgacggggtgaccgacgcgaacggcacgtacacgatcgagctcaaggacagccacgaggaggacatctgcgaggtggtcttggtggagagcccgcgcaaggactgcgaccaggtgcaggcggacagggaccgcgccggcgtcctgctcaccaggaacgtcggcatcagcgacaacctgcgccccgccaacccgctcggctacttcaaggacgtgccgctgcccatctgcgcctcgctgctcaagcagttggactcggacgacgacgacgatcagtaatagcacatcgtcgacgaccgcagactggctggcactaaaccacaaatcctcttcacctggattacaaatatgtaactgagaaaggaaaggaaaacaaaaatgtaactgcgtggctgtaccaaattctgagtgctggattcttgctattgtcacgcagttacatttttgttttcctttcctttctcagttacatatttgtaatccaggtgaagaggatttgtggtttagtgccagccagtctgcgacgactgcggtcggtcgtcgacgacgtgctattacatatcgatcgtcgtcgtcgatgtgctattactgatcgtcgtcgtcgtccgag

SEQ ID NO: 127208 - DNA, 422 bp, Zea mays
  Clone ID: MRT4577_47479C.1
gacaatagcaagaatccagcactcagaatttggtacagccacgcagttacatttttgttttcctttcctttctcagttacatatttgtaatccaggtgaagaggatttgtggtttagtgccagccagtctgcgacgactgcggtcggtcgtcgacgacgtgctattacatatcgatcgtcgtcgtcgatgtgctattactgatcgtcgtcgtcgtccgagtccaactgtttgagcagcgaggcgcagatgggcagcggcacgtcctcctcgtggctgtccttgagctcgatcgtgtacgtgccgttcccgtcggtcaccccgtcgatggagcgctcgagcttgccggtgccgaagtgcttgcactccagcctcaccttggcgcccgcgatgtactcggtgacattggtcacgaacccggcgc

SEQ ID NO: 127209 - DNA, 217 bp, Zea mays
  Clone ID: MRT4577_4747C.1
gataggcgtacacggaacccgacagctgacacatgcacgaagcagacacctaatggaccgcgcactgggtcctcctcgagatgctcattatacccgacgacagcatgtcgccagctcgcggacgcggggcatatcgactgcggctatggcagatctatgcgcgtctgcggacgcaccgtgaagacatgctcgacgatggcggtcgagctcctggagc

SEQ ID NO: 127210 - DNA, 675 bp, Zea mays
  Clone ID: MRT4577_47480C.1
tgagaaaccagtgtgtgatatggcgacgtcatggctcctcagacatccttgtccacttgccaggccatggaccagaacaaggaatgatataggtctccaagtgaccggcatcacctactgctactggagatgcagtagggccagtgcaggaggaagaatcatggcggatatgagtatgaacaccaccaactgcacggcagaacccgcccttctaccccaagctgatgctgccgaccctcctcctagagttagtaagagaagcccgcgcactggccgtggcgccgccgttgcggctaggcacgaagaggagggcacagacgacgagtggctcatgtacctggagccggcgaagctagaggtgttcgaccatctggagccttgggcggaggcgaacgtggtgccgctccttaagcctgcggaggtggcgtggcagccgacggacttgctgccggacctggcgtcgctgggcgccgacggcttccatgcggcgtgcttcgacatcagcgcgcgcgcggccggcctgcccgacgcgcacctcgtgtgcctcgtggggaacatggtcacggaggaggcactgccgacgtaccagagcatacccaaccgctttgaggccgtgcgcgacctcaccggctccagcggcactgcctgggcgcgatggatccgcggctggtctgc

SEQ ID NO: 127211 - DNA, 1314 bp, Zea mays
  Clone ID: MRT4577_47481C.1
ccgtggtagagaagaagagatatcttcttctttgataatccaagcttgccacgagcaccccttaggactagtgcacgcttcatgagatgttatgtaatcaatatgctgtgcgtgctttaggtgcaaaatacaccttggccgtgcttagtccttatgaacgccatgtaacttattgatttcccatggaaatgaaatggtatatttatcttgctatcagaaccgcaggtcattagattggttatttctgtcggcatgttttcaccagagctgtattgctgtctgttttagccgtcttgctctgcgctgcaacttgtatgataaaacgaacaatgggtgacaatagcaagaatccagcactcagaatttggtacagccacgcagttacatttttgttttcctttcctttctcagttacatatttgtaatccaggtgaagaggatttgtggtttagtgccagccagtctgcgacgactgcggtcggtcgtcgacgacgtgctattacatatcgatcgtcgtcgacgatgtgctattactgatcgtcgtcgtcgtccgagtccaactgcttgagcagcgaggcgcagatgggcagcggcacgtccttgaagtagccgagcgggttggcggggcgcaggttgtcgctgatgccgacgttcctggtgagcaggacgccggcgcggtccctgtccgcctgcacctggtcgcagtccttgcgcgggctctccaccaagaccacctcgcagatgtcctcctcgtggctgtccttgagctcgagcgctccatcgacggggtgaccgacgggaacggcacgtacacgatcgagctcaaggacagccacgaggaggacatctgcgaggtggtcttggtggagagcccgcgcaaggactgcgaccaggtgcaggcggacagggaccgcgccggcgtcctgctcaccaggaacgtcggcatcagcgacaacctgcgccccgccaacccgctcggctacctcaaggacgtgccgctgcccatctgcgcctcgctgctcaaacagttggactcggacgacgacgacgatcagtaatagcacatcgacgacgacgatcgatatgtaatagcacgtcgtcgacgaccgaccgcagtcgtcgcagactggctggcactaaaccacaaatcctcttcacctggattacaaatatgtaactgagaaaggaaaggaaaacaaaaatgtaactgcgtggctgtaccaaattctgagtgctggattcttgctattgtcacccattgttcgttttatcatacaagttgcagcgaaaaaaaaaaaaaaaaaatttgcggcc

SEQ ID NO: 127212 - DNA, 806 bp, Zea mays
  Clone ID: MRT4577_47482C.1
ataccttccattcatctcgttagaaaacagagtgtgatatggcgacgtcgcaaagctcatggctcctcagacatctttgtccacttgcgatgccatggacaagaactgggaataatataggtctcaaagtgaccaacatcacctactggagatgcagtagggcgaataatggaggaacaatgatggaggatatgagtatgagcaccgccaactgcttggcacaacctgcgcaactccaaggtgaagcggtcgaagtagcaggagttagtaagagaagcacgtgcactggccggtgcgccgccgttgcggttaggcacgaggaggagggcaccgacgatgaatggctcatgtacctggagccggcgaagctagaggtgttcgatcatctggagccttgggcggaggcgaatgtgttgccgctccttaagcccgcggaggtggcgtggcagccgacggacttgctgccggacctggcgtcgctgggcgctgacggcttccgcgcggcgtgctccgacattagcgcgcgcgcggccggcctgcccgacgcgcacctcgtgtgcctcgtggggaacatggtgacggaggaggcgctgccgacgtaccagagcataccgaaccgcttcgaggccgtgcgcgacctcaccggctccagctgtaccgcctgggcgcgctggatccgcggctggtccgccgaggagaaccgccacggcgacgtgctcaacaggtacctcttcctctccggccgtattgacatgcggaaggtcgagaggacgatccacaacctcatccactccggcatggtcatg

SEQ ID NO: 127213 - DNA, 312 bp, Zea mays
  Clone ID: MRT4577_47483C.1
gagctcgcggatcttcgcgctactctaccggcactgcgtcgacgcaggcgccgcatcatcagccgcatcgcgcgaccggcgggacctggcagcgccggccgtggagcacttcgccgattcctccctgcctgtcgtggttgcagatattctgaatcatcatttccgatactcaaccagcatttttcacaagattcgtttcacgtctgtctcatcagaatcaagtgatgatgatgttgatgagctgaaagagcacgaaagggacttagatggatcaagtgaatattgtccatctggacgtactgaaggccttga

SEQ ID NO: 127214 - DNA, 1012 bp, Zea mays
  Clone ID: MRT4577_47484C.1
cggccggggaaaaaaaaaaaaaaaaaaaaaaaaaaaaaaaaaaaaaaaaaaaaaaaaaaaaaaaacccgggatggttggggctaccctcgtcgtcgtctcactcaccccgccttcacgcctccctcaccaaataaggtcccgcccttttccgacattcacaggggggacaggaaatcagcggccatggcctcgattccggcgacgaccttcgccgtcatcttatccgtcctcttctgtgccgcggctggcaccgccgtcgacaacgacctccccgactacgtcatccagggccgcgtctattgcgacacctgccgcgccgggttcgtgaccaatgtcaccgagtacatcgcgggcgccaaggtgaggctggagtgcaagcacttcggcaccggcaagctcgagcgctccatcgacggggtgaccgacgggaacggcacgtacacgatcgagctcaaggacagccacgaggaggacatctgcgaggtggtcttggtggagagcccgcgcaaggactgcgaccaggtgcaggcggacagggaccgcgccggcgtcctgctcaccaggaacgtcggcatcagcgacaacctgcgccccgccaacccgctcggctacctcaaggacgtgccgctgcccatctgcgcctcgctgctcaaacagttggactcggacgacgacgacgatcagtaatagcacatcgacgacgacgatcgatatgtaatagcacgtcgtcgacgaccgaccgcagtcgtcgcagactggctggcactaaaccacaaatcctcttcacctggattacaaatatgtaactgagaaaggaaaggaaaacaaaaatgtaactgcgtggctgtaccaaattctgagtgctggattcttgctattgtcacccattgttcgttttatcatacaagttgcagcgcagcgcaagacggctaaggccttgttcgtttgtgtcggattgcatccggaatcgttccacctaatcaaagtttatataaaaaaaaaaaaaaaaaa

SEQ ID NO: 127215 - DNA, 334 bp, Zea mays
  Clone ID: MRT4577_47485C.1
ctcttgtaggagtttactagtttctgggctagatctgtcacgttggcgacttccttgtagtttaggcttcagtttgtgttcggctggttttctgtttcacttgtgttgggtagtagtagggttagtgtgtactttggatgtaccaagtaatactcagatgtgcaagtttaggctaggcgtatctgataatgtgaggcccgcagggcgtgcttgtctaaaaaaaaaaaaaaaaaaaaaaggaacaaacaatatagaggaaaacagataacaaaacacaagcttgcaaaaaaaaaaactatggtatagagacacctaaaagacaataaaatggggg

SEQ ID NO: 127216 - DNA, 163 bp, Zea mays
  Clone ID: MRT4577_47486C.1
ggcgcaatcgcacgctcgctcgctcgctctctctctcccatcccccgcacgacacttgggtagcgcgagagaaggagagatagagacatgacgaatcgagcggcaccatgtgatgggcgtccccgtcacctccacggcgtacgcatcgaggacgcgacgaggg

SEQ ID NO: 127217 - DNA, 400 bp, Zea mays
  unsure (1)..(400): unsure at all n locations
  Clone ID: MRT4577_47487C.1
cccacgcgtcctgctcaaaaggntttgttgtgagttcaattcanccaaaacaactatggttgtggaaataataatggtgtgtagatagtaggcttaattataattgatatagggtgaattgaggtaaggagttctagagggtgcatacttttttacttgttgcaagcgacataatagggggggggggggggggtctagattnattatattctacttctttttaaagctgcttttattgtaataacgtgggttaaggagattagttacaattgaaaaaatgatgctttggcgtgggggcctaatacggagtgaggggggcatcggtgtgctttgcatagagtgggggttggtgagtgtgaaatggaatgtggtttattgcagggcattaatgttggtaggt

SEQ ID NO: 127218 - DNA, 279 bp, Zea mays
  Clone ID: MRT4577_47488C.1
ggtttcatcgcggcacatcagtcgttagtcataataccattaccaaacgcaaccaacgataaatccacgtgacataaatagatggagcccatgagagtatggctaaaaaaataagaatgtgatcggagttgaagcagagattgctggcagaagagcatcacatgagaattttcttcaatcagagaattattttatgattaacatggagattatcaggtcagagatttatacgagagtggatatgaggggaaccaaccatgagatcaagtttggcaactt

SEQ ID NO: 127219 - DNA, 220 bp, Zea mays
  Clone ID: MRT4577_47489C.1
gtgcagaccgcgtatagcgcgtagaatacgaatccccccttccctgcaccgcaccgaaccgtacccaacccccgtgggagtgtgagaaggcatcggaggcaggtgatgcagtccctcgcgccgacagggttccgccgcacgccagagatgaaagagtcggtggaggccttggtggtggacccggaggccagaaccgggtagacgctgcacccggggatct

SEQ ID NO: 127220 - DNA, 552 bp, Zea mays
  Clone ID: MRT4577_4748C.1
cggggccccatagcccaaaaccttaggcctcgggcggccggcgccgtgcccagagttctagcttgtcgcgtgctgggagctcacgccgaacctgcaccatgaagttcaacatcgggaacccgtctaccggatgccggaggaagttggagatcgatgacgaccacaaacttcgtaccttttatgaacgaacgatctgccaggaggtgattgtttatgctatgggtgaggagtttatgggttatgtattaaagatcatgggtggatgtgacgaacacggctgacgaatggagcaaggagttctgacttctggccgcgtccgctttctgctgcacataggtgcttcctgctttctgggatatggcatgcgtaatgcagagcgcaggatgaaggctgttcgtgggtgtgtcgtgagccatgagctatctgctatcaacttggtaatagtgaagaaggctgagaacgtgctgtctgtgttaattgacactgagagatcaaggatgaggggtcgccatagggcctccaggatctggatagtgttgaatcttgtgaagg

SEQ ID NO: 127221 - DNA, 263 bp, Zea mays
  Clone ID: MRT4577_47490C.1
tggagtgcaggccggggagagaagaggatgaggcctcccccggcccaagtctcacccacatggtctgccttggatgctatcagatcactgttctagaacctgcctcatcacggttcagccggttcacatgcaggccatcaggcatgggctgctatcacgtcaccatcgggcaaacaagacagccacaccctctccatgacggcctggggccaaagcgggctgcatgaactcggctggggcacctgaggttgcccagtctgagg

SEQ ID NO: 127222 - DNA, 187 bp, Zea mays
  Clone ID: MRT4577_47491C.1
cgggcacaacaccacaatccgcgaatgcgacgcacctatctaagctcgctgcactgcactgcactgccctgtcatcatatcgtacgagagcccggacgagagcgagggagagggatgcctgctccgaagctcgcgacgctggcgcctgcagtgctcctggcggcgactgcagtagctcccccgaccg

SEQ ID NO: 127223 - DNA, 416 bp, Zea mays
  Clone ID: MRT4577_47492C.1
ccacccttccaaaaaaaaaaaaaaaaaaaaaaaaaaaagggaaaaaaaaaaaaaaaaaaaaaaaaaaaaaaaaaaaaaaaaaaaaaaaaaaaaaaaaaaaaaaaaaaaaaaaaaaaaaaaaaattgaaaaaataaaaaaaaaaaaaaaaaaaaaaaaaaaaaaggggggggcccccccgggattttcgggccggtcccttgggggcgaccaactttcccttatagggggccttttaaaacctgggcaaaataagggcaatagcttttcccggggaaaaatttttttccgttaaaatttccaaaaaaattacaacccgaaaccttaaatttaaaacccggggggccttaatggggggcctacctcactttattgggttggccctaattgccctttttcaagtgggaaaacttttttt

SEQ ID NO: 127224 - DNA, 560 bp, Zea mays
  Clone ID: MRT4577_47493C.1
cccttcccagccctcgaaaccctataaacccgcggctccactccgctcgagctccaccgtgcgaggcgacaggcgaggcggcgggcttcaacaccgggccggcgagccgcggaagtggggcgcgtcggcgctcgacccctccaccccccctccgtctccgcgtgatctgcaggcgagccgcggaagcggggcgcgtcggcgctcgacccctccacccccctccgtctccgcgtgatctgcaggcgagccgcggaagcggggcgcgtcggcgctcgacccctccaccccccctccgtctccgcgtgatctgcgaccgagggctgctcggctgccccaactgctgccgttgaacaaggctcagctagttagtactgcctccttccggcaacctcagctagttagtcccccgccgccgccatccgccccaagacgaccgccggcctaaccacccctggatcccgaaccacatcgtgagggtgaacgcgacgcctcgtcaccatggctgcgtcccacgtcaacactaatggcgagcttctagatctgtatcaacttcccttcgt

SEQ ID NO: 127225 - DNA, 666 bp, Zea mays
  Clone ID: MRT4577_47494C.1
aagtttgacaaagataggaaattcacaactaataggatgggacggcagctttcctctatgggtgtggatcctattgctgccatcaatagagctcgtagccagtctaggggccgcaagcgtgagaggtcagtgagcagagctgcagctgatggtgacggtatggagatagatggccagcaatccaacaagaaactgcgtcgtacatcaaggtcgaggtcgaggtcacgggctcctgaggaggtcattcctggagaaggattcaaggactctgagcagaagaagaaggctatcaagaaagcaaaggcctctacaaggaacaggaacaaggatgctcgccgtggagaggctgaccgtgttattcctactttgaaaccaaagcatctgttctctgggaaacgcactcttggaaagacaagcaggcgataagctcagcacctcactgcatctggtaataaaggactggtgcactgttggtttgatcaatttgatgaaacgggtgttttttttgtgttcagccagcacttatttatgctactatttacgaaatttgtcttgatgtctctggtcctcttgatatatagttttagtgtttaattctgttgaatggtacaaagttatccatgtcccctactcaacatgtttgtagtttgcccatgagattttact

SEQ ID NO: 127226 - DNA, 778 bp, Zea mays
  Clone ID: MRT4577_47495C.1
ccacgcgtccgaatacagagaatatgagaaagagttagatggtgcatggagccaccccacagagaagccagttcactcaaataggacaactcagagcgatgaaatatatctcaaaggagaatgcggacctgatacactcacagaaatgaaggaaaactatgggcgcatctcagactctagagatccttgtgaccctgagagagaaattgttgagagatctgaacagacatcaaatatcacagtatcaaaggcaacttcaccaatttcagatgaatcttctggcaggcgtccagcaaaacgcctgaaggctgatgctccccgtcttgtcaatgtcaatcaagtagagagtccacaggagcaaaaacctgttgtgaatgagaatcatgtatctggtggtgaaacagtacaatcggaaatcacagaattacctgcaaaaccaccttgcagttcattgggagacattaatgctgagagcaataatatgcttgaacagggtagtgaagatgtacccaacatggatattgttaaggaagaggaattgtcccgtgcaaaaggtgacattgagatgaaagatgctaagactgttgcattggatcatacaccaaaaggggtcaatttaagttcaagacgaaagagaggggcttctatactttatggattaactgctgaggagcttagagatcacatgagtagtctaataaaccggcatacttgtcagagcagggtgacatctcaagaattcccatcaattgatggattgcctgatcagacacatgca

SEQ ID NO: 127227 - DNA, 446 bp, Zea mays
  Clone ID: MRT4577_47496C.1
cccactcgtccgagatgcttatgcagagctacagtcccgtaccacctgaacttgcaaggcgatgaggcatcaaaatttaagccaggctcaattcctgatagacctccaaggcgaaatgatacagtctttgcaaatcattgaagtaatctacctgagaagagactgaagatctttgaactattatgagctcaacttctacccgatggagggacctagtttagtatttatgagagggcatatattgtatcagatcttcattatggagattgatcaattgtggttcacatttcattgatctgaagaggtgctgttaatttcttatcattgccttttgtgttcccgttatgtggtttaatgtttgattttatagttccatcttgcttgtgttcagaataatatggtttaatggttaaccaatatgcattaaacttctgactagcttatgt

SEQ ID NO: 127228 - DNA, 548 bp, Zea mays
  unsure (1)..(548): unsure at all n locations
  Clone ID: MRT4577_47497C.1
ggcccacgcgtccgccagaacatcatccctgcctctactggcgctgccaaggctgtgggcaaggtcatccctgagctgaacgggaagctcactggcatggccttccgtgtccccactgccaacgtgtcagtggtggacctgacctgccgtctagaaaaacctgccaaatatgatgacatcaagaaggtggtgaagcaggcgtcggagggccccctcaagggcatcctgggctacactgagcaccaggtggtctcctctgacttcaacagcgacacccactcctccacctttgacgctggggctggcattgccctcaacgaccactttgtcaagctcatttcctggtatgacaacgaatttggctacagcaacagggtggtggacctcatggcccacatggcctccaaggagtaagacccctggaccaccagccccagcaagagcacaagaggaagagagagaccctcactgcntgggagtccctgccacactcagtcccccaccacactgaatctcccctcctcacagttgccatgtagaccccttga

SEQ ID NO: 127229 - DNA, 196 bp, Zea mays
  Clone ID: MRT4577_47498C.1
gacacacacacacagcaggtgaccgccggctgcccgcgcatggcgtgacgggtaggcacttcaagtacgggcacgcacggcggcccagaccggggggggtacgcaggagggaaacaacggacaggcaaagtaaacgcgagatacgatgagaggatacagcaggaaccaatgctcacagaggagcagccctccggga

SEQ ID NO: 127230 - DNA, 470 bp, Zea mays
  Clone ID: MRT4577_47499C.1
cccccccaaaggcccccaaaccaaaataccctgccccaccatcccctttttccagtcctgccaaaagccctccccccccccctattccaaaagcctttaaaggggccccccccaagggatttccctttgggcccaaggggcccttccccccaaaccccatttccagtttccccaatcaaggaagcccccctttctccccttccccaggccccccaaccgggaaggacccccaaaggggggtccccctggaaaaaaaaccaaaacccccccccaaaccgggcccccaaaaagggcccccatttttaatggcccggccccgccccccccgaaccgggcaaaccaaaccccaggggccagagggtttttccaaccccccacctttgcttttgcccccttacccaaccaaaggccccagggccaaacctgaatcccaggttcccgggaagggcaccaaacccctacccgggccc

SEQ ID NO: 127231 - DNA, 559 bp, Zea mays
  Clone ID: MRT4577_4749C.1
agggtaccaaaactatatgttgcaaacgacagtcatctcaggtctccagcacacaaaaaccatcacatcacttattctaaatacatcaaaataaacaaactccatacatggactaatgaaaaatcgtattaacaccacgtccagcatttgatatacggttgaaagaagtggtacaactagtcttccattacaactgtgacattctatactatgtggaaaaaatggggaaagaatagagaagcaaaaacaagttagatgccttgacattttccagagcatgcccttttatgccattgcagggttcttttcttcctcaagctgttttagctctaccaacctttctgcccatgcccgatctcttgccacagcagccatctccctttctgtccgttctgcctcctttctcttaacagcggcagaatactgggctctgcgcttctccttgtcagccgtgatgaagtcgtcccgctgcttgatccgcttcctgtccttcctccctcgcactcgcacgctcccttggtttggctggctagctggtacgggctcgtcaggctcgcac

SEQ ID NO: 127232 - DNA, 494 bp, Zea mays
  unsure (1)..(494): unsure at all n locations
  Clone ID: MRT4577_474C.1
ccagtctccagtccgcaacggaaggagaggaggcgtcgagggaaaatcgcgccaaccgggccgaacgaatcgtcggaaggccggggaggaggtctagaaggtgtgggaatggcgacggggcttgccttggcggcggcgcctcatgttgcttcggtcacgggatcggggacagtggaggagcaggcggcgggggtcggcatcttgcttcagatatcaatgctcgtgctctcgttcgtgctcgggcatatcctgcgccgccgaaagttctactacatccccgaggccagcggctcactcctgatcgggatgattgttggagggcttgctaacatatcaaacactcagaaaagcatcaggagatggtttaattttcgggaggacttcttccttctctttttactgcctccaattatattccagtccggattcagcttancaccaaaaccattcttttcgaacttcgatgctatcataacatttgcaatcctgggaac

SEQ ID NO: 127233 - DNA, 253 bp, Zea mays
  Clone ID: MRT4577_47500C.1
ggtgcggtatccgccggcggagatcccacggcgtgccccaggcacccgttatggccgctccaaatatgttgggatgcatgagcgaccatcctactcccacttggtcaaaagtaactgacgtagttatagcagctcgagaggagagctgatgccgtcatctggatcgtgcgaaactgctgatggaaagtgtcgaccacaggcagttaaggtagatgcgcgctgctgcaccaaagactcatgccggcctctttaa

SEQ ID NO: 127234 - DNA, 297 bp, Zea mays
  Clone ID: MRT4577_47501C.1
aaatccatgggctcatcaattacctcacaaaaggctcatccgggggcataataaggcccatttgatcatccaggcctaataaggggcaatttctcatccctaatcataaaaaacggctcaggggtcagaacccaataaccggggagcccaggggggccggtcaccatcggggtacaggggcggggggggggccatccccccactaggggaggggggtttgacaaaggctaacccggtttctcgttcttgcgttggcaagggagctgggggggtctaatatatatggacaaaagacat

SEQ ID NO: 127235 - DNA, 265 bp, Zea mays
  Clone ID: MRT4577_47502C.1
aaaaagcgccaaaaccttgattttttgggccgcccgataaagataagccagtttggccaaaaaattagactccccagggaccggccctggcccgcttggaaccgcccgggtcccccgccctttcaggggtccaaaaaggggcccaccaaccgtattttatttggtcaagcgggaaacaccccctggacccagcaaaccttaattgggccgaaaccgaattaccccccgcgggccaaaaatgggaaaacaggcgtgggcccccccc

SEQ ID NO: 127236 - DNA, 1100 bp, Zea mays
  Clone ID: MRT4577_47503C.1
gccggccggtccgagagacagtcctcgcagcggagtgttgcgggcgaagggctcgtgggtagatgggcagcgcgtcgctcgcctcgcctactcctcaccggccccgcatcctccattcctccaccgctactataaattcctctgcttccgcccagctctgctccgccagtcccagcgacgcaccagtgatctcccggcgaaatcccgctcccgcgtcccccctcctccggctgcctctgccgcgcccccgctccggaaggtgcagtaaatcatggcgactgggcaacttttctcaaaaactacccaagcattattctacaactacaagcaacttcccatccaacggatgcttgattttgacttcctctgcgggagagaaacaccttccgttgctggaataatcaatcctggttctgacggttttcagaaacttttctttggacaagaggaaattgctattccagttcatcctacagttgaagctgcctgcaatgcacacccaacagctgatgtatttatcaactttgcatccttccggagtgctgctgcttcctcaatgtcagctctgaagcagccaacaataagggttgtagccattatcgctgagggtgttcctgaatcagatgcaaagcagctaattagttatgcacgcgctaataataaggtcatcattggacctgcaacagttggaggaattcaagctggtgctttcaagattggtgatactgctggaaccattgacaacataattcagtgcaagctttacaggcctggatctgttggttttgtgtctaaatcgggtggcatgtcaaatgagatgtacagcaccattgccagagtgacagatggtatttatgaaggaattgcaattggaggggatgttttccctggatcaactctgtcagaccacattctgcgttttaataacataccacaggttaaaatgatggttgttcttggggagcttggtggaaaagacgagtattcacttgtggaagcattgaaacaaggaaaggtccagaaaccagttgttgcatgggttagtgggacatgtgcacgtctattcaaatcagaagtgcagtttgggcatgctggtgcca

SEQ ID NO: 127237 - DNA, 1637 bp, Zea mays
  Clone ID: MRT4577_47504C.1
gttcaccggccccattcctccacccgccactataaatctctctgcttccgaccagccttgcttcgcccgttccagcgacgcactactgcggcgaaatcccgctcccgcgttccccatcctccggccgcctcgcttcggcctccctccggaaggtgtcttaaatcatggcgactggccaacttttctcaaaaactacccaagcattattctacaattacaagcaacttcccatccaacggatgcttgattttgacttcctctgtgggagagaaacaccttctgttgctggaataatcaatcctggttctgatggttttcagaaacttttctttggacaagaggaaattgctattccggttcatcccacagttgaagctgcatgcagtgcacacccaacagctgatgtatttatcaactttgcatccttccggagtgctgctgcttcttcaatgtcagctttgaagcagccaacaataagggttgtagccattatcgctgagggtgttcctgaatcagatgccaagcagctaattagttatgcacgtgctaataacaaagtcatcattggacctgcaacagttggaggaattcaagctggtgctttcaagattggtgataccgctggaaccattgataacataattcagtgcaagctttacaggcctggatctgttggttttgtgtctaaatcgggcggcatgtcaaatgagatgtacagcaccattgccagagtgacagatggtatttatgaaggaattgcaattgggaggggatgttttccctggatcaactctgtcagaccacattctgcgttttaataacataccacagttaaaaatgatggttgttcttggggagcttggtggaaaagatgagtattcactagtggaagcattgaaacaaggaaaggttgagaaaccagttgttgcatgggtcagtgggacatgtgcacgtctattcaaatcagaagtgcagtttggcccacgcgtccgcaaaggtcactggaatgcttttggagatggatcagaccgaggtcctccacctgctcgagtcccctgatgctctcaagtccaaggttgctgaggcgatggatgttctccgcaatgtggcccaccagcaaaacccaaacctcccgaccagtcagcttgccgcattatcactgaccgaaggcattatgtcctaacttgaaggccataacaaactatcttcagtttccaactcagtgcgggtgtttccagaggttgtctggcacatgacagtattgttccttcgatactatggttggacttgtgaatgttgtttccatactggatgttaggttttatttgcgccctacggtgacctgccgttaaggcaaagaacttatttgcaagtctgagcactattttggggggtggggtgggggggtgcgttgtttttataactgtcttttttcccctagttggaagttttcttactcaattgaatgaacgagggaacttattgcatacaaaaaaaaaaaaaaaaaaaaaaaaaaaaaaaaaaaaaaaaaaaaaaaaaaaaaaaaaaaaaggacggacaatataaaagaatcaagctataagaacacatgcatgcaacgtcatagctcttaatatagtgttacctaaattcaatta

SEQ ID NO: 127238 - DNA, 422 bp, Zea mays
  Clone ID: MRT4577_47505C.1
gtcgaccttagcgttcgtgaatttggtattgttcttgggtaaatcaggggcaggcttgctgtgaggatctaagcttgtaaagcttggatgtgaaatgggtgtacaggtatttgaggacttctttaaacgctgcaaagaggttgcagtggaagaaaaagcgcgtggctgatgaatacttaaaagcataattgtcggatgagatgtttcagactaaggttatttggtcccttgctagattacaggcaacatgtggtgcatttgctttatttacgggaacattcaaattgatagaatctgatggagaggagaaatttgaatgaacaggcagaacatgttcagttgatgcagcttacaaggctgatgacaaaatattctagatttcaaccgttctgcgaaaatgcagcatgttatcagggacacta

SEQ ID NO: 127239 - DNA, 377 bp, Zea mays
  Clone ID: MRT4577_47506C.1
aagccaactagcttttgtgaaccctgtcgcctacttgcaacagcagggggtgagatgcaacctactttttctcgcaaacataacatcataccaacaacaacaacaattgcaacagtttctaccatctctcagtcaactagccatggtaaaccctgccacctacctacaacagcaacaactgattttatctagccctctaactgtgattaatgcacctacatacctgcaacaacagttactgcaacatattgtaccatctcttactcatctagctgtagcaaaccctgctatctacttacaacaacttcttacatacaaccatatgacttaatcaaactatgcttgctacctacaacatatactaacatttacttaat

SEQ ID NO: 127240 - DNA, 664 bp, Zea mays
  Clone ID: MRT4577_47507C.1
gcggcgtattggatatggcagtgcatcgactactcttcgactccatgtctttctctctacctagtcttgtgcctaacaacttcttaggaatcaacattgtatgtccaaaaaaaacatttggagcaaagcaagggatcaaagttgccaaatcgatcactgctgtcatgcatgcacgctagatatataaacggttaacatgtctgtgggattcgaatcagagagaaacttgtggaactggaatcagataagcgataagtattcgaaactgaatcactttacacgtatgtactgtgtggaaacttgctctgttagtaactacacgctatatatatatgagatcacatttttggctctgtgtgtacgtggagtactgtttcgttctattagcttaactttccagcatttcgttttgtatcatgtacaggtgtatatggtatgttagtaactgcatatgcgtttctgttgtgtacgtagaaattaaaaaaagaggcttcagctatatacaataatttcagaatctcatccatgcttttagaatataccatgtaataataataagtacaaattttatcactgtgtacaggtgtattgtatggttttggcaactgatcgattgcgtttccatcgagcaaataaaaaaggaaccttaatatattacttgtgg

SEQ ID NO: 127241 - DNA, 222 bp, Zea mays
  Clone ID: MRT4577_47508C.1
gcacgagcaacgccgaggcaggagaaggcggccgaccagcgggccccggcggccgagcgccggcgggagacgcggccgcggttcgcgcccgagttcgacgggctgcactgcttcgagtccatcgtctccgcctgaacttcgaggggcctcctcgtcacatgccgcccccgcgcttggattcgttcctgtcggcggtcaccgagtgaaaaggcgacggcgacg

SEQ ID NO: 127242 - DNA, 754 bp, Zea mays
  unsure (1)..(754): unsure at all n locations
  Clone ID: MRT4577_47509C.1
cctcgagccggcaggataacgttaaaaaatccgctaatctcctttgtcctctcttctctctacctcgaccctctctctcacagaccgccgccatcagcgctgttttgctatctagcccgtcgttggccgctccgactccactcggcagtcgcctcgcggctggtgtttcggacccttccccgacaggtgcgcagtcccgcccttccccgccatgccactggcactccatcgctcggcccactcggccgtgcatccggcgctccaccccgccctggccctcctctgattgctccggccctgctagcttctcgccgccacgctgcccgcacccgccgttccgcccacgaccgtcggtagctagcaccacgatccacaccattgcgacctagcacgagagtccataggggtaaccgagccggtgaggaaactgtcctgtctgagagcaaagatagcaagagagcaaagcatggggcaggagcaagagggacctgcgactccataggcgaacattgtacggctccatcggccgcgcaacaaatgacatatgtacgccatgcaactacccaaaaatgatggttgttcgtgaatccatgacggcactgggccctggtatgcacagcggcgctgcccttcgccattgcctcagctctgtttagtacagttccaagcaagctgacttacttgctcctttccacgcataagatcaagtttaataatacnnatatatagtagttagggcatataaacacacaac

SEQ ID NO: 127243 - DNA, 263 bp, Zea mays
  Clone ID: MRT4577_4750C.1
cgggagcatcctgcaccgtgcatttcagccacagatcacatggcccctccgcgggcccagcccacgccctgaccgcccggcctggccaggtctccgtatctctctgccccgccgcaccttcgcaactgcggacatgctgggtggatccggatcgcatggaagacgcagactggccgcgctctcccaaatcgcctaccagaggaatgacgatgatgaagaggaggcatcccgggaacggcgccgccgagcccgacaggaacggc

SEQ ID NO: 127244 - DNA, 985 bp, Zea mays
  unsure (1)..(985): unsure at all n locations
  Clone ID: MRT4577_47510C.1
ttggaattcggcacgaggggcctccattccacgggccaacgtgccacttcccctactcgtcttcgccagaaacccgctggcgctttggtctctgtcgtccaagttcccatctccggccaccaatagttccgacccgtaagcaccaacgccccatttgccactaccctaccgcgcaccggcaaagcgcagcgccaggccgcagcttgcaggggcaggcggcggcgggcagggcaaccgccactgcagccgggatccggcggccagcggcaaccggcggggggcaggcggtcgggacctggtgtcggtctacagccagacagcagcagcagcagcgtgactcaaccactaccgtatggtccactgctcctttgctggtgtcgtccactgctcctctgcaacgtcgtttgatctcctgtgcagtctgcacacgcgtgttgaaggagttgattcctggacagcacacgatagcacaatcctctactggttcattcctggactaccggtggtaatctgacctgctatatcgctttgcttattatctatattcatcaaagcatctatttgatcataatgttaaaagcgcgggcaagtttctagtgcttatcatttgccctccggtcaccccgttgtcgcgcgaagccgacgctatttcattccccgacaggaccggggctccgctgccgcctcttcgcccctatatggcggtcccgaggcctcaaatccgtgccctacgtcggggcacgctgcttctcttccttgtcccgctcatctactctgtgtccaggctgcaaccctgggctccagaaaagggtgtgtgcctgccacccccaaccgcgccgaagcggcctgaccatctcgtgctcggccccgccgccggacaggaccgccccgaccgcctacagtgccgaggacttatagctctgaacaagattggcatatcaagtgaaagagactattctgganaacatgtttcttttgctactgc

SEQ ID NO: 127245 - DNA, 140 bp, Zea mays
  Clone ID: MRT4577_47511C.1
cggcgtcacgtgcagcaggacgctgcgctcctacttgttagccgaatccagcgtcggtgacccagacagagcgacagaccgagtgacatggcctctcacatcggctctcaccgaggccgtctactagggcctctgatact

SEQ ID NO: 127246 - DNA, 415 bp, Zea mays
  Clone ID: MRT4577_47513C.1
ggaccccccagaaacattaagtttaaaggaggaaaccctcggtgcaaagatcaaagcccccaacaggaaattaaaaatgcgcaaaccaaattttttttttttaaaaaacgcggctaaagacgacccaaaaaccctttaagtcaactttctggaacccgaagttaacaaaaacacggggggggcgctaaaatgccccggggggcaggaaaccccaaaaaggacactaccccacccctagaaatgccacaacaaaggacccggggggcgtcccaaaaaaacccaaccggaacctgcaggcatgccaccttttctttttgcgtgtggtttcggaacttgaaaacaaaacggttaacattggcacacggttaaaaaagaaggccggacccaatgccgccaaaaatcaattccttaacct

SEQ ID NO: 127247 - DNA, 449 bp, Zea mays
  unsure (1)..(449): unsure at all n locations
  Clone ID: MRT4577_47514C.1
gggagaaggcaaagcttggaagagttagagaggagtatgagaagatgatggagaccagggccgaatgggaaactgagaagaaggtgaaggcgagacgccaaaaagagcagaaagaggttttaacactgctactgcactattaattcattatttccttcgtcgaaagcatccgtagtacaagccccaaaccctaaaaaatgaccgagctggacagaaagagagaaaaggcactagaagaatacaacctggagatgacaaggatcagcaaaatctctggaggagcaagggcaatggcggaggagcgaaaatacaacgatgggaaaaagatcagagagaaagcgcgcaagatgcgatccacaggaaagcctnaccgcacgtgtgcttgcttttgagaacagctgcatacgctgaaatttgaaccaaaaccaaatgaaggacgtcattttgga

SEQ ID NO: 127248 - DNA, 582 bp, Zea mays
  unsure (1)..(582): unsure at all n locations
  Clone ID: MRT4577_47515C.1
cttcaaatttagtatganaanagatggagaccataccgatgggaaactgagaagaggtgaaggcgagacgccaaaagggcagaaggggttttagtttcgttaattcattcgtagtttaaagaacactgctactgcactattaattcagtatttccttcgtcgaaagcatccgtagtacaagccccaaaccctaaaaatggtatcgctaggaattcgtcatgacaacttatttgattaaatcacattgtttgaggatactcagagccgagcttcttaactttgcagaccgagctggacagaaagagagaaaaggcactagaagaatacaacctggagatgacaaggatcagcaaaatctctggaggagcaagggcgatggcggaggagcgaaaatacaacgataggaaaaagatcagagagaaggcgcgcaagatgcgatccacaggaaagcctccccgcacgtgtgcttgcttttgagaacagctgcatacgctgaaatttggaaccaaaaccaaatgaaggacgtcattttggacggttgtaaaaggcacgcaatagtgacgttctgtattgtaatatgta

SEQ ID NO: 127249 - DNA, 905 bp, Zea mays
  Clone ID: MRT4577_47516C.1
ccccgcgtccgcggacgcgtgggctcggccgtgaggccagccacgtcataccgctctggacggaatggagaaggcgcggcaggagtagctgctcctggcggcacgggatctaaggctgatgaatgggagaaggcaaagcttggaagagttagagaggagtatgagaagatgatggagaccatagccgaatgggaaactgagaagaaggtgaaggcgagatgccaaaaagagcagaaagagaccgagctggacagaaagagagaaaaggcactagaagaatacaacctggagatgacaaggatcagcaaaatctctggaggagcaagggcaatggcggaggagcgaaaatacaacgatgggaaaaagatcagagagaaggcgcgcaagatgcgatccacaggaaagcctcaccgcacgtgtgcttgcttttgagaacagctgcatacgctgaaatttggaaccaaaaccaaatgaaggacgtcattttggacggttgtaaaaggcacgcaatagtgacgttctgtatggtaatatgtatttggctttgacaagttatgagtgcacattccactgaaggcaacatcaacatatttttgaagggtgtggagttaaggaataaaaaaaaagatccaccatgcatcaacattcaagatgaagcatggagtaggaactgccccaagaacaacgagaacgaaaacatatattcatcataaaggtcaagatttaggattcccattcaaggtataaggtgtgagactagtatcatccaattcaagtgctgaggttcttcttgagctttggccaccagacttctcagattcattcctatttttgttgattgttgtctcctcatcctgtgtaccagattcatctgattccacttaattcaaaatcatactcttcat

SEQ ID NO: 127250 - DNA, 314 bp, Zea mays
  Clone ID: MRT4577_47517C.1
tcttaccaggaaccagcagggaaccaaggcgggggctacagcacgaggggacgggaggaacgcacccagcaaggacacggagcacgccacaagcacgaccagcgcgggggacgccaaacaagaggaacaccaatgccgcggaatcaacccgcggcgaaagaagaaccgaatccatgggggagagcgaggaccacgccacacaattagcgctggctgacgagcccacaacaacgaccggagggcccggaaagacatgcacgtgactgagcggacggccgcagagaccaggaaacgccagagaaggaccacagacc

SEQ ID NO: 127251 - DNA, 1109 bp, Zea mays
  Clone ID: MRT4577_47518C.1
gtagaagctgaggtagaagcggtgcacgcagcagggcctagagcctccgtctgctgaagggtttgatcctgatttcatctatgtgtctggcaggcttcgggttgtcttctttttttctccgtaaaagctgaggtgaaaaaagggttcggttttctggagtaggaaagggaggtagaggtggacgccagggttcagcgataccacctcaagaaagcaggcctattggaatagcggaaatgaacagcagcggggagtacgatgctgcgttcgcagccacaattgcagcagcagcatttgcaatcgctgcccgtgaggataagctcgcggctcaaaagaactccgtccccatcgaggaggtgaccccttccctatcgccagtcaatagagctgaaggcaccaaaaagcctgcaggaggcaacaaaatcgcgagatggtttagcggcaaggagcctatagaacacgacgacgacgacgaggggccagttaatgtatcggtaaggaggccactgaaaccagcacctggaaagcctgaggacgtgcctgcagatcatcacaaggtggcacccaggatgcttgagacttctctgggtgtgaggaagggttcgggatcttccagcaggtcggcagagaggaaatggagcaaggagtttgagcaagaacaggctgttcagaaagcgccctcggccgtgaggccagccacgtcataccgctctggacggaatggagaaggcgcggcaggagtagctgctactggcggcacgggatctaaggctgatgaatgggagaaggcaaagcttggaagagttagagaggagtatgagaagatgatggagaccatagccgaatgggaaactgagaagaaggagcctgcgcgcgcgcccacgatcgcagctgcaaccgagctggacagaaagagagaaaaggcactagaagaatacaacctggagatgaccaggatcagcaaaatctctggaggagcaagggcgatggcggaggagcgaaaatactacgataagagtgtgatttgaagtcactattgtaaaagtcacacaatagtgacgtactgtattgtaatatgtatttggctttgacaagatattagtgtagag

SEQ ID NO: 127252 - DNA, 320 bp, Zea mays
  Clone ID: MRT4577_47519C.1
aacgaactttgtgataacgatttttttttttttcataagacatggcaggtggttctaaatggggttgcgttaatgtgtgtacctagcatgtagaccacaaaacctgttcttttgaagaaacaacatgaacacaggcatgaaggaaaccaggactctctgcttcaaggcattgatgaattagtgggagcagaattcggggaacatcatgaggacgcacatgaccacgacgagcttgagttaggtgaacctcttgtccacaaactgtttcacaccacggaatatggtgtgagtgcagcgggcaacaccgcttcatgccttct

SEQ ID NO: 127253 - DNA, 226 bp, Zea mays
  Clone ID: MRT4577_4751C.1
cccacgcgatcaaaaaaaaaccatactactaactctccaaccaaaacaatggtgggcactaaagcgccgtgtactgcatggcatacatggtcagccaactctctgctctcaaggacgtaactctacctgaaggggtacttcctgtgccaggctcctggaccagttttagcttgctgatgtatattactctagaatcggacctttaccatatattttttcaccacca

SEQ ID NO: 127254 - DNA, 297 bp, Zea mays
  Clone ID: MRT4577_47520C.1
ccgaaaggcccgggccgaccacacccttccaaggcaatgaacaattttttgtggatattgtttaaggaagcactaaactccaatgctatctggagtccttgacaagaccggtggcaagctaatccaaacatcaaaaaaaggtcctaccagccttaataaaaaaaaaaaaaaaaaaaaaaaaattacaaataaaaattttataaaaaaaaaaaatggggcggccgttttaaaggttcaaagttaacttccccgtccatgcaacttaatagttttttaatagggcaaccaaaattaaat

SEQ ID NO: 127255 - DNA, 426 bp, Zea mays
  Clone ID: MRT4577_47521C.1
acagtattcttcactcatgagtcagggcatcagcaagttaacttcctgaattactagataatatggaatcgaatcaaaccaagtactagctcccttgttccatcctctgcatggctccgatctagtaaatagcatataacccccatagaagaaaagaaataagtaagctcagacagtgactggaccgcacagaatcatatttcatcagctcttttttcttgaaattttattggttatttacctatttgctatcatatattcataatccctatcccctagccttttatttcatttttcttgttacagtggtcatgtgccccatgcacatattctttgaaatgcactacatgtcttttcccatgcacaaggataaatagtctatttcctttcggagtgtaagattcatcatgaaaagcacttctcata

SEQ ID NO: 127256 - DNA, 418 bp, Zea mays
  Clone ID: MRT4577_47522C.1
gggggggggccttttttggttaaaaccgttttttgggtttaggggggggggggccacatttttttattggcaaacccccctaagggcatgggggggggggggtttttttggggggtttgggggggccaggccccccatggggggggggtttggggctggtgccaaaattgcccccgcccttgggggggctgggggggccccacaaaaccaaaagggggggggggggggcccccccgggtttttggttggaaccatgttgtaaattgttgggggaatgttttggggctaaatcggccaaagacctggaaaacattggggtggcaatacctggggttttctggggggtttcaaacggggtgggaaaaaggctttcccaaaggggtgcccgggggccttaggaattaaagaaaatttttta

SEQ ID NO: 127257 - DNA, 194 bp, Zea mays
  Clone ID: MRT4577_47523C.1
tgagtaccggccggattctgtcgaccgggcggcgaatgcaatactctccatgaggaaattgccctagctcacgtggaacaggagctcttgccacctggggctactgcggatagacgccaatgtgagttacttgcgcatattttttacccaaggttttccggatcaggcctccaaccgatgcttgccacgatgtg

SEQ ID NO: 127258 - DNA, 1276 bp, Zea mays
  Clone ID: MRT4577_47524C.1
gccggccggttcggggcgtttccggtcatccggtgtactgagaactcgcgggtgcgaacacgtggccagtctctatagccactccggatctcaaaccttcatctaaatttcctatgagttgacgttcgattccgctttgtctcagcctctctcttccgtactgcttctcctctacctccgtcgccagccagccactacctcgattcgctcccctccggccctcctgtcgcgcgcgctctgcctcactggcgccacggtcgcccgcgccggcaggctcgagtccctcgacgccatcgcctagattgtctactagctggcccccgctcgccgcgaggtgttgcttgcggaggtggcggcgatcgtgcctgcatggtgctcgacaaaaaggtgctctacgagacgacatctgcttccgcgcgcacaagctcaccatgcgcagcttcggtgacgtttagccacgtcatctccgccaccatgagcggcgtcacctgctgcctttgcttctccggtcagctcaactccgatctccgtaggctagccgtcaacctgatcccgttcccgcgcctgcacttcttcatggtcggcttcgcgccgctcaccttccgggggctcctagaaatatcacgtcctgactgtgccagaactcccaaaatagatatgggacgccaagaacatgatgtgcatcgtggacccgcgccacgggcgctacctgacggcgtccgccatgttctgcgacaagatgagcaacagggaggtggacgagcagatgctgaacgtgcagaacaagaactcgtcctacttcgtggagtggatcccgaacaacgtgaagtcgagcgtgtgcgacatcccccccacgggcctggcgatggcgtccacgttcgtcggcaactccacctcgatccaggagatgttccggcgcgtcagcgagcagttcacggccatgttccggcgcaaggccttcctgcactggtacaccggggagggcatggacgagatggagttcaccgaggccgagagcaacatgaacgacctggtggccgagtaccagcagtaccaggacgcgacggcggaagaggaggaggagtacgaggagggagatgaggtggctgcctgatccaccggcacattgtggggttgtgcacattgtggggttgtgttattattgttgctcttcatctggtgtttaaaatgttactgtgatgctgctgcgaaactgacgtaagttttaactgtggaattgattacttctagatcgtggatttgtcgatctgatatt

SEQ ID NO: 127259 - DNA, 517 bp, Zea mays
  Clone ID: MRT4577_47525C.1
taggggccttttttttttttttttttctttttttttttttttttttttttttttttttttttttttttttttttttttggaggatgaagctgaatatatattatttcccccgcgggagccgggactgggattcaacggttctaaaagggatacactgggggaccaaacactggccccccagcaaaaagctttcagctgacttaactattttattcttgacaccccatttgacacaaactggaatagggggaactccgcagaaactagcacgagcacaggtccccctagggggcccctcgaaaccgaaaccgcgagttcttccccccggtggggcattttgtattgcagcattgccggagcacaggccaaaggagtttccccttgcccatttttgctttcaacatttgccccctgggccatgagaataaaagcaatttcagtttgggtaaacaaagcagccaaatggcgcaaaggaaatccctggttggcgcagtaattaaaaaccaccccccgggga

SEQ ID NO: 127260 - DNA, 316 bp, Zea mays
  Clone ID: MRT4577_47526C.1
actgagcctctgatgagagcagcagtaccgttggtcgcatcggcgacagcgggcggccggcggacgctatgtccgttgtggaggccgtggggcccaccgggcgcggcgtcatacgggcagccactgtgatgctgcggggcgaggaagatgaaggacgcgggcgtggtccaagaccaagaccacgaccacagatgcagggtcgtcgttgcggggtggtaagaacgccgcgctgttcctgctgaaaacagtggaggaagaggcggacgcggacactgaaacggcatccatcggcgcggcgtcccaagactgcgaccac

SEQ ID NO: 127261 - DNA, 552 bp, Zea mays
  Clone ID: MRT4577_47527C.1
cggacgcgtgggcgcgtcacgcgccctgtgtagggatctcccccttctcctgctctttgttggccgggtagcgtcgcgtggaagcacggcggcgtggttccgcgcccgtttcgcggtggcggttccgcgaacctcgccggcggccggactaacttcaccccgccgtgtggtgcacggcaatcggcgcagcacggtgggttatgctgctgctgcgcctacctatatggacggaggattgttgtggttgtggtcgccccgactagatattttccttctgtggtgtatgattgctatggcgggcccgcgctcgagcggtgtgcggctcatctcagctgcgggggccctacttgggtgggtgtgccgtgtgcggtggtgctgagttagtccttgcgcgtccttgtgcgccgcattcgcccgtgtctagtggctcctctatgagtatgccagatgtccttagattccggcgcatgtagccgagctcggcggagactccgatgccactgtcgtgaactaaattaccaagggttgttcgatcgaagaatgcaattagca

SEQ ID NO: 127262 - DNA, 1506 bp, Zea mays
  Clone ID: MRT4577_47528C.1
cattgggtacctcgaggccggccggcgaggcgtcgtcaacgagtcgggttgttacctcgaggccggccggggacctgtccacagtccaccatacatatcactctccgctccgccattgttgctccttattagtagttcgtcccgcgtcccttgacagttctatctatccccaccacaaataagagaccacctctctgccttcttctcggaggtcggagaagagctctctgcttcattcggccggtccaactccaccgaccgatccaatccaacccactgaccatggggttcccgccggtgtgctgctgcgcccccatccccaagccggtcgtcgccttctgcaacctgctcggcgccatcaaggacgccgtcctgctgacgctcgccgccgtgggcttcccgcacgacgccgcgcgcggctcggcggacgcccaccagcccgaggaggtgaagacccggctccccgccgtggagtacgcccagctcctggccgagcagcagccgtcgcccgccacccacgcggcctgcatcgtttgcctggacacgctggaggcggcggacgaggtgcggcggctgggcaactgcgcgcacgccttccaccgggcctgcatcgaccgttggatcgacctaggccggacgacgtgcccgctgtgccgctccgacctcctgccaagcccccggggccgggccgggctgctcgggctgggccggctcgccagccgtctcacgcgcgttcgcgtttggtgaggaccgtctcggagcccacttttaccttttcggtggccaggccgcggtcgcagcccatcccggtggtgccggaacggcgcggacacgttagcgacggcgaccgggccgccggatggtcttaaatctgctctgccacttgccaaccgctaatcaaccagcgggcttaattagcagcggattggcttggtgtctgacagtcgatattatgacagctaaataagcagttaaatgtttctataggattgagtatacacggcagctaaatgtttcgtatacagtggcggacgcaggacgaaaattcaggaggggccaaaaagatcatatgagagtcatgattttctagttcgccaagtccattgaccgcaggggataagtcaaatcgttgcgaagagcgagatctaatttgtcgagcggatcgatgtcacgagaaaaacaggacaagggacggaggcgctaggaaggggcgaagtcgggtggcgtcgcatcgggaatgggtcgacgacggaaacagggcagcgagcagactgatttaggtggtgtcgggaagattagagtcagactggtagatgcaagtactgaaacgagaggatccggcgagcagactcataacatggttgttttaggccatgttctaaacatttagagctaactgttaactggttttagctaggttggggcatctaacaattaatacttatttaaggggtataactaacaattagttgatccattcctaaaaaaaaaaaaaaaaaagcggcc

SEQ ID NO: 127263 - DNA, 423 bp, Zea mays
  Clone ID: MRT4577_47529C.1
aaagcccaattcaataaatgagtatcggaaataaccaatcaaggcctacagctacagatgtcctctacgcagcggcacgcattgataggacccgcctggacatgccacgatcagagccgctcatgggcatatcacatggtttcaagtgggcacacaagtcccgcacttactccgctccttgagcagcgagtggtactctgttacgctcgctcgccccttctgacactgtgcttagctcagatcggatccaacatgtcctatcttgtcccagcgaattccggacctgaccatgctggcgtaccacgtcctcctatataccgtcaccttagaaccagggcacaaaagggccctaggtgtacactgggtgaaactggtgtccaatgacagtagaacacctcctccacactggaggcataggagatc

SEQ ID NO: 127264 - DNA, 375 bp, Zea mays
  Clone ID: MRT4577_4752C.1
cccgtccggggacgcgtggcctggctcaaatgttaccgggagactttatcattttggacccagagacgcaaatcccggggacggggaggttgtaacatgtggaaagcttcaaggacgtggaaccttcaatgtgatccctgattcctgaactatgggtggtacaatactagccttgctgaaggagagtgggaggacaacgaagcagcggatcgaaaaggtgagtgtgactcaagctatcgtgcacagctgcagcactatcacggactcgctcagacaggaccgcacttgcttgccaccgaccatgaacagccccgagctacacacacttattcctgaacctgggctgggagacgggcccacccaggaacgtcaggg

SEQ ID NO: 127265 - DNA, 753 bp, Zea mays
  Clone ID: MRT4577_47530C.1
gcatcaagggtgtcaaaacgacttactgaagaggctgaacaatactttgaagatttcctgtcgaatgttgaagatactgacttttcttcttttgatggagagagaagtgactcaagttcaaccaggaaagacctgttgttacttcatgctatgacagaaactccagttaagctcccagaagttgctttacctgcagaggcagatggcgttgtccttccctggctgcaatgggaaactaccaatgaccttcagacctccccgtgcaaaaccaaggcccagggagaaagtaccagaggcagcactagcaatcagactgcgagcagccgtgggagttggagccctggagaccatgccacttcatcagttgcctccaaagatagtttactgaccagatttggtgaggttgggatttgccgaagcagcttgtctgattatgctcgaaccttgtcgtttcacatcgacgactatttgcatttaaggcagagtgaggatctcctcttggagacgtggatgcagaaacaaaggatcgactctggcggcctagtcctgtgcagtaaatcgacgatattgtagagtgcagccaaataggtagttgatggggttgagctagactaataattgcttggatttttacctttagctgccatggctcctgccgcctagtgtgtatagatgcatgcattatagttaacagattggataagcttttttaacgcttcatcgtgattaagaaaatttgttttttacaccatc

SEQ ID NO: 127266 - DNA, 241 bp, Zea mays
  Clone ID: MRT4577_47531C.1
tttggttaaaattaggatgatggtggattttgctatcagaacacattaccacacactaaataaaagcatacaggcagaaacttagcctagggccacctggcaaactaaatagcccgatacaggaagagcacatagacacagagtgcatatgaataccactactactcttctattgtcaccagtacagagattatcgagtatggactgacaccctcttcatcacacaaaatttgccttggag

SEQ ID NO: 127267 - DNA, 432 bp, Zea mays
  Clone ID: MRT4577_47532C.1
cacagaagaaagggaatcttggaatggctttctctctgcaagaaatggaacacaaaagggaatgtgggaaaaaaaaaaaaaaaaaaaaaaaaaaaaaaaaaaaaaaaaaaaaaaaaaaaaaaaaaaaaaaaaaaaaaaaaaaaaaaaaaaaaaaaaaaaaaaaaaaaaaaaaaaaaaaaagggggggccctttttaaagaaccaaagtttacctacccgttattacaacttaaaagtttttttatagtgaaccaaaaataaaattaactggccaatgtttaaaaacagggaaacggaaaaaaccctggcttaacaaaattaaatccctttaaaaaaaaccccctttttgccagttgggttaaaaaaaaaaaggcccaaacctttcccctttcaaaaaatttgccaaccttaattggaaaatgaaccccccct

SEQ ID NO: 127268 - DNA, 190 bp, Zea mays
  Clone ID: MRT4577_47533C.1
gcacgttgccaccctcttgaatttcaaaacaaaccagccatggggaaaaacaaaacaaaaacaaaaggcgggagcgccttcttcactctacaaacaaacaagaacgctggaaacgcgcgcggcaggatgataatggattaccaaagaagaaggcagccgagcgagctataagctatttggcttgggcgct

SEQ ID NO: 127269 - DNA, 351 bp, Zea mays
  Clone ID: MRT4577_47535C.1
atggggccgaccgactgcaggctgtcagctgcagcgtgtctggccctttggggctggatggctctggtgccgcctccgacgctgcctcctgccgtctggttggggcatggttgcccatccaccgcacaggtgacagtcgcgccgtgcgcgggtttgccacatccatggcttcccctgcccgccggcgcgcactggggaccgtacaagacgtcgtacgccgcgacggtggcggcggcgttcttggatggtcttgtcctcactcctgttggtcgaaacgggagcgagaaccccttcgtgcatgctgaggcagccgccacccaccggtgcagaggtggtcggcgccactggtga

SEQ ID NO: 127270 - DNA, 222 bp, Zea mays
  Clone ID: MRT4577_47536C.1
attagcacaagctaggacactcaaaccacaatggctccactacatacgcgtgatggggcaacaaaaaaacacaggatggcgcccgctaatagaacttacaacggcaaaaacggcgaaactgacaccatgaccctgcgcgcaagctcgaacccctaggggactagggaacacgccaacagggaaacggacgaccggttcgggccaactgcgaggacatacacg

SEQ ID NO: 127271 - DNA, 109 bp, Zea mays
  unsure (1)..(109): unsure at all n locations
  Clone ID: MRT4577_47537C.1
ccacgcgtccggggaatgcagttccagaagagcccatggtatctcctgagttacanagtcaaacccctggtgatctacccacagagacagaaaccttacattctgatgc

SEQ ID NO: 127272 - DNA, 584 bp, Zea mays
  Clone ID: MRT4577_47538C.1
gccggccgggtccggaggagctccccgcacgaggaggggaaggaacaagatgagttccaagaaagcaacaaaccggggtttggtacttgtccttctgctcgttgttttgcctgcgctttcggtcgccacgcacgcaggagaaagagagttgccagatgaaaaggatcacaagggccattccactgttgcttctggaaaggggggaacggcttcaggagatatggtgaagacgaatgactatgggcgctacgatccaactccggcgttctccaagcctcgctccaagcttatacccaactaattacactcacacttgctgcatctacatgcttactatatggatggcatgcatagaaatatagtcctgtagagaatataatgctcactttgtttttttttgtcgcgttctagttcaaaaataaactaatcggcgataaatatttaagaacggaggtagtatctagtatctagccttgacgcctctactgaatgtacctctactgaatgtactcggcttcagttcttaagtttggtgtgttggatctcccaaaaaaaagaaaaaaaaaaaaaaaaaagggccccta

SEQ ID NO: 127273 - DNA, 544 bp, Zea mays
  Clone ID: MRT4577_47539C.1
ccggccgggccgggagggatcgaggaggggaaggaacaagatgagttccaagaaagcaacaaaccggggtttggtacttgtccttctgctcgttgttttgcctgcgctttcggtcgccacgcacgcaggagaaagagagttgccagatgaaaaggatcacaagggccattccactgttgcttctggaaaggggggaacggcttcaggagatatggtgaatacgaatgactatgggcgctacgatccgactccggcgttctctaagcctcgctccaagcttatacccaactaattacactcacacttgctgtatctacatgcttactatatggatggtatgcatatagaaatagtcatgtacagaatataatgtatatatgtaactactcacttcgttttcttttatcgcgttctagttcaaaaataaactaatcggcgacaaatattcgaagtatctagccttggcgtctctactgaatgtacctaaactgaatgtacccggcttcagttcccaaaaaaaaaaaaaaaaaaggcccctagggcc

SEQ ID NO: 127274 - DNA, 484 bp, Zea mays
  Clone ID: MRT4577_4753C.1
attacatacactacgaagttaggcccctaaaaagcatcactagcatgcttccactcatgctcgccaaccgattgtggcgagacgaacataacaatacatggcatgaccgatcagcgagcgccgaaaacgaagctcgtcgattcactgaccacacgctgcctgcaacagaccaggcatctacagtgataatctataaatgaaacctacaactgttctactataataaacaacaggggtgacatttgctttgtgaccgaggttcaacttaccacactcgtgagtgatcccgcgtattgctactcacagagggtgttgcgcaacggcacccacagtcttatctggatacatctcttgaaacgtgagcacactgatcatctttcatgtaccaccactgcactttccttggaatgaataaatgccaacagagagaacaccgtgtgaaccatctgaaccacacccactgctgcaaatgtaccatcatgtg

SEQ ID NO: 127275 - DNA, 143 bp, Zea mays
  Clone ID: MRT4577_47540C.1
ctgattttcctcagtttttctctggagcaactccactagctgcggagtttcgccctacgcacagtgctatggaggacatcagtttcgtgtgtatgcggctgttcatgttgggggacggaacaaccatagctcatcaaccgtcc

SEQ ID NO: 127276 - DNA, 958 bp, Zea mays
  Clone ID: MRT4577_47541C.1
tcgcagagcaagaggatataaataatcacctgacgcctgcctcttcctacatagggttccgactcctgccgccgacggcgtcgatgcatctacatatgagtactctcgccgcctcttttttttaacttggatcacctatttttgatttgaacattcaagcttcgtcgtgtatcaagattgtttcttttattttatgtgtggaatggttgatttttgcgataggagcggtgatgagcaatctttgtggactagagtttctgatactacgaaggtagtatttgacgaccaaacccttggctgtctgagctcccaattcacagtcttagccttttttgctgttcatatatgtactagactagtggtctttatttcctgttataatgctatggtatagtgagattttgagcaatgatgaacaactgtgttttggactagagtttctgatgctactacttcgttggtggtagttgaagaccaaacccttggctgtctgaactcatctcacaaaccatcattatgcttgttggttcttcgtagttattaaaaatatattttgttgcatgcgtccattaccaattccggaggatgattttgttccctcacggtataatggctcgggcgcaacatgctattctcttgatgtgcggtcatatccttattggttgcgttcttatgccaatccggccctggaaagctcgcatatagtattgacatgttaaatattctacattttcccccatttgtttcaggatctaaatgatgtgaaactttgaaagggaaagcgtcaaaaaagatcgattgtgatgtaccatgacagttctttcatattgaataggaagatctgatagattcttgaaacttgtttttgattctttcctctgtttagagatgtggatgatgacaacacaattaaaatacagttatccctgtctgattccttcaaaaaaaaaaaaaaaaa

SEQ ID NO: 127277 - DNA, 1380 bp, Zea mays
  Clone ID: MRT4577_47542C.1
ggccgcttttttttttttttttttaagaataatagaacccttcttcatttgtttttctgtagggaggattccttgtttcttcatccgtatacatggaacaaaatgaaaccctctagtcccatgaactgtcacgaactatgccaataattgccgcactaatagagaaatcattacccctcgagccggcagggtaaaaataaagaatatcagttgtcccccgcgtcccatgactgcatctctgctgcatgtgtgagctcaagaaccgggccaggagcgacgcgagggagggagggagcaccgtgatcctcactcagccttcccttctgaccagcggccagtagtgcatctcatcagggaaccaaaagagaagagaagataatataagatggggtgcgtgtcgtccaagatcctagcgaaatcagggagctttcaggagaaggtgagcggcctgggccacgcccacggcttccagaggagcagcgccatcgaggagatcatcctgtccacctccaagagcagcggcgaccagttcatggcgctcctccgcacatcatcccgcgccagctcgtcgtcggccgaggcgcatagccccgcgccgccgccggcagctgctgctgctgctgccaggatcgagacggtcgacgtggccgagctgctcgccggcctggaggaaggcagctgcggaacggcaggcgaggctcaggctccgccgcggccccgcgcgtcggccggtagggccaggagcttccgcacggtggaggagctggacgcgatgctgctactgacgcaacatcagcaggaggacgagaagcttgctacagccacggagggggcagaggcagcacgcgtgtcggagggcgccaagcggagggggcgcgcgcggcatcttggcgagctgcaagtgccgccggcggcggcggcgttcgacttctccaagtccgggagcctgcgggactggctgcggcagggcgggcagaccttctcgccgggctcctacgtcacgcccaggttcggaacgccggcggcggctgagcgcgggggaggcgagcagcagcagcaggaggcgctgctgttcgacccggagctggtggcgcagttggagcgcgccatggagcagctgtcggaggacaggggccgcgtcctggaccagatcctgggctgtaagtgaaggggtccacgtacgtacggcccgctagaaatgagggcgaacgggccgcgaagccgtctctctcctctcgtggagggaggaggctgttgggctgggactgaagattttgtgtgtttattagttggtcgtcgttgtatagatagattaaataaaaaataaacataacaacaagattaataataataataataataataataatattagcagtc

SEQ ID NO: 127278 - DNA, 783 bp, Zea mays
  Clone ID: MRT4577_47543C.1
attccacccctccatatcgtactcactttagtacttatataaacacaaaccccccaccaaaacccctcaacccttcatcaacacacctacaaaccaacacctaaactacaaaccacaaaccacaaaccacttttcaaaatggctgccccctctgctgttgtcgaaatcaagtccaaggctcagttcgacgagctcgtcaagaacactccctacgtcgctctccaagcccacgcctcatggtgcggtccctgcaaggccatctcccccattttcaacaagcaggccgccgagcacaagtccgacaagtacgccttcgccaagttcgacaccgacgatgtccccgatctcgcctttgagctcggcatccgctccatccccgccttcttcttcttcgagaacggcgacaaggccagcgatctgctcggcgctgttccccccaagctgactgccgccgtcaagtcctacgccgacaaggctaccggtggtgctgccgagaagcccgctgaggaaaacaccctcaagaccgatgagaacttctagatggaaagacttgggcgaaagatagaaatcactacagagcaaatggcgtcaagaacgcatattcgcaaggatacccccctataaacaaggcgcacattacgggcaccattcaccaaggcgaaaaccatcatgagctaggattgcgacagatggctatgcgaaagcgcaaggctttgaggaggatgggttgcattgcttagctagaaatacacctgatcacttcaaaaaaaaaaaaaaaaaaaa

SEQ ID NO: 127279 - DNA, 465 bp, Zea mays
  Clone ID: MRT4577_47544C.1
gccgttaaataacttttaatggttgttgggagagtcacaagggaggggactcccaaggcttttcagtgccatcctcaaagctggttagtgcagggaggtagggcaggattggttccagttttctcccaggaagggtttaaggggggtcccagccagtcccaggaatgagcccctcagcaccttggcaaccacagctgaagaggggcttttgctcccccagtccaacaaaggaaggggaggccaagctggccaacctgctactgacagcgccgcatccaaagcccaactgcacgtaggtcctcttttcctttggccaaatcctgttgcaagcacctttctgtctcatactggtgactggagccaagtgcggggtgggcctttgctgaagaggcctctggaccttggggatcgctgctgggggagaggggcaaccgcgtgggaagccctaggggagtggtctggggg

SEQ ID NO: 127280 - DNA, 341 bp, Zea mays
  Clone ID: MRT4577_47545C.1
acctactacgcgtccgcatctctctcccccgggggcgccggttgaatccacggagggaggccttgatggattgctcgattcctggggggaattgattgatttcagctgcctgtgcttgtgcttgtgctgctcaatcgaattcgagtccgaattggattaggcaggtggcttgggtcggtgcgggatccatcgagcggaggatgggcgacgaggccgaggaccactacgagctccacatggtgtgctacggcaaccacgaggacgagctgcgagatgagttgcgaagttcggcgcctccctggcgccccccagttgaccccgctcttgcagccgctggtgcc

SEQ ID NO: 127281 - DNA, 125 bp, Zea mays
  Clone ID: MRT4577_47546C.1
cccacattaatgttgcaaaggacatacctactcactatggaggggtataaaatccgcaggaggaccggtacaccatgaggcattatgttttacaagaacgatctaagtggcatacctcatagttg

SEQ ID NO: 127282 - DNA, 277 bp, Zea mays
  Clone ID: MRT4577_47547C.1
cccacgcgtccggtcaattcaacaagattcggttcagttttgtatttctttcacattgaatgattgttgttccatgcgttaggttgtccgttggaaaccaccatggccacttcaacctcgacaggacatcagtgctgaactgcgactagtactgtggccctccttcagagcattccatgaagctactgcaaggtggtggtgtttgagttggatcaggctacaaacatggctatcttcagtttggtgctattctaggcaacaaagtgagatgttgcag

SEQ ID NO: 127283 - DNA, 1965 bp, Zea mays
  Clone ID: MRT4577_47548C.1
gcgcgtatagactcctatagggcgattggtaccctcgaggccggccgggctcttgggtcatcctctacgcgagcgggccgcttctcccatccagccgcgcacggcgtcgccggaaccggagaagggagggaggaagggagcgcgagatggacaaggccaataagctcagcgccggagcgggggagaaggcgaccaagagcaggagccacgggtccacggcgctgttcgtcgcggtggactacgcgttcctgctcgccttcgccggcttcctcgcctacctcgtcgggtcgcggatcctcccctccgccgccggctccgcctagaccggcccgcgttcgtggatctctcttctttctttcacgttttttttggagccgatggctgcgggagcaccgggatcttgccgggtggttctcgtctcggaatcgatctcgatctgatgccgctcccgcgatgtaatctggcgacaatttgacgagaagagaactagcggtgtgtttcttggcaactcgcctggtaatgtgacgcatctttccttattctgttgctactagtactgcaaagaaaaaaaaaaaaaaaaaagcggccactgggaagcagacaatcctcatacccaagggcgacttccttgtcggacaactcaacttcacaggcccttgcaagggcgacgtgaccatccaggtggatggcaatctgctggcgaccacggacctaagccagtacaaggaccatggtaattggatcgagattctacgcgtggataacctggtcatcaccggcaagggaaaccttgacgggcagggcccagctgtgtggagcaagaactcctgcaccaagaagtacgactgcaagatccttcccaactcgctggtgatggacttcgtgaacaacggggaggtgtcccggggtcacgctgctcaactccaagttcttccacatgaacatgtaccggtgcaaggacatgctgatcaaggacgtgaccgtgacggcgcccggggacagccccaacacggatggcatccacatgggcgactcatccgggatcaccatcaccaacaccgtcattggcgtcggcgacgactgcatctccatcggccccgggacctccaaggtgaacatcaccggcgtgacctgcggccctggccacggcatcagcatcggaagcctagggcggtacaaggacgagaaggacgtcacggacatcaacgtcaaggattgcactcttaagaagacgatgttcggcgtccgcatcaaggcgtacgaggacgccgcctccgtgctcaccgtctccaagatccactacgagaatatcaagatggaggactcagccaaccccatcttcatcgacatgaagtactgccccaacaagttgtgtactgccaacggcgcctccaaggtcaccgtcaaggacgtcaccttcaagaacatcaccggcacctcctccaccccggaggccgttagcctgctctgcactgccaaggtcccatgcaccggcgtcaccatggatgacgtcaacgtcgagtatagcggcaccaacaacaagaccatggctatatgcacgaacgccaagggcagcaccaagggttgcctcaaggagcttgcatgcttctagaccctccgtcgactgacccatctctctagttataatttttctctcgtccttgcattgcccattacatgctatccattggtaacgcacaacagtaaaatgacagacatccgacagctatattatgttcgacggtgtaacaccctgaatttgagggtataaaattttttctctaaataccaaccaaattcaggtgttacctcttgtctctctctctctctcttttccttttgattaaaagtaagtgaattaggcgagggtttaattatttattttgtcaaaacttatgtgagtcatgaaatgttgcatcatgctgagcctaaattattcttttgtttgatgcacatgtttgaaaa

SEQ ID NO: 127284 - DNA, 263 bp, Zea mays
  Clone ID: MRT4577_47549C.1
tatattatcagaatggcagatgcggcgacagaacatcacaggcgcagacaccgctctcccacaagtaactttcaaaaagcgctcctcaaaagccaaatccaactttcgcaaacgagcagccacaccacctgcagccgcagcttcagattcggattcggatttcgtctcctcagacgacggcgaaggccgaagaattaaacgccgccgcaaagatgcagttgttacagcctcgttcgcagcgaataaggtaccccataagctag

SEQ ID NO: 127285 - DNA, 558 bp, Zea mays
  unsure (1)..(558): unsure at all n locations
  Clone ID: MRT4577_4754C.1
tgcgccccgcaggccgcacccacccacccagccggacccagcgccatgtccaccgcggccaccgcgtgcgccacgcgggcggcggcgcgtccgcccctcaacacggctcctgcacgccgcgcgccgccttctgccttgcgcccgccatctgccacccccgcccgccgcgccttcgggtgggggttctgcgccgccgcctcctcggcgtcatcnccctccacctgggattggacccgatggagccgccacttcnacnaggtctaccatgctgagagctactcatccctcctccatttccagctagaggaggctttggagaactaggatttctcggaggcgggcaaactcaatagggacatctttatagctacctgaaaactactctttatcccacttcatgtcctttctcaanaatgctttatatgaacatttattcccatactcttcatagtttacaaggtttgtttggaccctcttttttatttttctttgatgggttttttttaatgtttctttttttttttcttctttcctattttttcctaatttactcttttt

SEQ ID NO: 127286 - DNA, 2182 bp, Zea mays
  Clone ID: MRT4577_47550C.1
gtcgacccacgcgtccgatttggtggcctgcaaaaccgctgcctcgtcgtgctcatccctcctccgcctccctctatctcgctgctcgatcttgccacctgcaggggaatcggccgaaatcggtgcctgaacttgcgtcttgtcagtctgaccacgcgcatgggctgttcttgatctcaactcggcgcgcgttgtcactctccacttctcttcagttgagtccatggagctgggagctccacacgcaccgtcgtcctgcatttgttcctcgcatcctttcctcgttctgtgacggcccggtcggatcatccaagaccgaccgacccagacacacacacacacacacacacacacaccaaagaaccctcgcgcctctcccggtcggccgaccggtggttagatgcaacgggagatggtgcatgggcacggcgacggcaaccaccaccaacaccatcagctgccgaggtacgccgccgccgccgcggccaccggcgtggcgcgggcgtcgaagaagagcaagcccaagaagatcccgcagcgcggcctcggcgtggcgcagctcgagaagctccggatcgaggagcagaagatggagggatccatgccggtgtgcaggccttcgaaccgcagcgtcggcgtcggcggggtcttttatctccacccgatgcaccccccgccacaggcgccgctcccgcttctgccgaggcccggcgcggagtgcgccgtgcactgcggatacccttcggtgctctggggtcttccgatggatacggcgtcggtggcggtggaccccatgaagcactggaactacaagaggtgcctgtgtacgctccctccgcttccaacggtgagcgtgggcctgtcgctgacggcggcgtcgtcgagccacccaacggagcccccttcaaaccaaatgtacagcagcggcggcggcggcggcgcggagactgcggcggcggaggacgacgacgacagggtacacgctgtcgttgaggaggcggccggcgtggacagaccctggcccttggtgttcgagggcttgaacacggccgccttccggacgacggcggcggggaaggcgcctctcgcagtcgccgccaggacgacgagagaggccgccgccgccgccggcttgcctgacgcctgtgccgccgccgacctgaccagatacgagttcagcagagccaccacaaactattacaggttaaatttgcagagagctcactctcatgtttgtggttttcccccagtgtgggttttgttgagtgtgtgcttttcatctgagctcgaatttctgcataaggactagcccggcctccgcctgcagcttgagcgcgagttatccagactggtcatcgtcggagttggggcactgcaagagcagcaaggagaaggagcctgcccctgcctacctcaccttgagcgcgcagcctcctgcgccacgcgggaagcagcagcctcctgcgctcccctcgatcaaactcccggagttgggtcacttcggcttcatgcagcctcctcagcacgggagcgcttcggcgtcgtcgtccgcgtcggcgtcgcggccgttctacagcttcatgccggctggtccggttcgcatcgagagaccccggatcgggatcaaggccgacgacgcctctgacggcgtcgacctggaactgaagctgtgaaggcgctcatcgctggacccctctgttcctagctggtaaatttgacgccgaacctgaagcgggaactgggaacagagctcgtcgtcgtcgagaagaaaagtttctggcgccgtgttctcggtttgtaacctgaaacacgatgtatcggtatttgcgttctttttttttttctcctcaacattttcccgctcccaataaacatctggtgcgcatggagatggagtgtgtgcagcgtcgagcaggtcttcagtgaggaaaggagagcacgtgcacgatcggggttgcaagcttgcagttgcagctggcctctgtggggggtcttttctgtacagatctagcaaggcagcgtcgtggcacacccagatacgcaccagacagtcaggtagatgtctgccaagatatgcaaatatggttgtagatgttctggttaaaaaaaaaaaaaaaaaagcgggtggatgtagtgctacgtgcaatggaatcaccacatttcccattttatttgacgcttt

SEQ ID NO: 127287 - DNA, 323 bp, Zea mays
  Clone ID: MRT4577_47551C.1
tccggattcccgggtcagaacaactgcattgcacagcaagatcatgctggcgcttcttcccaaagctaatgccaagtgaagggtagggctatcatcatccccaataatggcttacgtacctaaataaacgaccttgcatgcatgcaccaactgtgagagttaattgtgcaataattaacggccggcatgtctgtacgactacgcgtcttggttgcaataataaacctctagttttgtacgtgtaatattaaaccactttccacgcaccttacacgtaaattcatgtcagactggatttctcctattactgagtactgccacta

SEQ ID NO: 127288 - DNA, 434 bp, Zea mays
  Clone ID: MRT4577_47552C.1
aaatgaactattgcgacatcttttcaattattggggcgtaaaaaagctcggatatcattcccagattcagattttctgatctagaatactcctattacataatactatattttgctaacttgctcctctgaatgtacgtactcaaatttcatcagcatatggatggcaggatgggtgcatcattcttcagtttgtaagcatatatgcatctgaatgtgtaaacttcataagggtttctttttttaatctcaatccaaatggattggaaggaattgagtgggtttaaatcaggcaaaatctctcctaatctctctcaatctcctccaatccagctctttataatataccaacacagcggtctgtacgatcaatctgcgatacaagattacaacatcgtggcagtatggctgctttctgttggttgaccccatgag

SEQ ID NO: 127289 - DNA, 487 bp, Zea mays
  Clone ID: MRT4577_47553C.1
cagacgcgtgggctgacgcgtgggtctggcttctatgggctaccggcttatgcatctatcgcaaatgagccatatgaatcctagctgtatgcggagaggacgcctagacgcctggatgccggcagaagttccctgatgaagctaccaggcgcgaagcagacccttactaccatcggtatacgcgcacagagcctctcacgaccttgccgtgcgcatggaatccatcatgctacaactggagcgtgtagacattgaccttgtgatcatcgctcatgatgctggtcttctggaactctacaggtacctgatggcatgtaatgcggccgacatacccaagctacccttttctcgcgatgagatcattgagagcataccctaacactacgacaacgagacaaaactcatcaagactgctgatttaccctaatcgatggttactggaagccccgaagatatcaagatccccgttctcacaagtggcactgta

SEQ ID NO: 127290 - DNA, 477 bp, Zea mays
  Clone ID: MRT4577_47554C.1
attttgcatagcaccatccaggtcctgtccgaagatagatatcttgttggtagtatgggtgttcgaggacgggatcgtgcgcgctgccagacagataccgcgacatgtgggcgctccccatcggcgtccaggacgaacacggatgttatgcgcacgttcccactacagaggtggcgacgttaaaggacactatcgagcggaagttactgaaggtacggtgggagagctacgttttcaaagacgggatgctacagaatcacgcagttggtccactggagcacctgatcaaaggacgggatgacggtttcctgcgaatgctcgttcacatgaaccacgtgttgaagatgacatgaaacgtttgctatgggcctgacggctcgcctgctagtatgtctgggggagcacccatgatgttggtgacggcgcatgaccttggtgctggataaccagaccagctatttgtggagctctatattc

SEQ ID NO: 127291 - DNA, 563 bp, Zea mays
  Clone ID: MRT4577_47555C.1
aaccccttcatattgacaaggcacttgaggtggtaaggtaacacgacaccatacacatctcaagggaaaaggaaaacaagaaaagagactgccttcctaaactatccagcttgtcaccatttctaggtactcagccaatcctcctctcaaagagatagtccatgccttgttatacacctaacatattgtacccaccacaattacgcgccagcagcagcaacgtaaaggcacactaccagtggtattctgagcagagtgaggggagcaggaacgaacatgactgccacaaaagtaagctcttccacagttccagcagcctgcatgctgccccccccccctccacaagcaatggaaccagcgggtgccttcctgctggttccttccctctcactgcttttggcaacacatcagcaacgccttgagccctgaagacaccttacagcctgcacagggaaaagactctctccaggaatatgttcaccaaaacccaacgcgtcaatattttctagttgcatggcaaattcaattagctttccaccattcatagactcgttatcattttc

SEQ ID NO: 127292 - DNA, 575 bp, Zea mays
  unsure (1)..(575): unsure at all n locations
  Clone ID: MRT4577_47556C.1
aatctgctatttcggtntgaaccaattgtgtgtgtgcacttcggtgtattagtcaaaactgatacgtttctgtgcaaactgtgttggtactgatacttaggtactacattacgtttacgtgtccgaaatttagagtacagttctgtgcatttaacgatcttgggtaatagaaagaaaactgttcttttatgtcagtaggtctgtggttcttcttgggtgcagcacggaattcactacggcctgaatgtgtgtcgtttcaaaatacagagctgtagactcaccgagttttctaacccattttgtattctagctagtgtctaatgttttttctggttgcaatgcttctttgtagaatgcttaagcagttgcgctaaggcgctagtgtctatttcactgtaagacagtcaatattgggccacatgactgcaaattagatatggattatgagtcttctggataaggcagctcaactaggctgcctttttttaaaaaaaaaaaaaaaaaaaaaaaaaaaaaaaaaaaaaaaaaaaaaaaaaaaaaaaaaaaaaaaaaaaaaaaaaaaaaggggcggccgt

SEQ ID NO: 127293 - DNA, 393 bp, Zea mays
  Clone ID: MRT4577_47557C.1
ggggataaccatgcctcactgtaccccgctacccaaaccccacaaagtcctcaaaccgggagaagagaactcgaacagacatccgctcccgagtcccgagtaccgacttcttggctctcgcagtcttgctcactcctgccgccaccaactggatcacgtcgccggcgccaatgtcggcgcacctcaccgtcgcgctgttgctcgcagtagccgccgcgtcggcccgcggctccgacgtgccgtcgttcccgctctcccaggcgcagtccccgtccaactcctcgtccccgtcgaacgcctcctcgccgccgtgtcacctcgacctctccgccgagctcttcggtggcgtggcagcggcgtgcggcgccagcggggggccgggctcgctcgacc

SEQ ID NO: 127294 - DNA, 1503 bp, Zea mays
  unsure (1)..(1503): unsure at all n locations
  Clone ID: MRT4577_47558C.1
ccggccggggaaacccgtctcgcacacaagcgagcgagggacccggggcggaagaagagagagaagacgtctctctcctctcggcgtccccgttccccaacctctcgtctgctgcctgcctgcctgcctgcctgcaaaaaggagtttgtcatggcgtctaagcgcatcctcaaggagctgaaggacctgcagaaggacccccccacataatgcagtgcaggtcctgctggtgaggacatgttttattggcaagcaacaattatgggaccacctgacagtccccggccgggaccttcccttcctattccctctctctctctctctctctctctctctctctctctctctctctctcccgcccgctccgcggcctcctcctctacccgccccacaaaccaaggccgcggcccctcgcgacgcggccgacgacgaagacaacgttgtcagcctcaaggtcagcctgctcggcgactgccagattggcaagaccagcttcatggttaagtatgtgggagatgacggggaggagcagaacggcttgcagatgacgggcctgaatctcatggacaagacgatgcccgtcaggggagcaaggattgcctacagcatctgggatgtggcaggagaccaccagtccgtcgaccacgtcccaatcgcgtgcaaggacgccgtggcgatcctgtacatgttcgatctcacgagccgctgcacgcttaataacattgtagattggtacgggagggcgaggaaatggaataagacggctattccaatcctaatcgggacaaagcggcatggctttgctcagcttcctcttgagatgcaatgggccatcgttaaccaggccagagcatacgcaagagcgatgaaggcgaccctcttcttctcgagcgcgacgcacaacatcaacgtgaacaagatcttcaagttcatcacggccaagctcttcaacctcccgtggacggtggagcgcaacctcaccatcggcgagcccatcatagacttctgacgaccccttcctctaactagtaactcggcagcacacgcacgacgacccttggtatatatcatgggttgacagggtcgtgtctttcgatcctcttgccctgtgcgagccgccggagccatgaagtgaccgagcatgcccgtcgtcctcttcctcctggtggccggctgcagcaggcaagatgccctttgtaaatatagccataggtgacggtcccgcgtgcgtgcggccgtgcgggagcgtcgtcaaatgggaagaaaaccgcgaggtgtgactgtgatgtaacaccccgtctgtaacattcgccagagtatataggaaatccatgttaatataccctccattccaactgacaaaggcatgcgctggcgcgtggcggcttgctgccggtgcagaacctcttctttctcctcacccgggcctatttggttcagcttttttctgaccagtttttctgagaatctagctgtggaaagaatctggctgtgagaganaaa

SEQ ID NO: 127295 - DNA, 319 bp, Zea mays
  Clone ID: MRT4577_47559C.1
ttttgagatcaaagaacactgttaaatgacacgggctgggtaaaacatcgtatgaaacctatgacactaaaaagatcccgacaagccaggaccatctacataccaccgtgcctcaatttctcataatcattaataaggaggggctaccgatacaacacaaacggggcatgataaagtacttatacgctcggacataatccgactctacaacatgtgacagcactgaacattcttaagcccaggtgctaacctcaagcctacttcctcagcctaaagcttatacattctcttgaacaccctcttactgggggggaaccta

SEQ ID NO: 127296 - DNA, 193 bp, Zea mays
  unsure (1)..(193): unsure at all n locations
  Clone ID: MRT4577_4755C.1
attgggtacctcgaggccggccggggcgcatcaatcaaccctaaaccctgctctcgcgccgccgcccgcccgcccgctatgtcgctgccacancccggtgccccgagagacggtggggccagcgcnncgtcgcctttccctcacgatnggtggatgnaaggaaagcgcaccagcgnncagaacggcgcccaaa

SEQ ID NO: 127297 - DNA, 292 bp, Zea mays
  Clone ID: MRT4577_47560C.1
aagggataaaaaggtcccacatttggggttaaacaacttacatattttttccggtaaaggatcggccctcacccggcattttaggggccgcggccggaatactaccctggtggggatccccagccttttccgaaaaagcgcagtttcacgggtttttaacgagggggggaacatcctccttgggcccatgggggggccgatccatgtttaagagggcccccctttcattcctttgggtcccaaaagaggggccatttataaaccccaccaccatcggggggagacccggggc

SEQ ID NO: 127298 - DNA, 1171 bp, Zea mays
  Clone ID: MRT4577_47561C.1
actcctatgggcgattgggttcctcgaggccggccgggtgctgtcttgggtgtgcggcacgagcgggggggcccgaccgccccgccggcgacgggcctgaataccatggacaagatcatggccgacagggcagctcggcgaggccgcggcccctgccattggtatggagcccaggatgacgccgcccggtcactgccagcttggcaagaccgccttcatggttaagctattggggagatgacggggaggagcagaacggcttgcagatgacgggcctgaatctcatggacaagacgatgcccgtcaggggagcaaggattgcctacagcatctgggatgtggcaggagaccaccagtccgtcgaccacatcccaatcgcgtgcaaggacgccgtggcgatcctgtacatgttcgatctcacgagccgctgcacgcttaataacattgtagattggtacgggaggtcgaggaaatggaataagacggctattccaatcctaatcgggacaaagtttgatgactttgctcagcttcctcttgagatgcaatgggccatcgttaaccaggccagagcatacgcaagagcgatgaaggcgaccctcttcttctcgagcgcgacgcacaacatcaacgtgaacaagatcttcaagttcatcacggccaagctcttcaacctcccgtggacggtggagcgcaacctcaccatcggcgagcccatcatagacttctgacgaccccctcctctagctagtaactcggcagcacacgcacgacgacccttgataggtatcatgggttggaacagggtcgtcccctcctcttgccctgtgcgagtcggcggaggcatgaagttgttaagaccgagcatgcccgtcgtcctcttcctcctggattgccgacagcagcagttttcctgcaggatgtcctctgtacatataaaataggtgacgtttccgcgtcgagggagcatcgtcaaaatggcaagaccgcgaggggtgactgtagtagtgtaacacccgtccgtaacattcgccagactgtatacgaatccatgttaattagggctagtttggcagccacatttttaaaagggatttccattttccttttcccttggaaaaatgtttgtcaaactaatccttaatataccctccgtttccgtagaggaaaa

SEQ ID NO: 127299 - DNA, 492 bp, Zea mays
  Clone ID: MRT4577_47562C.1
ctcggccgggaccgctgctgcttccggaggccgccagcgccattgtcgatggactcctcttccactccgcctgatcccatccgtctaggccacacgcggtatggctaccttagcatgccgtatgggcagtggcggacgccgggcactcgccctggcccatggcttgcacacctgctggacacaaggagtgcctcaagtgtgttgttgtcaggtagaagggcaggtgcaagaatgactacctggatgttcatgctgtcactgcttctagactgtgtactatattgcccgcttgggatgtctatgcgatgcacaacagcattgtcagttatgccttgctgcctggctacaccaatggaaaggctgtggtgcgctgcttcactgacatttacaccttggacactgaccctgaggcaaaaactgatgaattattcaatgtttgatatggaaggattgctgtcagaactggcaatatgcgagctccaggagtagatg

SEQ ID NO: 127300 - DNA, 300 bp, Zea mays
  unsure (1)..(300): unsure at all n locations
  Clone ID: MRT4577_47563C.1
ggccgcccttagttttttttttgttttttttgtttttttgggagtttgtatggtggtgggagttttttttttttagttcccccctaagggtccccaaaagggggcttatttctagagccaaacgttaccgtttcgttgtattgggggagtttaacccggtgccttttcatccgggaccatatagagccccccgagacagcccctaagtttttttcccatccaagggggggggtgggggtgcctnaaactaaggggggtagctttcttgaaaacctgggggggaaaggcccctccctgccc

SEQ ID NO: 127301 - DNA, 614 bp, Zea mays
  Clone ID: MRT4577_47564C.1
attcatgcttatcatcgagatttactgcgatcattctgggtgttttgaacacactcctgccgtgcccgcgagactctgtactgttcgaatctgaagtcatgacaagtcctcatactgacttgtcacagccgttctcgacgagctaacggacctgctgactccctctcccaccatctcctagctgacgacgttgtgccccacatatgtgctaccgtcatgagactgctatgacgccctcatgattgactctaccttgctgctgcatttttattgaccaccttctttccatcgtattaccccttggtgccatcaaatgatgcatttccgccaacccacttaccactagaatagtaagcctatcgatcgcatctgttatgacactctggagctcctgttcaaccctggcactgactcttgctatcgatctcctctctacttagttgccttctgactgaccatgccctggaccctcacatgagctcagagatgcgctcacttacaccacactgagcgcgagacagccatacacgtgctaggagctgggctcggatatatacaatgttgctgactctgtattcgacactcgctcttatagattacatacagacgtctgt

SEQ ID NO: 127302 - DNA, 674 bp, Zea mays
  Clone ID: MRT4577_47565C.1
cttggcaaagcaaagggccaaccccctcgttctttttaaatctttgctacaaattttacggggaaccggggtttcaacactggtcgaaacaacccccacaaaatcgcattggtttccaaatctagggaaatacagattttccaacacgagcagatcctgggaactaaagagtaaaaaccccggtttctttttgccggggtttttgccccccttggggcaggcccctcccggggcctgggccgccttcctgggagccttttcctggagggccttggggcccccctccccccgttgttccggggggagcccgtcgtcgccccccttggccgggggccgccgggcctgggccctttggggggcgggttccctttgggcgccgggggcagcccaccccagggcaagggcgaaacggaacccttttccgaaacacgccggtccaacagaaaacataaaaaacaacggggccaccctgacataaaaaagcaacgaactggaaaacccgcccttacaagaatcggtggaacacccggaacagaaaaaaaaacaagggggggccaaggatatgagcccttgggacaacttctgaacttcgtagggaaaaaagactggggccccgaaaggaacccccgggaagccggggaaaacgggagggcgaccctgggccgaattcctgg

SEQ ID NO: 127303 - DNA, 332 bp, Zea mays
  Clone ID: MRT4577_47566C.1
ccaacaagtatctcaggagcgccagcccatcgagcacggcgcggaccgtccacgtgacgacaaggactacaaggagcccccgccggagacgctcttcgagcccggggagctcaaggccgggtccttctaccgcgccgggatcaccgagttcgtcgacaccttcctcttcctctacatctccatcctcaccgccatggccgtctccaaggccacctccaagtgcagcaccggcggcatccagcgcatcgcctggtccttcgaggccatgatcttctccctcgcctactgcaccgacggaatctccggcgcgcacatcagcccggccggtgacc

SEQ ID NO: 127304 - DNA, 553 bp, Zea mays
  Clone ID: MRT4577_47567C.1
aatgacatgcttgatattgatagaggggcctactgtagctacggggggcattttgcccatacctccttgatactctcctcgaccctaagtgtgggttgccttcaaggtgagtctttgatactgctcatgtgctccccgcttaggcccttgcctgcttgacaggtgggcgtcagactccgtccatagtgagattttctctatggccttcgctgcctacatggagaggtaactagtgggtggcggactccgcccatagcgaggtcttcgctatggccttcgttgtatatgttagagaggtggtggtcgtaggcatcgacccacattgaagagcttagctctgtgaggggcgaagtctcttccgacggtcttcgtggccttcggcaaatccttcgttcatgggatcccttagcaaggtcgatgctaaggcctcagcaacattcgatggaaggatggtggtcgcaggcatcgtctcatgtcgaaggttcttactcgaaacgaagtctctttagcattccttatggccttcgatgaaccctgcatgcatgggagagaa

SEQ ID NO: 127305 - DNA, 449 bp, Zea mays
  Clone ID: MRT4577_47568C.1
ggctttcccatctctacaaacagctatttcagcaggagccaactctctcctttgtacacagagactatgctagtatttttcttgtaaaatttctccaagttattcatttattggctcaactaatttatcttaccccctcactctgtctttttagctggtcaagacgtctttggaaatttcctgaagtctgagttcagtgaggagaatattgagttctggctggcttgtgaagactataaaaaaacaaagtctgatcttttgcattgcaaagcggagaaaatctataaggcatttgtgcagtcagatgctgccaaacaagtgagtttattaccatcagcttatatgtaaaggaatttagatataggataacattcaacatagttgcaagatgaaatcctttctgagcatcatgattttcactggtggataatctaagtggatttctatag

SEQ ID NO: 127306 - DNA, 343 bp, Zea mays
  unsure (1)..(343): unsure at all n locations
  Clone ID: MRT4577_47569C.1
ggtcgnntcatccctttcttctagnnctcgttttattattccatnnggcggaggagaaagcacnctaccaccacctacctgttcctaccatnaagaaaggnacgaggnnagcaggaggnnagctagctcgcctgnngcggcggggtaccgggcgagggtcctgccgnnagtacaccggnagnngcctacggtgacggnagggtgnngtgtccactgggctgagaaactgagtacctgacgagtaccaaggnnaggagaaaagctagctataagcccactaagctagcactctttcggcgaagggccgnnngcgcctatcgcccccgccggcgcccttttcgca

SEQ ID NO: 127307 - DNA, 513 bp, Zea mays
  Clone ID: MRT4577_4756C.1
ttccggagaaaaaaagtttgagtgcaatctaactctatcgtgtgcactaccttcacgccaacgcagctcaaaatcccatctctccaaatccctagctgcatctccgacggtgtttgtgtcgaggcggtcgaagaccttggcgcgcgtcggccggagatctggcgagcggtggtcgaatgcctatgcgtgcaacggccagagacttgtgcgttcgggcggtggctacgcgcacaggctgggacctttgtctggcggcgtttgggtggcttgcttgcttcgccctgtgactagcaccaagctccttcacatcgacgccgaattagcacctcctccacgccaatagcgagtgcccctatagcccttgacatttgctgcatattatatgttctattgggattgcacaacatgttagctttaatatgtaggatatttccaataagaattgttgtgaatttgtaggtctgaactcaatgatttgcaagttgttattaaagttggctcttattttgcttt

SEQ ID NO: 127308 - DNA, 127 bp, Zea mays
  Clone ID: MRT4577_47570C.1
cttctggggaaaaccaaaaaggatcaggggggaagcccacgggttaaaacacaccaccagcaataatcctgggtggtctggacgcagcgcgattcttcttggctcgggggccaacaaggcgggctct

SEQ ID NO: 127309 - DNA, 538 bp, Zea mays
  Clone ID: MRT4577_47571C.1
aaaggaaaaaggggcccatcactaaaacttgtaaaaaacccccccaaaaaaaggatgggggggggggaaaattttttttttgaaaactggagccaggccccaacaaaagccttaaaacaaaaaaaagggccctttcggaaacttgcccaattgtttttttatttaaaaacttttgtttttgttctaaaccccttttacggaaaaaataaccaaaatttttgttaccccccccttccaacccatagggggggggttttggggaaaaagggttttatttttttcctgcccccccaaaaaaacgggcaaccctaactaaaacaggggttgccccaccccatggccccagcccttaaaccccccaaaaggggggggctcccttccccttgttttggccaataaacctaaccgccttttgggttcccacaattggggcccatttttcgggctccataaaaaccttcgcccatttttgaatggggctgggcccctgaaatttaaaaagaaacttggccagggcttaaaccctgttttacccttg

SEQ ID NO: 127310 - DNA, 391 bp, Zea mays
  Clone ID: MRT4577_47572C.1
atctcgtcttgcggtgaccttagcggagagaagcacaaagccccatcccaatcctagtcgatcttcttcccctcctcaaggaacaaaagaagctgaaccatggggaagaggaagccagatgctaagccacctcctaagaagcggatggccaagcttgacgctgccttttcctgcccattctgcagccacgggagtagtgatgagtgaagaattgacatgaagaatctgattggcgaatcatcttgtagatcctgctcagagaacttcagtcacgacgtgttagtgcactcactgagcctattgatatatatagagagaccattgatgagcgcgagcgtgtcagcactgatgaaggcgacgatgatgcgggagctagccccatgcgacgaga

SEQ ID NO: 127311 - DNA, 442 bp, Zea mays
  Clone ID: MRT4577_47573C.1
cccacgcgtccggatagattacttatacctttaaccttcagaatacaatcataggagcactggaaaattatcggaggacatgatatcatcacatgacatgaaacgactagaggcgtattcaaacaattcaaaccgattatccatgtgatgctggatctagtacccatgcttgcacatcagtattttttacacaggcttccaatgtgattacatggtgcatatacagttcgtatgttctgtctaagcctgcacgacaacgacataggcactgcgaatggagatctcgctatagaaagggcacatggtctatcaaacttcatacagacaatgaagaaactgcatggttaccttcataacattggaaggaaaaaaatcggaacaaccttacctcgactgaaatacattgaaatgccctcttttagcaaatcgatggatgaggacc

SEQ ID NO: 127312 - DNA, 399 bp, Zea mays
  Clone ID: MRT4577_47574C.1
attcggctcgagcctttttggttttgtttttttttttgttttttttttttttttttttgttttttttttacggggcgaacagggaaaattatgccctgatttagcaaaccacgttggttctacccaccccttgatttattttttcgcccaataatcaactaaaaacccacaattgttgtcaaacttcaagccctgcccacacgggatcctcctaaaattacccgacagcggcatgattattaacttatggaggcccccctcctcttgggggtcaccacatggcgcatcatcgagtagctctggggtccaccacccggggcgttactgggacgaaccttagccatccaccccccacttttaaacgggttcaacccacttattaggcgggacacggagccc

SEQ ID NO: 127313 - DNA, 352 bp, Zea mays
  Clone ID: MRT4577_47575C.1
agaacaggactgtagcggggggggatataaaaggattgccaaagttcgcataaagagagagagagcccgcgcctacaagacgaacagtcctggctacataacctccgcgaccaccttcaaaaaacccaaacggcaaaaccggggaaatttttttaggggcaaacacaggggcattttaccgggcggtaactcggttccaaatacccttcttccgaggcttaatggactggggcttcatcttccaaagaccaaaaaggctaaagcttttttttactttgaattcttttggaaacctgggtcatttggtaattttttttaacttgggccttgcaacccccctttaaggggggac

SEQ ID NO: 127314 - DNA, 213 bp, Zea mays
  Clone ID: MRT4577_47576C.1
accattccgcaccaacagatgatgggctccatgcgggcgatcttgtaaacatgacacgctgcatcagacggcgttgataatatcaatgtcacctacagccacaaccgactgactgcaccaaactcaatcatcatcagagctgtctttgttcacactgatcctgatgatctcgtaaaggttgcacacgagctcagtacgagcactggaaactcc

SEQ ID NO: 127315 - DNA, 210 bp, Zea mays
  Clone ID: MRT4577_47577C.1
ccccgggaggcccggcccagaatccccgggcctacccacgcccgcgatataccacttcgtccaccaaggaacctccggggtctttttaagatgcaactgggttggctcccgcagcaacaaaaccaagatatctcatcactcctccatcagacccatctccgagttcattttgcaatggaatttctccatgcaaatactcaagagtctact

SEQ ID NO: 127316 - DNA, 311 bp, Zea mays
  Clone ID: MRT4577_47578C.1
ggtcttcagaccattagctttatctactccagagcgcagaagaacccgatcgacaccatgagggtgttgctcgttgccctccctctcctgggtctcggtgcgagcgccacctccacgcatacaagcggcgggtgccgctgacaaccaccggcgaccgttcatctaccggccgcggagcatctgccacctcccgttcacctgccacctccggtgcatttcccacccgcggtgcacctgccctcgacgggccacctgccaccgccgagccatgtgtcgtcgccagatcatgtgccggcggcctcatggcacta

SEQ ID NO: 127317 - DNA, 129 bp, Zea mays
  Clone ID: MRT4577_47579C.1
attgacatattaaataaacttgcttgctcgcttgggtagggagaaccttccttagattatgaggaccaccaattaagactatgctggagggtaagcggaaaataaaaccatgttgggcttttgttatgt

SEQ ID NO: 127318 - DNA, 280 bp, Zea mays
  Clone ID: MRT4577_4757C.1
gggcctcaccaagaagacccgcggcacccaaggggaaacccctcccaggacccgccggcccttgggggggggctggggccccccacacccaaagaaaccggggcccaccccggggcccggaaaccgggtcacgcctgaaggccctaccccggaaaaggaaaaaccaggggtaaccccacatacataccaggggagggcccacaagcctaccttttaggaaaaaactatagggaccggaaacaggggttccaagaaacaaatggggccgtttcccgacccc

SEQ ID NO: 127319 - DNA, 867 bp, Zea mays
  Clone ID: MRT4577_47580C.1
cattgggtacctcgaggccggccgggatagagtttagggctgaaagagaactccttgccatccctcctcccctgtccctgcactctcgttccactgtgaactttattcttaaatcaatcgatcaatcacgcgcacaagaaccgtgaataaatcgcggaattcccaacgccgcaccttcaccgccgtgttccccagtccaatccaacccaaccccagtccggagacggctccgggcagcgcgcgatcggatcgacgcgggttcggcttctcatcgaacggcgcgaattcctgcccccgatcggaggagcgtcggctgcgacgcctcggcgtctgatctgatgcgggcgacttcttcttgggagaggagtgtgatgtacgatcacgatcgcgggatggggtggccggggcgggcaggggcagggtcggatcgggccgcgcggggccgtcaccgtgccaggatctggcgacgcgggacgactgcgcggcgagaactgggtgcaggtggtgccgcagcgaggcgctcgacgacatgtgcttcgggcctaccgaggcgaggcgcctcccacggcaggtcttctcctgcgatccaccctccgacgcggcgcacgccagcttcaacaagtgacgcccgcagccgcgctcgccttgttcccggactgctccgtctgacctttactttcgccaggcaccaattgttgctccttttgtcattgctggatctgagatttatttattagagaatagcttggtccgttttgctacgtgattctttcgtgggtttatataatataatgtaaaatctgctcaaaattcaatcagagcattgcaaatattgtatttaaaaaaaaatctacgtcgttttcgtta

SEQ ID NO: 127320 - DNA, 384 bp, Zea mays
  unsure (1)..(384): unsure at all n locations
  Clone ID: MRT4577_47581C.1
ttattatattttccccccnnnnnnnnnnnnnggggnnggtttangtttccccaaagggaaaacattaacctaaaaacttgggggggattccaagggcccactttgggggaggacccaggggaaaacgagggaagggggaaacaccttggaagccgaatatagtaaagggccataaagcaaattctttttcttatgccttgggcaaaaagaattcagcctctcaagaccatcaagaagagaagatgaatcaagggcgaaggggaaccggacccagttttccattcccaaaacactcccgggacacaaaaaaacggacttttttttggccagctggcaacaaaaaacaatatcatcaggggggccccccaaaagaaacaaattaag

SEQ ID NO: 127321 - DNA, 340 bp, Zea mays
  Clone ID: MRT4577_47582C.1
ctccccccaaaccccaaaaaatgggtggggggtttttttttttcaacgaaaaatgggagataacttaattttttgaccatgggctgttgttaaaaaaacttctttggccatgatcatgatcaagtaaattggggccggaattgattaatgcccccccccagggaagcttttttgttttttcttctttgggggataaacccttcctggccacctgttcttttaattaaaacctaaaaaaaatttcccccggtttctggggggggaaagggcccttctttttggtttaaaaacattaatgttttttccttcggccaaaaacataccatttttgtcctccccc

SEQ ID NO: 127322 - DNA, 485 bp, Zea mays
  unsure (1)..(485): unsure at all n locations
  Clone ID: MRT4577_47583C.1
tatcgcattgatcgtcttcctcgcacgggagtcggtccgtcttaagctgggtatattactggaggtgggacggcacaggcaccgaggctgagtatccggctaggactaataacccttctaggagtggcgtgcgccgtccggctttatctcatattgctggcggcctcgagtgcgccacatacgaccctggtatggagcctgcgtgtgaaactgcaaggagtaggccggatgcnatgatagatcagagtagaagatagagtatgatccgaataaatccagtaggtccgacaaagtacaaaggaggtcgagtagagggagcatagaagaagagaataagattctgaactagctgatatctggagtgcatactgatggtgtggaatgccgatgcgctcatatgaatcactcctcgcgcctcccctacgtctagctgcagatgataacgtgccatatgaatatattccgtcgaaggataatctttggcc

SEQ ID NO: 127323 - DNA, 1401 bp, Zea mays
  Clone ID: MRT4577_47584C.1
gaggagctcacgagcatgaaacgaatgagggttgaattggaaaaactacgcctgttgtgtgagaggataattaagagagagaaggtgaagagagagacggttttgtgtgatcatgaaatacttgccaaaactaaggacacagttattttctcctaccttgcatgcggagcaagctcagaatctgcaactacttcagttaataacaggtcgtacagtggagcagcacaaagatctgatgatgtcacagtagatagtactatttctgggaagaaaaccataaggttttctctgaataacagaggtgctgatagaaacacagctgacagctcgaggacattgctatcattcaaacgcaagttgagtgagaggggaccacgagctggtaagcaacttccgcagaggccaactattgctgcagagaaattagaagatgaagacaagaagacaactgataagaagataactatgcaacagagagaaatgtttcaaaaggagctcattatgacatctgatcaagcttctacacagaacctacgccttcctaaaggatatgcttatgttcctcgggactctttatctaaagagaagctatggaaacaaaatacacagccccataatccacaggagcctggtggataggatcagttgaaatcaagccggttcatttctatcgaggaaggccataaaaaacttgtgcaagcttgttctttgcaactgaaaactacaagcggcaagcagggcaggccagcgctattgccacaagggtaacagcgaatccgtgttcttttttggaccgaagttgcataatggtgcagacggtgctatttgtgtgaacgtatggtgtggcaccataacaagaaggctgcctcccacccacccacacaccaggtaccttgaatatgaccagcaatatgggtgaattgacctacctgtgctataccaaagagagcgtgccaactgtatatatgagtttaatttgtgcgcagattttgtaaatttgccctgtacattcttttcctttgcatatgctagtttagttgtgcaggaaaaagggaattatgaatccttttaggttggataagaaaaggaattagcttggttctttatcatggttcagaagaaaatgcggtggtgcttgcggacaacattgggcaggagtgttggtttgatacatgtactctgtagggatggtgaaggtgccaaaaataaggtcatgccactgctttaacgcaactatttgttgttggttactgggaagtggtatcgtacaggctgagaaacaatgttttactgttttagataattgtcgccggtggctttccatgtccccttatgttattgggaaacactagtccctttagggctcgtttgatggacaaaaaaaaaaaaaaaaaagcggcc

SEQ ID NO: 127324 - DNA, 311 bp, Zea mays
  unsure (1)..(311): unsure at all n locations
  Clone ID: MRT4577_47585C.1
ctcnctcaactctcctctgtcagccaactgaccaagcatcgtgccggaggggctacagtcacagatgggccaaggcgtaaggctaaggaagagaagcgtaaagacgtttggaccggcttgggttaatgggctgagtgagtgcgcgtgagagcgatatgtacactgttgtctgctggggagggtagcgaataatcagaactcatcttcatctccaagacattgtgctctctgcttcctgccttcttcctccttactctgaatctactctgagtattgtatccagtatatgcgagagtgtaacaagtggtatc

SEQ ID NO: 127325 - DNA, 800 bp, Zea mays
  Clone ID: MRT4577_47586C.1
actgcataatcggattcttctccgcctccaatccctacgctccacaatgccgagcctcgccgccgccgccgccgctcgccgcgccggggaggccctccgccgcggcgtcatgggcggtaggtatctctcttccctccgcccgtcacccgctactgctgccgcccccgacagcgacgaggtgctggtggaaggcaaggccagtgcccgcgcctccgtgctcaaccgccccggccatctcaacgccctcactaccactatgggagctaggctcaacaagttctatgaatcatgggaggacagccccgacattggtttcgtcatgatgaagggcagcggccgagcattctgtgctggtggggatgttgttggattgcgccaacttatcaatgaaggcaagctggacgagtctaaagattttttcaggactttgtacagtttcatctatgttctaggcacatacttaaaaccacatgttgccattcttgacggtgttactatgggtggtggaggaggcgtttccattccaggaacatttcgtgttgccactgatagaacagtgtttgccactccagaagtacatattggctttcatccagatgctgctgcctcattttatttgtcacacctaactggtcatgttggggaatacctggccttgactggtgaaaaactcaatggagttgatatgcttgcacttggccttgccacacactattcaattagtgagcacctggatctggttgatgaacgacttgcaaaattggttactgatgatccttcagttattgattcttcccttg

SEQ ID NO: 127326 - DNA, 370 bp, Zea mays
  unsure (1)..(370): unsure at all n locations
  Clone ID: MRT4577_47587C.1
ggtcagtccccgaggaggaggaacagctaggtgtggacaggcagctctagtctacactctgccactcccaatcccagcctgagttctgctctgctctgcttctagccatggtggcctagcggatcatgctcccgaatgatgctcaacctcttgctaagctctgactgaatatacccatatgctcacactctatgtggacatgagtattctgcagtggggggggatgagaatagtatcaaattctacagatgtgcactgcaggtagatgaaaggcactacaatgcttggtatggccttggggtggtgtatnttcgccaggaaaagtttgagttngntgagcatnnatttagaagggcattnnagataaata

SEQ ID NO: 127327 - DNA, 315 bp, Zea mays
  Clone ID: MRT4577_47588C.1
gcgtccgagaagggggtcgtcaccggcgcgctctacggtgtgggcggctgcggcagccggcgcgcgggtctgggtgttcgatgggacgagcaaaaactggaccgtggtgcccccgccggcggagttcgccggcttcgtggtctccggtgcgtccggccggatctgagaaaacctagatcttcttcggcctgtgcggccctccgcgatcgatcaagagacgtaaagggtactggtaggggtagggctagtacgggaggacctggtggatgtccgtgcgccattggtggatctgatgaacactggtaggtcgagatc

SEQ ID NO: 127328 - DNA, 196 bp, Zea mays
  Clone ID: MRT4577_47589C.1
cttacctcctttccacatacctttcaccaacggactcttctctatgttaaaagccaggttttcaaccctacaggatccaacaagcaatttcaattgacatcttacctttatcaccctaattcctacaacatatcattaaccctattacaacaaacacctttggttcatatatttacacaaaacattcattgcccaa

SEQ ID NO: 127329 - DNA, 325 bp, Zea mays
  Clone ID: MRT4577_4758C.1
cttgcgaaaaaaaaaaaaaaaaaagcatccctctgattgtctcatctattcctcatctcgcggatggcggcggcgtcctatctctgttgctgctgatgatttcttggacgcacgacgaacgcgagcagtgtcgaaccctaccaaatcacagagtgctaaatggaagcaacatttgaagctgacatcgagaaggaaaatggaacaacaatccacatgaagcttgtaaaaaaggagttaaactaataatttattctagtgtcaaagttcataatgactggacttgtactctgttattatgctataataatttattgaatattagatg

SEQ ID NO: 127330 - DNA, 269 bp, Zea mays
  unsure (1)..(269): unsure at all n locations
  Clone ID: MRT4577_47590C.1
ttaagaaggagtanantgtttanntggtggtccccccccccggtggngccaagaagngtaagaagaagacgtacaccaagcccaagaagataaagaacaagcacaagaaggtgaagctctccgggctgcagaagtataaggtggacgacgccactggcaaggagaccccgcctgcgtaaggagggccccaacacagagtgcggagcgggccgatacatggacaaccactttaacccgcactactgaggtaagtgcggggtaacctatga

SEQ ID NO: 127331 - DNA, 316 bp, Zea mays
  Clone ID: MRT4577_47591C.1
cttgtctgaggaggacacctaatatcataatgtgttgagacaacctggccattctggagggctagccatcgaggctgaaaaaacggataataatgatcaatcggttcactattcaccatgattctatcttcagtgcttgtatgtgacctcaatgaagccttcagagctaacctatgatcttagaatataagactgttctccttgagacccataatttttctaaaaaatttaaagtggggtcacactggaatatattgggaagagcgcatgaccaacatatgttattgaaacgagatatctaagttgtcaaactgaa

SEQ ID NO: 127332 - DNA, 459 bp, Zea mays
  Clone ID: MRT4577_47592C.1
ctttgggctgatttatgtgcttgtttatgtgcttgtagatacttacgcatagccttagcgtagcaaaagaacgaatgcggtaaacgtaaagaggacactggtatccccgcccccgcctacaacccgacgacggtccaggccgccgctggaactcactcttttcgcagccgcataacgttaaaacacagccggaagccccagtcggcatattaccagggcgtcgcaccaattccccccatctccgcgtagcaaagacctcccccgctaaaaaaaaaaaaaaagggtggttgtctcagaggacttaagtccatgcatgtgcgtacgtgatgctacagtctcctcacagcgctattcaaacctaacctatcggttgctgccccataatgctgcgatcgggaaaatttcggtgccatttaatccaactgttccgtagtatactttttccctgttagtcggtgc

SEQ ID NO: 127333 - DNA, 1438 bp, Zea mays
  Clone ID: MRT4577_47593C.1
gccagcctcgaggccggccgggccgggcctagggttaaatacattttgatccctgcctctctcccgcacgcccccgcccccaacacgtcgcgacgccaaaaaggaggagagaccgccacccccacgcccgcacggcccactcagcgctctccacccccgtcccctcgcggcggcggcggagcccgagcctgagtcctgcccccccgggctaggttggtctccgcctccgccctccagtctctttggcacaacctgcagccgctggcgcaggtggacatggatctgccaagcctcgccgtcgtgctgcgcgccgcgctcagtcacgttcctgaggagcgcaaagctgcagaggagagtctcaaccagttccagttcacaccacagcatttggtgagattgttacagatcattgtcgatggaagttgtgatatggctgtaagacaggttgcaagcattcatttcaagaattttattgcgaaaaactggtcacccaatgatccagatgagtctccgaaagttttggaaagtgacaaggccatggttcgtgaaaacgtacttggttttattgttcaagtgccccctttgttaagcttggagaaagtatcaaaacaattattcattctgattatcctgagcagtggccaagtctccttcactgggtttcacacaacatagacttacagaatcaaatttttggtgctttatatgtcctaagggttcttgccagaaaatatgattgaaaattcggcaccactatttgatccaaatgtcttcaatgcatggatggttctgtttataaacttgttggagagaccagttcccgtggaaggccaaccaatggatcctgagattaggaaatcttgggcctggtggaaagttaagaaatggactatccatatcctgaaccgtctctataccagatttggtgatctgaagcttcagaaaccagagagtaaagcttttgctcaaatgtttcagaagacttattcagggaaaatattggcatgtcacatgcagctgctgaatgcaattcgtggtggagactacttgccagatagggttatcaatcttgttctacagtatctgactaacagtgttacaaagaacagtatgtatcagatgatgcagcctcagattgatatacttctttttgagataatttttcctcttatgtgcttcaatgacaatgaccaaaagttatgggatgaagatcctcacgaatatgttcgcaagggctatgatattatcgaagatttgtacagtccccgaacagctgctatggacttcgtgagtgaattggttagaaagcgagggaaaaacaatctccaaaagttcatccatttcattgttgatatatttaggaggtatgatgaggcatctgctgatcttaagccatatcgccaaaaagatggtgctcttctctctattgggacacttt

SEQ ID NO: 127334 - DNA, 700 bp, Zea mays
  Clone ID: MRT4577_47594C.1
agaataccgaggagctcacacccaccgcactcctgcttcccagccggccatccagcatggcgccggagtcggactccggctcctccgcccccctccttcgcgccggatcgggccaccgccacgccaccggcggctggaggtcggctctgttcataatctgggtggaggtggcggagcggttcgcgtactacggcatctcctccaacctcatcagctacctcaccggcccgctcggggagagcacggccgccgccgccgcggccgtcaacgcgtggtccggcaccgcgtccatgctgccgctgctcggcgccgccgtcgccgactcgtggctcggccggtaccgcaccatcgtcgcctcctccgtgctctacgtcacgggcctgggcatgctgacgctctcgtccatgttcccgacgcccaagagccaacagtgcaacttcacggccgacggccggcgagaatgcccgccttcctccctccagacggccttcttctacgtctcgctctacctggtggccatcgcgcagagcggccacaagccctgcgtgcaggccttcggcgccgaccagttcgacgtgacggaccccggcgagtcgtcgtcgcgaggctccttcttcaactggtggtacttcggggtctgcgggagcgccaccgtgaccgtcgcgatcatgaactacgtccaggacaacgtcagctgggg

SEQ ID NO: 127335 - DNA, 1274 bp, Zea mays
  Clone ID: MRT4577_47595C.1
agcaaggcccatgatggcatgacagatgctatgcaatcggttcagcaatgagacaagacgcagtgaacaaggctaaagcatttgatgagaagcatcaatttagggctaatgcatcagcgaggatcaattcctttgataaacgtgttggcctttcggagaagataaacaatgggatatccgttgtcaatgaaagggtgaaatcagtagaccaaagattgcatgtttctgataaaacaatggctgcattgctggctgcagagcgcaagctaaatgatacaggctctgctgtgaaaaccaacaggtatgtgtctgctggaacaagctggctgaatggtgcttttagcaaggtcgccaaggctggtcatgttgctggctcaagaaccagggagaagttccagttggctgtgtcaaatctaacagccaaagtaagtgataactgataattgagactgttgcttgctgctcagtaataaatatgttatagcatagcatgtccaatagcttcagattgcagagtgtatgtagctttggtagctaagtaccatcgtttccttttctacactctggctgatatagcataatttgttccatgagttgatatttacttaacatgatcagctgaacagcatatttgcacatatatatagtagaactggtcctgattcttgatcagtcaggaaagcattaccaggtcagtggctatcaataagttaattaaaattgtgatattgagaacaaacaataaccagatgtagagtactactagaacagtttgtcaatttggctgtcaagttttgaatatccatgatgtgcatctacacatatgtcataaaagacactctagggagctccatttataaagtttactgagttgcagttttatatgcttcacacacttctaaaacaactttttctctctcatgaaaatagggccctgctgttgttgcctaaggggaatgctggttatggaagctctctttctgaggaaattctattggaagtccctgtgcaaaagcatttcctttgattgtgtggacagtgtggaaaataactgtgtttcagtgttatcttgtccgtctttccttagttgcaggctattcggtgattcttttgaggtttggtgtatacatgcgttcagtttttggtattttagaaccccattcttttagtgttgaagttaaattgattataggtgatagtggcattctattgtattgactcaatctatgtggattcttcttgatcgttgatgcctatgcttcaccgcttctccc

SEQ ID NO: 127336 - DNA, 298 bp, Zea mays
  Clone ID: MRT4577_47596C.1
actacactcgtcgtcgtctcactcacggcgccttcagacctctctcgagcagataagtctcgtccgtgtccgacattcagaagggggacatgaatttcgctgccatagtctccattcctgcgactaccttcgccatcagcttcttcgtcctcatcagtgcctcgattggcaccgcagtctacaccaatctcctcgactacgtcatccagggatgtgtctactgctacagctgactcaccggattcgtgatcaatgtcagcaactacatcgctggcaccatcgttaggctgtactgcat

SEQ ID NO: 127337 - DNA, 514 bp, Zea mays
  unsure (1)..(514): unsure at all n locations
  Clone ID: MRT4577_47597C.1
gggggggggggttttttttaatttttttttgtgtttttttttttttttttttttttttttttttttttttttttggtttttttttttttttttttttttttttggggggcccaaaaccaaaaaaacccccaacaaaaaataacctaggagcggccgcncgggggtttnnncttaattataaaaaaaaacaccaccctgcccaaacaaaaaaaaaccccctgggcccccccccccccatctaaaaatctaaacacccctttatgtcccccccaccctaacccctggaaaaccaaggtgccaaaaaaatcccaaaatcccaccttcccccccaaatattgaggcgaacaaagttcaccccggccaaaaagccccgcggccaaatttgccgctgggtcaaatttgaccaattgcggaccccccagcaacaaaaaacccccccgtccattcaattgccaattgcaatataaacccgaccccggggcccaccccggaaatcccgacccggacccgcaag

SEQ ID NO: 127338 - DNA, 623 bp, Zea mays
  Clone ID: MRT4577_47598C.1
aattgcggtcattgcacggcggcagctggggtcagtgcggcattgtatgccaaggaggtgagccctgttctgttgccagggaatcgacggggacggttgatgtgtgtggggacggagtgcctcgccatgtcgtgtgtttaggtttaccttgcaaggttaaaactcgattcgaatcgtctacttctcgcaactaatgagacagattgatccatgctactgcatcgagtaagaagtgaaatgaggttttcttgagaaaacatgttgattgtacctaatgattgttaccatgtatgcttagaaaggagcaaacctagcttaattaaatatgctagaactagaaaagctaaaactattttagactcagctagtgcttttagcaaaccaaacccctcagtcaaacatcttcatggtctataggtagaggagtagactccttacaccgggtaagtctaggtgagtattagtatactcacccttgcttgtggcacaattttataggtactttggatgacatggttgctggagtgacttggccatccaccctgccactgggctggacagtcgagtgggaccctgcttcagcagtagaggagcatgaggagtgatgggccaggcttcgccat

SEQ ID NO: 127339 - DNA, 113 bp, Zea mays
  Clone ID: MRT4577_47599C.1
tgtcacacgctctcgcgtctcctggagcctcgacggtgccggtacgtaggctctgtgatcctccccgtgcctgacttataacagctcaccgacgccacccatgcgcgtctaga

SEQ ID NO: 127340 - DNA, 917 bp, Zea mays
  Clone ID: MRT4577_4759C.1
acagagtacaagttttttagataatataatccagagcaacaaattcccaagcacacgaaatatcgagcgattagggccccccgtgttacaaggagagctagctacacattggtaccatacctcgccgggggttccagtaatttgcttctgtccaagaaaaaaaaaaagaagggccatatctgctttggtttttactccagctgggattccgacaccttttcctttaccagctcaaaggcatcgatatctgcaaagtatgctctctgcttctccaaaaggtcctctagtaagttgggtgtgcttgcaatgggccgcttctttctaccttcatgacagggaactgatgcggagatgggccgagtatcctttttcctgctgtgggtccttgcagatttcccaagaggggggcagctcgccgtggcagcgaccggttccttgcccttgttgttggcggaggcggggttcctcctccacctctcttgagccccggtggtcctgcggtgaactgtggagatggttggcgatttgaccacgctgcgctcctcctcgaagacagcggctgaggaaggcttgggcgcgggcgtgacggaggcggaggaggagcaggtggaggagaccgcggagacgtcagaggtcgcggggagggcccggcgtgctgtcctcctgggcttgctcggggtcggggactcagcgaggactaggaggttggtgatgtcgcccagcggcaccgccgacgccgccttccgctgccgtttgttagcgccggtcttcgggctcgtcagggatgccgggggcctcgcagcgcttttggggggcctcatcgtcggggtcgcggaaagtggggagagcggtggattcggagagcgggaagaggagcgaggagacggagatcccggccggcctcgaggtacccaatg

SEQ ID NO: 127341 - DNA, 407 bp, Zea mays
  Clone ID: MRT4577_475C.1
atacgccgcacctgactccggcagccagctccctccatcctacctcgtcatcagtgctgtagtaactcgaatcctatgcactgtagttggctatgaactctgacacgaacatcagaaagtagctgcatcgtcctcatacaaatgctgctggcaatccgcaacgacttgaaactcggataactgctggacggtctaaacttaggctccttcttgttgttagccaacatcaaccccttgctggttactatgaatacgctatgaagatttcactaacgtcggaagtaaagagcctccacttccaaggatatgccgccattacccaagaaatcactaccatttggttgtagatccaatgatttcatgagaacattgttatcgacctccttgagattgtctatggaccttca

SEQ ID NO: 127342 - DNA, 300 bp, Zea mays
  Clone ID: MRT4577_47600C.1
aaaaagaaaccaccacgcgggggaaggcaaacagacggaaccgaaacaggggaagacagcacagataagcatgccgaggcaaccaggtacctacccaagctggcttgtcgccctatgacaaaggttaacgcccgagggttacagaaagtgcaacacaacacgagcacacaggcgcccggcacgccagtggtacgggcaagtagcgacacagcaccaggggctgacaaagtcatgagcctggacacatcaacgcgaagagtccacatctggacccaaagagcactcagagcgcaaggcagg

SEQ ID NO: 127343 - DNA, 172 bp, Zea mays
  Clone ID: MRT4577_47601C.1
tcccactcgttctaataggttagctttgttacaagctgtgcttttatacaaattggatagggaagttgagaacaggtgtgggataattttctaattttgtttggattgccatatcctgttctaaattgtgttctttttatcgaccctcagcctacatatctcttttattgtt

SEQ ID NO: 127344 - DNA, 715 bp, Zea mays
  Clone ID: MRT4577_47602C.1
acccgactatattgggtttcaccgaggagagggttcgaagaaacatggaattcttgatgagggttgtcggattggaggtaccatacatcgcacgaaggccagcgctgataaattatagtattgaccgtcggttgttgccacggaattgcttgatcaattttctcagggcaaaggggttgttcaatgacgaggctagtttcctttctgtcgccgctataggcgatgagaaatttcggcgccgatacgtgcatccttacgaggaggattttccaggccttgctgctgcttttgcttctagctgtgctggagaacaccaatgggaacggctatataagatgacaggcgaaaataaagaaagctgacaattgttttggaaagtacaatcaggaacctgctgcaagccttgtttttcatcaccatggttctatcttgctgcctcccttctgagaaagagcttctcatgtgatggcatcgttacaagtttatttattaacttgcaaggattatctcaagttttagcccaactttattcctgtgcttcaggaagattattacgttggtggtctacttcccaccatgttttttgtaccacaatctatgagctctcgaacaccaggaacgggtttttttattccaaattcttcagtcgacaattggtttacttgagtgatcctggaaatgaaaaaaaaaaaaaaaaaaagaaaaatccgagggg

SEQ ID NO: 127345 - DNA, 401 bp, Zea mays
  Clone ID: MRT4577_47603C.1
ctagcgtaaccaaccctgatgctgaatttttcttttggcctgaccgattaaaccatatgagaggccattgatgatgccaggggtgatgccacctattacaattatgccgatgccgaatatgatgccatcgattatggtgcctactatgatgtcaccaataacgatagttattatgatgccaccgatgatgataccaaacatggttttaccatatatgatgccaaatatgattccttttactatgacgccaagtatgaagccaccgataatgatttcaagtatgataccacctatttatgatgtctaacatttgtgtcatcaatgataatgccaatacattattgacagtgccacaatgttactctgattttcattttttacattattcataaacaacaatt

SEQ ID NO: 127346 - DNA, 488 bp, Zea mays
  Clone ID: MRT4577_47604C.1
tggggttaacctttcaataccctttgcccatgtccttggaaggcattagtgcatgacaccgatatgagggtcaacaagctgacaagacatgattttttcttgagtcggttgcctgtgatttaactttgccatttggttgatcgaatgggcgaacgtgcgggtgctagtaggtatctaaagctctctccctcctctcttatcatatactcacatggtgctattttcttttcagattgaggagatgcatcgtgaactttgcagcttggtaatatgttttattccaccaatgtctacgcctcagcctccaggctctgtatttaggtcctttgtacaaagtttggtgctcaaagctagaggtggagatcataggatggttgtcaatgggactttcaacgacactgtgcttatttcattgtacacagtaatcctgcatttgttgacgaaaaaaaaaaaaaaaaaaggcccctaaaaattataaattaataatt

SEQ ID NO: 127347 - DNA, 467 bp, Zea mays
  Clone ID: MRT4577_47605C.1
gacactgccgcgagcaaacgagccgggattaaattggggtgtcaaccgtgcggaaacaaagaaaggaactcctgaggatcggctgactaatggacagagagctgatgagctctatctacgagacagaacaatgctgcacacagtcactgctcaagcagatagtggaggctagaacagatgcggtgacacaacgcacgatgatgcgtctgaatcacgcaatggaactacgaaaaaacaggtggctgaacacatgaggaagggagggaggtctgccgagggcaacatatacatgaggtacaaacatcgaaagcccatgaagagcgcgagccgcttgagaaagtaagaggaaagacaaggattaccatgccaatgaccgagagagctattcatgcttgaatgatctgcacttgtctgctgtcagctgccagtgcacacctgaccgctatgcttgcttaaacatacaaatc

SEQ ID NO: 127348 - DNA, 411 bp, Zea mays
  Clone ID: MRT4577_47606C.1
gggggaccatgccaaccataaaagtttttttgggggccacaaaggtgggaaaacagccctttgcataggggggggaaccaagccctacaggggttttttacggggccataaaaaaaagggccagaactttgtaaaagccaagccaaaaaaagtttttaaattcaccaaaatagccttttttttaaggaaccagagttaaaacgcccttatttaggtacgcattttcccttaggtgaatcccaatcacgaccagatccacagggcatagtacccaaggggggggttttttaacctggacaggattaggaggaagtcccccatttggggaaaaaaaacccccaagttaaaaaccacgggcaaaaagtgtccggcccaatgaaactttctggggacccgggggtcgacccggga

SEQ ID NO: 127349 - DNA, 672 bp, Zea mays
  unsure (1)..(672): unsure at all n locations
  Clone ID: MRT4577_47607C.1
aattcggcacgaggctcgccgccgccgccgccgccgccgacgccgaaatcctcgtcgcggcggcgatcaccgctcccctctatgatagcggcgcgtgagggcggcggagcgcggcctgtcgctccccggtcggcgtgcccggggcggctctgagagcccagagctcgtctcggttccctgccaagcgcagccgagcaccgcgccggcgccgcgtggcagttcaggccgtagtctgggcgctgttctgctctgggtctactggagtgcgtttgggattttttcggttcctactacattcgggggcgctgaaaataaggcgtctctctttcatggggcagccagggatggattctgttccagggaaggagaacaacggcattgcccctaacctcaatggggtcgtgtctccagcgaagcagcagctggaggggaaggaagcgttgcggtatgcaaacatcctccggtcgcgcaataagtttgctgacgcgatcaacctgtacaccattgttctcgagaaggatggcaccaatgtggaggcccttatcgggaaagggatctgcctncaggcgcagaacctaccaagacaggccattgagtgctgtacagaagctgtcaaaatcgagccaggaaatgcgtctgctcttacacattgngggatgatttacaaagatg

SEQ ID NO: 127350 - DNA, 498 bp, Zea mays
  unsure (1)..(498): unsure at all n locations
  Clone ID: MRT4577_47608C.1
ttgatagnaatatcaatctaaaaggaattggaataggagaagagctaattgggattggagaagaagttcctttggaatggaattgtagaacaagtagacaggatttctacgaaacaggataatccgttgattgggaacaagtccggattggattcctgcgtcacggatcagtagcagcaagtagatcaaagctagttcggtaacataagctcgggaacaggactatttgccgggggatgatcacttggttccgtaggtttcttgatctcatatctatgggccagtccgatccgaaaggaggaatgatggtagatatctactagatagccgtcttccactgcctcgagtccaatctctctctattnngctgcctagagtgtccaacaccttcagtaccgttctttggacgagagaagccttatccttcatactttctggacgtgttggtttccaatctgacattttatcaggaggttctgccaatttatccctactgta

SEQ ID NO: 127351 - DNA, 344 bp, Zea mays
  Clone ID: MRT4577_47609C.1
agagacagcgctccgtactcgcctatctccgcgactcaaagcttcttccatttcctaccgccgccgttgcacctccaccccattccgtcgacacgatgagggagatcatctcgatcgagaggggcgaaccccgacacacctgcaatcccttctccatgctccttctggccctgctcaagaatgccagccagctcgccaaggtccgctacacgcgcgtcaccctcatcatcttctccagcaccgagaagaggttaccagaactgcacccctgcctgcagtctagacatcacaccatcgagcaacatcagcatcctatctacacccacttccaggagctgaacccc

SEQ ID NO: 127352 - DNA, 415 bp, Zea mays
  Clone ID: MRT4577_4760C.1
ttttttttttttttttttttttttttttttttttttttttttttttttttttttttttttttttttttttttttttttttttttttttttttttaaaaacacccgggacccttttactggacaagccaagttaaaaaaaccccgccggggggccaaattttatacattggggggggcttttcccttcctttacaacaccccttttcccccaactgggtggggggggggggccccacccagggggcccccccgaaaaaaaattttgagcagcccttgaagcctcccaggcccccgagggggggccaggcccgccccaaaacaaagggcccctgggtctttattttggcgccccccttggaaaaacccatgccgaaaccgcggccccccatgggggtggaaaaaccaggggtctttt

SEQ ID NO: 127353 - DNA, 351 bp, Zea mays
  Clone ID: MRT4577_47610C.1
tgatagggaccgcgttgttgaagcaaggggtgagcttcaccgaatgctgaatgaggatgagctacgtgatgctgtgttgcttgtgtttgctaacaagcaagaatctctcaaatgctatgaatgccgctgagatcactgataagcttggactgcattcactccgtcagcgtgattggtacattcaaagcacttgcgctacaacaggacgaaggattgtatgaaggtctggactgattgttcagtaacattgacaccaagtcctaaattgtcaagcaaggtttgcgatcatttactgagctcatgaatgatgatgatggagctggatatctagggttgtgatggtattttcgt

SEQ ID NO: 127354 - DNA, 427 bp, Zea mays
  Clone ID: MRT4577_47611C.1
actataaataagtatttgagtaaaagaaggggatttcacagacaatataagggaaactttttcatgtaaaagaacaaaaaaaacttaatataaataaaaaatttacaatttataaaattcgaaatggcttttattcatcatagttaaatggtagagttgatttgtctaggtcgtcaaagtattgatgtttgacagcttctctggcagttatgcgttgactggggtcgtacatgagcatttggccgagaaggtcgatgccttctgagttgatgtttttgacctggctgggcaaattgtagttagtccaggatgggaaggtgtctgaatagtcaggaagtttgctgacgcctggccaagtttcttctgttggtgtcatgagaacgcggaagcatctgaaaagctgatcgatttccgagtcgccgtgaaa

SEQ ID NO: 127355 - DNA, 379 bp, Zea mays
  Clone ID: MRT4577_47612C.1
gtacagcagccgccgtcatcgcacgttcatcgctgcatggaggagttcgcgctgctacgccgtcgtttctccggcaagacctcctctgatcgtgatttgttcccgcgcttcgaggaatcgacgatcaagcttcgacgatcaagtgatctagctcttcgagttccacgaagttgaagaccctaagcatctgtttggtgaaggttgtccacattacaaccactgttcaagagaagacgaagtcgtggaaggagacttccaggagttccaggactacgacgagttctaggtgtgggttggcggcaacccccagtcagctgcctgtgaaggcccctatctttactgcgtttcgcttagcactttgatttacccgttaagttga

SEQ ID NO: 127356 - DNA, 2877 bp, Zea mays
  Clone ID: MRT4577_47613C.1
tggtccctcgagccggcgcgacccgcggcgccccttgctccctcacccggtggggtgggcctgacgggttgggccgaggagcggcacgagagaagcagtgaagggaacccgcgcgctttctcccgacgtgcaccggaaatggtggtcgtggacgcgtcggagttcggggcggagggcttcgacccgaagcggtggatcaacgcggcgctggacgcgcggcacccgtcggagcctctcgatcgcttcctcgccgacgccgaggagcgcctgcgttccgcggccgacgacgccgcggccgcgctcgagagggatagcggcgacgccctccgccgcgtcccgttggcatgccgcgacgcgctgcgcctccgcgacgacgccgtcgccctacgctcccacctcgcctccgtcctccagtccctctccctggctgagggctcatccgcagaatcaatagctgcactagcgcgtattgacactgtgaaacagcgcatggaagccgcatacacaacattgcaggatgctgctgggttagctcagttgagccagagtgttgaggatgtgttttctagtggcaatcttccaaaagctgcagaaaccctggcaactatgagacattgcttgtcagcagttggagaggttgccgagtttgcaaacgtcagaaaacaacttgaagtattggaagaaaggctagatgaaatggtgcagcctcgattagtagatgcactttctaatcgcaaggttgatgccgtgcaagatcttcgtggtatactgatccgtatcaataggttcaagtcactggaagtgcaatacactaagatccatgttaagcctctaaagaaactctggggatgattttgagctaaagcaaagatccagcaaggtagacatggagaaactcagtggtgaaagcattagtggcctctcattctctagttggctgcctaatttctatgatgagacactgctttaccttgaacaagagtggaagtggtgcttgactgctttccctgacgaatacaaatcacttgtaccaaaagtacttactgagaccatgagtgagttgaattcaagctttgtctctcgtataaatatagcaaccggggatgttattcctgaaaccagatctattgccaaaggtatattggatgttctatcaggtgacttaccaaaaagcaccaaattgcagaataagcatcttcaagcgctaattgaactgcacaatatgactggcacttttgctaggaacattcagtacttattttcagaatcagatcttgcagttgtgctgaatactttgaaagctatttattctccatatgaaacctttaaagcaaggtatgggcagatggagcgtgctatactctctgctgagatgacaagtatcgacatccgtggggccgtccctcgtggtgttggtgcacagggtatagagctgagcgaaactgtccgcagaatggaggaatccatcccagaaatgatagtactccttgaggcagctgtggagagatgcattagtctgactggtggttcagaagcagatgaactggtactggctcttgatgacgtcatgctgcagtacatatctaatctccaagaaacattgaagtccctgaggataatctgtggactggatagtgatgccttgaaaaaagatgcaggtttagagaaaaaggaagtacaacgattggtggatgtttctgaagaggaagaatggtctattgtccaaggtgctttgcaaattcttacagttgctgattgcctaactagcagaacctcagtctttgaagcttctttaagagctacacttgccaggattggaacaaacttttctgtttctggatttggctcaagcctggataaatcacctgcagcaactgctgatgagaatgcagacttgtcttttgctgggagggctgcgctggacattgcagctattcgcttaagtgatctgccagataagtctaagaagttcttaactgtgctagaacagtcaaaagatccaagattccatgctcttcctctcacatcacaaagagttgcagccttctcagacacagtaaatgaactcgtctatgatgtgctcatatctaaggttcggcagcgtctcagtgaggtcgcacgccttccaatctggtcatccgtggaggaacagggtggtcttcctcttccaagcttcagtgcctacccgcaagcatacgtgaccagcgttggggagtatctcctcactttaccacagcagctggagccactcgcggaaggtatctcaggcaatgaggctggcaacgatgaggcccagttctttgccaccgagtggatttttaaggtcgccgaaggtgccactgctttgttcatggagcagctccgaggaatccactacatcaccgaccgaggttcacagcagctcgctgctgacattgagtacctaaacaatgtcctctctgcgctctcgatgccaatccctccattcctgtctaccttccacgcctgcgtctccaccccgagggaccaggtccgtgatctgatcaaatctgatggtgcaagccagctcgacctccctactacccatctggtctgcaagatccggcggatcacattagattagtgaaatcgtcctaacttctccccctttccatgaggtttacctctgtaaaagcatgcattaccgcacgcttctgcgatcgtatgtttggcatgcgggcttgtagcttgttgcttcaccttttttttcttgccttgtaaccgtactgctggcacatagtgagaataatcctatatagaataattcattacttggagcctatattgattgcaaaaataaaaaaaaaaaaaaaaaaaaaaaaaaaaaaaaaaaaaaaaaaaaaaaaagcggacgcgtgg

SEQ ID NO: 127357 - DNA, 661 bp, Zea mays
  unsure (1)..(661): unsure at all n locations
  Clone ID: MRT4577_47614C.1
caggcggcgggcgggaattctctaccctctattgaacttctccattatatcccttgatatattcgcacttcacccatcagcaatccattgcaacaatcgcccaagatgatgtcccaagccgccatgcaggcggagaaggctgtaggccacggagacaacgcaaccaccactcaagacgttaccaaccctggaaacaatgaggcctgggcagacaactcggaaaaaatgaaggcattggcatggttcggcaagaacgatgtccgcatggttgaaactccaaagccaaaggtcattgagccccgcgacgtcattgtcaaggtgaccggatccaccgtgtgtggctcagatcttcacttgcttcacggttcagtcgtagagatgcagaagggtgacattctcggtcatgagttctgtggtgttgtcgatgagtgcggttctgaagtcaccaagttcaagaagggtcaacgcgttgttgcgtccttccagatcgcctgcggcgagtgctactactgcaagcagaagctatcttcccaatgcgagaagacaaactccaacacaattgagaataccatgtacggcggccggaccgctggcatgtttggatactcccacttcactgnaggatttgctggtggccaagcagagtacactcgtgttccct

SEQ ID NO: 127358 - DNA, 394 bp, Zea mays
  Clone ID: MRT4577_47615C.1
atccggctcgagggcgcacatgcggatgtgctccgcccatcctcgcacatgacgcggccatgccttgctttggccttgatcaagtgagctaccaccactgccaggcattgtctccttattacgtctggagccacaacgcgtcggtgggcagcctcaatctattgcatcatgatgatgatgctacagctgcacaggatggggcgagcgcctgggatatctggagcctcaaacagctgttcatgctggcagcatgtggtgcttattgagaaccgcatgctaaaaaaaatgtgttggcgatggtagctggataccagacgagagggcgagaggcatttgcatccctcatccgctatcgtattgtctatcctttatgtagattatattatgcttctgg

SEQ ID NO: 127359 - DNA, 130 bp, Zea mays
  Clone ID: MRT4577_47616C.1
gctcacctacgggctatactccttccaccggggcaacagccagcgctctcagctcatgatgcgcacccggatcgccgcccagggtttcacggtcgcagccatcttgctgggtctggctgtcactgctatg

SEQ ID NO: 127360 - DNA, 526 bp, Zea mays
  Clone ID: MRT4577_47617C.1
gggtacccgggctcccccctcgagttttttttttttttttttttttttttttttttttttttttttttttttttttcggcccaaatagcattcctttccgggggtagtggcccagcacaaatacgtttttgtaattttggccctaaagttacgggtccacaaagtccccttttccccgaaatcagatccaacagagggggaaatagatgttttttcgcccaatttctgcactgaaaaaaaaattcccctgttttagctgaacggggtcccatttttaaccatcctgaaaacaaaaataaaaaaaagttcggggcaacactcagcaattttaatcccaaaagtttgggtcgaaaaaaagtttcagtataacatgcaaagggggacaaaggggttttatttttacaaaaattgcatgtttgtttggactgcccccccccaaaaatgcagggaggaaacatgcctcgagggtaattagggacaatcctcaactggcacatcatgatatcaagtggtatcataactaaca

SEQ ID NO: 127361 - DNA, 260 bp, Zea mays
  Clone ID: MRT4577_47618C.1
gcgacataccatcatcggcacctcgctcttcttctcagctctccccctctagcctcaggtacgtatacacagacacttccgttgatcgattgagtttgaacccaccaggatcaggcttaggattacctcatgtctgcgtcgccggagttttacaggcccattgaagcattggacttttagctgtactgtgcaactcatccggtactgtaccctggctacatctactgttgcataacgcctacggacagcttcatctgcta

SEQ ID NO: 127362 - DNA, 710 bp, Zea mays
  unsure (1)..(710): unsure at all n locations
  Clone ID: MRT4577_47619C.1
gccggccgggccgggagtagtgtgaaggaccccgcccggtctcatcgtcgcccggcgcatgtatgctccgcagagccgcgccgtccctcgctttctggaggtggcggccgcaggacaacgatgcgggccggaaactggccgcgcagctcctactacagcctctttcccacacctcattggcagtgccagaccgcatcgctcagcagcgagccacgcaggtttccttccctcgcggccgcacccgctacttgttcgacggaacgcgtcatcgggatgcgatctcttggaacgccgtggtctctggccatgcgaggcacggtaacgtcccagacgcgctggacaccgcggcgcggatgcatagctcgggagtgccgttcactgaggccaccttcgcgtcggtggttggcgcctgcgcacgcgggcggatgttctgcgcggggacgcaagcgcacggccaagtgatcaagtccgggtgcgagggcttcgcggtcaccggggcgtccctcctcgacttctactcctcgtgcttcgacctccgtgcaactcgcactctctttgagtctctgcgtccgaagaacgagctgctgtggagcccgatgggtgntgcgcttgtganggttcgcttgctggctgangncttggacttacttcaaaatacaccagcgnncacgtgatngtgttgcatggacagctgtcatatctggctatgc

SEQ ID NO: 127363 - DNA, 344 bp, Zea mays
  unsure (1)..(344): unsure at all n locations
  Clone ID: MRT4577_4761C.1
ggggaaaaaaaaaagggggccaaaaaacgggcccttggggaattccgaaagcaaaggttccgccaacaaaaaaaccgaaaccaaacaaccgggggggacaacggaagggggggattcaaaaaaaaaacggggggaaacaaaagggctaccacccagcaagaacggcatcaggggaacaccaaaaaaggagggcaggggggggccgcaagcccccgaaaaaaattggcacaggaccccggggcaggggaagaaaaccccgggccccaaaggggcttggggggggtccaccaagnttggggggccctttccccccccggancccccttgggnggggggtttggggg

SEQ ID NO: 127364 - DNA, 266 bp, Zea mays
  Clone ID: MRT4577_47620C.1
tcagtctctgcgaaagctggctcgcctgcaaggtccgacccgcaattcgcgcggggacccacactgcccggacggacactaggggcaagggcaacctagctcatcgctactcccggtggcatttgctgcctgccaaggatgcagctctaactcacccgaagcaacttacgccgaggcgtggctctgtgctacgaaggagggccggagggaagggaagggcaggccatgccacttgaagccatggtgtcccccaaagagcacctagc

SEQ ID NO: 127365 - DNA, 354 bp, Zea mays
  Clone ID: MRT4577_47621C.1
ccgcgcctgagacaatgctgaccttattgctatgcttgagtcgatgttccacccatgttattgccggaacttctgatgaatacaacagacctgtagccgagaatgacgggcttatgcatgctaattacactcattgagccactcttgctcaggaagccgtcactctatctggtctttggatccgatgggactggttgcgatgatctcttcagacctgcgcaggaacactgacggcccatactgtcttgatgaaggaaagtgtagacttgcaatcgattggtcacacgatgactgcttcatttatgtggcccaccactgcctatagcgaggacaatctcgatttactgaacatct

SEQ ID NO: 127366 - DNA, 413 bp, Zea mays
  Clone ID: MRT4577_47622C.1
cacatgccgcgtggtgaagatccaccactgtaacgagcaattgaaaactacatctatgagaactgcttgctatggccaaacaggcccccttaagcataacatgccaccgcgacctgaaaacatttattgccaggttttcctgaaaactgactctttacggtacgacaaagagaactctcatgagattcatcttaaaaatacatatactcttatgataacaccagcgttatggctaattgaggtaatattaaccttacaaagaaaaaaacactaatgtcgcctactcatccagtatatcactattctgacccctgcttgcaactggactgctgaaatatatggctaccaaagacaagattataatgctgcgtggaaaaacatcatcactgcaaaacccctagcatatatataac

SEQ ID NO: 127367 - DNA, 157 bp, Zea mays
  Clone ID: MRT4577_47623C.1
ggcataacgtaagcgtacgaactcggaatcggctcgatccgagcgattcggctcagaaccgaggtcccccaatcccccaaacatttttttgtcgaatcggtcgtgagatcctctccgacgagatggcggggaaggtagccaaggccacggccgccaa

SEQ ID NO: 127368 - DNA, 630 bp, Zea mays
  Clone ID: MRT4577_47624C.1
atggaaaaagagccacttgacatggttgagacctcagttcgagtcatcgagacacatgttgacatcattcgcagtctagtgactgatggggttgtggatactagtgaaccggaatcagtgtacacacttaagaccactttgtttcaaattggagatgtatgcgacatgcttgagaagtgtgctctgtccatcaaaaagtatgctgactccaagagggctaaaattattcaagatgaagccctgcaatatgctgaagatgatgaagctgcagatgatttggtggcactcccaagcccagatctccttactcaagccgacatattggaaaaatattttggaattgagtatgatagcgaccagtcaaggggttgttgatgtttagatggctgtgatgttataatgctgaaggaccccaagaagagattaagtcctgtagtctaccacctcccgttatttgtgggcttcaccgatggctggaaacatttggtgatagcaaacgaccttcgggctggggacgtctgcgagcttgttaaggggccagacgatgttgagccggtgtactatgtccggatgtgtggtcacaaaattaaaagccgccccggctgcatgtgtgtgcttctcttctcttag

SEQ ID NO: 127369 - DNA, 117 bp, Zea mays
  Clone ID: MRT4577_47625C.1
gggaaatgaagggttggacaaaacttttctgtgcttagcacaaggttcacgaagaattgccgcactggtttttagttattacaaccagagttgtttctactgtatacaagttttccc

SEQ ID NO: 127370 - DNA, 813 bp, Zea mays
  Clone ID: MRT4577_47626C.1
gtaccctccgggtctgccgggaacccaaaagatatgacaactaaaaacttactacgcgcggttatggttgcaggcactgaggaaggagcccttgacggtttatggtgatggaaagcaaaccaggagtttccaatatgtttctgatctggtaagtctacctctactcaacatatattgaaaaaaataagagacactcgatacaacatcactgccagagtggcctagccagcaagtggggatgcttgaactattcattacaagggaatctattattctttgcattcattgtactgatttgggtcttctcccaggtcgagggtctgatgaagttgatggaaggcgagcatgtaggaccatttaacctgggcaaccccggcgagttcaccatgctggagcttgccaaggttgtccaggacaccatcgaccccaacgcacggatagagttccgtcagaacacccaggacgacccacacaagcgcaagcccgacatcggccgtgccaaggagctccttgggtgggagccaaagatccccctccgcgagggccttcccctcatggtcaccgacttccgcaagcgcatcttcggcgaccaagacaccgcggctgccaccaccggaaaccagcaaggctaggacggaagaggagcacgggacctggaaatttttggtggcctgcttctagctgcttggtcggccctcctctccttactgacaaaagctatggccatgtagttcgtcggaaatgtgtcgctgaaataccttggttgatgctgtaatgctattctttctcctggattttctctctctctctctc

SEQ ID NO: 127371 - DNA, 372 bp, Zea mays
  Clone ID: MRT4577_47627C.1
ggacatggtaaagcttatttcttaaagaacgacataccgttgggaacacgggatttcaagctgcagaacagatcgggtgcacaccgaaaaacaggatacacctgcgctgatgtttaccgcacaccattggggaactgcaaattacaagaacatactgcttacaaagaaggcctaaaggggacacagatgaaaacctgccactgataaggagaccccaatggagaggaaccttcaccaagccatccaatgaaaaagatcacctgataacaatcctgcatcttcgctgaccctttcacgcagataaagcaccttttcatgtatgtgttacatagtgaactctagcttgttcagttccaataccattatatcgac

SEQ ID NO: 127372 - DNA, 430 bp, Zea mays
  unsure (1)..(430): unsure at all n locations
  Clone ID: MRT4577_47628C.1
cccacgcgtccgcttcgttgctcaggcactgaggaaggagcccttgacggtttatggtgatggaaagcaaaccaggagtttccaatatgtttctgatctggcaagtctacctctactcaacatatattgaaaaaaaaataagagacactcgattcaacatcactgccagagtaccagatttgattttttttttccggtggcttagtggcctagccagcaagtcgagggtctgatgaagctgatggaaggcgagcatgtaggaccatttaacctgngcaaccccggcgagttcaccatgctggagcttgccaaagttgtccaagacaccatcgaccccaacgcacggatcgagttccgtcagaacacccaggacgacccacacaagcgcaagcccgacatcggccgtgccaaagagcttcttgggtgggaa

SEQ ID NO: 127373 - DNA, 550 bp, Zea mays
  unsure (1)..(550): unsure at all n locations
  Clone ID: MRT4577_47629C.1
tgaattcggcacgaggcataaggctcgcgacacgcatcaccgggacgatcagatatgatcttaagatgaacagctgtcattgtccaacgggaccacagaggagaactacccaagcgcgaacaccgagtgcatgaagggcgccgagaaggacatgcgctagctgctcgccctgctcgtcctgtacagctgctaccccgtcaagctcaccctccggtagctctgcgacaagacaaccgatcatgtgaaccaggaccgagaatgctctcgaaaacctcaaactgcccaagggtgctggcttacactaccaacctatggctggacctcgcggagggggtcatggagcctttcatgtangaactcctgtgcctttatgtaagatcatctatccacatcgagagatgcgtggtcctgctgttaccggcaccataaacgcactcaatgctgcctgtgctgcaagatgctcgctgagtggtcagctgattgatccatggtctgacgctgacatcaaccctgaagactgtgccagagacaagatcaaagatgataactg

SEQ ID NO: 127374 - DNA, 372 bp, Zea mays
  Clone ID: MRT4577_4762C.1
caaccccaccaccggtctcctccgcctcctcgggccgtgcacacacgctcgtgctcccccgctcatccgactcgccgtttctgcctactccacctctgccccgctcccatcggccgatcggtcggaggccgcgtcgtcacttgagagatgcctcttgttgacaggggcggggatggaaacggtggcgataccaccagcctagggcccgccgcgcgccgcgccattgatgaaagggggactgaagcaccgcagcacattacgagccgccacgctcgagaaggccaagctcgatctctaccaacgtatcaagaagatcatgccccagctagcaaccggtggtggcggcggagatgttggaaaaaggatcggtca

SEQ ID NO: 127375 - DNA, 315 bp, Zea mays
  Clone ID: MRT4577_47630C.1
atgatccccaagaacgacaggattcgatttccgaaatgcaaaatcacaagcaaacaggaatcaatcaagaacgtagggcgtggaggaagggggaagggggcttgtagagctcggacctctggttctcaaggcggagggagggcgtggatgaagaaggagcttgccacctgcggagctcgaacctttggttcttgggggccgattggcggccgcggcggcagttgcaaggggacgattagcgggcgggggtggagcgcatcccgggcggcggcaattgcgttgagggacggtggagacatcaagcaggaggcttag

SEQ ID NO: 127376 - DNA, 260 bp, Zea mays
  Clone ID: MRT4577_47631C.1
atattttgctcgttttttgggttcatctaaccgaggcgcgtgtgtatttaaagccacaataataatgttcttaaggaatgacgcactgaatcttgacaaagcagcttgccctgctcacttggggctcacaccagatagggcgggtacttggaccaatgaaaagaaggccggtggtcaaccacggttcatacaaacactgtctccaagggctgacaagcggcgcctgcaccgccagagcgagggcgcacgccattggggcg

SEQ ID NO: 127377 - DNA, 522 bp, Zea mays
  unsure (1)..(522): unsure at all n locations
  Clone ID: MRT4577_47632C.1
ttgcgcctcctggctcctgggtctcatctcctcccttcgcttcgcaaggccaacaaggaactccaccacgcacggccgcacccgcacccgcacccgctctctgctgccatggcgtcgtccttcgtcgcgctcaccgttatgttcggcttcaccgcagccctgtgctgcctccagctcctcggcgcggacaccacgaccacgaccacgaccacgacccagagcggcctcgcgcgcctggccgcggcctcctgagtcccggcggtcctggccgccctgacgctgaccccgcgacgacgtcgcgcgcctgaacgtgaagtgaagcgtctggacgaccggaccactgctaggtcctcgttctgctcgatccgttcggagctcagcgcgtctgggctttctgatggcggcggcgtctgaaggagaagggggtgattaatgtttggcgtgcccccgtgccggtaaaaaggaggatacttttattttgttttcctccgnatatgttggcctagtgcttgcgcttctgga

SEQ ID NO: 127378 - DNA, 339 bp, Zea mays
  Clone ID: MRT4577_47633C.1
aaggtggggctttttgactgggggggagaaggaaaactccgattcattaaagggctgccagaagccgcgataacattgctccgacccactatagacgggtgcaaaaagattacccccagcatagaaccgcccgaccaaaggcgatgtttaaggggacacaccgtaccaactgacgattactaaacggagaaactgggccggcctggacctgattcccactcaaaactgtcaacccaccgttggacccacctccccaatattggggccagggccacctcaatcagggggggcttccaattacatgcggccggagacccacaggggttcaccccagccccg

SEQ ID NO: 127379 - DNA, 940 bp, Zea mays
  unsure (1)..(940): unsure at all n locations
  Clone ID: MRT4577_47634C.1
tttttttttttttttttaaaccacaagtatcaccatcattaattcattatcatacgatgatacaagaacgtaactgaaacacagtatatatatttatatatatatatttacaagaccgtccaggagatgaaagagcaaactgaaatcccagtcccagtgggattacatagacagtgagcttaccacaaatccagaagcgcaagcactaggccaacatatacggaggaaaacaaaataaaagtatcctcctttttaccggcacgggccacgggggcacgccaaacattaatcacccccttctccttcagacgccgccgccatcagaaagcccagacgcgctgagctccgaacggatcgagcagaacgaggacctagcagtggtccggtcgtccagacgcctgcagcgacgacacgccgacgcttggcgcaggttatttttatagtcaggagaaggagggggggattgcttgttgcatcacttcacgttcaggcgcgcgacgtcgtcgcggccgcggtcgaggtgcccgtcggcgccgagctgcaccacggccgccgcgacgagagccaccgtccccgcgaggagggtcgccttggcaaggcccgacacgagcgccccctccgccccggcacgggcgtgcacgcgcgcgaacgcgagcagcggggtcagcgtcagggcggccaggaccgccgggaccagggaggccgcggccaggcgcgcgaggccgctctgggtcgtggtcgtggtcgtggtgtccgcgccgaggagctggaggcagcacagggctgcggtgaagccgaacataacggtgagcgcgatggaggacgacgccatggcagcagagagcgggtgcgggtgcggccgtgcgtggtggagttccttgttggccttgcgaagcgaagggaggagatgagaccggccaggagcgagacnccggccggc

SEQ ID NO: 127380 - DNA, 450 bp, Zea mays
  Clone ID: MRT4577_47635C.1
tagccttcaaaaaattctggaacgaaaaagtcgaagttagttctctatttagcggattacctttattcttgtattctattaagttatttatcctaaggattttttgctattataaggtataaattctatggacattcgtagtagttttaattcatcgctacgggctaaaatattaattcgagttctagtagtacaggttcacatggccaaccgagctggaaaagctggtgggtatattgcaccacatacgagtagtccttcgcataatgataacacacagcataataatccaagcagtagtttggatcctcctgcttcaccgagattgcaccctgagttttcacactctgattggttactattagcttataaaataagagaaataagaccatatttttatataacaaacctgagtaatattttttctcaaccagaagaattatgctgcgt

SEQ ID NO: 127381 - DNA, 572 bp, Zea mays
  Clone ID: MRT4577_47636C.1
cttttctctcccgcaccccacatagctttgacctcatgctctcttcggaccgcatagcccatacgactaccgtctacaactattcaaccttatgcttacctataccaacaatcaaacctactcaaaggaacaaggaacgtggttagcttgttgtataactgctgtaagtacacccttcgctacaagacccgcctgtgattataggataactgcgagctaacgtaaaggtaactagacacaattgcccttgacataaaaagggggagcatgagtactacgccatgatgggcaaaggtaaggtgcaccataagcacatcaacaacaatatcaatcgccctggatcttgctaacaactacagtgtgtgctgcttaagaatgatcaacacatctgactgctatatgatgactacgacccgttgatcatattgtgcaccaacaggaacctctagcagtattccaccgatttatgaataggaaataatattgaccggtacgagcgttactcctatgcataaaaggatcttatatcaatagaatctgaaattcatgtcaacatctgccataatgataga

SEQ ID NO: 127382 - DNA, 325 bp, Zea mays
  Clone ID: MRT4577_47637C.1
aataaattgtgactcgcttattttgtgagcatgccttttaataacttttttacttttatcaacaaaaacacgagccgcgtcataagggaaaatcaaaatgaaaaaaaatgaaattctctggaactacggggacaaatgagaaactggctgaaactgcaaaggaaaccctgccagagctccgtgcatcccagtacaaaaaaacctgggggccaaaccctcctaacccacccccccgggggcccccccctttggccacaaagaaaggttgaaccggggctggggtaagggggccacacaagcatattttcattaaaccccccaaggg

SEQ ID NO: 127383 - DNA, 216 bp, Zea mays
  unsure (1)..(216): unsure at all n locations
  Clone ID: MRT4577_47638C.1
ctaaccccgaacccccagaatnnttcctcgattgcccaatgcaannnattcccggtgngcccacaaagccgaagnntgcttcgctttgtgtnnatgcccacggaccttgnnccaattgtcagcatcctttttcatgtgtggtccgtatgctggagtgtaaatgtctggcaatggcttggccatgtcngcgtgctcgcctgctgcnccttgtgttcc

SEQ ID NO: 127384 - DNA, 128 bp, Zea mays
  Clone ID: MRT4577_47639C.1
gttgtatatacctaattggtctcagtcttttgcaggcattgtacatgacgtatgccgcggtagctttgatcgatatcgaccttgcctttaatctgcggaaccttttttaacggtgcacgtaccactct

SEQ ID NO: 127385 - DNA, 158 bp, Zea mays
  Clone ID: MRT4577_4763C.1
gcaacgcaccgttgcctgtgaagcagcgcacgctggagcgtgaagggtccagcgaccgcgactgatggggaggagcggcggcgagacggcggggaagaggcagcagttcgggtgcatggaggagttctggggcttctacctgagccagcactccaagc

SEQ ID NO: 127386 - DNA, 275 bp, Zea mays
  Clone ID: MRT4577_47640C.1
acccaccccgcttttttatcccatttttatatgaggttcccgggggaggcataaaaggaggggggtgaccaccatcgatcaacgacgggttccaatgttctggagataagcacagagatcgtgaaggcctatgagtgggaccttcggagaaccacagccttttcccaatgccatgggacgacttcaactggccggaccagcaagatgaccatgatcctgcatggtaccaacactagctcttggttcacactgcttcttgttatatcttgaccacc

SEQ ID NO: 127387 - DNA, 973 bp, Zea mays
  Clone ID: MRT4577_47641C.1
ccggccgggagtggagtggagagcgcgaagttaagccaccatgtggacgagggctttagcgacgatgctgttcgtggcaggcgccgcgctgctcggcgtcggcggcgccagcgcgcagcagggcgtgtggagcatcatcacccggcccatgttccagagcatgctgagccaccgcggcgacagcgggtgccagggcgccttctacacctacgacgccttcatcgaggccgccagcaagttccccggcttcggcaccaccggcgacgagcagacgcgcaggcgggagctcgccgccttcttcggccagacgtcccacgaaaccaccggtggatgggcgactgctccgggtggaccgtttgcctggggatactgccgggtgaaggaacagaacccgacggacccaccctactatggacgaggacccatacagctaactcatgagtacaactacaggctcgccgggcaagcgctgaacctgaacctggtgggcaacccggacctggtggcgagcgaccccgtggtagccttcaagacggccatctggttctggatgacgccgcagtcgcccaagccgtcgtgccacgccgtgatgaccggcgcctggacgccgtccgccaccgaccgcgccgccgggaggctccccggatatggcctcacctcgaacatcatcaacggcgggctagagtgcggcaagggccagtccaccgacggcgccaaggaccgggtcggctactacaagaggtactgcgatatgctccgggtggggtacggggacaacgtgccctgcaaggaccagaagccttacggaggatgaggacgtacgtggacaacaataattatatggttgctgcaagccttcacgtgtttttgttgcctctacctactaagaataaatcaagtagcagcaaacaggggcaacctgctaccttcggcgtgtgttttacttatcaaaaaaaaaaaaaaaaaagcggcc

SEQ ID NO: 127388 - DNA, 571 bp, Zea mays
  Clone ID: MRT4577_47642C.1
tttgtctgcaaacatagaccgcggccgtaacagcagggagggtctgctacacataacgagcgcgccttgacgagtccatttacaggacccgagggcctaatgtgtcagagcgtgacccctagacgcgcagagacacaaaagaactccgaaagcacgtgtccaacggagagtaacctatggaacacttggggtgattattcacactaagctcacaccaaaaccgctgcacgggtccaacggggaccacctatggaacactttggttccttatccacactacccttatgtatgctggctactgatctgccttgaggtccttgcttggatatttaatcgcacctgagtacggggttggaatttacataattttcctatttcaataaaaacaccaacctcctactactgatgggaaaaccttaactgatgttgctccagcgtgggatgttcttgttccaccttcaagccttgaccttgtcgatgagtgcctgtaagacctgcaccggaccttctgcttcctctctaattacggaaactgtatgctgaggtgaaacaggggacaaaggccttgctc

SEQ ID NO: 127389 - DNA, 684 bp, Zea mays
  Clone ID: MRT4577_47643C.1
gcggccgggccaccctactattgacgaggacccatacagctaactcataagtacaactacaggctcgccgggcaagcgctgaacctgaacctggtgggcgacccggacctggtggcgagagaccccgtggtagccttcaagacggccatctggttctggatgacgccgcagtcgcccaagccctcgtgccacgccgtgatgaccggcgactggaggccctccgccaccgaccgcgccgcggggaggctccccggatacggcctgaccacgaacatcatcaacggtggtctagagtgcggcgaggaccgctccaccgacggcgccaaagccgccaaggaccgggtcggctactacaagaggtactgcggtatgctcggagtggggtacggggacaacgtgccctgcaaggaccagaagccttacggaggatgaggacgtacgtggacaacaataattatatggttgctgcaagccttcacgtgtttttgttgcctctacctactaagaataaatcaagtagcagcaaacaggggcaacctgctaccttcggcgtgtgttttacttatcatatagtgtgtctatgtatgacacagtatgagggatgatgtactgtctcatctctggatgcatcataacgaactaatcaacggttagcagcaaaaaaaaaaaaaaaaaggggcggcc

SEQ ID NO: 127390 - DNA, 454 bp, Zea mays
  Clone ID: MRT4577_47644C.1
cgaagttaagccaccatgtggacgatggctttagcgacggtgctgctgttcgtggcaagcgccgcgctgctcggcgtcggcggcgccagcgcgcagcatggcgtgtggagcatcatcactcgtcccatgttccagagcatgctgagccaccgcggcgacagttgtgtcaggggcgccttctacacctacgacgcgttcatcgaggccgtcagcaagttccccggcttcggcaccaccggagacgatgctactcgcatgctgatgctcgccgactttttcagccagacgtaccacgaaaccaccgttggatgtgcgactgctcctgtgggaccgttggcctggggatactgccgggttaaggaacataacccgacggacccaccctactttggactaggacccatacagctaactcatgagtacaactacatgctcgccgggcaagcgctgaacc

SEQ ID NO: 127391 - DNA, 449 bp, Zea mays
  unsure (1)..(449): unsure at all n locations
  Clone ID: MRT4577_47645C.1
gaataacggggccgaccgacgcgtcctgtggactattgctttagcgactttgctgtttttggtcgnggcangcgccgggctgctctggttctgtttctccagctctcagcatttcttgtggagcatcatcacccggcccatgttccatatcatgctgagccaccgcggcgacagcgggtgccagggcgccttctacacctacgactccttcatcgaggccgccagcaagttccccgtcttctgcaccaccgtctacgagcagacgcgcatgctgtagctcgccgccttcttcggccagacgtcccactaaaccaccgttggatgggcgactgctccgggtggaccgtttgcctggggatactgccgggtgaaggaacagaacccgactgacccaccctactatggacgatgacccatacagcttactcatgagtacaactacatgctcg

SEQ ID NO: 127392 - DNA, 385 bp, Zea mays
  Clone ID: MRT4577_47646C.1
agccgggatcctggagagcggacgcccgccgcccttttattaaatagtaagtgtttaatttttaaagggggaaactggaacactccaaacaggtgaggggcactttatttacttatttggggggccccgccggacaagggggtacaggtaagtatacatgccgcaggaccctagctagcaagagtgaaattgaagctgctgaaggaaagcccgattgcgaggaggaaagtggggaatccaagctgattcttgtccacctctagcaggtagcagggggtttttcagctggaacccaccgatgacggccgccggcgcttggcccggccctggacaaaaccgaggcaagccggggtggcgttcacctgggccaagggagttgcccccc

SEQ ID NO: 127393 - DNA, 125 bp, Zea mays
  Clone ID: MRT4577_47647C.1
catttgtttcgatcgccaatggaggagatcattcctcacccccatctccagcgtactcgacgaccttgcaatcgtcgccgtcatggtgatggtgctgccatcgacgacaggcggctgccgggtct

SEQ ID NO: 127394 - DNA, 517 bp, Zea mays
  Clone ID: MRT4577_47648C.1
gtggacgagggctttagcgacggtgctgttcgtggcaggcgccgcgctgctcggcgtcggcgtcggcggcgccagcgcgcagcagggcgtgtggagcatcatcactcgtcccatgttccagagcatgctgagccaccgcggcgatagcgggtgccagggcgccttctacacctacgacgccttcatcgaggacgccagcaagttccccggattcggaaccaccggagacgagcagacgcgcaggcgggagctcgccgacttcttcggacagacgtgccacgaaaccaccggtggatgggcgactgctccgggtggaccgattgtcttttatactgccgggcgaaggaacagaacccgacggacccaccctactatggacgaggacccatacagctaactcatgagaacaactacaggatcgacgggaaagcgatgaacctgaaccatgagggaaacccggaactggtggtgagcgaccccgaggtaaacttcaagacggacatctgattatggatga

SEQ ID NO: 127395 - DNA, 399 bp, Zea mays
  unsure (1)..(399): unsure at all n locations
  Clone ID: MRT4577_47649C.1
aaaaangggccgacccacgcgtcggcttagcgaggtgctgttatggctgttttgagctgttcgcagggccaacagcgccagccggagacggcgtgtggagcatcatcacccgaccatgttcacacatgctagccaccacagcacagcaggtgccagggcgccttctacacctacgacaccttcatagaggccgccagcaagatacccggcttcggaaccaccggcgacgagcagacgcgcaggcgggagctcgccgccttctttggccagacatcccacgaaaccaccggtggatgggcgactgctccggatggaccgattgcctggggatactgcccggtgaaggaacagaaacagacggacccaccctactatggacaaggacccatacagttaact

SEQ ID NO: 127396 - DNA, 433 bp, Zea mays
  Clone ID: MRT4577_4764C.1
ccccggacgcgtgggcggacacatgggcggacccctggcctcgtttatactttcaaattaccgacatggctcccgggattgggtgattcttgtgttactcgccgtgtcctcacccacggctctggccacctccgatgtgatacagatgctggccgacaagcccacgtactccacgttcctgaagctcctgcatgacaccaaggtagtggacgaggcaaatcaactccggacggcaacgctactggccgatcctgacaaacttgccaagcctatggcctcgctgcccgcctataaagagcggacggccgaggagaaccacgttcttctcacatactacgaccccaataagctggaccagatgaagacacgcaccggcatactgcccacgctgctttacctcaccgacaagaaactcggcctcctcaactacacc

SEQ ID NO: 127397 - DNA, 1089 bp, Zea mays
  unsure (1)..(1089): unsure at all n locations
  Clone ID: MRT4577_47650C.1
gtaccctcgagacctgccggggtggagtgggagagcgcgaagttaagccaccatgtggacgagggctttagcgacggtgctgttcgtggtcgtggcaggcgccgcgctgctcggcgtcggcggcgccagcgcgcagcagggcgtgtggagcatcatcacccggcccatgttccagagcatgctgagccaccgcggcgacagcgggtgccagggcgccttctacacctacgacgccttcatcgaggccgccagcaagttccccggcttcggcaccaccggcgacgagcagacgcgcaggcgggagctcgccgccttcttcggccagacgtcccacgaaaccaccggtggatgggcgactgctccgggtggaccgtttgcctggggatactgccgggtgaaggaacagaacccgacggacccaccctactatggacgaggacccatacagctaactcatgagtacaactacaggctcgccgggcaagcgctgaacctgaacctggtgggcaacccggacctggtggcgagcgaccccgtggtagccttcaagacggccatctggttctggatgacgccgcagtcgcccaagccgtcgtgccacgccgtgatgaccggcgcctggacgccgtccgccaccgaccgcgccgccgggaggctccccggatatggcctcacctcgaacatcatcaacggcgggctagagtgcggcaagggccagtccaccgacggcgccaaggaccgggtcggctactacaagaggtactgcgatatgctccgggtggggtacggggacaacgtgccctgcaaggaccagaagccttacggaggatgaggacgtacgtggacaacaataattatatggttgctgcaagccttcacgtgtttttgttgcctctctacctactaagaataaatcaagctagcagcaaacaggggcaacctgctaccttcggcgtgtgttttacttatcatatagtgtgtctatgtatggcacagtatgaggggtgatgtactgtctcatctctggatgcatcataacgaactaatcaacggttagcagcattcaaaaaaaaanananananagaaaa

SEQ ID NO: 127398 - DNA, 1408 bp, Zea mays
  Clone ID: MRT4577_47651C.1
ttgggtacctcgaggccggccggggtcaacctgccgggtgcggccgggctagtagctttttcttctgcatgccggaacgcagacggcaagaccaatccgagtggtagcgcctgctaatttggaaatgctttgtggacaactacttccatctatccagcagctcaggaaatatttaccgtacgtagctccatcacccgcggctccgccttgttgttatataaattagattataaggcacggcccgagagtggagtgggagagcgcgaagttaagccaccatgtggacgagggctttagcgacggtgctgttcgtggcaggcgccgcgctgctcggcgtcggcgtcggcggcgccagcgcgcagcagggcgtgtggagcatcatcactcgtcccatgttccagagcatgctgagccaccgcggcgatagcgggtgccagggcgccttctacacctacgacgccttcatcgaggccgccagcaagttccccggcttcggcaccaccggcgacgagcagacgcgcaggcgggagctcgccgccttcttcggccagacgtcccacgaaaccaccggtggatgggcgactgctccgggtggaccgtttgcctggggatactgccgggtgaaggaacagaacccgacggacccaccctactatggacgaggacccatacagctaactcatgagtacaactacaggctcgccgggcaagcgctgaacctgaacctggtgggcaacccggacctggtggcgagcgaccccgtggtagccttcaagacggccatctggttctggatgacgccgcagtcgcccaagccgtcgtgccacgccgtgatgaccggcgcctggacgccgtccgccaccgaccgcgccgccgggaggctccccggatatggcctcacctcgaacatcatcaacggcgggctagagtgcggcaagggccagtccaccgacggcgccaaggaccgggtcggctactacaagaggtactgcgatatgctccgggtggggtacggggacaacgtgccctgcaaggaccagaagccttacggaggatgaggacgtacgtggacaacaataattatatggttgctgcaagccttcacgtgtttttgttgcctctacctactaagaataaatcaagtagcagcaaacaggggcaacctgctaccttcggcgtgtgttttacttatcatatagtgtgtctatgtatgacacagtatgagggatgatgtactgtctcatctctggatgcatcataacgaactaatcaacggttagcagcattcacctttacgtttccagtggttccacttggcatttaatttatgacaccagtgaacaaatgaaaggaactatatatacatgactaaaaaaaaaaaaaaagggcggccgccaccgcggtggag

SEQ ID NO: 127399 - DNA, 530 bp, Zea mays
  Clone ID: MRT4577_47652C.1
cgcaggggctcagtcaatccgatgtaggcacgccacacagctctccaggttgatgcacacagaagatggaatcgagctcaccatgaatgtaggacgcgctcaagtaattagtgcttcagtgtgcgccatagaaatggcgacacgatggcgcgtgcatgggaggaagcgccttaccttgcttggcgggggaggctaacgaagaatacgagtgcttccggtctgtagcaaacaagggccaatgtgcgttatacactgccgaaggggcacggttcgaggcgccgttgaactaacttagcaccgctggattcatggagctcctgcagatgccacaaggaagagatcagatcatatggcggggatggcactgaaatgatcacactgacctgcaactccttggaaatggacatccctatgttgtctctcatgagaggaacctaacccaatctagaacatgcgcttcttagcaccatggacatgtcatgccactgtgccagctacatggcaacggataccggactatgccacacata

SEQ ID NO: 127400 - DNA, 364 bp, Zea mays
  unsure (1)..(364): unsure at all n locations
  Clone ID: MRT4577_47653C.1
gccggccgggttcggatctgacggtgacgaactcgaattttccgtacttggagtagaggncggcagcaagcggcggtagagcgagaggtcgattttaccccagcagcactctgttggcgatcctagttctccaggcccttctggtctctgcggccgcgcccaaaggacctgcagggccgacgacgaagaacccgcgctggcgcggcgagcgcaccagctggtcgcgcgtgtggacctgcgacgaccccctcaccaagcgcgccgccacctgccccacctgcctccccccgcccacccaccacgccgccatcacgtaaacggcccccctactacccctacttttttttttactcccccccccccc

SEQ ID NO: 127401 - DNA, 1364 bp, Zea mays
  Clone ID: MRT4577_47654C.1
attgggtacctcgaggccggccgggctcgggtctgcatatcttccacaaaatgcagctagctttcccttgtcacctgccgggtgccgggtgcggccgggctagtagctttttcttctgcatgccggaacgcagacggcaaagaccaatccgagtggtagcgcctgctaatttgccacatggaaatgctttgtggacaactacttccatctatccagcagctcaggaaatatttaccgtacgtagctgctccatcacccgcggctccgccttgttgttgttatataaattagattagaaggcacgggccgagagtggagtgggagagcgcgaagttaagccaccatgtggacgagggctttagcgacggtgctgctgttcgtggcaggcgccgcgctgctcggcgtcggcggcgccagcgcgcagcagggcgtgtggagcatcatcactcgtcccatgttccagagcatgctgagccaccgcggcgacagcgggtgccagggcgccttctacacctacgacgcgttcatcgaggccgccagcaagttccccggcttcggcaccaccggcgacgagcagacgcgcaggcgggagctcgccgccttcttcggccagacgtcccacgaaaccaccggtggatgggcgactgctcctggtggaccgtttgcctggggatactgccgggtgaaggaacagaacccgacggacccaccctactatggacgaggacccatacagctaactcatgagtacaactacaggctcgccgggcaagcgctgaacctgaacctggtgggcaacccggacctggtggcgagcgaccccgtggtagccttcaagacggccatctggttctggatgacgccgcagtcgcccaagccgtcgtgccacgccgtgatgaccggcgcctggacgccgtccgccaccgaccgcgccgccgggaggctccccggatatggcctcacctcgaacatcatcaacggcgggctagagtgcggcaagggccagtccaccgacggcgccaaggaccgggtcggctactacaagaggtactgcgatatgctccgggtggggtacggggacaacgtgccctgcaaggaccagaagccttacggaggatgaggacgtacgtggacaacaataattatatggttgctgcaagccttcacgtgtttttgttgcctctctaccaactaagaataaatcaagctagcagcaaacaggggcaacctgctaccttcggcatgtgtctacttatcatatagtgtgtctatgtatggcacagtatctcatctctggatgcatgataacgaactaatcaacggttagcagcattcacctttacgttttccggtggttccacttt

SEQ ID NO: 127402 - DNA, 217 bp, Zea mays
  Clone ID: MRT4577_47655C.1
tggggacgaaagcagcgcgtaagtcttatccctagacgctaggaattaagaagccacaccggtgcggcccggactccgcttcgctgcgggagatccgcatatacaagaatagcaggaagctgctgatccgtaagtctgcgatcgagcgcctggagctccagatcggggaggacttcaagacggacctaagcttccaggcctccgccgtcgccgcgct

SEQ ID NO: 127403 - DNA, 171 bp, Zea mays
  Clone ID: MRT4577_47656C.1
cttacgcgtcgaagtcaaacccttctcagcagccgtcgtggtcaccgttggagcgcgtattcaaaaccaaatcgtagtgatagcatgcgacatgttcatgtagaccgtaggagaaaaaaccatgactttgaacgggcggcgactggcaaaattcttcgtcgtcgtgtgagg

SEQ ID NO: 127404 - DNA, 425 bp, Zea mays
  Clone ID: MRT4577_47657C.1
accacgcgtaccgcaacaggcccttgaagctcgacactcggactgagactgacagtctaggggcgaatggtgctgggtgtggaacttatcctctcattcccttgctttgaagggtaaggggctagggcgggccgaactgcacaacgagcgggcgccaggcggacgacgaagcgacgaggcagacactccggagagaatgtcgtcggcactaggaagtggcttgtactgagcctccccgtgtcgaggtcggattcgctcggaaaacttggccctgccttcagcatccgcgccggctgcagcgtgggtcttgacttctgactcataggacgtgcactcatcggagctggattccttggtttacaattgaagattggagcttgaactggatgtggaataagaataggttctggttacggcttttgaaa

SEQ ID NO: 127405 - DNA, 513 bp, Zea mays
  Clone ID: MRT4577_47658C.1
gcaaaagctgaacttcatgagatcgtaaagggtgggcattatcgggtaattttacaccaacaggtacaagatcctctatcagctacacaatttgtctggagcttgagaagctctgatcaacgaatacgctatttacatacaatacagccccactttcttccgcaacgcctgcgctattttggccttgggattaatcaagctgtctcacattttatttacctcttttggaagttgaatatcttgagcgagaggccaaagagcaaggcaaagagcacaggaaacgcgaccaccaccacagcgaccacccacagcaagtcgtgatggtacccaaagtagtcctcaacgaagtcagctatacgcaccccaccgtcactgaacgtctcggatacatctccaaactgtgaagtgaccagcccgttgagcgtccatgcgatggggcaaatccagtagaaccatctccaccagactggaattctagttcttggtattaagaatcccgagaagaggttccag

SEQ ID NO: 127406 - DNA, 121 bp, Zea mays
  Clone ID: MRT4577_47659C.1
aaatttagaaacaaattttatttaagatctgaaatacaattcctaaaatatcaacttttccagaaaaccgtggctacacaataatgcattgcctctatcatgttagaacgtgcattagact

SEQ ID NO: 127407 - DNA, 247 bp, Zea mays
  Clone ID: MRT4577_4765C.1
agatcgatgcaaactatatgagcaagaaaggtgggacgatctaggtgggatcatgaacggcctcgtgcggtcgaagaccagcaactgcggcgccaatggcggaccaccggggaagcgcctgcagcgacggctggggctaggcgagtgcaacaaggcagtgcttgggaccaagtacctgggtagtgtcgtcggtcgctaggtatcggagcgtcggttaggagctgtggagcgccgacctgtacaagct

SEQ ID NO: 127408 - DNA, 284 bp, Zea mays
  unsure (1)..(284): unsure at all n locations
  Clone ID: MRT4577_47660C.1
cccacgcgtccgatggtagtagcaccctctgttggctaacgacatngtcccaaatagccctgttttcttgttgggaatattgctctttaactggtgggttggcccggccctctcgggaatagggaggatttgcaccccccgcggggggagaaaaaaaaaaaaaaacccgcgcggggggggtttttttttttttttttttttggggagagggggggggggggggaaataaaaaagagggggggggggggggcgccgcccctcctccccctttttttttttttttt

SEQ ID NO: 127409 - DNA, 795 bp, Zea mays
  Clone ID: MRT4577_47661C.1
ggttcgccggtatcggcttgtgctaatgtcatagatcacctactaggagcttaagtcgactagacttgactcgagaatagaatcgaagagaagcgaagcctcgccaagataaatacaaccctatggctatggtatggcactcactgcaatgacacgaccaggtctatagaaaagttgatacagatctcatacaggtaaggttccgcacttttctaagtaactactagctccggatgcatctttctcattgactgctttcttcaaatcaaagtaggacgaacaaggaaatggaactggtcaatgcatttctaactaacaattgaccctattcctcgaatggcgcgtagagtggagtattgacttgccttgaaaggattggttcccatctttttctaacctcgggcaatagctgcttcccggcacttcttaacccattcccccttgctgacttctaccgttgcactctccttttggcacctaatctaggttttttttatgacattgatctcaaaccgccacatattgatagaattgttcaacaagtgccgcttctgaatttgtctcaaattaccggaacagaatgtcaaagccagtagtttgaactgccagtggagtgccgttgtttcgaagttgttgactattgtccagctatcaaattagtgtagacagaagcactgtttgagccttgtcgagaatccgttctggcacttattgtctatagcaaagtgaaggaatagaatgatcatcctgctcctatttaaacagaattccatggaaagtgtagcaagccgattc

SEQ ID NO: 127410 - DNA, 955 bp, Zea mays
  Clone ID: MRT4577_47662C.1
cattgggtacctcagcaaaccaggtcctcgctcggtttggtgcgcttaccactccgtcctagcagcacggtcctcgattcttccgatcgctccggcagggcacacaccgatcccctcgtcaccggaggtggttaattagcggcttagcgccgccgaagaagggatggcagcagccaccacgcctgaggaggacgccgcctccgcggctgccgtggacgccatcactgagacgaccaatcgcttcaccgtcaacacggacgccgccggtgccgatgctggtcctctcaagctcgacgacgtggacggaaacgtctacagctgcaagcgctgcgggacgctcctcgccgtcgccgacgacatcgtctccaagagcttccattgcaagaacgggaaggcttacctcttcgataatgttgtcaatgtaaccgttggagagaaagaagaccgcatgacgatcacagggatgtattccgtttctgatattttttgtgttggctgcggagagattgttggatggaaatacgaggctgcacatgagaggagccagaaatacaaggaaggaaaatttgttctcgagaggtaccagttgcttggagcagaatgaagacttgaccgccgagtgctatacacggtgctcggtggctggctggaagagagactagtgatgcatactgcatataactttcttaccgtgtggatatatgaattttaatacgattcgacaagcttaaactcgtctgtggaccctgtaataaccgatccctcctgccatgttcttgaggccgggtgctgtgacttcatatatacattaattatgtatgtatagacatggatgtttgttgtatgtatgtgtagaccgtactagttgtgtgattgtgtcaagttctatggcgatgatgtggatgcgtgtatgtatatgtgtatgtctatttttgttttcgcccttgcccttccc

SEQ ID NO: 127411 - DNA, 428 bp, Zea mays
  Clone ID: MRT4577_47663C.1
gggctgaccgattttgaaaatcaattaacatatgaagtcacagcacccggcctcaagaacatggcaggaggggtcggttattacagggtccacagacgagtttaagcttgtcgaatcgtattaaaattcatatatccacacggtaagaaagttatatgcagtatgcatcactagtctctcttccagccagccaccgagcaccgtgtatagcactcggcggtcaagtcttcattctgctccaagcaactggtacctgcttaagattgaaatttcgtttactaataaagtgaaccataggctctaaacaagtcgtaatatatgatttactatagatcatgaaacacaggatatcagatatatatatgatcacctctcgagaacaaattttccttccttgtatttctggctcctctcatgtgcagcctcct

SEQ ID NO: 127412 - DNA, 213 bp, Zea mays
  Clone ID: MRT4577_47664C.1
gccagcctagcaattaaacccaccgcactcttataggagcaccagccaccctacattcgctgcgcaggcgttatcgccaccctggtgctcgtcgtgcccgaaaccaaacaccaaaacccgctcatgatattgggagaacaaagcctagcatcaaccgaaaaagatagcaaatccctccataacctatgtcctgccggaaccgcaacattggac

SEQ ID NO: 127413 - DNA, 386 bp, Zea mays
  Clone ID: MRT4577_47665C.1
ataaaagggcattgccagacccagcgcgaggccaacgcaagggcgggcgccagggcaaccaaccccaaaaaaaacaggggggaacccgccgggccgcccaccggcccccgcccgaaaaaccggcctaaaaaaagacggaaaccacggaaaaaccacctgtgaacaccaaatgttaggacagacaaaaaggaccgccaacaaacaggggaagaaaaaagagggggggctggaaccccaaaagaaaaaggacgtgacgagcgacgggccccgccgggtgggaccgagtattaccgtcgggccgaaccacacggacgaccaaacagaaaaaacgggggaccgaaacaacaaccaagggggggtagacttagctgggggccgccaaagcg

SEQ ID NO: 127414 - DNA, 296 bp, Zea mays
  Clone ID: MRT4577_47666C.1
aatattattgtttttttgcccagtaacttcacgctcatggggtccgggctgggctacacctgctggcccgccgccggggggccaaccaccgagtactgggcgcccgacccaaaagggcggcccacgccccggggaagggggcggagaccaacacggactcgcagggtttggcgaaccgggacccgtcccgctgcggcttctaagaatgggacaaccccaggcccggcgggccaggcccccggtgagcgtgaggctggtgcgggcaaagcccccccggggggttcgggccgcggggg

SEQ ID NO: 127415 - DNA, 221 bp, Zea mays
  Clone ID: MRT4577_47667C.1
gttttgttttttcgaggccacggagagaaaccggtccgccgattgcacggagctcgagctttgccgagtacttcatatcggatacaccggcaatcgggttcggcaggatgaacatcttcagccggcaggcaagaagaggcccggggaagaataacgaccctgagcgccatcctctggatcttctcggggactaagaccacgttccacctttccgtgttgct

SEQ ID NO: 127416 - DNA, 858 bp, Zea mays
  Clone ID: MRT4577_47668C.1
ccacgcgtccgcggtacgcttgggagcgctgcatgtgttagattagtaagttgttttggaaatccctagaatcaaggagagttgttttggaaatccctagaatcaaggagaaccttctccatgttggttgggccattggctatatatacttgtaagcacttgacaatcaattaggcaagaattatattcttaatttctctctctctgagttaagcctaattttttcttatcctaaatatttttttcttaattaggcaagaattttttcttaattaggcaagaattatattcttaattaggcaagaattttttcttaattaggcaagaattatattcttaattagccaaattttttcttatcctaaataattttttcttatcctaaccaagcaaatcaatctaatttattattttttttcatcctaacggctccacttgccataacacttttattatgtatctacacatagttcatgtctagatgcaaaaaaaaaaatgtacttaaaaaagttaggacttatagtttggaacgggagagtagaataaaatctatggtcttctaagtgcatcgatgggcaactctcaattttctcgtctcgaaacttgaccataaaagtttaatcatgtgtacaattcttagttcttacctaggaacattaaattgacaaaatctggcaatatacttctcagtttttccagtgaagtgtcttttagtcatgaagttaccaaataatgtgcttaactaccaaaaatcataaaaatgaaaccctttgttgtagtattcagtgtcatttaccaggtcaactgtcttattggccttaaaaatggagagctctataaagtggaaccaaatatgtc

SEQ ID NO: 127417 - DNA, 305 bp, Zea mays
  unsure (1)..(305): unsure at all n locations
  Clone ID: MRT4577_47669C.1
cctggtatctggcgtttggttttagtccatagtccgcgtccgcgaggcaggggtggggtcttagccgtatgcgcccctggcccttagcgagccgtggcgagccgtcaatcgcacatcgttctcgccgcgccacctggctggcgtntactggccgcgtgggacctggcgatggtaccgatgcccagcttcgggcctcgtggagtgtcctcgtgcccggccgtgcacgcatgccgggtgcgcgcttcgccgncgttcggcctgggcgctgctgtgcctncccccacttcccacttcccagtcccagc

SEQ ID NO: 127418 - DNA, 558 bp, Zea mays
  Clone ID: MRT4577_4766C.1
ggtggctggttccgcctctggttcgacccctccgtgctggtcgcgccgctcaccaggtgcttcgccgagcggatgacgctctcctacgacgccgacgccgacgactaccgcaacgcgcccggcgtcgagcaccagggtctccgacttcggctccacctccaccctccgctacctcgaccccaatctcaagtacccaaagcaaccatttccattcgctcagctatatatgctacggtgagttccaagcgtcgtcagtcgcggtgacgtgacctgacgacgaacaatcgacgcgtgctacgtgcaggctcctcacggggtacatgaacactctggcgagcacgctggaggaggccggctacgaggaaggccgcgacctgttcggcgcgccgtacgacttccggtacgggctggccgggccggggcacccgtcgcaggtgggcagcgcgtacctgcagcgcctcaggctgctggtggagtcggcgtgcgcggccagcggcggaaggcccgcgatcctggtggcgcacagcctgtgcggcctcttcgcgctgcagctgctgg

SEQ ID NO: 127419 - DNA, 142 bp, Zea mays
  Clone ID: MRT4577_47670C.1
tttttgattaaatcgctctccctgctggtcacttggtcaggagatggcagagaaagtctatatttcattccaccaaatttcacagtggtcaaaagcgttatagtgaagagatgacaaacacctgcgttcttgtttcatgcag

SEQ ID NO: 127420 - DNA, 120 bp, Zea mays
  Clone ID: MRT4577_47671C.1
cgtccgaattcccggtcgacagcgtcggcgcctcgcgtcactccatgccaggcgcctgtcggcccggcaccctggcccggcgccttgcgggaccctggtgagccgcggcgcgctgcgtcg

SEQ ID NO: 127421 - DNA, 294 bp, Zea mays
  Clone ID: MRT4577_47672C.1
ggtaccgacccctatgcatatgcccctgtcctacctactagccctcaaggaggctgtgaggtattggtacgagtgggccgtgtgggccgtgttgatggagatgatgctccaagagcgtggttattgggtggtgttgatcgacgacaacaacactaatgaaatgatggcaaagccgcataggatgccatcctttgtgcggtgcactcggagctattgtgcccccttgcaaagaagacgatgaagcgcgccttggatgctatcaagaacatgtgcgttggctctgatcgcaccccc

SEQ ID NO: 127422 - DNA, 645 bp, Zea mays
  unsure (1)..(645): unsure at all n locations
  Clone ID: MRT4577_47673C.1
ggcaaatcatttatttcactctgcaaaacagtgtcaaccagtgtagatgtcatatttacacgatccaccgaagacggccttacaacaataacgatgtccctcgccacatcgtagttcccaagcccctgggcgagcacgaacatgtcgtgcctatgaaggtgcattgtgttggagtcaccctgccatattgccatgctctggaacaccacctccatcacagcgtcgtgccggaaccggccaccacgctaccatcgccctggtcgtcttctccaactcctcgagtcatgttggcatcatgggctcagggcacgattggtgaagttgaaaattttcggtggcccatcaacaaactcgaccaccacggtgtcgtcatagtccaggctgcttctgttgtagtaccaggcatccaatatttgggtatctagttgaaagtttaggtcgggccatttccgctaacaagaacactacacaaaaacaactgggtggtcttgatggcgnggtgtggcgacgatggtggtacaaatggtatttttggtgcacatggtcatgaaaaagtgaggcantatccgcttatataagaaggccgagcccaccggcactttacaccattcacagcagcacaaaactataaacctggaataacac

SEQ ID NO: 127423 - DNA, 181 bp, Zea mays
  Clone ID: MRT4577_47674C.1
tgaatttcagagacacaacatgcggaaacgtctgactacacacatattcctggattgggttgaactccaccatggtcgacacaggtatggtgctcgagctacttcatatggtctaagaataaatctgcttacgtggctgcccgctagagattgaacaaataccataaggatccttccagct

SEQ ID NO: 127424 - DNA, 1387 bp, Zea mays
  Clone ID: MRT4577_47675C.1
cgttcccctccatggccgccggcgcggttcagcagtccatcctcctgacgccacctgcaacggcgccaggcgatgatccattccaactcgcgtatgttatatttcgtaggggcattggattggaccgcactagcaactttttcttcatggagaaagtggacatgatcatagctcgtgcatggcgaaggttccttgagaagacgagactgcaaaagctgttctcaagaaagaaaaatagtaagccaaagatagattccaagaagaatgatgatttagctagtgaaatagaagacaaggagctttatgttgaacgcatacgtcttgaaacaatggatttaagctttgggaatttatttggcaaggtcacaattcaagagcctacatttgaagaggtgattgtcttgtataggagaaaaagtccaaagggccaggatgatagggcaattcatgtaaagcacttcaaaaatatcccaatggcagacatggagttggttctgcctgagaagaaaaacccgagcctcacacctatggactgggttcaatttattgtttctgttgtcattggacttgttacactcatcagttcactggaaatgcctaaagctgatttctgggttgtaattgcaatcctctctgcactggcaggatattgcgcgaagatctatttctcgtttcaacagaatatggcaacctaccaaaacttaatcactcaatcaatgtatgacaaacaactagatagtgggaaaggcacactcctccacctctgtgatgatgtgattcaacaggaggtcaaggaggtcataattgcctactacattttgatggagaatggaaaggctaccagtgatgatcttgacttgcaatgcgaggagttaatccaggaagagtttggcttgcaatgcaattttgaggtgatggatgcagttcagaagctggagaggcttggtgtcattacaagagactctattggaaggatttgctgtgtccctctaaagcgtgccaatgagatcatcggcgcgaccacggaagaactggttatgaaagccaggcaaagctagcaatctattattttgaacaatgtagccgcattgtagattcttgcctgatggcgctgtaacgtttatggttactccagaaagtccaaacactgaactcttgcacaccaggagataagtacattctggtcatctccacagtagttctgggagagctacaagaaaatgtggttgtatttattttttttatttttttggtggggggtactatggtttgtggaacgtcgtcgagggtgttgtaagcatctagcattcttttgataacaagcgtggtaggaaggatgtttgaagaacacatacaagggctattatgttgctggattgatgctgtg

SEQ ID NO: 127425 - DNA, 392 bp, Zea mays
  unsure (1)..(392): unsure at all n locations
  Clone ID: MRT4577_47676C.1
ccttccctgttcagttgtgtcttttttcgggtgcattgctcttttgttgcgttcgctctcaccgantgttctataaccccccacgaaaagcaaacccccgtgtttaaggacacgcccggcgggggggtcccccaaccctggaaaggggcggggcccggggtctgatcggggggggttttaaaaccccctccaaggccgggggcctgtctaggggctttagatcccccccccgggccccccgcgggggcgcccgggtgtgacaccgggacgggccccctaggcgaaccccccggggggggaatcgcataccggccgggccctggaggggggggcaggaagagctttccccccccacctggggacaaaaggccccccaagaggggccccccccg

SEQ ID NO: 127426 - DNA, 2309 bp, Zea mays
  Clone ID: MRT4577_47677C.1
attgggtacctcgaggccggccggacggacgacactgtgcggatctgtaaccgtggtgcgtttccacttcctccccagctcatccgcgacagagcaattagtccattgcacacctccactcctcacccttcaatctttcgttcccaactgcgtttcctcctccgcgtcttcaaggaggggagacctgaaacgaatccagtccaggctggtggctgccggcgctggacctgaacgctggtgcatactgcgtaggcaagagcaggcaatggcggaggcgaatgcggggaaggagaagaaggaagtggtgcggctggagcgcgagtccgtgatccccatcatgaagcccaagctcaccatgaagctcgcctacctcatcgaacatcagtctgacagagaagaattcttgaagctctgcaggagggttgagtacaccataagggcttggtaccatctccagtttgatgatatgatggaactgttcgctctcttcgatcctgtgcatggtgctaaaaaactcgagcagcagaacttcctacctgaggaaatcgacacgcttgagcagaacttcctgtcctatttctttcgggtgatggaaaagagcaattttaacatagtaaatgacgatgaggttgaacttgctcattctggacaatatctgttgaatcttcccattaaagttgatgaatcaaagttagatgacaaacttctgtcgaagtattttaaggagcaccgtcatgaaaacctgcccgacttctcagacaagtatgttatatttcgtaggggcattggattggaccgcactagcaactttttcttcatggagaaagtggacatgatcatagctcgtgcatggcgaaggttccttgagaagacgagactgcaaaagctgttctcaagaaagaaaaatagtaagccaaagatagattccaagaagaatgatgatttagctagtgaaatagaagacaaggagctttatgttgaacgcatacgtcttgaaacaatggatttaagctttgggaatttatttggcaaggtcacaattcaagagcctacatttgaagaggtgattgtcttgtataggagaaaaagtccaaagggccaggatgatagggcaattcatgtaaagcacttcaaaaatatcccaatggcagacatggagttggttctgcctgagaagaaaaacccgagcctcacacctatggactgggttcaatttattgtttctgttgtcattggacttgttacactcatcagttcactggaaatgcctaaagctgatttctgggttgtaattgcaatcctctctgcactggcaggatattgcgcgaagatctatttctcgtttcaacagaatatggcaacctaccaaaacttaatcactcaatcaatgtatgacaaacaactagatagtgggaaaggcacactcctccacctctgtgatgatgtgattcaacaggaggtcaaggaggtcataattgcctactacattttgatggagaatggaaaggctaccagtgatgatcttgacttgcaatgcgaggagttaatccaggaagagtttggcttgcaatgcaattttgaggtgatggatgcagttcagaagctggagaggcttggtgtcattacaagagtgagttctcacttgtttctttttcttctcatggtgccacctgatcagagcatagggacgttttcttacagatacagtgcacagaataacgatttttgcagacacgtttacagggccagaagtttttgcatctactgaccatcatgttgtcacgtattgttctctgcttctttttttctttttctttctgcccaatactgaaggccgttttgcatccaggactctattggaaggatttgctgtgtccctctaaagcgtgccaatgagatcatcggcgcgaccacggaagaactggttatgaaagccaggcaaagctagcaatctattattttgaacaatgtagccgcattgtagattcttgcctgatggcgctgtaacgtttatggttactccagaaagtccaaacactgaactcttgcacaccaggagataagtacattctggtcatctccacagtagttctgggagagctacaagaaaatgtggttgtatttatttttttttatttttttggtggggggtactatggtttgtggaacgtcgtcgagggtgttgtaagcatgtagcattcttttgataacaagcgtggtaggaaggatgtttgaagaacacatacaagggctattatgttgctggattgatgctgtgaaccatgtattcttttcgtcagaacaaaaaa

SEQ ID NO: 127427 - DNA, 375 bp, Zea mays
  Clone ID: MRT4577_47678C.1
gtgggaaggaggctgtcgatggcaccgctgcctcctgcacgatctgcctggggtgtcggcaagggcaatatggcatgtcagtatggcacacgaggagaggaggctctcggggctccaagaggccgacggccggccggccgggcatcgtctcgtcgcggcgtcgtagatacatgccgcaccggttcttgcttgcacagcctgctgcatgcatgacaggggcggcggaactagaactggcctgttcatcggtgccaggtgacatttttttttttgcaaaatcagtgagctttgatgtgcctgatgcacgagcggtcattcacaacaccaggtcggtcgcttgaagagtttcctgatgaagaacgaaggatacacacc

SEQ ID NO: 127428 - DNA, 2008 bp, Zea mays
  Clone ID: MRT4577_47679C.1
aaaaaaaaaaaaaaaaaaaaaaaaaaaaaaaaaaaacgagaaaaaaaagaaaacagaggcgacaggccaatgggtttccgcggtggtttgaggccgcccgtgacgcgcgtctgcttcgtcctcctgtgcctgtgcgcctcgttgtccgaagccaagaggacgccgcagcctgcgcctactacgggcaagaagcagcagccaccggcagcgtcgtcgtcccagcagagcccagcggtctcgtatccggctctccccgtccgggcggtgtgcctcggcggttggctcgtcaccgagggctggattctgccctccctcttcgacggcatccccaacaaagacctcctggatggcacgcagctgcagttcaagtcggcgctgcggaagacgtacctgaccgcggacaacggcggcggcggcgccgtcgtggccaaccgcacgcaggcctccgactgggagacgttcaagctgtggaggctgaacgacacgacgttcaacttccgcacgtccggcaaccagttcgtgggcatcggcgccagcgacggcatcatcgtcgcgacggccaccacgccgggcctgccggagacgttccagatagtgcggtgccccttcgacaagaacagggtccggatcaaggcggcgaacggctacttcgtccaggcgatagcgaccggcgaagtgatagcggactacggcgagcccacgcggtggtccgacttcgacgcgtcagtgttcctgatgaccaccgtcgggcagcagctgcaaggggagtaccagctctgcaacggctacggcgccgacaaggccgcgccgctgctgagggagcattggagcacgtacatagtggaggacgacttcaagttctttgcgtcgagtgggctgaccgcagtgaggatccccgtcggatggtggatcgccagcgaccccagcccgcccgctccgtacgtcggaggctccctccaagccctggacaacgccttcagatgggcagagaagcacgagctgggtgtcatcgtcgacctgcacgcagctcccgggtcgcagaacccctgggagcacagctcgtcccgagacggcacgcaggagtggggaaccacggacgccagcatcgcgcagacggtgcaggtcatagatttcctcgcgtccaggtacgcgacgagcccgaggctgctggcggtggagctgctgaacgagccgctggcgcctggagcgaccctggacagcctcaccaggtactaccgcgacgggtacgccgccgtccggaagcacgcgccggcggcctacgtggtcatgtccaaccgcctgtcgtcggggaactccacggagctcctctggttcgccggccgtgggttcccgggcgccgtcgtcgacgtgcattactacaccgtcttcaacagcttgttcggtaacttcaccgcgcagcagaacatcgacttcgtccggactaacttctccggcgagctcgccgccgtcaccacccgagatggcccgctcaccttcgtcggcgagtgggttgcggagtggaaggtgccgaacgcgaccaaggaggaataccagaagtacgcagcggcgcagatgaacgtgtatggacaggccacgtttgggtgggcctattggacggccaagaatgccaacaaccattgggatctcgagtggatgattagaaatggatacatctcgttgaaaggctaggacccaagccaacaggtttcagtctatataaaactctaatctctattggtagtacgtaggaacccgggcgagccagagatatttgctatatgtcgttgtaattaaattaaggccaagttcaatgaccttggcttcgtcagaacgaacccggccgggcgtactacttgtgccatgaacacttttgttggttgttgtgtgtacccgagcaaaccaatttaacgatgtactaaaaaaaaaaaaaaaaaaaaaaaaaaaaaaaaaaaaaaaaaaaaaaaaaaaaaaaaaaaaaaaaaaaaacttgaggggtccggtaccactg

SEQ ID NO: 127429 - DNA, 594 bp, Zea mays
  Clone ID: MRT4577_4767C.1
aagacgatttcatggatggcggcagcagtagtcatgatggaagcagtgtagtcgtcggccaggactactgccccagaagatctaggaagctctccggtagccgccgcgcgtgggagagggctaataacgagaccgaccaggcagatggcggctacgatgtgattttggtctccgatgtcccctacgcagctaactctctgaagaagctccatgcgcttatttcaaagtgcctacgccctccgtacggagtcatgtactacgtggcatcgaagaagagctcggttgggtccaacggtggcgccaggcagctccgagctctgatggaagagggaggcgtccttggcggccacttgttgaccgagcgatgtacatacataccgcgaggcgtatagtacgtagttccattaattctttggcagcagcagcagcaacgttgaagcttcaagaatcaaatacctgtagctgagcttgcacgaatccttcgccgcctttgtagagatctgtctgctatgtgctgtgctagtgtcgttctgttaaagtacagagagcaaattgtagtgacctttttgtgtatatcgaatacacggtgatggc

SEQ ID NO: 127430 - DNA, 181 bp, Zea mays
  Clone ID: MRT4577_47680C.1
gctcatcataggtttggatgtatgtaattttttttacaaaaaaaaccaaaaatttctaatataagagacactaaaacagtatttaacaaattcaatatccccaaaaaaaccataccaaggcacactacaatggcacattaaaaatacaagctcaagatattttaactcaataacattaaaa

SEQ ID NO: 127431 - DNA, 670 bp, Zea mays
  Clone ID: MRT4577_47681C.1
gccgcaacgtacacgcagaaggctctggatttcggaagggtggcgaaccagaagggtgggagtgctcgactgggtgaagaaactccaccaagaaaagcagctaggcacgatggtggacaaggacctgggcagcagctacgacagggtggagctggaggagatggtccaggtgtccttgctgtgcacgcagtaccacccgtcccaccggcccaggatgtccgaggtgatcaggatgctggagggggacgggctcgcggagagatgggaggcgtcgcagaacgtggacacgccggagtccgtctcgtcggagctcctgctccagaagtacatggacttcgcagcggacgagtgctcgctcggcctggaagccatggagctctccggcccgaggtgaccgaccggctggttgaccggacccggcgggcatcgcacgggtcggcgtaggtgtttttgccgtatcaagccctatattgttgtgttacgttggacacatagggaaggcgatggattgtatggtctatatagctgtggtggcattcatttgtacatacagcagcattgtgtgaggtgagcccatccttgttgcgcgtctacttggtggcaaagagatgaagatgaatgagtatatagagatagagatccaagttcccagtgcggagcggttggtgcc

SEQ ID NO: 127432 - DNA, 447 bp, Zea mays
  Clone ID: MRT4577_47682C.1
atctccttcaaaaaggaggcgcgaaccagcgtgttgtcgacagtgccaccgcgctcgcggcaggaatgaatatgaacgatgcgctacactgcgcatcaacaatgttcttgctgctctacatctcgctgtacctcactccgactgatcctccgaaatccacctgatcaccttccgagaggtaccgatacatttccatctgttgaggtgccaccggttataccgcgtcatcctctgccgcccggcagaccgacactgactgatcattatctgtggttacattctggaccctgtattttctatgctttcatgtctctctactttctagtattaattatcaataagttggcttggaatggttgaattgcatccaatgcatgaagtttctttggttaaaaaaaaaaaaaaaactacaaaaaaacaaaaaaaaaaaaacaaaaaagaaccaat

SEQ ID NO: 127433 - DNA, 2086 bp, Zea mays
  Clone ID: MRT4577_47683C.1
ttgggaccctcgaggccggccgggttgccatccaccgaagatgctttaatcacctttgcccggtccttgccatcactgtcgtcctcttcgtcttggcgaccattccctcttcttgccgttgtgacgaagctgtcctgcaaagagaagaagaatacttcctatccgaagccattcaaggtgcgttcaacttcggatccggagccattcaaggtgcaagagctgctactggctgtactgtatccaagagctggtatttgacaattctccatcccactcccacctacccacgcccgcccacaggggccaggggccacggcccacgggacgccggcgacgccaatacgggatggcctcgccggaactgcccggcgccaagcgtaacaacgtcctggtgccgccgtccccgcttttgcgcctcaacgatgacctcctcgccgatattttcctccgcctgcccaccctcgccgatgtagggcgcgccgccaccacctgcgcctccttccgccgcgtcgtcgccgacagcaccttcctgcgccgcctccgctccgtccacccggcgcccctcctcggcttactgctcttctcatcagtccacccggcggagccgccccacccctccgcgccctatgcgcgagctctgcagagggccgcagacctctccttctccttcgtcccctgcgccggccgctggatcccgatcgacgcccgcgacggccgcgtcctcctggagagcgagaccatgggcggcgactttgcggtgtgcgaccctgtgtcccggcgatacctctttctgccccgtatccccggacacccagccgctcagcgctgccgccgtctggagccgttcctcgttcccgccagtaacgaggagccggagacgtcgctgagggtggtctgcgtggcagagcgcaaacctggacagctggtcgccttcgtcttctcttcggacaccgggcgatggggaagtctgaccgtggatgtcagcgtgcctccctcttgcaaattttcgtggtcctcctacggtttcggcagctgctactggaaggtgactgggagtaacaaactccttgggctcgacacgcgttccatggtgttctcctctttcgatatcccgtctggttacggccagcaagattctgtcattgtggaggcagcggaaggcagattcagaatgttcactctccacaacagcatgatttctgctgcatcttacctggttcatgctgttcgggtaatccgcgaagaaggcaacaacctttggcaggttaagaggagagtcaggttgccgtcccaatatattttcagctttgcagatgcaacggataagcacttactccttcgtgggattccatggaatttgcacctggagccttctactcctggtgctgatataggatacttctctgttgagtttgagtctatgcaggttgagaaaatttgtggcatcaggaatcttctatacgccaaactgtacactggttttccaccgtcattgtccctaccaagcatatgaaatggtggcttcacaacgtgaatgtttaactatgctggctattgacttcaatctggtggtttggaaaggaagcaaaggattcatgtatgaactacttcgagggcagggtcactaaggagtaaaaggacttgaggactgatgagcagttggatgatctgtttttcagtcttttaggacatgtttggatgcagccctggcctggacggcctgctggcttaggcagctttcccgtgcctccatacaaacatgcccttacttattttctcgtcataccaatatttccatgtgattctgcaacgttgcatcgtatcctggaaggctggaatgtttatttggtgctcggcatctctctgaacttcatgtttccccggcgtaccatgctagtgtttttcaatggagccattattgcacttcgctgtgctaatacgtgcctcaattactgttactcgttatttgctattcggatggttcatgtaacaaatgtggattgagcaatctggtgcatccaatcaaaatccaacggtgaccttcatcctgaaatgagatagtgatgtatatttttcaacaaaacaa

SEQ ID NO: 127434 - DNA, 400 bp, Zea mays
  Clone ID: MRT4577_47684C.1
cttgactgcctcgttcatgcagctttaagttttttgagaacctccaataacttatgggagcttataactaatgcttcatctgaagcaatggattctgatccagcaactgtgatcctgggatactggaaagaggccaactgctgagcaagcattacaacatcctttcttcaatgtgggcaattgctgaccaaggcctgtacatgaggcttaccatacatgaaacaaacggaccatagcagctgctccaagactgctactcatcatgacgaattacagcacagcaccagaaaagtgtttgcttgattaaagtatcagactttaacacggcccttgtagaacacccattgtcatccatgatggaaggcctataaaactgtaaattttcgtgacaccaggatgg

SEQ ID NO: 127435 - DNA, 177 bp, Zea mays
  Clone ID: MRT4577_47685C.1
gtgcgcaatccaaaatctcggaacagttcgagattcggggctactgatgggatgcgctcaaacaaacttattttgaagcatgaccagtttgcccatgcaaagtgacaatttaattacagcctgccaaaaggcctcccttcttttatcgcggctcctgatgtgatgcagagatgcccc

SEQ ID NO: 127436 - DNA, 641 bp, Zea mays
  Clone ID: MRT4577_47686C.1
tcgcccacgcgtccgcccacgcgttcgcggacgcgtggggtcctccttctcctcgtcggaggagaactgtccgctgtcgtgactgacgttggggaggtcggcctcattcttgatggggcgcagacctgggcgtcgcgcagccgcctctcccacgtggcgacgttgcgggagcagtgcgggagacgacatcaggagtgcggaaggtggaggggaatcaaccactgcattggtgtagattggcgggcaacctgtccgggctgccatcgtcggacggcgaccaaatctaggcagcgcgggtgttggtggcctccaacgaggcctctcctcgactgacgtggtggacgcgacagccatcgagcgcagggtggagataatggtgttctcgaggatcctcgcgtcgcgcagcacacatagttaatctaatctcgggacacgcggaccgtccgagcccaagggccggaccgtccgctcattttggtgtccaacacacccgtacgttcgttcggtcgattaagcacttttacattatggctaattaggattaaaggggatgcgtaactgctaatcttctggagacttcttattatctttagatgagatcaccaccggcttttattcttcaacagggctcattgagttaa

SEQ ID NO: 127437 - DNA, 272 bp, Zea mays
  Clone ID: MRT4577_47687C.1
cataaagctggcagacgaatccttaatcgtaccctgacgtcgtcgcagccgcagccgcggccacaccatcaagcagaactagcagccatgccgtccaaattggacccctctcaggtggtggatgtcttcttgcgcattactggaggcaaggtccgcgcggcatcttgcttcgcattcaaaatctggcagatctgtttgtaccgactgaagatcgtcaaggacatcaacatggagacctataaggactggtagggccttcacgtcaccgtcaa

SEQ ID NO: 127438 - DNA, 1645 bp, Zea mays
  Clone ID: MRT4577_47688C.1
ccgtagcctatatagcttgctcgcataaacgtcaaaaaggagactttgtcggccctcttccggcaccggcaccggcaccagcgccaatctagctagtcagtttagcttcgctccttcgcttgcttgcaagtaacagcctctctcgtgtccaaaaagaaagtctttctctggaaaggagagaaggatcatcatcaccaggatcaagaaagaactcgtcgattccttaccccttccgtcttcttctgatctcagctctatccactagctaggagatggacatgaacaacgggtggcttggcttctccttgtctccttcggcagcgagcaggggcggctacggctacggcgacggaggcggcggagcgagcgcgagcgcgtgcggggatggagagggctcttgcccctcgcctgccgcggctgcctcgcctctccctctcgtggccatgccgctcgatgactctctgcactatagctctgctccagattggaggcacggcgcagcagaagccaaagggcccaagctcgaggacttcatgagcatcacttgcagcaacaagagcagtggccgcagcctctacgacagctgcggccaccacgacgacgagcaggccagcaagtaccacgaggtccacggcatccaccccctctcgtgcgggtcgtactaccacggctgcatcagcagcggcggcggcggcggaggcggcattggcctggggatcaacatgaacgcgccgccctgcaccggcgggttcccggaccaccagcaccaccagttcgtgccgtcgtcgcaccacggccagtacttcctgggcgccccagccgcaagcgcgggcccgccagcaggcgcagcaatgccgatgtacaacgccggcggcggcagcgttgtcggcggctccatgtccatctccggcatcaagtcctggctccgggaggccatgtacgtgcctccggagcgaccggcggcggctgcgctgtcgctcgccgtgacggatgacgtcccgccggccgagccgccgcagctgctgccggcgccgttgccggtgcaccgcaagcccgcgcagacgttcgggcagcggacgtcgcagttccgtggcgtcaccaggcacagatggaccgggcggtacgaggctcacctgtgggacaacacttgcaggaaggaaggccagactaggaaagggaggcaagtctacctaggcggctatgacagggaggagaaggctgcgagggcttatgacctggcagctctcaagtactggggcccctcgactcacataaatttcccgctgagccactacgagaaggagctggaggagatgaagcacatgtcgaggcaggagttcattgcacacctgagaaggaacagcagcggcttctcgaggggagcatccatgtacagaggagtgacaaggcatcaccagcacgggagatggcaggccaggattgggagggtcgctggcaataaggacctgtaccttggcacattcagcacgcaggaggaagcggcggaggcgtacgacatcgcggcgatcaagttccgtggcctcaacgcggtgaccaacttcgacatcagcaagtacgacgtgaagcgcatctgcgccagcacccacctcatcggcggcggcgacgcgtgcaggcgctccccgac

SEQ ID NO: 127439 - DNA, 381 bp, Zea mays
  Clone ID: MRT4577_47689C.1
ccggacgcgtgggcggacgcgtgggcgcctcctcggaagcggtttgcgtggggtttgacctcaacatgccaccgccggccgaggtggcgtagatggcggacctgccgcagcgcccgatgacacacggctcctccaacgttgtcgagtatgcgtagatgattagcacttgtattagtatgaggttggttgctcgatcgtttaatttgctacgatgagttactactaggtgtacatagatgttctttttgcatcggcggctaggtataacaaaagttactgcttgccgatgttacaaaacaaaatactacgaaaatgttttgttcttcgttgtttgtaacatattaatttgctgattaacgagagatctacagttttttgctc

SEQ ID NO: 127440 - DNA, 402 bp, Zea mays
  Clone ID: MRT4577_4768C.1
agttgttctggccagatcagccagaattcgtaaggatggcggcgcgctttggtgtaactatcataccctttgggtgtgttggagaagacgacgttctcgaggtacatgttttgttaatccgtttgttcaactgaattctatatatagcagaacgcattagagcacatttttcttgctgcagttggttctggactacaacgatcagaagaacattcccgggctccgggaatggatacagtcgatcaacaaagaagccgagagagtgaggtaactttcttcctcgtcagcaaagactgaagagtgacaagagacctcagattctttttcttcttcactcatggcgcgcattgttcgtttcagggacagcgtaaaaggagaggatgggaaccaggacatgtacct

SEQ ID NO: 127441 - DNA, 355 bp, Zea mays
  unsure (1)..(355): unsure at all n locations
  Clone ID: MRT4577_47690C.1
cnanannnnnnannannnaaaanggggatatttttgaaaattttgggggttagggaacaccagtaacgggggcttttcaccaaatttggagaaggggttcatgaatcatgatgcatcactccctccctggagaaaagattaattttttaaaccaaacattttttggcctatttactaaggttatttcgaaatagttaactagaattgaatagcttggcgactcaaatctttgtgggtttggcacaaaaagggacggccttgggcaacgtggtgcctaaattcttaggcatggtaacttcatttctttttaggttaggcgggagcctccatgcaaactggtttaagagggacccaa

SEQ ID NO: 127442 - DNA, 366 bp, Zea mays
  Clone ID: MRT4577_47691C.1
ggcaagggacgtaagaaggccgccctttttgtatttattttttattattgtgttgtatcgtgctcttaaaaagcaggatcctataacttgacttcaattatgatgcatgtcctcccaaactttacaaagccttccggctttatctcccttaggaccgaatctaagcaacctgaactaccctgaccccgttctctatagacttcctgtacctgccagcatgatgctatgtcgacaggaacagccgataccattgctcaatgtcacctggctgttgtgcagcaggagctggaccagctagggaatttcacccaatgtagttgcagttgtatactcctcgcttttgacgttcctgagcctgacgatcat

SEQ ID NO: 127443 - DNA, 507 bp, Zea mays
  Clone ID: MRT4577_47693C.1
agagcttgttttttttttatttgtattgattttttttagtttcttttaagaagtgctgttagtgttggcgtcaagatgatacaagtatgcgaaggttcccattatagagagcttggccaagaaggttttttttttttagatggatggtatgatgatttttgtcatgatacctttacttttgatgatgcttctgccttggcagcataactgtaggctaccagatggcctttgtgatacaagccacctcagcttcccatgtgtgatgggaacttagatccaaagcagtttgtgttgagctgcgaaggagctatatgttggtctggaggcaatacctgtgtcatggctaagcctttcttctgggcctgccggattgtagtccaaacatcgtcttcttcttttgattcagggactattacgttttggtctgaaggttaaggacatgctggttaccaggtttttaagttcttttaaacgtcgcccgggactagctcatgcccatgctcccaa

SEQ ID NO: 127444 - DNA, 448 bp, Zea mays
  unsure (1)..(448): unsure at all n locations
  Clone ID: MRT4577_47694C.1
gggaatcaccaccactgggatctatcagaccattattcttatatctacntccagaagcgcgagaagnagacccgatcgacactcatgagggtagttgcatcgttggccctcagctctcctgagctctcagctgagaagcgccacactgcacagcatacatagcggtgagttgcggaatgccagcacaccgccaggcgagtcatctacacgccgacggtgcatgtgccaccttcgggggagctgccacctccggtgcatataccaccgccggtccacctgccgacgccggaccacctgccaccgacggaccatgtgccgacgacggtagatatgccggcgacaccatgccactaccgtactgaaccgacccgggctgaggctaatgcggaggcacacccatgcccaggccaacagtcgtatgcaaacccgttccaggtgtatggaacct

SEQ ID NO: 127445 - DNA, 333 bp, Zea mays
  unsure (1)..(333): unsure at all n locations
  Clone ID: MRT4577_47695C.1
tcgaggccggncgggagaactctcctacatatagctctaacgattgtcctgtcctaatgagatgacatgcgatgttatgcagacggagtatatagcacatacagcataagttctgcttcgacgtgctacagctatcttctatatgctgcgaagaattcataagctgttcgaagcaaaatacggcctgaacaaataatgaaccacgcattctacatcatcataatgaccaccaccaaattattgtcttactgagaaaatcaacaacaacaacctaccaaccacatgcacccctgatcaccatccattagtgcccctcagaacgtctcaccaccc

SEQ ID NO: 127446 - DNA, 478 bp, Zea mays
  Clone ID: MRT4577_47696C.1
tttgccaattatataattttaggttgaatttttattagtttttgaagccgcgaaagccaatgacggctgtttcgaatgttgtagagaattcagttgatcgaataaattaattttcaaaagccaatggtttaaagaattttccgaatcgctgcgtgaccagcgcagcgcgtccacgccttttaaggtctctctgctgtcgttgttgttattgttgttgctgatggttgcttggtagcaactcggttgttgtttgtttgttgatttgtttgttgaattgacgagcgcctgcctcgcagcacagtcacagattgcagaaggcaacaaatttaattagattcctcgtcgatggttttgtaaaagaggcgctcgtccgatggctgagtacttttgattgctttcggttccatcatctctcccgaccgactgttgatgatagttgtgggggatcggcgggggtttaaaattctacgaatgagta

SEQ ID NO: 127447 - DNA, 216 bp, Zea mays
  Clone ID: MRT4577_47697C.1
gtccggactcccgggaaaaagctatacttgtactatttatttacagaacgaacatgtgataaaggctttagaccattagtatttgatgttggcgaaaaaggctatacttgtactatttatttacagaacgaacatgtgatgtaacctcgattttcatgaggcatgattatgaaagttacagaataatcgttttatattctatattagggagagggg

SEQ ID NO: 127448 - DNA, 856 bp, Zea mays
  unsure (1)..(856): unsure at all n locations
  Clone ID: MRT4577_47698C.1
ctcatctcctcctcgtagccttcctctgcttgacgtgctctgtttgtgctcgcttcgacgatgactacgacgactcgaggtatggccctggaggtttcggtcgtggtccgggctttgatcgtggcccgagaggtggctaccgacgcggtccggacttcggacgtggaccgtttggtcgtgactgtcgcttcggtcgctgccgcagaggtggtggcggacgtggaggtggtggaggcggtggcatgggcggtggtggtggaggcggactaggtggtggttcaggaggaggattcggtggcggggcaggcggtggcgttggaggaggaggcggccttggtggtggtggcggcggaggtatgggcggtggaggcggcggcggccttggacatggcgttggtctcggtggagggggcgggggcggcctcggcatcggcattggcgttggcgtcggagtcgggttgggcgcgggggcaggcgcaggcgcaggtggcggcgctggtgcgggtgctgttgctggaaaccgcgggcgttgattcatccgtccatgtccagtttaaagaagaacgcatccatgcaagcatgtgtatgttcggcgctggagtagctatgaattactctatgacgtggttaaattatggttaatttcactcctcctgtttttggttgctgtgtagtctttgctcattattattggtgcaagtgtttgcaataaatcttatatactcttgggaaaaaanagtctaatggatagtagtatattaatncagntctagcgattttttttccatgnaantcctggnttccaagcatcttgtttgancttcgcntnctaagggtcaaanannaaaaanaaana

SEQ ID NO: 127449 - DNA, 429 bp, Zea mays
  Clone ID: MRT4577_47699C.1
aaaaggggtatgcaaaggcttaaaagccccaaacaccaattcaaaaaaaacccaaataaggaaaacccaaccacccctaaattaggcgggggggaaacaaaaaaaaggaaaaaaccccccgggtcctgggggccccttaggacccggcccccaaaaaaattttaaaaaagcttccttacggttttggggggcggccaaaattcccttctaaaaacagggaggatttttttgggttttccccccccttttcttcaaaacacgccaatgggcctaaaaaactggggcgaaaaaaaataaaaactttggggccccctttaaaaaaaccgggggggaaaaggtttttttcccattggaggccccaaaaaagaacctgggtttaacccccggcccctaattatccattttccaaaaaagggccttgcccttgga

SEQ ID NO: 127450 - DNA, 255 bp, Zea mays
  Clone ID: MRT4577_4769C.1
cgtcgcggtgccgtgcgccggtgctggccagtctagggttttcggccctcgcgcgccgatccgtcccgcccggcgggccatgtcgaaacaaggagggaaggacaagccgctgaaagcgcccaatgtcgaaaggaatgagtacgacgacagtgatcttgcctaattgcagaagaaaacagatgaggaaaaggcgctgaatgagctgaatgccacagcacataaaggcgcaattggaggctctggtctcaagagaag

SEQ ID NO: 127451 - DNA, 156 bp, Zea mays
  Clone ID: MRT4577_476C.1
atagcttcactctctgttatcctttctcttcaaccatattatcttttagataagttcacatttaagttggtgcctgcatcacccttatcatttcaacaatcaccatccctatctttttttcattcatttgtacaaaccatcaattcacaacatctt

SEQ ID NO: 127452 - DNA, 558 bp, Zea mays
  Clone ID: MRT4577_47700C.1
ccggccgaggacgcatgtccccgtcggtgctcacactctcgccgagcagcctggctgctctgtccgctcggcaccatcactatggggacgaccgtcatggatgacaatggactacataatacaagaccagaacgcgcactactgcgacgcgcactaattcatgctctcgctatcgaggaccagcatgatcctccagggcatcaagcagctacaccatctgtaatgctaaggccattatctatgacaactaagactgtatgcctgaccacgatacgctggttctagctggcaagcatttggatgatgccaaaactttagctgattacaacattaaaaaggagtcaacagtcacttaggtcttgaagttcaaggggggaacgtatgatcaaggtgaagacactaatctggaaggaaatcgagattgacatctagcccaaagacacatttcataggatcaaggagtgtgttgaggacaaagaaggcatccgacctgttaagcagcagctcatacatgctgagaagcgacttgctgatgacactactatcaaagattacaac

SEQ ID NO: 127453 - DNA, 580 bp, Zea mays
  Clone ID: MRT4577_47701C.1
aagcatcataaaattctttttataaaagggaatcaaggaatggtgatcaattttccaaggaagggaatgcatcaattgtttagcacacaatcctatcacctaatacatcatataaggtgataaagattttaaaacaacaaggaaaagggataatgcaccggggcttgcctaggataacactaggttagtgtttgttagatgacgtccacttggtgatcagccttttgtcttggcacttgttcagcctgtccatctttaggttgatccaccagcatcaccttgtgaagaagcccacccgttacatcatcttggggtcgactcggttcttgtcctccacactacgtgattaattaacgtaccacatcacatatcgatttggtattaacaagaacgacgacgaccaccgattcacccaaatcacagaacacctgatggatgatgcgctggagctttcctttccccataatcctaggattcttctcctcatcacgcacaaatacacatatacacacaatcaacacacaaaaatctcgtcgggtgacgaaacgatggagctagaacagaatctcaccgatacgaa

SEQ ID NO: 127454 - DNA, 671 bp, Zea mays
  Clone ID: MRT4577_47702C.1
gatttcaacgtaacgagacggagtgcagcaccgtttctgttctgatgctactcgaactggcactactaacagtccccttcctcttcgggtctcaacctcgccttcttcgttggcctcatcctgcctcttcgctgccgacctgcatgaatccccatgattacgttccggcccattgccaacaaccccataacacgagtcgacaaaaatatcccaacgatgccctatgttcctgatacaactcagaaggcgaacgatcatgctggtgcacctattcttcttgctgtccctgcactagctgtggtggcctcttctctctttcctatcgtcaacacaacatcgcactgtgcctctgtactcgacgacaattggtacacgttactctttatccactctcaaagtcgacccattaggctctgacatcatgctctacgactgttaaaaaatataccacgaggatagttgaatctgccactctactatggctgcttatggaatgctgaaccatgatccaatgtatgtacccctgaatggtccatatctatgctccgatagtgacatgttcatcatctcagctgaccgataatatgatctatccatcatacattacctttcgcattttttgttttaaaaaaaagcccctaggggcctctagctccctctatctccccctt

SEQ ID NO: 127455 - DNA, 317 bp, Zea mays
  Clone ID: MRT4577_47703C.1
gcttcctgctaacagttcgttctcaaagcacagcttagcatacatgcaagcaagtgctcagtatatcaagcaggtgtctggcctattaaaggtcggtgtaactactctgcggagcagttcagcctatgaagcaccacaagaaacatactcctgccagttgaggcttaaaagttcacctgaagatgatgtggtacctatgcggccaggatctggtgaaacacatgtcatctttcctgatagcctcggagatgatttgatcatcgatgtgtctgattcaacagggaagtcttgtggtcgtgttgttgcccaagttgcta

SEQ ID NO: 127456 - DNA, 2188 bp, Zea mays
  Clone ID: MRT4577_47704C.1
atgatgaattaatagaagcagattctgattttgtcgatcttgttgctgctcatgacagttcaatggaactggtggagcaacgttgtcaagtagagaaacctgaacattttcagcctactacagtagttagaatcccttctctacgctctagatccattggaaagggtgagaaggtggttgttgcaccagaaatagaagcagccacttctaagattataaaagaagaggaaagggagagtggtcaagtaagttggcgagtgtacaagctgtatatgacagaggcctggggctggtggggagttatgggcatggtttcctttgcagtcgtgtggcagtgctctgatatggctagtgactattggctatcatatgaaacgtcaggcggcattcaatttaacccatcgttgttcattggagtgtatgtggccatagctgctttttcaatggtccttcaagtaatcaagactcttcttgagacagttttgggtcctcaaacagctcggatatttttcgagaagatgtttgacagcattctgcatgcccctatgtcatttttcgataccactccttcaggaaggattctcagtcgggcatcgtctgaccaaacgaccattgatgttgtgctggcatttttcattggtctgacaatttcaatgtacatttcagtattgagcaccattattgtcacttgtcaggttgcctggccatcagttgagctgtaattccacttctattattgaacatttggtacaggaatctctatcttgcaacctcacgggagttaactcgacttgaaggagtgacaaaggcaccggttattgatcacttgtctgaaactgttcttggtgtcacaactataagatgtttcaaaaaggagaaagaatttttccatgagaatttagacaaaattaattcaagtttgcgcatgtacttccacaactatgccgcaaatgaatggctttggtttccgactggagctaattggaacacttctattgtcaataactgcatttctcatgatcagcctgcccagtaattttatcaagaaagaatttgttggtatgtctctatcttatggtctctccctcaattctctggtgtacttcgcaatatccattagctgcatgttagaaaatgatatggtggctgtggagagggtaaatcagttcagtattcttccttccgaggcagcatggaaaatagaagagcatcttccttcttcaaattggcccaatcatggggacattgacattaaggatataaaggttaggtatcgatcaaatacacctttaattctgaaaggcattaatataagtatcagtggtggagaaaagataggagttgtaggaaggacaggcagtggcaagtcaactttaatccaagctttgttcaggctcgtagaacctgcagagggaaaaatgatcattgatggaatagacatatgcacactcggtctgcatgatctcagatctcgctttggcataattccacaggaaccagttctctttgaaggaacaattcgaagcaacattgatccaattgggcagttttcagatgcagaaatatggcaggctcttgagcgctgtcagctgaaagatgtagtagtttccaaacctgaaaaacttgatgctccagtggctgatagaggagagaactggagtgtaggccaaaggcagttgctctgtcttggccgtgtcatactgaagcagacccagatcttatttatggatgaggcaactgcttcagttgattcccaaactgatgccacgattcagaagatcacgagacaggagttttcatcatgtacaataattagcatcgcccacagaataccaacagtcatggactgtgatagagtcttggtgttggatgctggtctggtaaaagaatttgattcaccttcgaggttaatcgaacaaccgtccctcttcggtgcgatggttcaggagtatgccaatcgctcgtcgaatctgtaaccgtaccatgatactgagtatgtaaaaaataagtagaagttggttgcttgactttagtgtacatatggaggtagcttaactcctgatggtattgtagctttgcagtattttgataagaaactcacacaagagaggggaaatacatctaaagtttagagatcaccttttgaccttagcaaacaatgaatatttcttggaatgaacttgtaacc

SEQ ID NO: 127457 - DNA, 332 bp, Zea mays
  Clone ID: MRT4577_47705C.1
gcggggcacaccagctgcagcaactcgtgctacctgtgatcaaccaagtagctatggcaaaccggtctaggtactctcagcaagagcaatcgtgtttcattcaaccaactggctacattgaaccgtgctgcttattggtagcaacaactattaccattcagccagttagcgtactgcctactatgagaacgacaacttttgacatttaaccaattggccgcactgaaccccactgctgaattgccgcaggaaattctactatcatttagccagatagctgtaggaagccgtgcttacttcttgacacaacatcgggggctatctttgtacca

SEQ ID NO: 127458 - DNA, 295 bp, Zea mays
  Clone ID: MRT4577_47707C.1
atagggttatgttaaacctgatgacctataaacacttcatttaggaaggcagaacaggtattaagggcacactagagaccgggactaccctgaagacccacctgctaaggggggggtgtaatcacccaaagccaatgtagaacaatggcccctttgaaaatgcacgggttatatttgcaatctattacgaggggggtctcccaggaactcagttctggatgccaaaactacttttgggaaaacgggacccaattgaatcaagccaccagggattgatcattcttggggataagcc

SEQ ID NO: 127459 - DNA, 535 bp, Zea mays
  unsure (1)..(535): unsure at all n locations
  Clone ID: MRT4577_47709C.1
acaatagtgttccggcggtgggagccaaaatattaaagcctccttgatgctccttggtctttctgcaagtgctgctacggcgaccattttcccgcaatgctcgcaagctcctatagcttcccttcttcccccgtacctctcaccagcggtgtcttcggtttgtgtgggccgggggggcaaccctacaggatccaacaggcaatcacagctggcatcttacctttatcacccttgttcctccaacaatcatcagccctattacatcagttacctttggtgcattttttggcgcaaaacattaggggacaacaactacaacaacttgtgctggcgaaccttgctgcctactctnagcaacaggggtttgttgcattcaaccaactagctgcgttgaactctgcttgttatttgcgacagcaacaactaccattcaggcaggtacctgctgtctacccccagcatttctttcattcaaccaactggcagcattgaactttcctggttatttacagcggctacaactactacctttcag

SEQ ID NO: 127460 - DNA, 1700 bp, Zea mays
  Clone ID: MRT4577_4770C.1
ggcggtttgaccttctgaccggagggagagagagagagagagagagaggagaatcatagctgctgcgttcgatttgcggagggctggaggggacgcgagacgggacaggacggatcttcgacggagcgttgcccgattcgtcgcagttcccggacaagggaggaaaggcgtgggaagagggaggacgcgcgttggtctccgatccaagagctttgttaacaccagagattaaaagatagcgccgtagcgcaatgaaggcaccatcgctactggttcggtgtttccctggcttgcttcccagcaaggacactagttgtgtgccaattgtgtccgagaaggatctgcagctaccatcactagccgttgaaataattccctcaaagagtgctcacccgtacaaatatgctggagagaaggttgatgtgcaaggttttgatattttcaagggtaaagttagtgtagcagatatgatatccttctcaccttctgaagtagcatcatcaaaatatgatggagctctgaaaagctgggagaattctattactcttgtcaacattattcgaaatgagatccgtgatggccagttgagcttcaggggcaagcgggttctagagcttggatgtggatctggcgtctccgggattttttcatgcttgaagggtgcatccaccgttcactttcaggacatgaacgcagaaaccatacggtgcagaacaatacccaatgttcttgcaaacctcgagcaggctcgggacaggcagaacagaccatcagaagagagccccgtgacgccatcccggcagctcttggatccaaacgtgcatttctatgccggagagtgggatgaactcccgacagttctctcggctgtgccgccacccgcggcgccagcagacctcagcttctccgaagacgatttcatggatggcggcagcagtagtcatgatggaagcagtgtagtcgtcggccaggactactgccccagaagatctaggaagctctccggtagccgccgcgcgtgggagagggctaataacgagaccgaccaggcagatggcggctacgatgtgattttggtctccgatgtcccctacgcagctaactctctgaagaagctccatgcgcttatttcaaagtgcctacgccctccgtacggagtcatgtactacgtggcatcgaagaagagctcggttgggtccaacggtggcgccaggcagctccgagctctgatggaagagggaggcgtccttggcggccacttgttgaccgaggtgtgtgacagggagatatggaagttcttcttcaagtgagcagatccagggactgggagtgggaacggcaggggaaatggatccttcctgacgttgaaatgaaacccagttttttttttggtttctatctgcagcgatgtacatacataccgcgaggcgtatagtacgtagttccattaattctttggcagcagcagcagcaacgttgaagcttcaagaatcaaatacctgtagctgagcttgcacgaatccttcgccgcctttgtagagatctgtctgctatgtgctgtgctagtgtcgttctgttaaagtacagagagcaaattgtagtgacctttttgtgtatatcgaatacacggtgatggcaattcggccggtgcatggtatgtgtgagaaactcgcgcacaatttctacatgcatctttctac

SEQ ID NO: 127461 - DNA, 495 bp, Zea mays
  unsure (1)..(495): unsure at all n locations
  Clone ID: MRT4577_47710C.1
aggccggccgggaaaaataattttccaaataaagaaaaaaaaaaaataaaaagnggtgctccccatcctgatgtggttccctttcgcgttcaacaatagggcgctcgaggtactgatgctcataggtgtatgcgtgtcgcgagtcttaatccgctctggatttcactgtacatacgaaccgaggtcataatgcagaacctccccggcgcgtaaggagtctgctgcgtgctcttaaatatctgggagattctgcccgattatgcgtacccaaccttccgctgccaactggtgttaatacgatcaccacaaccggagaaccccatgcgctccgagattgcagtctcttcaggttcaacattgagtgactcttggtcctcggtggtttgggtgcgaagagatgcttctgatctcttcgaagccttagctcttttatccgcttagccaggagactactatagaatggacctgtgaccaaaaggacataaaaatgccttt

SEQ ID NO: 127462 - DNA, 410 bp, Zea mays
  unsure (1)..(410): unsure at all n locations
  Clone ID: MRT4577_47711C.1
ggtgggtggttttttttttttttttttttttttttttttttttttttttttttttttttttttttttcccttgggcttccttttttcactgctcgggtttttcaatgtttaatgtttccaggctttaaccttgtgaagcattacagggggggggggccggacttttaaatggggncggtttctttggtttttttttggttcagttcaaattggtaacttgcccgttttttggcacacgaggtttgtccccttctttggtcccgaagattttctgcctgtccttggcttagggggctatccttcctcctgggttttttgaacaacattttaatttgaaccaaacgggaactcattttgtgctcgggacgcttgcgggtttagctacttcgctggtgggttttgcgggcgcc

SEQ ID NO: 127463 - DNA, 800 bp, Zea mays
  unsure (1)..(800): unsure at all n locations
  Clone ID: MRT4577_47713C.1
ggtaccctccgggctcggccggggattgcactgcaagcgcagatctcaattaggagtacacaacaagtggagttcgacggatgtgaattgcggcctttcttggttgccgtcttgctgctatggttgacttgcggtccctactcgtcgccggcgtcgtcctcctcgccggactggccgtcctcgtccacggcgccggggacgagcagttcgtctactcgggcttcaccggcgcgccgctcgcgctggacggcacggccaccatcacgccgtcggggctgctggagctcaccaacggcacggcgcagctcaagggccacgccgtgcacccggcgccgatgcggttccagcggacacccggcgggcccgtgcgctccttctcggcgtccttcgtgttcggcatcatcccgccctactccgacctcagcggccacggcatcgtcttcttcgtcggcagggacagcttcgcgaccgcgctgcccagccagtacctgggcttcctcaactccagcaacaacggcaacttcaccaaccacgtcttcggcgtcgagctcgacaccatccagagcaccgagttcaaggaccccgataacaaccacgtcggcatcgacgtcaacagcctcacgtccgccaacgccagcaccgccggctactacgacgacggcaccggcgcgttccacgacctgaccctgatcagcgccaagcccatgccaggtctggttggactacgacgggnagacggcgcaggtcaacgtgttcctggctcccctcaggacaccaagctaccangncctctggtgtcg

SEQ ID NO: 127464 - DNA, 876 bp, Zea mays
  Clone ID: MRT4577_47718C.1
cgcggcgctgccgccgccgccgtcgccagggaggcggacgctgttcctggacctcgacgagacgctcatccactcccagacggagccgccgccctcgcggttcgacttcaccgtgcgccccgtcataggtggccatgcggtcaccttctacgtcgtcaagcgcccgggtgtcgaggcgttcctccgcgcggcggcggatgccttcgaggtcgtcgtcttcaccgccgggctgcaggagtacgcctccctcgtgctcgaccgcctggatccagacggggaggtgttcgcgcaccgcctctaccgcggcgcctgccgcgacgccggtgacgggacgctcgtcaaggatctggccgccaccggtcgggcgctggaccgcgctgtcatcatcgacgacaatcccaatgcctacgccctgcagccggagaacgccgtcccggtggcgccgttcgtggatgatgacaacgaccaggaactgcagaggatgacggcgttcttggacgtcgctgcggggtacgaagacacccgggacgccatcagatgctacaaggatctcgtcacggcaacctgagccgctatcccttcttaagccagtttcaggtttaatgttagcacatttttctcagattagtctactggttagtgggaaagagaaacattgctgcggaacaggacgtgtggtaaagctttgattttttcaggatcttcctgaacttcaatgcgagtattatgagaccaaattgaattgttacagtagaatgttcaaatctccggttacaagactccttttcattttggatatataatcaataaattctaccgctttgtgaagcacttttagggagtcagattaaaggtgaacatgagattgcgatgagc

SEQ ID NO: 127465 - DNA, 364 bp, Zea mays
  Clone ID: MRT4577_47719C.1
ccccaagcacacacccgtgctctcccaggtcagtaggacaaactcttctagggtctaaaagctaccaaaagggtgctactggcccaacacctccgaccaaccgcaggcgaaggagctctccaccttcacaccctcgatttatccttgccatctgtacccggcaggacacaagcccactagctccagctattcttattcatgaaaggttctgagattatctaaccaagcgactgccgcaacgacagagccacaccggacacactcccccctgtttcccattctcttactactcgagcggaaccctctcgtattgccacttgtagcatcaggtgaaaaaatacaaaggaaagacatgagggatcca

SEQ ID NO: 127466 - DNA, 219 bp, Zea mays
  Clone ID: MRT4577_4771C.1
cccacaaaatccaaggggtttggatttggaatgggaggcgacccacattcgttttttgaactattaaatacggcccttaacctggagtttttgtttcccacgggacacaatacaaacagccccgcggcactttggttcaaacagggggggccccttgtgataaaaaaactccttgggcgccccgccatttttttgcccacccatagcttcccccaccct

SEQ ID NO: 127467 - DNA, 120 bp, Zea mays
  Clone ID: MRT4577_47720C.1
cctgacttcttccccatgcttgtcactcgagcagcgaggctcgctagcatatctgacggcatccgtgatagtatcaagaacggcgtcaagtccgctactgatagtgcgcatacgggagct

SEQ ID NO: 127468 - DNA, 279 bp, Zea mays
  Clone ID: MRT4577_47721C.1
ttctgtagccggaagatctccgttccgctcccagcggctccagtttaaattccccttccccctggggaaatgcactaccttgttttggggggtttaggggtgtttttgtttttcagttgttttgtttttttgttttttttttttccctttgccttttccccttttatttggagggattgggaggaattgggaacagggagttggaaggtggattttgttaatttttttagctcatttccaggggtgggaattttttttaatatgtgcccggaataaagt

SEQ ID NO: 127469 - DNA, 683 bp, Zea mays
  Clone ID: MRT4577_47722C.1
gtcactattgacagctacgaagatataccagcgaacgatgagaagagtctgcagaaggcagttgcaaaccagcctgtcagtgtcgcaattgaggctgctggcacagcatttcagctctacagctcgggtatcttcactggaagctgtggaacagcgctggaccatggtgtcacggccgtcggctacggcacagagaacggcaaggactactggatcgtgaagaactcatggcgccaacccgccgaaccctggccccagcccgccgtccccgaccccggcgcccgccgtgtgcgacaactactactcgtgccctgacagcaccacctgctgctgcatctacgagtacggcaagtactgcttcgcctggggctgctgcccgctcgagggcgccacctgctgcgacgatcactacagctgctgcccccatgactaccccatctgcaacgtcaggcagggaacctgcctcatgggcaaggacagcccactgctttcagtgaaggctacgaagcgaaccctggccaagccgcactgggctttctccggcaacacagctgacggaatgaagagcagcgcatgagaaaacgcagcgtggcattaggtcgtcagcagcctgggtgatcgattagagcccctgcgtgggaaatggtcacctggccccctgattgacgacggaagcatggctc

SEQ ID NO: 127470 - DNA, 824 bp, Zea mays
  unsure (1)..(824): unsure at all n locations
  Clone ID: MRT4577_47723C.1
ctcgaggccggccgggacttccctcagtcctcgtccgtctctgctctccctcttctctctctctctacctagctagctagctagccttcctgtagcgcggcagatatggctgcctccaccacggcggcggcggcgctgctgctgctcctcctgtcgctcgccgcggcggcggacatgtcgatcgtgtcctacggggagcgcagcgacgaggaggcgcggcggatgtacgcggagtggatggcggcgcacggccggacctacaacgaggacctgccggagtccgtcgactggagggccaagggcgccgtcgccgaggtcaaggaccagggcagctgcgggagctgttgggctttctcaacaatagcagctgtggaaggcatcaaccagattgttacaggcgacttgatctccttgtctgagcaagagcttgtcgactgtgacacttcgtacaatcaggggtgcaatggaggtctgatggactatgcgtttgagttcatcatcaacaatggcgggatcgacaccgagaaggattacccttacaaaggcacggacggacgatgtgatgtcaacaggaaaaacgcgaaggttgtcactattgacagctacgaagatgtaccagcgaacgatgagaagagtctgcagaaggcagttgcaaaccagcctgtcagtgtcgcaattgaggctgctggcacagcatttcagctctacagctcgggtatcttcactgggagctgtggacagcgctagacatggtgtcacggncgtcgctacggcacagagaacgcagggactactggnatcgtgaagaactctggggcagcagc

SEQ ID NO: 127471 - DNA, 753 bp, Zea mays
  Clone ID: MRT4577_47724C.1
acttccctcagtcctcgtccgtctctgctctccctcctctctctctctctacctagctagctagctagccttcctgtagcgcggcagatatggctgcctccaccacggcggcggcggcgctgctgctgctcctcctgtcgctcgccgcggcggcggacatgtcgatcgtgtcctacggggagcgcagcgacgaggaggcgcggcggatgtacgcggagtggatggcggcgcacggccggacctacaacgccgtcggcgaggaggagcggcggtaccaggtgttccgggacaacctccgctacatcgacgcgcacaacgccgccgccgacgcgggcgtccactccttccgcctcggcctcaaccgcttcgccgacctcaccaacgacgagtaccgcgccacctacctcggcgccaggaccaggccgcagagggagaggaagctcggcgccaggtaccacgccgccgacaacgaggacctgccggagtccggcgactggagggccaagggcgccgtcgccgaggtcaaggaccagggcagctgcggtaaaggagcttccataccaatctccgctctcttcctctctttttttttattactatactcctgctgaaataaagctgacctgcttagtaactctagctagaacatgggaagcttctccagccgtgtccatccgcaacttgcagtagtttttattgctatccacatgagcagaataaaagagtcggggatttgtaaaaaaaaaaaaaaaa

SEQ ID NO: 127472 - DNA, 279 bp, Zea mays
  Clone ID: MRT4577_47725C.1
gggaaacgggaaatggaactttttatttttgggtggccccataccttatccaaaaaactttttttttgaattaccactaataagccatctaaaagagggcccccccaatgatttgtttttggtaggaggcccttgggtctttcaaaacaagttggacaaagggcaacaattgttgtatttgtaaaagggttggggggttagccccaaactgctggtaaaaaggcaacaactgttgctgtgtaaaaaaggaagcccggtttgctgcacctagctggctaa

SEQ ID NO: 127473 - DNA, 1829 bp, Zea mays
  Clone ID: MRT4577_47726C.1
caagggcctcctgtctgctctcacttcctcagtcctcgtccgtctctgctccgatccctcctctctctacctagctagctagccagccttcctgtagcgcggcagatatggctgcctccaccacggcggcggcggcggcgtccgtgctgcttctgctcctgtcgctcgcccgcggcggcggactaatgtcgatcgtgtcctacggggagcgcaccgacgaggaggcgcggcggatgtacgcggagtggatggcggcgcacggccggacctacaacgccgtcggcgcggaggagcggcggtaccaggtgttccgggacaacctccgctacatcgacgcgcacaacgccgccgccgacgcgggcgtccactccttccgcctcggcctcaaccgcttcgccgacctcaccaacgacgagtacccggccacctacctcggcgccaggaccaggccgcagagggacaggaagctcggcgccaggtaccacgccgccgacaacgaggacctgccggagtccgtcgactggagggccaagggcgccgtcgcggaggtcaaggaccagggcagctgcgggacgtgttgggctttctcaacaatagcagctgtggaaggcatcaaccagattgttacaggtgacttgatctccttgtctgagcaagagcttgtcgactgtgacacttcatacaatcaggggtgcaatggaggtctgatggactatgcgtttgagttcatcatcaacaatggcggaatcgacaccgagaaggattacccttacaagggcacggacggacggtgtgatgtcaacaggaaaaacgcgaaggttgttactattgacagctacgaagatgtaccagcgaacgatgagaagagtctgcagaaggcagttgcaaaccagcctgtcagtgtcgcaattgaggctgctggcacagcatttcagctctacagctcgggtatcttcactggaagctgtggaacacggctggaccatggtgtcacggccgtcggctacgggacagagaacggcaaggactactggatcgtgaagaactcatggggcagcagctggggcgagtccgggtacgtgaggatggagcgcaacatcaaggcgtccagcggcaagtgcggtatcgcggttgagccgtcatacccgttgaaggagggcgccaacccgccgaaccctggccccagcccgccgtccccgaccccggcgcccgccgtgtgcgacaactactactcgtgccctgacagcaccacctgctgctgcatctacgagtacggcaagtactgcttcgcctggggctgctgcccgctcgagggcgccacctgctgcgacgatcactacagctgctgcccccatgactaccccatctgcaacgtcaggcagggaacctgcctcatgggcaaggacagcccactgtcactgtcagtgaaggctacgaagcgaaccctggccaagccgcactgggctttctccggcaacacagctgacggcatgaagagcagcgcatgagaaaacgcagcgtggcattaggtcgtcagcagcctgggtgatcgattagagcccctgcgtggggaaatggtcacctggccccctgattgacgacggaagcatggctcggcggccgctatctacctatatccattttagtaggtactcactcctgtacataaaccctgcagaaaaaaaagagggttcggttgtttatggaacccaggcaaatttgctttcgcgcacaatgtaaaactcagctagcagctctgctaagctccccggcgtagctcgacacagctgcgatctattattatttgatgtaatggggaccgatattgc

SEQ ID NO: 127474 - DNA, 405 bp, Zea mays
  Clone ID: MRT4577_47727C.1
cgccagcagggaccggtcctgactgggtggacccacgcatgcgtccacgcttccaggcaccccacgcacacgtcagcatcgggtgctgcgtgacccgtctacgtttatcgagaaggttctagaccccacaagcaggaggcgactctgctccttggtgcttcgtactcctcccacgtgtgtgcgctctgatgacccaatctgacaggccgttaatcttctgaacacaggagtcatgggctgccaccgctaggatcatgtgtgaccaatcgactgttgagatgagcgaaccttcgtatcatgatataggaactaatttgaacctttgccttgagcggaatgctttgagggctgcacatgctgttgccgacattccagcttaagcatcataaacactcactggggatg

SEQ ID NO: 127475 - DNA, 415 bp, Zea mays
  unsure (1)..(415): unsure at all n locations
  Clone ID: MRT4577_47728C.1
aggatcgccctggggagcttcagtatgtataccacccnggcgccctcaaggcggcgttcgctgagttcatctccaccctcatcttcgtcttcgccggccagggctccggcatggccttcatcaagctgaccggcggcggcccgacgaccccttctttcctgatcggatgttgggtnncncactcnttcnccctgttcataacaatttctttngccccaaacatctccngcngncacctnaaccctnccntnaccttcnncccccttctnggcggcaacatcaccctgttccgggggctcctgtactgggtggcgcanctgctggggtccaccggggcgtgcttcctgctccgcttctctacgggccggcaggccacgggcacctttcggcttaccggcctgtcggtgtgggaggc

SEQ ID NO: 127476 - DNA, 106 bp, Zea mays
  Clone ID: MRT4577_47729C.1
acttggcaaatctttcattcctgttattttgccgggagcactgcaccggaaggttataagtcgagctcggctgagatcagatctatatcatctcctgcaggtggaa

SEQ ID NO: 127477 - DNA, 838 bp, Zea mays
  Clone ID: MRT4577_4772C.1
caagcagaccgctggcgcctccagcgccgtcgccggaaacggcggcacaccacccggaagcacgacgacagccacgcacaccggcggcggcgagacgaacggggcggcggcggcggcgctggcggcacggccagcgctggcggccagcagcatgttcgccaaggtgcacatggagggctacgcgatcggcaggaaggtcaacctcagggcccaggacggctacgactccctctcaaggacgctcaccaatatggcaaccaacttcttctgccccgcagactgttcaggcgcggcagaaaaagacgctccaaagagtgacaagttcatattcctgtacgaagacttcgagggcgaccgaatgttggttggtgacgtcccatgggaattgttccttgcgtctgctaaaggattgtacatcgtccgaaaacccagcatcaggcgacaaaggtcggggtgaaggtgacagaaactataaagccgaagaaccaacgaccaacggctgatgatgcaggcactctcttcaagcaagtgtggtcgcaaggacaggagcatataaatatatatgcactacatgctaggacatcttcttggttttggcatatatatagctccgaattacattttcttctgctggtactatatatttaatagtaaggtagttagtagagctatgtgagttatgttgtactgttggtgtttcctgatatcaatgtgcatatagttttgatcgctttgtaatggggggaaaaatctacaaaaggccggaagaaacatgctcacattggtctcaacaagtcaacggtgataaataaggcagatatattatgacttgttaacc

SEQ ID NO: 127478 - DNA, 1720 bp, Zea mays
  Clone ID: MRT4577_47730C.1
tagcaagctagccagccttcctgtagcgcggcagagaggctgcccctgcctccacccggcggcggcggcggcggcgctgctgctgctgctgctcgtgtcgctcgccgcggcggcggacatgtcgatcgtgtcctacggggagcgcagcgacgaggaggagcggcggtaccaggtgttccgggacaacctccgctacatcgacgcgcacaacgccgccgccgacgcgggcgtccactccttccgcctcggcctcaaccgcttcgccgacctcaccaacgacgagtaccgcgccacctacctcggcgccaggaccaggccgcagagggagaggaagctcggcgccaggtaccacgccgccgacaacgaggacctgccggagtccgtcgactggagggccaagggcgccgtcgccgaggtcaaggaccagggcagctgcgggagctgttgggctttctcaacaatagcagctgtggaaggcatcaaccagattgttacaggcgacttgatctccttgtctgagcaagagcttgtcgactgtgacacttcgtacaatcaggggtgcaatggaggtctgatggactatgcgtttgagttcatcatcaacaatggcggaatcgacaccgagaaggattacccttacaaaggcacggacggacgatgtgatgtcaacaggaaaaacgcgaaggttgtcactattgacagctacgaagatgtaccagcgaacgatgagaagagtctgcagaaggcagttgcaaaccagcctgtcagtgtcgcaattgaggctgctggcacagcatttcagctctacagctcgggtatcttcactggaagctgtggaacagcgctagaccatggtgtcacggccgtcggctacggcacagagaacggcaaggactactggatcgtgaagaactcatggggcagcagctggggcgagtccgggtacgtgaggatggagcgcaacatcaaggcgtccagcggcaagtgcggtatcgcggttgagccgtcatacccgttgaaggagggcgctaacccgccgaaccctggccccagcccgccgtccccgaccccggcgcccgccgtctgcgacaactactactcgtgccctgacagcaccacctgctgctgcatctacgagtacggcaagtactgcttcgcctggggctgctgcccgctcgagggcgccacctgctgcgacgatcactacagctgctgcccccatgactaccccatctgcaacgtcaggcagggaacctgcctcatgggcaaggacagcccactgtcactgtcagtgaaggctacgaagcgaaccctggccaagccgcactgggctttctccggcaacacagctgacggcatgaagagcagcgcatgagaaaacgcagcgtggcattaggtcgtcagcagcctgggtgatcgattagagcccctgcgtgggaaatggtcacctggcccctgccctgattgacgacggaagcatggctcggcgtcggcggccgctatctacctatatccattttagtaggtactcaatcctgtacataaagcctgcagaaaaaaaagagggttcggctgtttatggaaccctggcaaatttgctttcgcgcacaatgtaaaactcagctagctctgctaagctccccggcgtagctcgacacagctgcgatctattattatttgatgtaatggggactgatattgcaacgaccaccaatgttat

SEQ ID NO: 127479 - DNA, 2472 bp, Zea mays
  Clone ID: MRT4577_47731C.1
ccgggtcgacccagcgttcgcccagcgtccgcccagcgtccgggggcgcgtgggtaactttttatcttaaggggaactaagctatggctttatgtggcacaaatattcaaacaatccaaataagattatcgtgatgagcttaaagccggccgggctttccccgcaacttctcccactactcacgctactacccctgccctaggccacgtccaacagcctcccccaatccgtcctttggcttcgctggcgacggcggaggctggtgaaggcaggaattggtgagcgctccaattcggggattggcggaggctggtgcgcaccaaggcaggaattggcggtggctggtgcgcgccagttcggggaatcggctgcagctcacagaggacacacgacgtgtgtttccttgccgtcggttcggacatggctaggggtatgagaaagtgcatcattcaaagccaagaagagtatttggtagaggagcctattggggaaacaagtcatcggccacgagatgcagcatatgaccaccatccttctgctagagaacgccaaaaagaaagcgacaatggtaatgagttcaatgacctagatcatcataaaaaagatacaacatcttttgagactacttctggagtgtacccttctcctgatgatgcggatatagaggattctgttgaaggtgaaactaatgaagcaataagtcgtggtccgaacaaacttaaacatgtttggaaccttcaaaaaggaaaacgaattgtagttaactgtaacgagctcggccaacctattggagaggaggcaggagtcttaggaaaattccttggcatggttgctaggaatggctgcttatgtagcttaagcttcaaagattggagattactgataggaaagaaggacaggaacaatgaacaaaaaaacaagcaagatgtactaaagcaagtaaagatgagattcctataccctgcccgcatggaaaagtggatacttcgaactattgaaggcgtcttagatgatcaatgggtcgctcttgtgaataattggtttacaacaaaatcacaggatatcagtgaggcaaataggataaactgcgcaaaaaggaaggcgacccatacatcaggaacaaagagttttgctcggaacagggaagatatgagggaacaagatccagaaaagaaatacccccatagggctgtattgtatatcaatacacacaagagtaacatcacaaagaacagaaacccacatgtggttgcattgaaggaactattagtgcagcaaccaagtttagctgacactagtcatggaaaggttgcatggaaaggagatgcgcttagccaaattttaggagaagagaagcctggccatatccatggtcttggccttgttccgaatccagatcaagtgtttggtggatcaacttcaaggcatctaaaacatcttaatttaacctctttggatgcaacatcaagtgaagatgtagtatctcttcgacttcaagtggaaaaacttatagatcgtgtccagaagcaagatgatactatactaaatttgcaaaataccttggaactgcaaaaaagtcaccatgaatgtctagatgaacctttgtcggcatcaaaagatcttcagccgactatgaatcaaaaaattaatcttcttgatgaactgaatagcacaatggcggatgaaatcgaacatgatgggtacgaggagctgcaggcccagtgcaaaaaatctaaaattcaagaaaagggcaagccaccaatgccacgaggaggactccaaggtggtagagtttctacatcgttaaatgtaaaaaatagaagtaatgcagccaaggtgatgaaccaggacactgctcgaaattcctctaatcatgaaccatacaagagcaagggatctctagaaaattatttgccaagtactaaagacgatcagtctacatcaaaacgaaaagttggttctcatattttcttgatgagttggaggaatcaaaataagaaggttgcattaggtacaataattggttgtgatccaaagcaacaagttggaggagatccattgggcaaagaattttggaaggttcgtctcggtcttgtacttgtgcgtgatgaaccactaatacggccctacaacaatttcgtggttctaggagacataaacaacgaccctatagcatggccttcaagttgtatagaaaaggcagctctttaatgtcaaccattgaacaacagcagatctacatgagggctatgactttgattcttctttaaattagcgttattagtgatgagagcgatgagtctactgagtccggtttatgagtcaacctttgtttgtttcatactatcatagaaaaaatgtcaattcacacattgtgtaatgaattaagttgtggatgatattttataacgacactactatttttaatatagactgattccagatttactatttttaatacagacttatttc

SEQ ID NO: 127480 - DNA, 1957 bp, Zea mays
  Clone ID: MRT4577_47732C.1
cattgggtacctcgaggccggccgggaagaaaaggaaggaagaagggcctcctgtctcctctcacttcctcagtcctcgtccgtctctgctccctcctctctctacctagctagctagccagccttcctgtagcgcggcagagatggctgcccctgcatccaccacggcggcggcggcggcggcgctgctgcttctgctcgtgtcgctcgccgcggcggcggacatgtcgatcgtgtcctacggggagcgcagcgacgaggaggcgcggcggatgtacgcggagtggatggcggcgcacggccggacctacaacgccgtcggcgaggaggagcggcggtaccaggtgttccgggacaacctccgctacatcgacgcgcacaacgccgccgccgacgcgggcgtccactccttccgcctcggcctcaaccgcttcgccgacctcaccaacgacgagtaccgcgccacctacctcggcgccaggaccaggccgcagagggagaggaagctcggcgccaggtaccacgccgccgacaacgaggacctgccggagtccgtcgactggagggccaagggcgccgtcgccgaggtcaaggaccagggcagctgcgggagctgttgggctttctcaacaatagcagctgtggaaggcatcaaccagattgttacaggcgacttgatctccttatctgagcaagagcttgtcgactgtgatacttcgtacaatcaggggtgcaatggaggtctgatggactatgcgtttgagttcatcatcaacaatggcggaatcgacaccgagaaggattacccttacaagggcacggacggacggtgtgatgtcaacaggaaaaacgcgaaggttgtcactattgacagctacgaagatataccagcgaacgatgagaagagtctgcagaaggcagttgcaaaccagcctgtcagtgtcgcaattgaggctgctggcacagcatttcagctctacagctcgggtatcttcactggaagctgtggaacagcgctggaccatggtgtcacggccgtcggctacggcacagagaacggcaaggactactggatcgtgaagaactcatggggcagcagctggggcgagtccgggtacgtgaggatggagcgcaacatcaaggcgtccagcggcaagtgcggtatcgcggttgagccgtcatacccgttgaaggagggcgccaacccgccgaaccctggccccagcccgccgtccccgaccccggcgcccgccgtgtgcgacaactactactcgtgccctgacagcaccacctgctgctgtatctacgagtacggtaagtactgcttcgcctggggctgctgcccgctcgagggcgccacctgctgcgacgatcactacagctgctgcccccatgactaccccatctgcaacgtcaggcagggaacctgcctcatgggcaaggacagcccactgtcactgtcagtgaaggctacgaagcgaaccctggccaagccgcactgggctttctccggcaacacagctgacggaatgaagagcagcgcatgagaaaacgcagcgtggcattaggtcgtcagcagcctgggtgatcgattagagcccctgcgtgggaaatggtcacctggcccccctgattgacgacggaagcatggctcggcggccgctatctacctatatccattttagtaggtactcagtcctgtacataaaccctgcagaaaaaagagggttcagttgtttatggaaccctggcaaatttgctttcgcgcacaatgtaaaactcagctagctctgctaagctccccggcgtagctcgacacagctgcgatctattattatttgatgtaatggggactgatattgcaacgaccagcaatgttatgctgcattcatttcttggaaaagaaatacatctactaatggaggaagggaaagagctccaacaaaatgaaagcttt

SEQ ID NO: 127481 - DNA, 383 bp, Zea mays
  unsure (1)..(383): unsure at all n locations
  Clone ID: MRT4577_47733C.1
ttgaaataagtctgtattaaaaaagtagtaccattacaaaatatcatccacaacttaattcattacataatgtgtgaattgacattttttcctatgacaatatngaaacaaacaaaggatgactcataaactggactcatcagtagactcatcgctctcatcactaataacgccaaattaaatgagaatcaaagtcatggccctcatgttgtgtgttgttgttcaatggttgagattaaagagctgccttttctatctttaagctcatcacgataatcttatttggattgtttgaatatttgtgccacataaagccatagcttagttccccttaagataaaaagttacccacgcgtccgcggacgcgtgggcggacgcgtggg

SEQ ID NO: 127482 - DNA, 318 bp, Zea mays
  Clone ID: MRT4577_47734C.1
ggctatctatctggagtgccgggtctcttgcagggtaggtaacacgtgctttgggacctcctgtgtgttgtaacatgacttatttgcaaggtcattaaagcacattgggcttatacggtgacttgaacggacattgtttattcaaggcatgacctatacatgactataagctaccgataacgaattcatgaggtacaaatcaagtggtctagtataaagcaatgggtctggatttgctaggatgatgataacaaaagactttccaaaaatatgacagttgagatgtacatgtcttactgtaaagtatcaggttccata

SEQ ID NO: 127483 - DNA, 1647 bp, Zea mays
  Clone ID: MRT4577_47735C.1
ccggccggggtctctcccttatcctttgatttataaaagggggtaaaatacggtattattattactagacatctcagctctctggaccatcacgtgtacaattgcgaccgctatatatcaacaaatatatgccatgagtgtgcaagtgtaagttgtgtacacaatatacagggcggttttgtcttaagccagcagctccccggccgatggcaataagctgcttcaacggcggcgccggctggccggagcccgtggtgcgcgtccaggctgtgtctgacacgtgcggcgacacgatccccgagcggtatgtgaagcccctgtcggagcggccccggctctcaccggcctccgatggcagcggcccgaatatcccagtcgtagacctgtcaatgctagacgtggacgcgacatccagcgccgtggcggcggcgtgccgggagtggggctttttccaggcagtgaaccacggcgtccgcccggagctgctgcgcggcgcgcgcgcggcgtggcgtggcttcttccggcagcccgcggaggtgcgcgagcgttacgcgaactcgccggcgacgtacgagggctacggcagccgcctcggcaccgccaagggcggcccgctggactggggcgactactacttcctccacctgctgccggcttccctcaagagccacgagaagtggccttccctgccttcctccctacggggggcaacggaggagtacggcgaggaagtgttgcagctgtgccggagggtgatgcggctgctctccagcgggctggggctggaagccgggagactgcaggcggcgttcggcggagagggcggcgaaggggcgtgcttgcgggtcaacttctacccgcagtgcccgcagccagagctgacgctgggcgtagcggggcactccgaccccggcggcatgaccatgctgctggtggacgaccacgtcaagggcctgcaggtaaggagccccgacggccagtggatcgtcgtcgaacccgtccccgacgccttcatcgtcaacgtcggcgaccagatccaggtgctgagcaacgcggcatacaagagcgtggagcaccgggtgacggtaagcgcggcagaggaccggctgtctatggctttcttctacaacccgcgaagcgacctgcccatcgcgccgatggcggagctggtggggcccgaccgcccggcgctgtacccggagatgaccttcgacgagtaccgcgttttcatccggcaacgtggtttggccggcaaggcgcagcttgagtccctgcaggtcaaagccgccgccggcggaggaggctgtagcgctgcagctgcctcgtccaccagctagcagctactgagctatatatatacatatatcatctgcaggggcagccggtttcagttagctagctgtgcataatcaatgttggatcgaccagtgaataatatacaattatttgatgttaatttctacacaaatgttgtacgtgctgtacattcatcccatgtaactgagcagtaaatgtaagtgtgtggaactcccgttgctatttggtcttcgctcttgagttcaagagggaagtaggataattatccaaatcaatataatactactaaccatcgattattgttttaaaaaaaaaaaaaaaaaagcggcc

SEQ ID NO: 127484 - DNA, 2404 bp, Zea mays
  Clone ID: MRT4577_47736C.1
tccagtcgacggactcggcaaggtcctcgttgtcggcggcgtggtacctggcgccgagcttcctctccctctgcggcctggtcctggcgccgaggtaggtggcccggtactcgtcgttggtgaggtcgaccaaaacggttgaggccaagacggaaggagtggacgcccgcgtcgacgacggcgttgtgcgcgtcgatgtagcggaggttgtcccggaacacctggtaccgccgctcctcctcgccgacggcgttgtaggtccggccgtgcgccgccatccactccgcgtacatccgccgcgcctcctcgtcgctgcgctccccgtaggacacgatcgacatgtccgccgccgcggcgagcgacacgagcagcagcagcagcgccgccgccgccgtggtggaggcaggggcagccatctctgccgcgctacaggaaggctggctagagctaggtagagagaggagggagcagacggacgaggactgagggaagtgagagcggacgcgtgggcggacttgtttgcggacgcgagggggaacaagggcctcctgtctgctctcacttcctcagtcctcgtccgtctctgctccgatccctcctctctctacctagctagctagccagccttcctgtagcgcggcagatatggctgcctccaccacggcggcggcggcggcgtcgctgctgctgctgctgctcgtgtcgctcgccgcggcggcggacatgtcgatcgtgtcctacggggagcgcagcgacgaggaggcgcggcggatgtacgcggagtggatggcggcgcacggccggacctacaacgccgtcggcgaggaggagcggcggtaccaggtgttccgggacaacctccgctacatcgacgcgcacaacgccgccgccgacgcgggcgtccactccttccgcctcggcctcaaccgcttcgccgacctcaccaacgacgagtaccgcgccacctacctcggcgccaggaccaggccgcagagggagaggaagctcggcgccaggtaccacgccgccgacaacgaggacctgccggagtccgtcgactggagggccaagggcgccgtcgccgaggtcaaggaccagggcagctgcgggagctgttgggctttctcaacaatagcagctgtggaaggcatcaaccagattgttacaggcgacttgatctccttgtctgaacaagagcttgtcgactgtgacacttcgtacaatcaggggtgcaatggaggtctgatggactatgcatttgagttcatcatcaacaatggcggaatcgacaccgagaaggattacccttacaagggcacggacggacggtgtgatgtcaacaggaaaaacgcgaaggttgtcactattgacagctacgaagatgtaccagcgaacgatgagaagagtctgcagaaggcagttgcaaaccagcctgtcagtgtcgcaattgaggctgctggcacagcatttcagctctacagctcgggtatcttcactggaagctgtggaacagcgctggaccatggtgtcacggccgtcggctacgggacagagaacggcaaggactactggatcgtgaagaactcatggggcagcagctggggcgagtccgggtacgtgaggatggagcgcaacatcaaggcgtccagcggcaagtgcggtatcgcggttgagccgtcatacccgttgaaggagggcgccaacccgccgaaccctggccccagcccgccgtccccgaccccggcgcccgccgtgtgcgacaactactactcgtgccctgacagcaccacctgctgctgcatctacgagtacggcaagtactgcttcgcctggggctgctgcccgctcgagggcgccacctgctgcgacgatcactacagctgctgcccccatgactaccccatctgcaacgtcaggcagggaacctgcctcatgggcaaggacagcccactgctttcagtgaaggctacgaagcgaaccctggccaagccgcactgggctttctccggcaacacagctgacggaatgaagagcagcgcatgagaaaacgcagcgtggcattaggtcgtcagcagcctgggtgatcgattagagcccctgcgtgggaaatggtcacctggccccctgattgacgacggaagcatggctcggcggccgctatctacctatatcgattttagtaggtactcactcctgtacataaaccctgcagaaaaaaagagggttcagttgtttatggaaccctggcaaatttgctatcgcgcacaatgtaaaactcagctaagctccccggcgtagctcgacacagctacgatctattattatttgatgtaatggggactgatattgcaacgaccagtaatattatgctataaaaaaaaaaaaaaaaaaggcccctagggcc

SEQ ID NO: 127485 - DNA, 615 bp, Zea mays
  Clone ID: MRT4577_47737C.1
cccaactaatttgattgcttctctcaaatgcttaactgcagcacaagtcaaccagtgatgtaactgtataatcatgcaaaaatctagtttcttgttagatcctctataagctattcaactagctgtccagtaatactcagccttcaccaggttagttgggactgataacaacagattgttctgcttatatgctttattggtttgtatacatgatgtcggtgccttctaactttttatcttaaggggaactaagctatggctttatgtggcacaaatattcaaacaatccaaataagattatcgtgatgagcttaaaggatcgtaacttgggagatgaacggttttctgatttcaattgcagatagaaaaggcagctctttaatctcaaccattgaacaacaacacacaacatgagggccatgactttgattctcatttaatttggcgttattagtgatgagagcgatgagtctactgatgagtccagtttatgagtcatcctttgtttgtttcatattgtcataggaaaaaatgtcaattcacacattatgtaatgaattaagttgtggatgatattttgtaatggtactactatttttaatacagacttatttc

SEQ ID NO: 127486 - DNA, 1846 bp, Zea mays
  Clone ID: MRT4577_47738C.1
ggaagaagggcctcctgtctcctctcacttcctcagtcctcgtccgtctctgctccctcctctctctacctagcaagctagccagccttcctgtagcgcggcagagatggctgcccctgcctccaccacggcggcggcggcggcggcgctgctgctgctgctgctcgtgtcgctcgccgcggcggcggacatgtcgatcgtgtcctacggggagcgcagcgacgaggaggcgcggcggatgtacgcggagtggatggcggcgcacggccggacctacaacgccgtcggcgaggaggagcggcggtaccaggtgttccgggacaacctccgctacatcgacgcgcacaacgccgccgccgacgcgggcgtccactccttccgcctcggcctcaaccgcttcgccgacctcaccaacgacgagtaccgcgccacctacctcggcgccaggaccaggccgcagagggagaggaagctcggcgccaggtaccacgccgccgacaacgaggacctgccggagtccgtcgactggagggccaagggcgccgtcgccgaggtcaaggaccagggcagctgcgggagctgttgggctttctcaacaatagcagctgtggaaggcatcaaccagattgttacaggcgacttgatctccttatctgagcaagagcttgtcgactgtgatacttcgtacaatcaggggtgcaatggaggtctgatggactatgcgtttgagttcatcatcaacaatggcggaatcgacaccgagaaggattacccttacaagggcacggacggacggtgtgatgtcaacaggaaaaacgcgaaggttgtcactattgacagctacgaagatataccagcgaacgatgagaagagtctgcagaaggcagttgcaaaccagcctgtcagtgtcgcaattgaggctgctggcacagcatttcagctctacagctcgggtatcttcactggaagctgtggaacagcgctggaccatggtgtcacggccgtcggctacggcacagagaacggcaaggactactggatcgtgaagaactcatggggcagcagctggggcgagtccgggtacgtgaggatggagcgcaacatcaagtcgtccagcggcaagtgcggtatcgcggttgagccgtcatacccgttgaaggagggcgccaacccgccgaaccctggccccagcccgccgtccccgaccccggcgcccgccgtgtgcgacaactactactcgtgccctgacagcaccacctgctgctgcatctacgagtacggcaagtactgcttcgcctggggctgctgcccgctcgagggcgccacctgctgcgacgatcactacagctgctgcccccatgactaccccatctgcaacgtcaggcagggaacctgcctcatgggcaaggacagcccactgctttcagtgaaggctacgaagcgaaccctggccaagccgcactgggctttctccggcaacacagctgacggaatgaagagcagcgcatgagaaaacgcagcgtggcattaggtcgtcagcagcctgggtgatcgattagagcccctgcgtgggaaatggtcacctggccccctgattgacgacggaagcatggctcggcggtcgttttttacctatatcgattttagtaggtactcactcctgtacataaaccctgcagaaaaaaagagggttcagttgtttatggaaccctggcaaatttgctatcgcgcacaatgtaaaactcagctaagctccccggcgtagctcgacacagctacgatctattattatttgatgtaatggggactgatattgcaaaaaaaaaaaaaaaaaactcgagcccgg

SEQ ID NO: 127487 - DNA, 2165 bp, Zea mays
  Clone ID: MRT4577_47739C.1
acccgtccgaaaaaagatacaacatcttttgagactacttctggagtgtacccttctcctgatgatgcggatatagaggattctgttgcaggtgaaactaatgaagcaataagtcgtggtccgaacaaacttaaacatgtttggaaccttcaaaaaggaaaacgaattgtagttaactgtaacgagctcggccaacctattggagaggaggcaggagtcttaggaaaattccttggcatggttgctaggaatggctgcttatgtagcttaagcttcaaagattggagattactgataggaaagaaggacaggaacaatgaacaaaaaaacaagcaagatgtactaaagcaagtaaagatgagattcctataccctgcccgcatggaaaagtggatacttcgaactattggtgagagatggagacaacacaagtccaatctaaaatccttacattttgatgcgcataggagcaaggaaaataatctaaaaaatgttccagaaggcgtcttagatgatcaatgggtcgctcttgtgaataattggtttacaacaaaatcacaggatatcagtgaggcaaataggataaactgcgcaaaaaggaaggcgacccatacatcaggaacaaagagttttgctcggaacagggaagatatgagggaacaagatccagaaaagaaatacccccatagggctgtattgtatatcaatacacacaagagtaacatcacaaagaacagaaacccacatgtggttgcattgaaggaactattagtgcagcaaccaagtttagctgacactagtcatggaaaggttgcatggaaaggagatgcgcttagccaaattttaggagaagagaagcctggccatatccatggtcttggccttgttccgaatccagatcaagtgtttggtggatcaacttcaaggcatctaaaacatcttaatttaacctctttggatgcaacatcaagtgaagatgtagtatctcttcgacttcaagtggaaaaacttatagatcgtgtccagaagcaagatgatactatactaaatttgcaaaataccttggaactgcaaaaaagtcaccatgaatgtctagatgaacctttgtcggcatcaaaagatcttcagccgactatgaatcaaaaagttaatcttcttgacgaactgaatagcacaatggcggatgaaatcgaacatgatgggtacgaggagctgcaggcccagtgcaaaaaatctaaaattcaagaaaagggcaagccaccaatgccacgaggaggactccaaggtggtagagtttctacatcgttaaatgtaaaaaatagaagtaatgcagccaaggtgatgaaccaggacactgctcgaaattcctctaatcatgaaccatacaagagcaagggatctctagaaaattatttgccaagtactaaagacgatcagtctacatcaaaacgaaaagttggttctcatattttcttgatgagttggaggaatcaaaataagaaggttgcattaggtacaataattggttgtgatccaaagcaacaagttggaggagatccattgggcaaagaattttggaaggttcgtctcggtcttgtacttgtgcgtgatgaaccactaatacggccctacaacaatttcgtggttctaggagacataaacaacgaccctatagcatggccttcaagttgtatagaaaaggcagctctttaatgtcaaccattgaacaacagcagatctacatgagggctatgactttgattcttctttaaattagcgttattagtgatgagagcgatgagtctactgagtccggtttatgagtcaacctttgattgtttcatactatcatagaaaaaatgtcaattcacaagttgtgtaataaattaagctctggaatgtctttcattgcgacactactatttttaatatagactgattccagattaacagatctacatgagggctatgactttgattcttctttaaattggcgttattagtgatgagagcgatgagtctactgagtccagtttatgagtcaacctttgtttgtttcatactatcatagaaaaaatgttaattcatacattgtgtaatggattaagttgtggatgatattttataacgacactactatttttaatatagactgattccagatt

SEQ ID NO: 127488 - DNA, 488 bp, Zea mays
  unsure (1)..(488): unsure at all n locations
  Clone ID: MRT4577_4773C.1
aacggaattcgccggggtcgagcccacgacagtccgcaccacaccaacctacgatctccctttaatattcacnnccgtcggcaccctccgcattcaaggatgcgagatcatttgatgagaagcggcctgacnncggacaagactttatcannccctcnngaggttggaagtcgtcttgacaaccatttgaccacacgttatagtgcctaagaatccagtgacaatggatgggcattcctccccagaccctagcagcggcttcaatcttcgcttggctaaacacgctttgaggacccgggcgcactgcttttgctgacttaccccacatccagaagggagatgcaccccttccaacctttgtgcttccgccttcagtgggacggcaatgctagattcttttgtgaaaaacccttgactcggcaatgacttattcaccctcgagtgtggagtccctctgacaaccattgacaacgttaaaggccaaagat

SEQ ID NO: 127489 - DNA, 562 bp, Zea mays
  Clone ID: MRT4577_47740C.1
gcgacgacagccgttcgatcagcgatcaacggcccagatttaatgaggccgagatcacgccacagccctccgattgagtcctgcggtccagatcggcccagcgaagggggtacgccctgatctaatcgtggccgttgaataagatccaacggtcaggagcctttcccccaatttccagcatcccgagcggcggcggtggcgctcccacggcggagcttcgccggcgagcgcgcaatccggtgccaaaccacccagaactggaaattaatcggtgcgaaatcgagaggggaagatagtgaatctacagaggggggtctcaccggcgattgaaggggttgcagacccgcccacggagaagagcggattcacggtggagcttgctcgacgacgagcaattccttgcgtcacggtggcgcccaacccgaattggaggcgcggacagcttccccgggcgaagacgatactccctgacccaactccaagagcggagaccctccaaccacgacgttccacggcggcggcgctcctctccggtttctctctctctcggtgttacggcagt

SEQ ID NO: 127490 - DNA, 873 bp, Zea mays
  Clone ID: MRT4577_47741C.1
gggtacctcgaggccggccggggaagaaaaggaaggaagaagggcctcctgtatcctctcacttccctcagtcctcgtccgtctgctccctcctctctctacctagctctagctagccttcctgtagcgcggcagagatggctgcccctgcctccaccacggcggcggcggcggcagcgctgctgctgctgctcctcctgtcgctcgccgcggcggcggacatgtcgatcgtgtcctacggggagcgcagcgacgaggaggcgcggcggatgtacgcggagtggatggcggcgcacggccggacctacaacgccgtcggcgaggaggagcggcggtaccaggtgttccgggacaacctccgctacatcgacgcgcacaacgccgccgcccgacgcgggcgtccactccttccgcctcggcctcaaccgcttcgccgacctcaccaacgacgagtaccgcgccacctacctcggcgccaggaccaggccgcagagggagaggaagctcggcgccaggtaccacgccgccgacaacgaggacctgccggagtccgtcgactggagggccaagggcgccgtcgccgaggtcaaggaccagggcagctgcggtaaaggagcttccataccaatctccgccctcttcctctctcttttttttattactatactcctgctgaaataaagctgacctgcttagtaactctagctagaacatgggaagcttctccagccgtgtccatccgcaacttgcaggaatttttattgctatccacatgagcagaataaaagagtcggggatttgtatcttctacggttgtacctgaaaggtcaacgctcagcggcaagcttcacgttggataaaaaaaaaaaaaaa

SEQ ID NO: 127491 - DNA, 1018 bp, Zea mays
  Clone ID: MRT4577_47742C.1
gcgcgccacttcgcccatggcagccacgcctgctcccttcgccgcgcgtcgtgtcgcgccgttcgccgtcgagtctcgctacccatcgcgaagtcccatgctgtcagcctccgcacatgtcctaagccgtcagtttgcctccatctcgtggtagtgttgcgctgccgtcgagtcccgatatcgatctggttgtcgtcgaagtgaagcttagtttaatgattgccaagggttcgatcaaagattttattcggagactgtcgacgttctcgcaagcttgaagtcggacttactttggatgataagtctctgatgttcgagagaggcgaggcctgtaagcgctctcttgggactcaaccaaatatctaaactggaaaactgtcatcgccctcgcggatatcgaatcaaatcagtattggtaagccaatttattatttcagttaatcaaattagattagctagatttattagtcgtaataattctcgtgtttagcagacgtgtcatgtctgtattagatgtttgctaaagtacctcaacacctctggtaacgtgatcgtgggaaattattgcgtattatggtacaacttaggtctaaaatgcaggatttacaaagagtgtgttagaggaagtataaattaagcgtgtataaattggctcgccaatcgcgaggaatggtcaagttaataatacgagaaaaaatagatttagtatttcatatgatcaattaaatgccctagataaatatctagcactaccaaaatgagtgaaagcgaataatatcgataagtttgtttctgttaggattcaatccagctaagttaaaaataatgtagatgatgagtcgtgtctaggctaattatgtttaaagtgtatgatttgttttcgatgtttgtgttaggtttgtttaatttagagaagcgtaattattgcgcttagtcgtatgtcgataactgatattatcgtataaaattgttgtaacatcaaaaatcgtatggtggtaatttagagagagatcttccg

SEQ ID NO: 127492 - DNA, 234 bp, Zea mays
  Clone ID: MRT4577_47743C.1
gagcagtatgagggcattccatactactcatcagtactgtcttgtcctatgcgacagatacctgagcaggagccagtacaatgtgggcctacttcaagttcttgtcttgaatgtcaagctggacatgctttcctggtagagcaccttcagaatctatgattagattctggattgggtccggtttctcacctctctagtatttctgcacctatcagtacagatgctacacgtttg

SEQ ID NO: 127493 - DNA, 473 bp, Zea mays
  Clone ID: MRT4577_47744C.1
ccttgcttatttctctcccttcatttactttaaaagactatcactctccgacaccgcactcctatccataccattccacacccttccccccctgtcccccattctagacgacttaccacggaccaccacggagtcatccttgcttctacgcctctctctacccctcgcacacttcgccgactaccccatgcagaaggagagcaccctccaccttggcatccacctgagcaccaccatccccatcttcgccaataccctcactggaaagactatcatcctcaccaacgcatattctgcccccatcacccacttccaagccaagatccacaacaccgaggacctccttcctgaccagcagcgcatcattcttgctgtcaagcacctcgaggactggctcacgctcgcctactactacattcatcaagagagcaccctccactctgtgttgcctttcagggtcggcatgctcatct

SEQ ID NO: 127494 - DNA, 383 bp, Zea mays
  Clone ID: MRT4577_47745C.1
gccggccgggtcgggagtatttaaggaggagaggaggaggccgggagtgggacgagcggtgccgggtccgggtggctgtgcgccggtgacgtcgttgggtggcgccttccacgtgcagtccggagatggcacgcgacgcggggcccgtcgctctcgcgaggacgacgtggaggcggcaggcaggcggggacgatcgctcgcggctcgcgcccacatgtctcatgtatcgtctctcctccagtccagtccagtccagtcctctcctactaccctacctcccctaacatgtgtgatggccgcgcgccacctgggctcgcggatttcctttggcgcgccttcggcagtttctttcttgctaaaaaaaaaaaaaaaaaaggccccta

SEQ ID NO: 127495 - DNA, 454 bp, Zea mays
  unsure (1)..(454): unsure at all n locations
  Clone ID: MRT4577_47746C.1
cggccgaggtacaagctttttttttttttttttttttttttttattttttttttttttttttttttttttttttttttttttttttagaaatggaccttcttatttttgggaagccacaaacattagacaaaaaacacccggggggggggggggccaagggcgaatcccacccccacgcccgccctgagcggaggatccgggctccaaccccagggggcgtggaacgaccctatcatggccccccacgcgataatatcaacggagccacctcccacgctgaggccggcgtgcacgccggttccgatgggggcgggggcggcctgggcatccttaatcccaaaccggtgcggcagctctgcgccgcgcttcgttcgagagaagacggtgccgcccccgtgtcgcttcacttggcacccacgggggagggcacctcgccgatggttgacnttttgc

SEQ ID NO: 127496 - DNA, 249 bp, Zea mays
  unsure (1)..(249): unsure at all n locations
  Clone ID: MRT4577_47747C.1
gaggaccaaagcgagggggggggcggggagaagcgccgagcagcacggcgagggaaacggcggcgccagcgcgcagcagggcgaggggagcaacagcacgcggcccacgnaccagagcangccgagccaccgcggagagagcggacgccagggcgccagcaacaccaacaacgcggggggcgaggccgacagcaagccccccgggaaccacaccaccggcgacgagcagacgcgcaggcgaaagcacaa

SEQ ID NO: 127497 - DNA, 420 bp, Zea mays
  Clone ID: MRT4577_47748C.1
tttttatttttttttttttttttttttttttttttggtttttttggactaaccccttttttttgaatcaaagggccaccacttaaaattttccccaccaaaagggaattttaaaggttttcctagggtccccctaaggcatggttttaaaagggaactaaaccaatccttttaacaaagcttactaaaatgagttgcttagaatgggttttccccaaaaaagaatggcaccaaagcttgcatgaacaaaagggacctggccgttcaaattagaaacataaaatgggaatcccccgaaagttacacaaataaatgcaccagtcctagtggggttccaaggattggacaactctaattgtttgtttttgaaaggggaggtgcctttgttttgcatccaagggggagccgacccggtttggtg

SEQ ID NO: 127498 - DNA, 121 bp, Zea mays
  unsure (1)..(121): unsure at all n locations
  Clone ID: MRT4577_47749C.1
tntatgcatatagtaaaaacccagcccatgaacccctgaacaggggcccctcntgcagnccctgcctaatggacctgccggcctgagccatgtgatttccanttgccanagcaagcatcat

SEQ ID NO: 127499 - DNA, 192 bp, Zea mays
  Clone ID: MRT4577_4774C.1
gcatatacttcctactcgatcgatgtacgttttttttatctgcaataaaaatcatcgtcgctgcaatacgatctgtctcataagatcgacaggggatcatgaaaaaatatattacgaaataagtaggactacagcagaaatgaagtgttaaaaaatcaaaagtaaggtcttccggccccctttttctttttt

SEQ ID NO: 127500 - DNA, 566 bp, Zea mays
  Clone ID: MRT4577_47750C.1
actcctatgggcgattgggaccctcgaggccggccggggaactaagtcctcgatcatgcctgcaaattaccgtgatgcatctcaagatcctaggcatcgttgtgttcctcgccgtgccctcatccggcggctctggccgccttggatgtgatagagatggtggtcgacaagccgacttactcacacgttcctgaagcttgtgcaggacacctaggtcgcgggagaggccaatctcctccagtcggcgacgctactggtcgtccccgaaaaacttgctaagcctctggtgtcgctgcccggcgataaggtgcgagcgctggtgaagaaccacgtccttctcagttacttagaccccatcaagctggatgagatgaacacacgcaccggcatcctccccacgctgctctccgtcaccgacaagaaactcggcatcctcgactacatcagtgtcgacgacggacagatgtacttcgtagctcccggcgtcccctgtgtggacaagctcgtgaaggtcgtcgcagcgcggacgtactctgtgtccatcatggagatcagcgagcccattt

SEQ ID NO: 127501 - DNA, 232 bp, Zea mays
  Clone ID: MRT4577_47751C.1
cccacgcgatccggatcgccacccggatcactgaagttgggcagaggaggtccgaacatggtgtgtctggtacgatacattctgcccgatcgcaccaagatgtgtaagctgaagctttaacccctgaatgccatgtcaacttctcagttaaaggctcagttgacttgcgccatcaatatgatattcaaccatttgatgccgtgaatgtggaggatgacccaccaactatatg

SEQ ID NO: 127502 - DNA, 476 bp, Zea mays
  Clone ID: MRT4577_47752C.1
ggccgcggattttttttttttttttttggattgacaatatatatatcacgcgattctgggcatttatacaacctgtaatatgtatggcaacgcaagcaccatagaactagacactgggtcagtttgtccatcccaccaccgaacctgcactgcttactacacttatgcatgcatcacaagacagcacatgagggagcgggcgcgcatcatgatcatggccacgcgcgcctccctcctggcggctgcgtgctaggatgtcgctgcccaccccttcctgcgaaagccgcacgaaccgtaccaccgaacccccgatcaaccaatggcccgctgaaagcactgtggggatacttgtcctcgcatactacgcggtcttgcctccagcttgatagtcgctgcactgccctgccgagcgccacgttccgcggcacggcgctctatttctgatttacgttgacaattactttcgcaacacctcc

SEQ ID NO: 127503 - DNA, 342 bp, Zea mays
  Clone ID: MRT4577_47753C.1
cccacgcgtccgcccacgcgtccgcccacgcgtccggcagcttctgcttgctctggggggaaggagagagagagagcagccgagagagatctagtagagaggctagtatgtggtcctcgaacgaagatgttggcggtgttcatcgagcacgtggtggaggtgccggcggagctggtggcggccgtcagccggacgccgacgaccaagactaaggcgttctagctggtggggcgcttgctggccacgtccgagcctgccgagtacgtgcagctcggagaccacggacacctcgcctactgccacaccaactaggcgctactgcgtcccaagtcgttcgcggcc

SEQ ID NO: 127504 - DNA, 230 bp, Zea mays
  Clone ID: MRT4577_47754C.1
cggccgcccttttttttttttttttttaaacctattaaaaggttaaaacgtttaatttggaacaatacttttttcgtttcatttgaattggtcatcaagtcatttgttacactgacactgccacccatggtgatgcgggacacattattactcaatcatggccgctaaatgactcaactagctagctagccagcggctatactacaacacataaattcttcaatggggga

SEQ ID NO: 127505 - DNA, 292 bp, Zea mays
  Clone ID: MRT4577_47755C.1
ggggggaaaaaaccatccataacgacgtttttaaaaacccaggggcacagggggggggacataaccagaaaggtttacaacatcgggggggggaaaccaaaaggggggcaagagccgcacaaaagcctggcgatgaccggataaggatacttttaggactaataaccattataacctttctcacccttataaaactcagcaccaacccccttggagtccttttggaggggtgccaaatccttacgggcctaaaaaaaattgcccttcttaatacccttaccgaaataccagg

SEQ ID NO: 127506 - DNA, 630 bp, Zea mays
  Clone ID: MRT4577_47756C.1
cggagccccactcaaagtccaagtcgcgtctcccagcctccctccactgtcccacaccccaacactgttccagtccagcggctagcactagcagacagagcccctcctccccctagctcttgctcttcccaggcacagcgcaacgcttccagctagtctcgagacgaccggcagagatgatgaggcgttgcagcatcgccgccctcgccatcttcctcctcctcctcgtgtgctcctcatcctcctccaactgcgcggcagccgctcgcctcctgcctggcgccggacatctccggcctctccgccatgccgccgtgggcgccagtggcgacgagctttccgcgggctccgagacgatggaggcgtgcgaggaggggaacggcaaggacgagtgcgtgcagaggcagctgctcctcgacgcgcacctcgactacatctacacgcggcacttcgactctgctagtgctacggcccccctacggaaaaagttggtttgtggagggaatattttataatcacttgctagaatgctacctagattgctacctagatgaacgctgctgcggctaattaatttacatccggacggacgtttgcatccgtctacttagtactccctcccgtttttta

SEQ ID NO: 127507 - DNA, 839 bp, Zea mays
  unsure (1)..(839): unsure at all n locations
  Clone ID: MRT4577_47757C.1
cttgttgattttggtgtttctgtgaccagcaccacatcaagacgaccactccaaagtccaaagtcgcggctcccagcctccctccactgtcccacaccccaacactgttccagtccagcggctagcactagcagacagagcccctcctccccctagctcttgctcttccacaggcacagcgcaacgcttccagagatgatgaggcgttgcagcatcgccgccctcgccatcttcctcctcctcctcctcctcgtatgctcctcatcctcctccaactgcgcggcagccgctcgcctcctgactggcgccggtcctctccgtgccgccgtgggcgccagtggcgacgagctttccgcgggctccgaggtgacagcccaagacacgatggaggcgtgcgaggaggggaacgagaaggacgagtgcgtgcagaggcggctgctcctcgacgcgcacctcgactacatctacacgcagcacaagggcaagccgtgaccgcgagggaggatgccatgccgcagctgcagtggagcgaggagcttgcagctatgcaggccaccgtctcggctcggctgctagtgctacacttctacggcccccctacggaaaaagttggtttgtggaggggcctagggaatattttataatcacttgctacaatgctacgtagatgaacgctgctgcgggctgcggctaattaattaacatccggacggacgttgtcatccgtctactagtactagctagtatatatatatatggctgtgtacgtctccaagtcttatctaatatatatgcatgcacatgggggggaacaattaaataataacatggtaanagcc

SEQ ID NO: 127508 - DNA, 290 bp, Zea mays
  unsure (1)..(290): unsure at all n locations
  Clone ID: MRT4577_47758C.1
ttttggtttttttgttttttttttttggcccggcgctcggtgntgttttttcgcgntgtcttcgnctctcgtgcgccgcgctgcgcttcctctggcngcgctccgtgctnggctggccggggcctnggggtgcgtttttctttgttggggtggggtcgcctttcttgctgngncccctcggctggggggcctnnccgggcngcgnncccgtgtctggcgggtgcngccctgggggcctttcngcttntgccggggtgcntgctcccggcgctggggngcgcggcgccggt

SEQ ID NO: 127509 - DNA, 1497 bp, Zea mays
  Clone ID: MRT4577_47759C.1
gtggcggccggctcgagggccggccggggctcgcggaaaaaaaaaaaaaaaaaaaaaaaaaatttacaaaaaaaaaagcaccagtagcagtctaccaccataccaccaatctcccacattaagccatccgtcaccactcaccagccacccaaccagcactcactcactcactagctccgtctccgctccgtccaactcgtacacaacccctctttctctctatcttctctccatccatccatcctctcgcccttccacagctagctaagcagtacgacgtagtactagcatttagcagttcatcaacgcgctcaacctagcacgacctacggcgatgaggcgccgcggcagcaactcctcgccgcttgcggctgctgcccagctgctccttctcctcctcctcctcgtcgccggctgcatccacagcgcagcagcggcggctcgccacctgccttctcctggcgccccagtccaagcgctggatcaccaagccgagaccggtggcaaggctgcatcagctggtgcagacggcgccggcggccttgagatccaggaaggcgtgacgggcaacaatcgacgggaaaaaaaaaaaaaaaaaaaaaaaaaaaaaaaaaaaaaaaaaaaaaaaccggccgggaccacactccaaagtccaaagtcgcgtctcccagcctccctccactgtcccacaccccaacactgttccagtccagcggctagcactagcagacagagcccctcctccccctagctcttgctcttccacaggcacagcgcaacgcttccagctagtctcgagacgaccggcagagatgatgaggcgttgcagcatcgccgccctcgccatcttcctcctcctcctcgtgtgctcctcatcctcctccaactgcgcggcagccgctcgcctcctgcctggcgccggacatctccggcctctccgccatgccgccgtgggcgccagtggcgacgagctttccgcgggctccgaggtgacaacccaagacacgatggaggcgtgcgaggaggggaacggcaaggacgagtgcgtgcagaggcggctgctcctcgacgcgcacctcgactacatctacacgcagcacaagggcaagccgtgaccgcgagggaggatgccatgccgcagctgcagtggagcgaggagctcgcagatgcaggccaccgtctcggctcggctgctagtgctacggccccccctacggaaaaagttggtttgtggagtgaatattttataatcacttgctagaatgctacgtagatgaacgctgctagctgcggctaattaattaacatccggacggacgttgtcatccgtctactagtactagtagtctagtactagctagtatatatatggctgtgtacgtctccaagtcttatctaatatatgcatgcacatggtggtggacaaattaaataataacatgtataaccaaactctcttcttaaaaaaaaaaaaagggcggccgccaccgcggtgga

SEQ ID NO: 127510 - DNA, 377 bp, Zea mays
  Clone ID: MRT4577_4775C.1
ctggagcatgcgtgcacacaagcgcgatggctcccaagatcctaggcatgcttgcggggcgcgacagggcctcaccggctgctctggccggcttcgatgtgatagagatgctggccgacaagcccacgtactacacgttcctgaagctcctgcgagacaccaaggtcgcgggcgaagcgaatcatctccggtcggcgacgctactggtcgtgcccgacgaacttgccaagcctatggcgtcactgcccgcccataaggtgccgctggcggcggataaccacgtacttctcaagtactacgaccccatcaagctggacgagatgaagacacgaaccgacattctgcccacgctgctctacgtaaccgacaagaaacta

SEQ ID NO: 127511 - DNA, 524 bp, Zea mays
  Clone ID: MRT4577_47760C.1
aaaaaaaaaaaaaaaaaaaaaaaaaaaaaaaaaaaaaaggcaaaaaaaaaaaaaaaaaaaaaaaaattttgtaccttgcccgggcggccaataaaaaagggaaaaatatttgcttttttccttcccgctgggggctttttaaggggtgttttttgaggttccctttcccccttgtggggggttgaattacattttaatgggccccatttccccttttggggggctggttaaaccttggtggcccccattttaatagccttggactggtaaaactttggccttccccatttttttcgatttggccccctcccctttttcttcccttgggtttttcacaatgagtcccgaatggaccccctttctaacggttcattaaccccgatgggtgtggggcccccccttatcgggacccttaaacttggcaggggcttagggcccccccctttgggtcttttcccttgctttgcccccaaggcccccggttttcccttttttgctttaattttggggctccttttagggtt

SEQ ID NO: 127512 - DNA, 1832 bp, Zea mays
  Clone ID: MRT4577_47761C.1
gaatccaagattagattgtatgattcgttgcaaatatatgactcgcaagtttctcaatttagcatagagttgctagctatgcaagctacaccttatttttttgaacataatggcaggagctctgcctctcaattaagaagaatagaattgatccagttttaaggaaaaccggacccaaaacctacacagggcgcacggtagaaaaaccggtgaaggccctaacaaaccacctagacaacagcagcctcacacacacaaacacatctagagtcattgttgccaagctcaaacacaagggacgagcagctccgactccccaagacgagccgcacactgccaaagcaactcgacgacgcctaaatccagacaccgacgcaaggaataagatcacggcgcgccatcgttgccaagcctcgcacaccccacacgaggcagctccgattcttcgccacgagcaaagatccacaacgccgaactccgggagaaaacagacgcctaaagcgacaatggccccgacaccaccgagccaagcggagtgacaaagagcctccacaacgccgacgaacacacaaactagaggtcttctgggccgcgccttcaagaaggagaaacgacatcgaaaagtcgtcgccgcccgcctggtaccaaccaagcaaagtttcctccgaagacctcctgtcgtccgccgacccaccaacccagcagccccaaccttcagagccccaacatcggacgagcaccagcgaaagaccccaagaaggccgaggcgagggttcccgcattgtggtgagaggtccaaggacagcaccctcaatagggcaggggtggcgcccgcgggcgtcaccgctgtccgcccgcaagcgggcatggctttcgccagaggccctcccaccacacgccccaacgcacggagctagccgcccctgcagaaggcgccgcagacagctgcagatccggcgacggccaacgccccaaccaaggcaagtacaggcaagccacgccgccaccacagcgggccagccgcacgcgtgggtgccgacgccgcagaccagctacgaccacgcgagcgcgcaggcaccgccgcagcagccgcaaggccacccgcccaagccagcaacagggaggagcggcggaaggcgaccagccccccagatccgggcagacagcccgcagatccgaccaacccaacgcagatcaagacgccgaccacctcatcgtagacgcagacgagtggaggtcccgccaccgccaatccggtcgactgcgcaggcccaccgacgcaccacgccgaacaccaccccggcacatgcccgggaccagcctgtcgacgcctccgaaggctggcacgcggaggccgcgaaccccacgcgcaccagattccagacctccacgcgcggcgccgctccctgccctgggggcgccagacagcaccttctccgcgcctgcgacccacggccggccgcatgcccccctgctgcgcggacacccagccaggacccgcaacgcccggaagtgacatacgaacgccgcgctcactgccgccaggatgccgccgaggccgagccgcgccggcgaagggtcgccgccccacacacgtcgcccccacctcctggaacccgactagatccgggcagacgcgaccaaagcagagaaaaatcgccccgccgccaccttccttggggccgcgtggacatgcggcggcgccctctggtgacggcgaggtgggatggagtggagggagggggcggcggcgctagggtttcgggacgcccgtgtagtaagttgacatccttagcaagcaagttgaggaagaaatcaataattgtagtagc

SEQ ID NO: 127513 - DNA, 1442 bp, Zea mays
  Clone ID: MRT4577_47762C.1
ccatcgaggcccgcgcggccgggcgggcaccacactccaaagtccaaagtcgcgtctcccagcctccctccactgtcccacaccccaacactgttccagtccagcggctagcactagcagacagagcccctcctccccctagctcttgctcttccacaggcacagcgcaacgcttccagctagtctcgagacgaccggcagagatgatgaggcgttgcagcatcgccgccctcgccatcttcctcctcctcctcgtgtgctcctcatcctcctccaactgcgcggcagccgctcgcctcctgcctggcgccggacatctccggcctctccgccatgccgccgtgggcgccagtggcgacgagctttccgcgggctccgaggtgacaacccaagacacgatggaggcgtgcgaggaggggaacggcaaggacgagtgcgtgcagaggcagctgctcctcgacgcgcacctcgactacatctacacgcagcacaagggcaaaccgtgaccgtcagcgaggaggatgccgcagctgcagtggagcgaggagcttgcagctgcaggccaccgtctcggttcggcacttcgactctgctagtgctacggcccccctacggaaaaagttggtttgtggagggaatattttataatcacttgctagaatgctacctagattgctacctagatgaacgctgctgcggctaattaattaacatccggacggacgttgtcatccgtctacttagtactccctccgtttttttagttatcactggatagtttaattttgcactatctagcgataactaaaacaaaacgaaggaagtactagctagtatatatatggttgtgtacgtctctaagtcttatctaatatatgcatgcacatggtggtggacaaattaaataataacaagtataaccaaacctctcaaaaaaaaaaaaaaaaaaaaaaaaaaaaaaaaaaaaaaaaaaaaggaaatgagtcagttatctctcatgaggactgtggagagctggttgaggaaagaaagagacgaggacaggaggaggagaaaggagcgaaaggagaaaggcctcccagaattcgacaaggttgtcgagggtagtcgggttataggtgatccagcaaagaacgcagacagagttataaacaacgggtgggcagctggacggctaacctcgacgattgcaggagaggaaaatttcgtcttcagctctaacagcgtacttaggcaatgatctagttttgttttcctttatctatacattgaaaacggtaaataatagtcttgcggatccaatagagatatcgttggggctttggcatttatagcgaaagttctgtcaggaaaggagaattcactctatatagtttggatttgaggattcacactgtaattttattcgcagctgagtgttcgagaaaaagaaattgcactgt

SEQ ID NO: 127514 - DNA, 294 bp, Zea mays
  Clone ID: MRT4577_47763C.1
ggaagctgcctttccttctccctgtgcttaaccagaggtgcccatgggttggacaatgaggctggtcacagcagcactgttactgggtctcatgatggtggtcactggagacgaggatgagaacagcccgtgtgcccatgaggccctcttggacgaggacaccctcttttgccagggccttgaagttttctacccagagttggggaacattggctgcaagttccctacacttgtaacaactacagacagaagatcacctcctggatggagccgatagtcaagttcccgggggcc

SEQ ID NO: 127515 - DNA, 544 bp, Zea mays
  Clone ID: MRT4577_47764C.1
taccctcgaggcctgccgtgggtcgcacgcgcggagaaggtgttgtctggcgcccaagggtagggagcggcgccgcgcgtggaggtctagaatctggtgcgcgtggggttcgcgacctccgcgtgccagccttcggaggcgccagcaggctggtctcgggcatgtgtcggggtggtgttcggcgtggtgcgttggtgggctgcgcggtcggccggattggcggtggcgggacctccactcgtctgcgtctacgataaggtggtcggcgtcctgatccgcgttgggttggtcggattcgcgggctggctgcccggatctggggggctggtcgccttccgccgctcctccctgttgctggcttgggcgggtggccttgcggctgctgtggccgtggtggcagcggcggtgcccgcgcgctcgcgtggccgtagctggtctgcggcgtcggcacacacgcgtgcggctggcccgctgtggtggttgcgtggcttgcctgtccttgccttggtcggggcgttggccgtcgtcggttctgcggcgcctt

SEQ ID NO: 127516 - DNA, 557 bp, Zea mays
  Clone ID: MRT4577_47765C.1
aaaagagaacggctccgctctattatattcttcaaccaaaaaaaaagagggattttgtttccgcttgccaaacggggaaactagaatagaatcgctccattctaattgactctgcaaccaaacgcactcttatctcgcgagctccaaaccgagcggaactgacactgaaccgagccagccaacgagacacgattatttcgtacaaacctatcctcgtcaaccagacgggcactccgcgacggcatcgctacagcctacaggcactaataactgcactggcacagcgacactgcacacgcattttccccgtgcttgcagttgcagtgcagctgtacccacattaccctgtcagtctcggccattgcattgcctcaagaagcagcaatggagttgccaaaaccaatgggcgtgcttctgctcgggttcttcgtcttgtgcagagggaatgaactctcgtcaaatcgaccgaatgtttcctttcttttcgagagttgcgagatcacctgcactgcattggcgggtaaccaaacttaaggttccccgtttctcgcagtggg

SEQ ID NO: 127517 - DNA, 2638 bp, Zea mays
  unsure (1)..(2638): unsure at all n locations
  Clone ID: MRT4577_47766C.1
gaacgtaatggcaggagctctgcctctcaattaagaagaaaggaattgatccagttttaaggaaaaccggacccaaaacctacacagtgcatccacacaacccagacaacaacaacccccacacaatacacatcctgagtcatcgttgccgagctcaacacatgggtcgatcagctccgactccccaagataggcagcacaaggctaaatgaaaaacaacgacgactacaaacatcggcccaggaggaggaagaatgcggcgcgccgtcgttgccaagcacgagacaccccactcgagacagctccgattcttcaccagcgagacttccaaaactttgatcctctatcctgcccccgccagcagtagcgacgccttcaggaagggagtgacgtcgaggacgccaccgtcgccggtccgaaatggacggngctttcacccatgtaagacagtgctgggaagcacgacgccctcaacaggggaagcggcgcccaggggcgtcgccgtcgccaaggctttcgcccgccttttttttttttttttttttttttttttatagtaaacatcatatatttggatgatagagtataaacatgaacggtacttgcaaacacacacatatttcaaaactgaagatatattcctatggacacttgaaacccaagaaagccctatatatctgttatgtactgactacttcgctattaatgtatatatctgtacactgtactaaaaggagcaatagacaaaagccgatagagccgtaccgctgccggtgccgcaaatgatgtgcagccattagctgctaacttgctaagctctgcttccgaacatcaggtatccaagaagtgaggataacaagaagacaagcagcacaaacgcagagaagccccgaggagacgcctttgttttccggaggagatccagctctttctgaatcttcttgttttcctctgcatatcttctttccagttccaacttggatgtagaatcatccttcaagaaggagaaacgacgtcgaaaagtcgtcgccgcccgcctggtacaaaccaagcaaagtttcctctgaagacctagcagagcagtgtagatcgccagcaccaagaagaaagctgaaaggtcagccacgccgatgtcaccccgccaagccatcgcgtgttgtcaccttctgccgtccaccgacgcaccaacccaccagccccaaccctcagagccccaacgccggtcgagcaccagcgagagacctaagaaggccaaggcgagggttcccgcatggggcgagaggtccaaagacggcaccctcgatagggtaggggtggcgcccgcgggcgtcaccgctgtccgcctgcaagcgagcatggctttcgtcgcaggacctcccaccacacgccgcaacgcacggagccagccggccctgcccacaccacaggccgaaacgagaggcggagagataaatctagccggagaggctcaagatccggcccccagccccacgaccatgacccaccacctgcagaaggcaccgctggcagccgcagatccaccaacgcccccgatccaagcaccacgctacaagcacaagcgagccacgccgccgccgcagcgggccggccgcgtgcgtgggcgccaacgtcgccggccagccacggccatggccacgcgagcgcgggcactaccgccacgggctagccgcacgagccaccatggttgcggccacaaggccacctgcccatgccagcagggaggagcggcggacggcgaccagcccctagatccggccagtcagcccgccgatccggccttcccagcggcggatcaggtcgccggccacctccaggaagagggaggagtggagtgggtggaagaagggagggaaatgagtgagagagcagtcccgccgccgccctcctcgctgctcgtcgaacttccggcgagctgctccggcgacggcgggggtgaagaccggcggcggtgggtgcggtcgatggggagccgcccgtgtcgcccagaggaggatgacgtcagagcaggaaagaaattaggctactactgcgaatttttaatccggccgaccgcgcagcccaccaacgcaccacgccgaacaccaccccgacacatgcccgagaccagcctgctggcgcctccgaaggctggcacgcggaggtcgcgaaccccacgcgcaccagattccagacctccacgcgcggcgccgctccctacccttgggcgccagacaacaccttctccgcgcgtgcgacccacggccggccgcatgcccccctgctgcgcggacacccagccaggacccgcaacgcccggatgtgccaaacgaacgccgcgctcactgccgccatgatgccgccgaggctgagccgcgccggcgaagggtcgccgccccacacacgccgttgccacctcctagaacccgactagatccgggcagacgcgaccaaagcagagaaaaatcgccgcgtcgccaccttccttggggccgcgcggacatccggcggcgccctctggtgacggcgaggtgggatggagtggagggagggggcggcggcgctagggtttcggnccgcccgtgtcgcccagcagaaggcgaccgagcggctttggttctgtcatgttagcatgntttgt

SEQ ID NO: 127518 - DNA, 349 bp, Zea mays
  unsure (1)..(349): unsure at all n locations
  Clone ID: MRT4577_47767C.1
gtccttttttttttttttttttttttttttttttnggggggtgttttctttgggggcagccaatcaatgactttgaactttcaattactatcgaatcccgggtgacacaaaccctctttaacgagcgagaagggtttgggagtaagatactttatagcactttacattgacttgagggcaggagcccacaaacaagaaacttttatacaaaacacgttttcctacaatcttgtagcttgggttgacaagggtgtccaagcctgagacgacttggattgattcgatgacatttccaactttgacgttagccagaggtgcctcattctcaggtacatatccaaatactggg

SEQ ID NO: 127519 - DNA, 158 bp, Zea mays
  Clone ID: MRT4577_47768C.1
caacaaactcttgtttgctttttttataaaagaggcctgctatcagcttgcgctaactgtcagggcaaacggcacttatgcatacaacataaacccctaaaggggggttagatctggcatgctggactcgcaaaataatgggacggcctaccggcaga

SEQ ID NO: 127520 - DNA, 348 bp, Zea mays
  Clone ID: MRT4577_47769C.1
tcgtgcttggacgcgcgggaaaaccgataagagagcagatctgaggaaaacaaccctggaaccaaagcatggggctgcaggaggaatttgaggagcatgctcagaaggcatagacctcgcctgagaacacgagcactgagaacatgctgaccctatacgggctgtacaagaaagccacgggatggagatgacaacaccgagcgtacgggcatattctaccaaaaggacagggacatgcgggatgcctggaaggctgccgcaggccaatggtaggatggagcgatggatgactacatcagcaaggggaaggaactctaggaggaggctgcacgcttttaaaactttatt

SEQ ID NO: 127521 - DNA, 366 bp, Zea mays
  Clone ID: MRT4577_4776C.1
aagcgctaatggttggtaagccatggccaccgccgccgggtttagcctcctaaggtcctctttggggggttcccggttccgggcggcaacccggacaaaaccggggtccttggggggggcaaccggcccgggcggggccggggcggggccaatttggccgtccatgtcaaggtcttcttcaaaccggccttacaaccggacttctttccggtcaagcccaataagggagtccatcgggtcccgggggaggacccgccgttccatgacggccatgataacttacgccaccaccaacgtgttaatggggggcgccggttccggggggttgtcctgggcgtacaagctttcaagggaccccgccgtggg

SEQ ID NO: 127522 - DNA, 202 bp, Zea mays
  Clone ID: MRT4577_47770C.1
ccacgcgtgcgtcaaaagtccattcatacttgcgacttgactggttatttaggtgataacgatttggggaccattgtgccctgttgaactcatgtattaccttgtgaagtccgttgtgtctggtttctacctgaccgtttcgttatctgatgctgtttctttaataaacaagagaaaaacaccacctaaaaccatacaaaca

SEQ ID NO: 127523 - DNA, 202 bp, Zea mays
  Clone ID: MRT4577_47771C.1
cctgaagaccgagagggacaagaagcgtgagacgtatttccccatgaggcagtacgctatccaggcctagctccgtgaacgcccctttatcctgtcaagttttgctcagcagttacttgaatttgagacaaatctatctccatccaagtcatatgtcgctgatcaactgcatgatgaaaaacgagtactttatgcttgttta

SEQ ID NO: 127524 - DNA, 459 bp, Zea mays
  Clone ID: MRT4577_47772C.1
ccttcctctacggcaggaaaacaggacagctgcacaaaagatggcaaccctggaagaccaaaattgtttacgggaccctaggtagcccaagtttcatttccgttcccatgttcaagcctctcaaatataccctcataaagcgagaaactaaggaacaaatctacgattattgaaagcttaggttttaagctgaccagggcaaacgctcatccaacttctttgtgcattggaccgagctcccgcagtatatttattcggtcatcacaggcttgcatttaagagccttgggcccctgatttttttgctaatactactacatttacctgttgatagccccaaccttatcgctgacgaaggaaccgaaaaggagggagtccacgtcccccatcatcttgtcttggcgccctcgcttaatatagaatttctacctctcctgcaagcgcttgttggccattgcag

SEQ ID NO: 127525 - DNA, 285 bp, Zea mays
  Clone ID: MRT4577_47773C.1
accattacaacagacacgcctatgcgtacggagaatacattcagaacaataactattcctgcgccacgttaaaacagacgggcgttagcttcaggtcttggaaagaatcacttaacatgtaggagcttatttacacacattatccggtcgtatatacaaaaaaattacgcgttgtgcctatgaacggtatgtttgtaaaccatatctctggctgactttgtgaagtcaccctaatttgcatattagaagatcgtgtggtagacattccatgaaaatcattaccca

SEQ ID NO: 127526 - DNA, 354 bp, Zea mays
  Clone ID: MRT4577_47774C.1
gtcgaccacccgtccggaccgagcgaattgaccacagcttctcaccttcgctattttcgatggcacccaaggcggacgggaagcgggctgctaataaggcggcagaggatgagcccgcgacagagaaggcggataatgctccggcggggaagaagcccaaggccgagaagcgcctcccggcgggcaagttctccggtaaggagggcggctagggcaagaaggggaaaaagaaagcgaagaagtccgtggagacctacaagatctacatctttaaggtgctgaagcacgtgcaccccgacatcggtatcttgttcaagggcatgttcatcatgaactccttcatcaacgacattt

SEQ ID NO: 127527 - DNA, 1509 bp, Zea mays
  unsure (1)..(1509): unsure at all n locations
  Clone ID: MRT4577_47775C.1
cccaccccaccatctaactatcctattagctttcaacatgctatattgtatgctagtacctttatttcttttttttttctaactcctgcacttccttattttacagatcccagagtgatctagaggctaatctgttcaagcttatggaaaaacggggatacggagaggagtatataaatcgctataaaatgatgacaaggttccatcatcaacgggttccactagtaattttggtgtgtggaactgcctgtactggaaaatcaacaatcgctacacaacttgctcagaggctcaatttgcctaatgttttacggacatggtgtatgagctgctgcggacatcaacagatgcgccacttacttcagttcctgtgtgggctcgcgattttaattcacctgaagagcttatcactgaattctgcagagaatgcagagttgtacgcaagggtttggctggcgatttgaagaaggccatgaaagatgggaaaccaattattatagagggaatacatttggatccaagcatttatcttatggatgaggaaaagagtgatggtaattccaggacggagaagacagtaacagattctgaaaatccaggcgtctctgtagaaaggaaggttgaacatcaattcaaaaatggactagcagagaacagaatggattctactgaggacaacaaaaacttcgtcaaaagcaaaaaaagcacactggagaaaggtgatgggcacaaagatttggaccaacagaagaataatgccaccaagaaagacaaacctgctgctgagccgataattgttccaattgtactgaggatgtctgattttgatcacaaagcattgctagaggaatggatagccactagagctttcagagataattgcattcctcaggatcatcggaaacttataaacaaccttaagcttattcaggactacctttgttcttttgagtcacagggattgaccattgttgatatctcagcaaattcgtttcctcaaacattagattggcttcacagctatcttcttcagtgcatcgagcgaggtcttttggctgcgtgtttagaaagctgcaatcaaggtcaatgacactctttggatgtaacctgtccaaccacacctcagtgggcattatatgctggcaatggacactaagaatatcattgtaaaggattacgcatgagtctggatatcatctccaaccaagaccgatgtgaaaataccatcgtgatgttgtcaataccagccataagcgtgggtctgtctgattggggttactcgcattaatattgtactgtattgtattagaggttatgcggcatactcataatctgaataagataacaaaatttggcaaaaaaaaaaaaaaaaaaaaaaaaaaaaaaaaaaaaaaaaaaaaaaaaaaaaaaaaaaaaaaaaaaaaaaggaagggnngaaaaaaaggaggggggcgggctttaagggggccagcgttggaatacctggcctttggtgtcattaattttcat

SEQ ID NO: 127528 - DNA, 490 bp, Zea mays
  Clone ID: MRT4577_47776C.1
ggaggaggaggcgcatccctccatcctctgcgactgcgtgctctctcgagctcgagtcgattgatgattcatcttcctagtctcgtctccgcgccattctccaaatccatctatcgtcaccatcccgatcccagccccagacccgatgcagcaacgcctcctccaagtacgatttcgtcaaggtcaaggtctgcctcggggagaacgccgaccactactacgtcctctccaggttcctcctcagcaggatgctcacagtcaccaagattcctaatcatgtcgccatcaagattgcccttgagctcaagaagctgcttgtcgacaacagcctgcttgatgtatcccagagtgatctagaggctaatctgttcaagcttatggaaaaacggggatacggagaggagtatataaatcgctataaaatgatgacaaggttccatcatcaacgggttccactagtaattttggtgtgtggaactgcctgtactgg

SEQ ID NO: 127529 - DNA, 2055 bp, Zea mays
  Clone ID: MRT4577_47777C.1
cattgggtacctcgaggccggccggggagccagctgtcttgttcctccgtccgggaggacgaggaggaggaggcgcatccctccatcctctgcgacttggtgcgtctctcgagctcgagtcgattgatgattcatcttcctagtctcgtctccgcgccattctccaaatccatctatcatcaccatcccgatcccagccccagccccagccccagccccgccagacccagacccgatgcagcaacagcaggacccagcacccgccgatcccgacccactgccgccccccgacctcggtgatgccgccgcctcgtccgcaacgcagacgatcccttcccgcaacgcctcctccaagtacgatttcgtcaaggtcaaggtctggctcggggagaacgccgaccactactacgtcctctccaggttcctcctcagcaggatgctcacagtcaccaagattcctaatcatgtcgccatcaagattgcccttgagctcaagaagctgcttgtcgacaacagcctgcttgatgtatcccagagtgatctagaggctaatctgttcaagcttatggaaaaacggggatacggagaggagtatataaatcgctataaaatgatgacaaggttccatcatcaacgggttccactagtaattttggtgtgtggaactgcctgtactggaaaatcaacaatcgctacacaacttgctcagaggctcaatttgcctaatgttttgcaggtgggtttattatttatcttttccagtctatagctcatgtctcatgtgcctcgtttccttacccttgtgcaactgcagacggacatggtgtatgagctgctgcggacatcaacagatgcgccacttacttcagttcctgtgtgggctcgcgattttaattcacctgaagagcttatcactgaattctgcagagaatgcagagttgtacgcaagggtttggctggcgatttgaagaaggccatgaaagatgggaaaccaattattatagagggaatacatttggatccaagcatttatcttatggatgaggaaaagagtgatggtaattccaggacggagaagacagtaacagattctgaaaatccaggcatctctgtagaaaggaaggttgaacatcaattcaaaaatggactagcagagaacagaatggattctactgaggacaacaaaaacttcgtcaaaagcaaaaaaagcacactggagaaaggtagaaccagtgaaggtctatcttatgctcagaaccacgaaaccaaggtccatgattctgcacgttctcaagaaaaaaatcccaaggatgaaagtgatgggcacaaagatttggaccaacagaagaataatgccaccaagaaagacaaacctgctgctgagccgataattgttccaattgtactgaggatgtctgattttgatcacaaagcattgctagaggaatggatagccactagagctttcagagataattgcattcctcaggatcatcggaaacttataaacaaccttaagcttattcaggactacctttgttcttttgagtcacagggattgaccattgttgatatctcagcaaattcgtttcctcaaacattagattggcttcacagctatcttcttcagtgcatcgagcgaggtcttttggctgcgtgtttagaaagctgcaatcaaggtcaatgacactcttggatgtaacctgtccaaccacacctcagtgggcattatatgctggcaatggacactaagaatatcattgtaaaggattacgcatgagtctggatatcatctccaaccaagaccgatatgaaaataccatcgtgatgttgtcaataccagccataagcgtgggtctgtctgattggggttactcgcattaatattgtactgtattgtattagaggttatgcggcatactcataatctgaataagataacaaaatttggcattgtttgctttatctgaatataaacttgtaaagatttatctacgtcctgcataaaaaaattttggcatcgtcctcaaagccgaagtcattcgaaggcaaaaa

SEQ ID NO: 127530 - DNA, 332 bp, Zea mays
  unsure (1)..(332): unsure at all n locations
  Clone ID: MRT4577_47778C.1
tcgcccacccttcctcccaccctttcctccactcgttctccgacacgaagactcacgtcgngggcgctcatctacaatgtctgcgccaacccttncctacccttctttctcaaaatctataatatcgctccctccgcgactccgacgttccccttcctacacaactccaacgtaccactcacgaaatacccctatctctaaacacacgccatgtccctcttcatcattacctgccacgcaacgtcacaccttcgcaaaccccgctaaatcaccttgacgccgaccactctcaatacgctggtcgccacgcactctaggtactgactcgcata

SEQ ID NO: 127531 - DNA, 150 bp, Zea mays
  Clone ID: MRT4577_47779C.1
atgccacttaagttcgatgtagtaacatggctgtgtatccctcatatactctggggggtacgctcgctacacttatgtatacaactagtatatagccttggccaacaggccttactcttcttgggaaaatgcatcgtgagggggatagat

SEQ ID NO: 127532 - DNA, 267 bp, Zea mays
  Clone ID: MRT4577_4777C.1
ttcttgtctctttttctctctctgtcctgcgcgccgggcagatacgatcgcctacacctccggtttcttgtgtgggtggtgatcggtgaaggaaggggaacttaagatcaccctcttcgggcttgggaggcaatctcagaagacattcaggcctaagaacgatgcaccgtctggcaacaaggctgtgcacctgacgaatcacattcgtctaaccttatgaagccggactttgaggtatgctgtccggttgccaccaggggacgatct

SEQ ID NO: 127533 - DNA, 258 bp, Zea mays
  Clone ID: MRT4577_47780C.1
cccacgcgtccgttttttttttttttttttttttggcggaataggtataggtagattaataacaaaagataagtcattacttgcggttaaaagcgatcaaagaatgccgatcagcggatcaagtacaagctctttgccttagatctgtacaaagcatggatcttggctagcctagctgcacgccccttggacacctaggcgataccatgaacaaaatgcaccaaaagaaccaatcatatgttcgcagaacactagaaa

SEQ ID NO: 127534 - DNA, 1125 bp, Zea mays
  Clone ID: MRT4577_47781C.1
atgaggcaatcgggtcttgtgccagaaaagcctgttgctgaaggtacctcaactgttgaacatgaacaaatcgcagttggagaagggagcgataacaaagatgaagaggattacactatcctgagcccagcaaaacctagccaccttgaatttggtagatctactatgattgcagatgatatggttataatgaagaaattgggctactttggggaggctgagagtaaacttgttcgttttgctgacgaggaagtggttccagagttgaaggatgatgaagttgtgtttaaaagcttcttcagagcagggcttcggttccctctatatgactatgaaaggtttgacaagggtgccaaaggtttgaaaaggaaaaggattgtcagtattttaaatagacaagctgccaggctagtaaaggaggatgagaatatttcgaaaaaggcaaaatctactcctgagccgaaggcagcaatctccataaaacggaagcttaacatgactctcactgctgagccgaaggtagctgatgcaagagaagaagctccttcaacaccccctgctgctgaaatagcagaaattttaaagaagaaggatcaaccttcggtcgtaaaggagaagactgaaggtcaaaagagacaaagaattgtcaatgtcatgcaaactattgagcgaacaccgcctctagcctcgacatccagaatggtgcctgctgcaagtgccgaagttgaagccactgccgaagctgaagccgctgctgaagctgctaatcttgtgagcacaatgtcaggaattgacaagcttatatcagatatggtcatagaggagacagttgcgaccgcagaggaaaacatggccgcagtgcctggcaaggggaaagaaggtgttgatgcttcgtcggaagagaaaagttttgaccttcagcacctgggaggtcaggaattgtcagaggcagataaagaggagctaaaagaatatgaaatatcttgtggctatcagccagggtctatgcttttctgcagagttgacaaagaaattctgggatgtatccgcgaccgcgccggagcaaaaataatcagcactctgtcaaagagtgttggtttcccgaagctagaagctagaatctga

SEQ ID NO: 127535 - DNA, 419 bp, Zea mays
  Clone ID: MRT4577_47782C.1
cccatgctatcagtctacttaactgactgtctacacaacacatctctcgattcgaaattacgcactcatttaacgtatgatgaatccactaaatactatcattacacttctgcatctaactctatcttaagatttattatcatctaaaataaccgatgaattatcaatttttcatatcttaaacttaaataaatgcttcaccaacatatttattgtatcaaaaaacatggaattgaaccccttcatgcttactataactagatatttcagctttctactggctgctctaactataaccccagctctatctattatcttcaacaaaatacgtctcatattaaaccaattgactagaataatcctacttttggattccttatattctaaactcttttccacactaatcaccaaatctattc

SEQ ID NO: 127536 - DNA, 702 bp, Zea mays
  Clone ID: MRT4577_47783C.1
gacgcctgcaggttcggtccggaattcccgggtcgacccacgcgtccggtcaggttgcatgagactcgctcaggagacatctgtaatgcctgtgtgctgcttgtgaaaagatggaagaagttgccggcaggatcaaaaaaaaactggaatcacgtggtagatgcaagagcaggccctagtctaaagacaacattgaaaccaaagaaagtgaaaactctatctggaaacaggatgaaaagcaaccagatcagcaaactgcagaaggaatttaaacgccacaactctgatgctcacagtaccacctcaagtgcctctccagcccagtctccatgctacagtaaccagtcagatgagggctcagatacagagatggcttccagctctaatagaactccggttttttccttcttagatcttacctactggaaaagacagaaaatatgttgtgggatcatctataaaggccgttttggggaagtcctcatcgacactcatctcttcaagccttgctgcagcagtaagaaagcagctgccgagaagcccgaggagcaggggccggcacctctgcccatctccactcaggagtggtgactgaggttcatttagaagggagcaaagagcgttttaaactttgaaaagaccacaaaacaaactgaccctcctatttttaacttggatacctgctattctgccaaaagacat

SEQ ID NO: 127537 - DNA, 567 bp, Zea mays
  Clone ID: MRT4577_47784C.1
aaaaaaaaacaagtttttgatacagggggggaatgttacaacaacggacatttgttccattaccccataagggtactaccacaaaaataatattttcaagggctttttaagggttatgccaaactacaaaaatttcaactgcagtttttaaaaaaagctcggggggggggcggttcagggttcagcgactataaactataaaatcgttggtgggcaaggcaagttccaaggaaaaaaatggccaaatgccggtgtttcaacaaaaaaaagggaaggttccattttttcaggagcaaaaacgaggaaaggggtggtttttttttcaaatcctaaaaaaacacaaaaggggtgatcatttcccaaaagggggggatttggtggagccccgaccaccaggggtggcacccccacccatgccttcagaaccaccggagttgccatatcctcccccaccatacccttttggagccccataccccccccctccttgggcccccccatatgacccgtaggccccatatggccctccttacatggggccaccttttggggagccataacctgggc

SEQ ID NO: 127538 - DNA, 204 bp, Zea mays
  Clone ID: MRT4577_47785C.1
aactcgtatgaatagaaactagatctgaatgacaaagtaaacgttgacgctagcaaaatacgcgcgggggtcaggcccatattctgtatcataaaacatgctgaacccaaatggtggaagaaactcgttcgagatgatcaaaggacacctcactctgtgaaagctgatcgttacacatggaatgatcaagaagatgatcgtgct

SEQ ID NO: 127539 - DNA, 512 bp, Zea mays
  Clone ID: MRT4577_47786C.1
tttttgtttgtgttttgtggtgttcattttttttgttttttttgttttttttttttttttttttttttttttttttttttttttttggggggaaaacaaagggggggttgggtgttaccaccaacaacaacgggggggccttttaactccccccaagaatgttttttgggaggcttttaacttgtccccccccaaacccctgccttggggggggtttctttttttacggccccggcggggggctttacaaactttcgaagacccccttcccccttggtggggggggggggcccaccggccccggggtggcgtttttcactttttggtcggcctggcttggaaggttttttaggcttcgaaacaacccctggtttttttaggggcgggggcgggggcccggcccttgggaacccttttcttggcctttaggaccccctaaccgggtttggccctccccctgggggggtttttttagggtttcttgggtgttattgcccccctggttttcattt

SEQ ID NO: 127540 - DNA, 283 bp, Zea mays
  Clone ID: MRT4577_47787C.1
atgtcgagaacgaggcctttcgagccgcatgcatgcatgccccgtatgcgcaagatggttttgcatgaagcgtaatatatatcatccatgagcagcgccggtcgctgtacataggtgcaagttttccagtgtgcttcatgcttgcgcgcgccaaggaggcggccagtccaatagcccatgctgggccaggaagccaacactagtaatggtggcaaacttgctcgcccttgttagtaccgcgtgttgcgtcgtccctgccccgtgggtcgctcgcaagggccct

SEQ ID NO: 127541 - DNA, 349 bp, Zea mays
  Clone ID: MRT4577_47788C.1
aaaaaatgataaatgcaagtgtatgaaacaaagtacaattacctataaatcgtggtggactctgggaaagtgaaccctatacgcctgatcatttcctacaaaacattacgatgatgccagtgaacaatcttatactctacgatgatacacttgcgtcttaagttaagataacccctactaggaaaatattaagctcttcgtcattagagccataccatctctttgattaacctgaaccaaacttggtggattcttagaccggagagacttatcactgaaacgtacacgttgtctgaatagtgattccaacttacactcctgccatgctattattgctactatgcttgtt

SEQ ID NO: 127542 - DNA, 227 bp, Zea mays
  Clone ID: MRT4577_47789C.1
ggggaacgatcagggggctctggaaaaaataataagggttttgattgtttggttctgcccttggctcatttcattcctgggctactttaacatgcaaaccttaaacattctttttacagccttactaactaggccttaataacccaaaacatggggctccaccctgatgcgcccgcacattaactagcaaaaaaacatggagctccggactttgacatgcaggcaag

SEQ ID NO: 127543 - DNA, 2381 bp, Zea mays
  Clone ID: MRT4577_4778C.1
gaggttcatcgttctgctctggccgccgcgcgccggcgcagatacgtttcatggtaccctcttgcatcgcactcccacatggcggctgcggctcaagctaggtcgtccttcctcgtcctgctcgtcgccacgtggtcgctgtcgccgcggcttgccggggcctccacgtccacggaagcagcagctgccggccgtggcgttacgctacgcctcgacgcgagccaggtggtcgtggacaatggcgcggtgcaggtggcgctgtcggcgccggagggccggatcaccggcgtcagctacagcggcgacggcgagaccaccaacctgctggggtacgacgccggcgagggagactccggagggtattgggattcggtatggaactatcccggctctggtctcccaggacagtacaatacgttggatagcacagagttcaacgtagtgtcctcaagtgaagatcaagtggagctttctttcaggagcacatacaacccgtcgcatcgaaacagccttcggctaaacatcgacaagaggctggtgatgctcagaggtagctctgggttctactgctacgccatctttgagcatgacagggcctaccccgctctcaacatcacggaggctcggctcgtcttcaagcttaacacggcaaagttcgattacatggctattacagacgatatacagaggtacatgcccagcgcggcggacagagaagagcctcgtgctgtcccgctggcttacaaggaggctgttctgctggttgaccccaaggaaccccagttccgaggagaggtggatgacaagtaccagtactcgctggacaacaaggacaacgttgttcacggatggattagccgcggcgatcccaacgccgtgggtttctgggtcatcactcccagcaacgagttcaagagcggcggccctctcaagcgggagctcacctcccacgtcggccccacatccctcactatgtttatggggacacattacgttggcaagtacatggtggccaacatcaacgacggcgaggcgtggaagaaagtgctaggcccggtgttcatctacctcaactcaggtcccagcagaggtgagctctgggaggacgccaaggctcgggcgcgggcggaggcggcgagctggccctacagcttcctcgcgtcaccggagttccccaaggcggccgagagaggatccgtcgtaggaaggctcctggtcagggacaaacacgagaagcatggcatgcctgctgggtcgtctgccttcgtcggcctcgcctcgcctgggccgcccgggtcctgggcgacggagagcaagggctaccagttctggacgagggccgcgccggacggcaccttccgcatcgccaacgtcagggaaggagtgtacggtctgtacgcgttcgttcccgggtttctcggagactactgctacggttcgccgctgaccgtagcgccaggccgtgccatcggcgtcggcgacctcgtgttcgagcccccgaggtcgggcccgacggtgtgggagattggcgtccccgaccggacggcggcggagttctacgtcccggatccggaccccaggtacgtcaacaggctcttcgtcgtccgagacaggtaccggcagtacggtctgtgggagaggtacgccgacctgtacccggacaaggatctcgtcttcaccgtcggcgaaagcgacgaatccaaggactggttctttgcacacgtcacaagaaaggtagggcaggttgccgtgccaacaacatggcagatacggttcagtctggaccgcgtcgtggcagacgacgacacctacacgctgcggatctcccttgcagcttctcaaatgtgcaggttgcaggtgcaagtgaatggggatgcaaggagaggcagggattttacaacgcccgacatgggcgatgacaatgcgatcacacgccatgggatacatggctcacagtggagccttgagtgtgtggtcgggggccacctgctacgccaaggcgataacaccattgacataaaactcatcgcacaacaaggaccgaaaggtcctgccatggtcgccggggtcatgtatgactatatccgcctagaagggccaccatctagaggcgttgcctcgagccgcattccagcgttctcccttcaccggattttgttcctgttagccttcctagtcatgtcctagtatgtctagctatgtggccatctaacatgtagcattttttttgctagttgttgtatgaaagcaagaaatatgatgatgtagtacaagcaatgttattgtggagagaatggaggcccatgctacactgattaagtatgtattcaacagatcatcaattggccggagataagggatcatgctaaatgttcacatgc

SEQ ID NO: 127544 - DNA, 711 bp, Zea mays
  Clone ID: MRT4577_47790C.1
cattgggtacctcgaggccggccgggtcgttgatcccttcccttcttcgccggcggagcacccgattccagacgagcagatagaccgaacgactcgtgaaagacggctcgaatcacttacattgctcagaagctaccagtgattacatgatcccaggcaatcaagtcgccaccgaggctgccccgaagcctgcccccaccactgaagcagtgaagcagcctcaacgctaccggcctgcgactgtagtgctctcgtgggataccttccaaacccaagagaacttagctgctgatcaggaaattgctcttccacaagctcaacaggtagatcgcacaggagttcaaaactgactggtgtttccaaaaccatgggatgctcacccaccaaaattctactaattcacatctatgagtggcctgaattgagaacaccctgctgagatacatcacatgactaactgtagcgactctatcatgtctctagtagattcaatgtcataatgaggcatcactcggcgacaggtgctaaactgcacctcatacatgcgagacaaaaacttgaagaactgatggtgattgctatatgctggaagcattgtactgcacgtataagaaactactcgtctatgtgcatcgatagactctcttctgctaatggaactggtacctgtacagtggttgttgataggatctgatacctacgatagctatg

SEQ ID NO: 127545 - DNA, 485 bp, Zea mays
  unsure (1)..(485): unsure at all n locations
  Clone ID: MRT4577_47791C.1
ccccaatcttggggatttaacgggcttggtttcttacaggacggggaaggggcaacccttccgcgccaagcaatgggaagtccggtttaaaaccaaagaaaaccggagaaccagaaaaagggcaacacaacacaccacaccacaccacaaacgggcagggcagcgtccaaggggggtttgggcgggtgttcgctcataaaataacacatccctcgtgttttacagactctttttcttcgcgccaccaccaaaaaaaaacctactccacacctggctcagagttcagacaacacaattctcctccggtggggtgggcgaaaggatggagcggttggtggtgggtgggtgggtcanaactcaaaacaagcagaaaccagtcacctggtcaccgcccggcggcggcgggcgcggtgcatcgtcccaggcagaaataggggacgcgggccatgcactggtacaccggcgggtcggggctgagggtggac

SEQ ID NO: 127546 - DNA, 387 bp, Zea mays
  Clone ID: MRT4577_47792C.1
ccggtgcaaaatgatggatggtgtgacgcgttgtaaggagtgtgtgcgtcgtggtcggtcttgcgacggaaccggtgtccctttatcggcgttgaatcgtatcacttctgaacataaaagattgcgtttggaagagaaagaggctgcggagcagcttgctgagtatcaacagaaagccgctgaagctttgtctcgtttgtcgcgcattcgttctcagcgcgagtctttggtaactcggggtgcggagatggtgaatcgtgggttgaaaagtcttgacgaattggatgaggtggagcgtgctgagtcagaggcagtgatcgatgtgcagcttaacggcggcgtcgacgtgattgattggaatgcgatactggctgattttgggtcgtc

SEQ ID NO: 127547 - DNA, 929 bp, Zea mays
  Clone ID: MRT4577_47793C.1
ctcgaggccggccgggaaatttcatgcgttccttatcttccgttccgctcggaagtctctctaccaccttctccccattccgctgttccgccctctcgcgtcgcgtgcctccaggtccctcctctgcgtaactgggtggccgccgatccgccgccaccgccctgcgtcaggtgttccggtgacaagcgtccacctgtgcccggcctcggcggctgcactgcgcgccgcgggagccagcagccgcttctccaccaaggcgaccgtgccgctttcaagatgttggaataccaaaacgcaattggggggagactgaagctgaagggtaaagcgctggacgtaaaggatggtggggtgaagaaaaagaagaagaagtaccagcgtgaggagtcgtctcagattgcgcacgatgagctccacaaaggggggagatctgaatcaccaattgatcccaacaatgagcggattgaatctgacaagaccggagatgaagggaacccacatcctgactatggccatctcacaccagcagagcgacgctacatggaacagaagcagaagatcgacatgcagaagatggccaaagtcgccaacaagtcccatagagaccgcatccaagacttcaatcagtacctggcaaacctaagcgagcactacgacatccccaaagttggtcctggctaacatagccaaactggctgtgttacgcacaacaattgtgtgctgggtctatccatttatgttagcatgttatgtatcgtttaaaacgatttgttgccaccagaaattgatatttaatttcaaaagcatgttccaactaaaaaaaaaaaaaaaaaagcggtgcaaagggggcggggcttgccctttgggtgcaatcatccgtttcctaaaaaaaaaaaaaaagggcccttgggctccaagttttgttccct

SEQ ID NO: 127548 - DNA, 159 bp, Zea mays
  unsure (1)..(159): unsure at all n locations
  Clone ID: MRT4577_47794C.1
gngcngacccgncggtgtaccagtgcatggacngcgtccccgacttcagcctgnntngntgnanngcgnccgtcgnngccgcngcgnggttgaccangcggtcgacccggngactggtttctgcttgcncttgagtcttgacccacccaccaccaaccg

SEQ ID NO: 127549 - DNA, 281 bp, Zea mays
  Clone ID: MRT4577_47795C.1
gactcctaagggcgattgggtacatcgaggccggccgggcctactgtgaacaatggacacacccagatgcctgcttatggaatcggtgagaaggcagctgatatgattaaggaggcgtgggcttagttgagcattgaatcggcaggaatagtgatagttacatacatacccccaagcagttaaatgataatgagttgttcttgaaaaaaaaaaaaaaaaaaaaaaaaaaaaaaaacatacaagtttttcttcgaaaaaaaaaaaaaaaaaaacccgcgccc

SEQ ID NO: 127550 - DNA, 375 bp, Zea mays
  Clone ID: MRT4577_47796C.1
gttggtactctattatgctggggtcttatttttttttaatcctttctcaacctggttctggtttccatccacggatggggaaagtaaaccaactaccccggccacagagcccccaggatccaattggaaataagcggcatagcccgggctgcccagcggtttttaatacacaggtcgggggcgccggggcacactagcaccgctccctgaccctggggggcttatcatgaaaccacctgcaggtcacagggccttggaggggggccttattctaccaatagggggtagcacccgcagttaatttctacggggtcaaaggcaattaaaacgggcggggcggaatcaattcggtacaccaaccagggggctaacatg

SEQ ID NO: 127551 - DNA, 230 bp, Zea mays
  Clone ID: MRT4577_47797C.1
agcctgacatcagaccacgcgtcatcaatgaaggcacaatctaggtgcaagagatttgcttgtcaaccatcacaattcgcctcgcggtcatataggatgacagggcatagtatcgcacacactgtgagcagacttgtcgacagaactgtaacattcggttcattgaatgaagtttgctgacaagatgggtaccaagagcatcgatgttgtccatcgttttttggacgccg

SEQ ID NO: 127552 - DNA, 1653 bp, Zea mays
  Clone ID: MRT4577_47798C.1
ggaccctgcctggtccaagcgagtagcgattagcctgtcgttttctgcttcttgatttttcttcttttcttcaattttttctatggttgcgttccgttgttgctgcagttttttgagattcctggtatagtaatgagattcctgatatggtaatgcgattattttacattttctggttaggatcttgctgacgtgagaattgagatcgatctgaaaggcttgattgtgccttccctacatcaatccatcttgatgtctcttggaaattccccaaaagcgtcaaagaacctgtttggtggttgcattgtttgctttggtaattcaactttgcttttgcttgtttcttctttattccgtgccaatgatgattcactttcaaggtgaattctttgatggttgcattgttggctttggtaattcaactttgcttttgcttgtttcttctttattccgtgccaatgatgattcactttcaaggtgaattctttgattgttttgtgatgttcttgaggcgttcaactgaggcacgaccgaatcgaaatttaattactgctttgtagttcatcaaaatcttggctttaattcagtagtagaaaattgaactttgaaactttgtattcgtgtcaaatctttttttatgttactcatctcaagtgtactagtgatgctgaattttggatgactttatttgctggttcacagctacggtgatatgcatttgaggtgtacacctgaggcacgtcgcacgcttgaagaagcctatgcacttgttctttctgatccttaagtttgaaggttcattcgtttggtctttcgaatggttcttattgcatcagcagctaatttcttgcatgaaaatagcgatttgcttaggttaccctgcacctactttcaacaaatatgtcatgttttttctcattcatttgtgatttgcctccaacgtcctcatgagtttgatcagtacaatatcatgcattttcttaatcaagtgtatggtttggaaaaaaagatgcgttgaagtatcaatgccaattagaataaactagtgctaacttagtcatgctaaaataactagcatgaaccacggaaggaggaaataactggattcgtgtggctgcatgtatgtatgttaatttggactttagacataatatagcattagtttgtatggggtgtgggttttatctatctcgatctggtcttaataaattaagattttctctcagttcggattccatctctgtttgtatcctttgtaaataaagtaccttaattttgtagtgaaaacttttataagaaaactacagcggtggttaccttggcgaagtgaagggtggtggttggaactttggtgaccaaaaaatatgtaaagtggtggacagagatataaagtggtggaaagcattggaatatgatactttggtttgttttgcaaaatttcattgttaagagaattttggtttgtttttctattgataaatggcttgccttttacatcgtagttccatgtttttagctctatttttaagctacataagtgtagctctataagttctattctagaaaaaagagtttttagagcatttaaaaggatgttatgtaacaagagcccaggatcgtattttgaaatatatgataacaaaatcctattat

SEQ ID NO: 127553 - DNA, 818 bp, Zea mays
  Clone ID: MRT4577_47799C.1
gccgggtctcgcacttgttcggaaccctgcctggtccaagcgagtagcgattagcctgtcgttttctgcttcttgatttttcttctttccttcaattttttctatggttgcgttccgttgttgctgcagttttttgagattcctggtatagtaatgagattcctgatatggtaatgcgattatttgacattttctggttaggatcttgccgacgtgagaattgagatcgatctgaaaggcttgattgtgccttccctacatcaatccatcttgaagtctcttggaaattccccaaaagctaaaaagaacctgtttggtggttgcattgttggctttggtaattcaactttgcttttgcttgtttcttctttattccgtgccaatgatgattcactttcaaggtgaattctttgattgttttgtgatgttcttgaggcgttcaactgaggcacgaccgaatcgaaatttaattactgctttgtagttcatcaaaatcttggctttaattcagtagcagaaaattaaactttgaaactttgtattcgtgtcaaatctttttttatgtgactcatctcaagtgtactagtgatgctgaattttggatgactttatttgctggttcacagctacggttatatgcatttgaggtgtacacctgaggcacgtcgcacgcttgaagaagcctatgcacttgttctttctgatccttaagtttgaagggtcattcgtttggtctttcgaatgggtcttattgcatcagcagctaatttcttgcatgaagctagcgatttgctttaggtatcctgcatctactttca

SEQ ID NO: 127554 - DNA, 525 bp, Zea mays
  unsure (1)..(525): unsure at all n locations
  Clone ID: MRT4577_4779C.1
nttttatatagtagctaattatggattacctgttctaaataactatttgtgctacatttgaaggacatctttaggactgcagtgacgcttcagatacccacagattcagataaaacatgtgaggttctacggtttctttattattactttattttttaaaaaaaagaatgtcacctacatcagcttggttagtattccctcaaatcactgttgatccaatttagaccattaagaaaaaacacgagcatagtcattacaatattttcactcttcaaagccattaaaatcctacgaaggaaattgatgtttgtacattgtttttcagggcatatgtagtcatagtgctctccttctatttcctgtcacttgatgacctgtttcacaaagctcaattcatattaaaaaggatactctgcattctcctcatctttaagtgcggtgatccatatttttataaacattgtcttggaaagctggaaggtgctttacattatccatgtgttaggtgggcaagtcatcttacgc

SEQ ID NO: 127555 - DNA, 507 bp, Zea mays
  Clone ID: MRT4577_477C.1
gtggccaaccagaaataagaagttacatttccagattctaatgtgatattggtctccaagggtgttcgataattacttttgctaaaaaaaaaaaaaaaaaaaaaaaaaaaaaaaaaaaaaaaaaaaaaaaaaaaaaaaaaaaaaaaaaaaaaaaaacgaaaaaaaaaaaaaaaaaaaaaaaaaaggttttgcctctcccggggggccctttaaaaggggaaatttttgaaaatttccataacattgggggccgtttaacaattcatttaggggcccaattcccccttatggaggggcataaaacattcaagggcccggtttttaacaacttgggattgaaaaacccgtgggtttcccaaataaaaaccctttgcaaaaaacccctttttcccaagggggcttaatccaaaaaggccccaaacaaaacccttttccaaatttttacacaccttatttggaaaagggaccccctttgtggcggcctttaaagcgcggggggtggggggt

SEQ ID NO: 127556 - DNA, 441 bp, Zea mays
  Clone ID: MRT4577_47800C.1
ggggcacaagaacggagtggtcccaaaagtaaaacgggggaagaaatgctagcttaagggaccatccccaatccgaagtattgaataagtgctgagactttttagaaggccaagcccatctgcacttaacaccactcacacccgcccaaaattaaaacccgaaaaacaaccgggaacaaaaccctgggaccggcattactcagaaagacttacccgactaaagaaaaaaccctcaagggtctgctggctttaggaatcaaggaaaggctttagcaagaatcaacgtagaacctcttgccggaataacttactacaggggggccttaattttaatcttttaaccccagaagaaaaattaacagactttggttgcatccgggctaattccccccttttataaaaacaccctcattgttattcgtgagggttacaacccgactt

SEQ ID NO: 127557 - DNA, 426 bp, Zea mays
  Clone ID: MRT4577_47801C.1
cgcccttgggaagttccatgtttcaccatggttggatgttcttgttcctgagggcattgccccaacggggaaaaaagccccccaacttaccagggtttctattggtgtttgttgacaaacttttacccatgcttgttaccgtttggaatttaagttataaacgatatctttaactttcttcagctaggcctttgtttaattccgaaaagggtcaaatgggggtgttcaaacattccaacctttttgagggaacctttggggttgcatttagcttccttttataaaccgatggttttaatggggggccccctaaagtaaacattgactccaaaattggcgaccctgcggcctggaagatcgacggttataactggttccagcttctggaacacatgaatttccttaaaaatctttaaaggttacttc

SEQ ID NO: 127558 - DNA, 479 bp, Zea mays
  Clone ID: MRT4577_47802C.1
aatttcgcactcgctgagctctctctctctattcggcgcccatgtctgcacgaacaagtcgactctgtacgattacgacaccatacacgccggcatgcctgcgtatatccctacgctcccagctcaagataggccagccccacgctctcctacccgagagtgctccactgcctgactcaccacaggacaacaccaacgatgtcctacactatctcctgtacaagatggaggtgactacatgtttgcaggatagtgtcacctgctttagtgtccggcatggcgttcgacttgtctagagccatgctaacataacctgctgaggctgtactaggtcccaggatctttaagcaggatactgtagactctgaagctgctgcatgctgacagctgtccctcctgagatgaatgctggcaattgcaacatccacttctaaagcttctcaagatggtctcaactagtatggtatgcgatatcacgg

SEQ ID NO: 127559 - DNA, 299 bp, Zea mays
  Clone ID: MRT4577_47803C.1
ggcaaactggcaatgttcatgggatttcccccttccaagataaaaataaaactgggagttgttcctatcactttaccaaaagtccttttttatcacactgttcatgatcaaaattaaatttcttcaaaaaccggggtggggggttccttttatggggcaccccgttagacccttaacccttcggtttttaagcatttaaggggggcttcgatgaacttttcgcaggctttcttgccattttgcacgatgcaatcgtcccttaatttttttgtttttgggcaagcacagcaaattttttt

SEQ ID NO: 127560 - DNA, 575 bp, Zea mays
  Clone ID: MRT4577_47804C.1
gggcttgaatattcctgcgaacttcttcctccctcccttttaaaacatctgcagaccagagggaagcaccccgatgaagacaaccatacacgagcccatgacaaacaatcataagcttcacctaatggtttgctgggcgcttactgagcaataaaaaaatgtaatgctgcaaggggacctggtgaggactgcattgaacatagactgtatcatgcacttgatcctaaaaccaacagctgctccagcagtcccaaagcctgccgaacattattgttaccaaacacaatacggtggtgtacaaaaatcatagcactatttttataaagtagtaaactggtacaagttaaactgatagaccatcaatcggcaccaggatagttaagcgcatctttacatcattaggcgtaacctcttgccggactatccttccttttatccccacacatgaacgctttgtattaatatattctaatcgtaatcctgttggaatgtgtaacgaatatagatccattctttcgctgaagaataagaagaaaaggatattagtacgggtgctgactcacatgatcatggaa

SEQ ID NO: 127561 - DNA, 617 bp, Zea mays
  unsure (1)..(617): unsure at all n locations
  Clone ID: MRT4577_47805C.1
taccggtnccggnatatcccggggctgcaaactagcaatataaaccgcgtcattatcgcacctttgaccaaggtgccgtggatggcgcatcagcctacgcagttgatcactggttcgggcattctgcatgacgctccggtcttcgacgcatagtgccactggcggactacatactgggcctggcgttgtgacacgaacaagctgccttgcggagaagacaaccatctccggcacggaagacacagctgacagcaggctatctacgccatcggagacacttcggtagactcagtatccgctccattaacatgtgcaccagtcccctccaaaacatacaggccgccaatgattccgagatatagcatactcctatttaaattggatctatttatacttattgtattgagggtattgtaggataacaacttaccgatattgtaacaaacactatccagtaggctgataaataaatgctcctagttttagagcagagcccgcggaggccgatctcggcattataagagcccgaaaaggcccacccggccgatgaggtggacgataaggccattcagtgaggccgagcgccacgcgcgcactgccngagccgacagcgggtc

SEQ ID NO: 127562 - DNA, 276 bp, Zea mays
  Clone ID: MRT4577_47806C.1
aatctaagcagatctggatagttaagtttacaactattaactaaaatcacaatgaatacgagatcggtcaatactctaccctatcgaaagctactgtcactcacagtttgctactaggtcactgttgcatcgggtactagttgattgtgcttgaggattttaattttttgaggtcatctagagtaatttattgattggggcacatctagagtaatttattgattggggctgtgctggcacaaaatgaagacaaatgcacacatggaactgatctgg

SEQ ID NO: 127563 - DNA, 336 bp, Zea mays
  Clone ID: MRT4577_47807C.1
gggcgtacgcgtcctcccatgcgttcgaaatgacttctgaatcacccaagaatacgccaacatcgacgctcggagaaatgcttaaaagatcaaagacttgcatattcaatgttttacgggcgccatggttgtcgatgtgctaaacgacttcccagctttggcggtgccaaacttgatcatgtcgatcggtgctggcacagacccggccatacgctctggtgacatccttctaatgaagagcatccttgttgacgtcatcacctacattgatctcttgcgcaagaccctctgctgtatccggatgaactacctgtgggccctggactacaacgttct

SEQ ID NO: 127564 - DNA, 2672 bp, Zea mays
  Clone ID: MRT4577_47808C.1
ccggccggaaacgagcgtaaacggccgcctccatggccactttccctgttaccaccgcccccactcctcaccagagcactccacccacagccggcctgcccggccacctccgtctgcccactgccgcctccgccgatgccgccctcatcaccctctccgccttcctctcctccggccgcctcacgacctcctccccttccctcctccaccgcaccctccgcgccgccgccgaccaccgcctcccgcggctcggcctgcagctccacgccttcctcgtcaagacccgcttacttgccgaccccttctcggcctccgccctcctccacctctactccaccatcgccccgctgcaccgcacccgcctcctcttcgacaggatccccaagtccacctaccccgtcccctggaacaccatgatcctacggtacgcgcaggacggattcttggatgaggcgttcgatctgatggtggccatggaggaatccggcatccccattggtgcctccacctggaacgccgtcatcgctgggtgcgtccgagctgagaacggagagctcgccatcgagctgctaggcaaaatggtttcggttgggggagttgtgcccagtgtggccacgttcaacaccgtgctccacgtgatttcggcgttgcgcggggtgaacgtgctccgagagttgcacgcatttgtgctgcgcaacgctgaggttgtgggacttgggcctgtggatttggatcgactccaggaatccctggcggcaggatacatgtgcagctcctgtgtccagtacgcaggccgtgtgtttcgtgatgtcaggataagcacttgcttcctgggcaacctgatgatatcgggatttcttgacacggggcagcggaatcaagccttgggtgttctgcgagaaatggcgtttggctgtggtcatgaagctcagcatctgccatcggcttcgcttacgctggtcctccctgaggtcaatctggcaacaaagagaggcctagagatccatgcttatgcctatcgccatggttttgagtgtgacacctcggtctgcaatgccttgatggcaatgtatgcaagagggggcaagatatgccggtcagacaaggttttccaaggactggatgctaaagatgtcgtgtcatggaatactatgatttcaggctatgccacggttcatgattttgatctctcatttgagctgttccgtgaaatgcaacgtaatggtaccagacctgatgactacacatttacatcagtgctcaacgcctgcagctttgcctgcaatcacaggacagtaatggcattgcacgggcaaatgataaggatggggctttgccattcctatgttgatgatatgaattctctcatggatgcttatggaaagtgtggtttcattgctgaagctcagaagatatttgatgaaaccgagcgaaaggatacagtttcgtggaatatcatcatttcgtgctacggctacagcagttttcctcaacgagcaatcaggcttttccatcagatgcaagatcaaagctacaaacctaccagagtcactttcattgctgtgctagcggcatgcagccatgcaggcttagtagacgaagcactgcgttatttcgaggcaatgcacggagactacagcattaccgctgatgaggctcactatgcctgcatcgttgactgttttggcagagcaggtcagctccaacgggcttatgagttcatcagaggaatgccggtggttccaaatgcttgtgtgtggggtgccctacttagcagttgcaggatacacggaaatataggcctagcagaaattgccgcgaagaagctcgttgagctggaccctcagcattctggatactggatgctgctaaaggatatgtactcaaaagccaagagatggaatgatgtatcgcaacttcgagctgctatgagagataatggcgttaagaagtgcccaggttatagttggattgaggggcgagatagcgaggtccacagattccttaccgctgacaagcttcactcacaaagccaccagatatacgaagtactaggtgggttaaccgagcagttgatggatgaaggatatgaacctgaaatagatgtcgatttgacatatactgagtgagggatgtactagatttctacaacttgtcttgaaaatctagccatttagctgacatccctagtcccaacaccatgtctattgcaagcagccacgcgaatcttattcaatgattacaaggttgcacgagctaaagagttcagtttctgcccaggttagaagcgctaagaagtaggcgcaagatgttacattttgggctcgtcatctgatgtgtaagttgatgccttgtcacgaaaagatcagacccggagcattgtgtaacaagaatatacagagttcacagcctagtttcaatatttttttggtgagaaattctgattcaaatattccaccatgactcataggaaaggttcctcaagatttactggataagagaagacaaaatgagattgtggaaacagaaaagcagctgctgacttcagtggcttgtaaaatgccttaacaggagtccttgttggaaaatacagaaggcaaagcagcaacggactgttacttttgaacaaaaaaaattcaagaaaaaaaaaaagaaggggggaaacgtgtacc

SEQ ID NO: 127565 - DNA, 343 bp, Zea mays
  Clone ID: MRT4577_47809C.1
attcggttcgaggcgagctgggatacctaactttttgtcttcagggaagtcgggtccacaggccgatactggacctcttgacgggctctctgcattatccgcacgggctcgtcggatgagcgcacccgccacaggcggcctccgcgtacccctgtgctgggggagccaacgtgtacatttgcctgaccgtcagcaaggtacatggttccgtaaaacacttccttgtcgcggatcagggacaacttccgagaacagcgttgctagaagagtgtagaccggggctctatatacgatgaattctcatgccaacgcgcctgcaaaataaaacggttgatccaggact

SEQ ID NO: 127566 - DNA, 466 bp, Zea mays
  Clone ID: MRT4577_4780C.1
acggcgtccgcccacgcgtccgccacgcgtccgggacatctttaggactggcagggacgcttcaaatccccacagattcagataaaacatgggcatatgtagtcatagggctctccttctatttcctgtcacttgatgacctgtttcacaaagctcaattcatattaaaaaggatactctgcattctcctcatctttaagtacggggatccatatttttataaacattgtcttggaaagctggaaggtgctatacattatccatgtgttaggtgggcaagtcatcttacgccaatgagaagcttaggttgaagtcaatgccttggcacaactaatgacatggaaaacaacggtctaggttaacatgggcttcagattgcattgctgggaaagatggaatggaattcaaattttggtggccgcacaagtgtgaagacttgaattcatatatatacttagttaggctc

SEQ ID NO: 127567 - DNA, 429 bp, Zea mays
  Clone ID: MRT4577_47810C.1
ggaagattaggaggaagacggggaagagggggaggaagaacaggaggaggaagaggcccacgacaagattgacaatcacaaggaggaagatagacagggcggcgaggataacaagcgggatgctgacgaacagacgctgactaccacggtctctgcagggcaaggccaacagactgaacgtgaggaggagcttgatgggtatgcacacgaggacggagaggagcacggtactgaagaggaggagatggtccgaagagactactacgaaccagcctagagggcttcctgcagacgggacaaacgaatctgtagaggcatgccagaaaatggatgcagagaccctcgaccactccggaactgttccatcatctcccaacagacagcgctgaccccaatgcaccatgccccaaaaccggccgcacttgtcct

SEQ ID NO: 127568 - DNA, 840 bp, Zea mays
  unsure (1)..(840): unsure at all n locations
  Clone ID: MRT4577_47811C.1
cggccgctcgaggcggncggncngatacctcccattcctcctccctccctcccccgccgccgccgccgctctgctccaggttccccgccgccgccgccgccgttctactccaggttcgccgacgccgccgctgatcttctcaaggtttgccgccgccgctgccgccgctgctctgctccagtttcgccgacgccgccgctgatccgctcaaggagatcgttggagagtcgatcggggatgagcggaggcatgcggcagatcctgaacttggggctgtatgacgggcgcaaacgcgcgtattcgctgcggcgcctgaacctctccaagatgaatttttttcacccgacggcagaagaggcggccgcgcatggcaaggtgctgcccacactggccctcgacaaggcccgtaaaatcaacaggaaaaggatctgcaacactaaactggcgacggcggaggcggcggcgcccaagatggatatgccaaaatccgacctggtcatggggccaccgcaaatctccccctgcctgcagtcccgtcgcttcgtccatttcttccccaccgcctcggagagcaaggtcatcttgggcgaccgcgggaaccgcatgttacgcttcaacatcgtcgatggctcccgctacatggataccctgccatgcctccacggagtcaaggagatgccgatggtcatctccgtccctccaacggacgtgcaccttcctgatgccgaagacactgaggacctctacatcatcgatggcctcctccatccgcacagggcagaagtgcggccgcagttcgaggccctggttgtggagggggttcccaagtccgccgtatct

SEQ ID NO: 127569 - DNA, 400 bp, Zea mays
  Clone ID: MRT4577_47812C.1
aacatgaaagatttgggagatctgcttcaggggaaaaaaaaagaaaaaaaaaaaaaaaaaaaaaaaaaaaaaaaaaaaaaaaaaaaaaaaaaaaaaaaaaaaaaaaaaaaaaaaaaaaaaaaaaaaaaaaaaaaaaaaaaaaaaaaaaaaaaaaaaagggccgccccccaccaaggaaccccgccaccccggaattaaatccggacccggtccctgaagccttccaaccttccctaaaagggggccatataaaacctggcctaaaccagggcaaaaccggttcccggggaaaaatggtaacccgttaaaattccaaaaaactatccaacccgaaacctaaaagggaaaacccgggggtcccaaaggagtaaccaacccaacataaatggcattcccctaa

SEQ ID NO: 127570 - DNA, 198 bp, Zea mays
  unsure (1)..(198): unsure at all n locations
  Clone ID: MRT4577_47813C.1
ggtacccccgaggccggcccgggcggtatggtaactcaaaccgcagtgatactaaacaggctcacgagaagagtgcccttttagatgtattcaggggattgatttctgatggattgggcccaaggatttcagcgtacaatgctataatcttcagcttgtgtagacataatatgcttgngaaggcanntggacctgaag

SEQ ID NO: 127571 - DNA, 367 bp, Zea mays
  Clone ID: MRT4577_47814C.1
gggcgatgggttccccgggggttgggaataactaaaatggggccccaacaggggggggcatacaggtttatagctgaaaaaatcgggcaaacgggaggtggatttttgggctgaatttaaaacaggggtgaaaaactagactttgtacaacggggggaaaaggtgccatgatacaagggcaccctaaagcttttaaaaggggaaaataattttggggcccaaaggggtgcagggtttttaaaaaaaccatataaaacttgggggggggttaaggaactaattaacctgggggccaacctccgggggcactaaagggtttggggatttcctaaaccccaacctttggaggggcttaaggggctttttt

SEQ ID NO: 127572 - DNA, 267 bp, Zea mays
  Clone ID: MRT4577_47815C.1
cgtatgtcatcatttttagcatgtcttatgatgaaaagttgatggatacaaaaacatgagcaccaaggtcatcaatgaagacgcacacgctacaataggcacgctcatgcagagccatacaggagcctgggaccaaagaattgacttctgcagacgttgttttgaaagaaatctgaagcctggcacgggccctgatctatgcacgaggcgtattaactccatgaactttcctccagagctcatgcaaattggttgtggccatcacat

SEQ ID NO: 127573 - DNA, 625 bp, Zea mays
  Clone ID: MRT4577_47816C.1
tgggaccctcgaggccggccgggccggggttcctcacaaatcccgctgatttacgcatatccaacatccaattcgtgatctctacatcctctgccgccatggcgctctctgagagaaaagacctacgtctggacgggagtactacgccaaggatctctctgaaggggaattcggcggcctccagatatacctgggaaacgtaaatatgcccggtatcatggtgtgccgcgcagagaaaccgccatgcaaccccatctccagacgtcaaagataatgacgtatggagatgacaatgcagagcggccgcctcgtcgacatcctcatggcgcatgtctgcgtcgccacgctgacgttcctgctatttgtataccactccggagcggtgaaccagccctatcgaggtgatattcggtcaccttgttttcctggaaaacactcatgctgaaggactactggtgaggatctgatcgctacgaccactggttggatgcctcttgacccgatctattcgatataggattgggcgacgccacgctgttcatctaagagggttgcctatgataataggagttggaataaacggtctctacactagattggaaggcatgctactaggatgattttt

SEQ ID NO: 127574 - DNA, 187 bp, Zea mays
  Clone ID: MRT4577_47817C.1
tcggactatattttttctgaagattcaacgatggccgcgacaatacagaccgcgtctgcgcgccaaatctttgacacccccggcaaccctacaatcgaggtcgacgtgtttttctcagattgaacctttgcaagggcaactttttttattgcagcattaacttcaatatatgaagctcttgacttta

SEQ ID NO: 127575 - DNA, 272 bp, Zea mays
  Clone ID: MRT4577_47818C.1
tgcggaatttgctttctgtcgcctacaagaacgtcatcggtgcacgccggcctcttggaggatcgttacctcgatcgagcaaaaggaggagtccaaaggcaacgagtctcaggtcacattgatcaaggagtaccgtcagaagattgagaccgagttggccaagatctgcgaagacatccttgaagttttggacaagcacttgattccttccgctcagaccggtgaatccaaggttttctaccacaagatgaagggtgactaccaccgttact

SEQ ID NO: 127576 - DNA, 177 bp, Zea mays
  Clone ID: MRT4577_47819C.1
tcgcgccggcaaccgccgccatcgatcgatcgcgcggaaactgacctctaccgatgtctggagccggccaggaggataaaaaacccgcggagggcggcgcccacatcaaccttaaagtcaagggacaagattgcaatgaagggttcttttgcataaagagggccaccccactgaaaa

SEQ ID NO: 127577 - DNA, 342 bp, Zea mays
  unsure (1)..(342): unsure at all n locations
  Clone ID: MRT4577_4781C.1
agtaggaggggcccgcccttttttatatttttnnnaagacgaaacattaaggtgggtgccattacacattatgttacagaagggtttcctagacacacgagagcagccgctaaactaacagctggatttttgctatatgaaacggtcaacgattacgagcatgttatgcaaaagaaacttttacagatgtaccactgctcacgttcttttacttagactttggcagagtactccacgacctcgacggcagccgcagcctggagcaaatgctgctagagaggttgcagtctttcatgtgcgtcactaaatgcgtcccagtctgggggaactcagccaacctaa

SEQ ID NO: 127578 - DNA, 569 bp, Zea mays
  Clone ID: MRT4577_47820C.1
cttaggttcttgagcttgggattgtggtgcactcggtgatcatcggcatctccctcggcgcgtctcaagaccccagcaccatcaagcctcttgtggtcgccctcagcttccaccaaatgttcgagggcatgggtcttggcggctgcatcgttcaggtaatcatcatacagtccattgtcctaagatatacagtccattaatcggtctgctctattacgtaccttgatttgtctaagatgaccacactaataagctcatgttccaaacaaattaaattagttaggaggtttaaaaacgaacagctaatgaaccagctagtaatagtaattggaggcctaaaactagcagtctaaagcgaagcatgatttgatttggtatccttaacctgacgaccgtcagtcaggctgcttttgtgccgctaccttttttttttctgttagattagaagaaagtaccaaagcactgcacttcgggtggttcggagacatgcgctgcacaaaagctaggagacatcagacatggatgcccattcctttctttcgtgaatctactctacttaaaactttttc

SEQ ID NO: 127579 - DNA, 3498 bp, Zea mays
  Clone ID: MRT4577_47821C.1
cattgggtacctcgaggccggccggggtggacgatgcatggggagagagagagggagagggagagtctcctcctcctcctccccgaccggagcgccggtgccatggaagggggcggcgagcaccaccacccgcttagcgtattcctccgggacgcgaggctcgcattcagatgggacgagctcggtcaggagatcatgaggatcgcggtgcccggcgcgctcgcgctcatggctgacccagtcgcctccctcgtcgacaccgccttcattggccacataggtccagttgaacttggagctgtaggtgtatcaattgccgtgtttaatcaggtctcaagaattgcagtgttcccacttgttagcgtcacaacatcatttgttgctgaggaggatgctatgtccaatggcagagacaatgacaaaatacatcaacaaaacgaacgcaatgtttcggtcagtgaaatggatgaactgattcctcctgaaggggctagtgccagtaccagcatatcgtcttttgaaactgattcatgtgaggtcagtgttgagcagaagaggaaaaatattccatcagtctctacagcactactacttggtggggtgcttggcctacttgaaaccctactgcttgttctctctgcaaaacctatcttaggctacatgggtgtaaaaccggactctgcgatgatgaagcccgcattgcagtacttagttctcagatctcttggtgctcctgctgttctgttatctctggcaatacgagtagtctttcgcggatttaaggatacaaagacgcctctatacggaactggcttcagacaggaagaaggcccatcggattttacgtgtggcctgcctcggcgcctcgctgctcgccgcagtctcccatccattccagcccccctccccttcgcctcgcccctcgcctcccacggcctcactgctcgccgcggccccagacgtcagctcgcctccatcccggcctccctccccttcgcacctcgcctcctcctcgacgcttgtacctccgccaaggatctctcgggctgtgccagtttcacatgtctatctcatgcttcctctcctctagctacaaccccgccttgtggcctcgctgctcgcccaaaacgttatgaccagggacagagagagggaggtcgggcctagcagagcacggcagtaatggtgtgtgaggaacaagagcaattcgtcgcccacgtccaccatgagccaccgctggtgccggccggggctatggactccccccacggtacgcacgctgttctatgcatcttttcacctcccttgtgttttaataatctgtcaattggctttagaacctcagtggctggtgagagtatagtggccccaaggaattctggaacaatgatgtacaaatttgagaattgcagggaccgaccagagttgactcagaaggcaaattgagggaagtttagtgcatgacatgcaattctcaagattcaaaaacacaaggctgtggtatttaaagagaaacactacaatgaccttatggtcatttgctgcttcagtgaaatcggattgttttccaaatcctcaacatatggattttcatttcagattgtattttcattcaccatgtttttgtctgatgcccaaattggatttccccaattttagtgttgacaatcctcgcttgtgggaagtccattttgagatatagtttgaagtgcatgccatcaatgattctttgacgccatgatttgcaccacttaactttgaagggctgttgctaactggttgcaatcagttgagctcaggggcatggtatgaccagaattacaagtttttgtgcaggactttgtactttgggtaatgcgagtgatctttcgacgcgattagggttgaatcatttcaatcactccaagggccagttgtctcaccagtgcatgagaaaaaggtaaatacactagaggaatctgtttagaatctattttttgtgttgattgttgctacatatgcagtgtattagtttcctgcatcattctgccatctttgggtattgacgtctcaattctagaagaagcagattattagtccttgtatatgagatttgcatgatgtggttggcatggtgtcccttctgttatttgactgctggttcataatgtagaagcatggttttcatgtattacctaacactgagagtacataaattatcatgatattatatgttcccattgcaaggcacgggcactcacctatttagttatataatgctaatagtttgtggcaatgtttcttggaaggatttctgtttttccttatgtgtctaatggttttatgacaaccaatggctggagatgcgatcaatatagttttggatccaatatttatgtttgtgttccaatatggtgttagtggtgccgccatcgctcatgttatatcacatgtatggtggaacattctgtagatatttcattacatccatactcttatggagattaaggctgcatgttgatttgttgccacctagcttcaaacatctgcagtttggctgatttcttaaaaatggttttctgttacttgcacgagttattgccacaacttgttgtgtcacactatccgcttcaatggtcgcacggctaggttcaactccaatggctgcattccagatctgcttgcaaacctggttggcttgctcacttcttgccgatggattggcttttgctggacaggccatacttgcaagtgcatttgctcgtaaggaccatccaaaggccactgccacagcttctcgtatcttgcagctggctttggtcttgggacttctcctaagcatacttcttggtgttggtctgcacatagggtctagattatttacatccgatcagggtgtactgcatcatatctacataggaatactgtttgtttgccttactcaaccaatcaacgctctggcttttgtttttgatggaatcaattacggagcatcagatttcggatatgctgcctactcaatgttttattggaatctggatagctctggtgatctacatgagcctccggatgtttgctggattttggaggatagggacgacacaagggccctaggcttatcttcgcggctgaacatagcggcagatgcaaaattaagtcatggttggctactatgcattgcagggctgcaatacatgtttccatcagggagcctgtcagaagtttaacacacttgttgtaccaaggcgtgtgaactatagctatttttttctgtcctaggacaaactgtgccacgacatgttgtagctatttttctgtcacgtattcatccgagcagatacatggtcctacaagtaacacatatatgtaactaaaaatagtgaggactgttccatgtatgtactctctgactcctaacttttaattggtatcgactattaaaaaaaaaaaaaaaataaagaataaaaaataaaaaaaaaaaaaaaaaaaaaaaaaaaaacaatcatttagaaaaaataa

SEQ ID NO: 127580 - DNA, 1402 bp, Zea mays
  Clone ID: MRT4577_47822C.1
ctcagatctcttggtgctcctgctgttctgttatctctggcaatacaacacgcgtccgctttcgcggatttaaggatacaaagacgcctctatacgcaactgtggctggagatgcgatcaatatagttttggatccaatatttatgtttgtgttccaatatggtgttagtggtgccgccatcgctcatgttatatcacaatatttcattgcatccatactcttatggagattaaggttgcatgttgatttgttgccacctagcttcaaacatctgcagtttggccgatttcttaaaaatggttttctgctacttgcacgagttattgccgcaacttgttgtgtgacactatccgcttcaatggccgcacggctaggttcaactccaatggctgcattccagatctgcttgcaaacctggttggcttgctcacttcttgccgatggattggcttttgctggacaggccatacttgcaagtgcatttgctcgtaaggactatccgaaggccaccgccacagcttctcgtatcttgcagctggccttggtcttgggacttctcctaagcatacttcttggtgttggtctgcgcatagggtctagattatttacatccgatcagggtgtactgcatcatatctacataggaataccgtttgtctgccttactcaaccaatcaacgctctggcttttgtttttgatggtatcaattacggagcatcagatttcggatatgctgcctactcaatggatagggacggcacaagggccctgggcttatcttcgcggctgaacatagaggcagagctagtaacctgactcaccagcacgacgagcacatggtttattattgttcccggaagtggcagtccttaatgtggtctcgtaaatatgccatacggactcagggtctttttggttcgctacctaacttgtcatactttgcctaacttttctgcttaaggttagttcttcaattcggacgactaaccttaggcaaagtgtggcgcagttagccccgaaccaaacagtccctcagttcgtcaaacttaggtctgtaagtttggcggatgtgtaggcactcacatcgttaaacaaatctgttgtactggcctaaattgtgacaaatgcaaaattatgtcatggttggctactatgcgtagcagggctccaatacatgtttccatcagggaggctgtcccaagtttaacacccttgttgtaccaaggcgtgtgaactatagctattttttctgtcctaggacaaactgtcccccgacgtgttgtagctatttttctgtcccgtattcatatgagcagatacatggtcctgcaagtaacacataaatgtaactaaaaatggtgaggaccgttccatgtgaaaaaaaaaaaaaaaaaaaagag

SEQ ID NO: 127581 - DNA, 1556 bp, Zea mays
  unsure (1)..(1556): unsure at all n locations
  Clone ID: MRT4577_47823C.1
nattctgtanatatttcattacatccatactcttatggagataaggctgcatgttgatttgttgccacctagcttcaaacatctgcagtttggctgatttcttaaaatggttttctgttacttgcacgagttattgccacaacatgttgtgtcacactatccgcttcaatggtcgcacggctaggttcaactccaatggctgcattccagatctgcttgcaaacctggttggcttgctcacttcttgccgatggattggcttttgctggacaggtaagggaaccctgtgtttctttggtcgttaaccttctttattggaaattggatgacatttaataagctcaagttaatatgattgacaatggggtttccagatgcatctcttatcttttggtttatttcttataaatcgggatcacacttcaataggccatacttgcaagtgcatttgctcgtaaggaccatccaaaggccactgccacagcttctcgtatcttgcagctggccttggtcttgggacttctcctaagcatacttcttggtgttggtctgcgcatagggtccagattatttacatccgatcagggtgtactgcatcatatctacataggaataccgtttgtctgccttactcaaccaatcaacgctctggcttttgtttttgatggtatcaattacggagcatcagatttcggatatgctgcctactcaatggtccttgttgccgttgtcagtatcatttgcatcctcactcttgaaagttatggcgggtttattggaatctggatagctctggtgatctacatgagcctccggatgtttgctggattttggaggatagggacggcacaagggccctgggcttatcttcgcggctgaacatagaggcagagctagtaacctgactcaccagcacgacgagcacatggtttattattgttcacggaagtggcagtccttgatgtggtctcgtaaatatgccatacggactcagggtctttttggtttgctacctaacttgtcatactttgcctaacttttctgcttaaggttagttcttcaattcggacaactaaccttaggcaaagtgtggcgcagttagccacgaaccaaacagtccctcagttcgtcaaacttaggtctgtgagtttggcggatgtgtaggcactcacatcgttaaacaaatctgttgtactggcctagattgtgacagatgcaaaattatgtcatggttggctactatgcgtagcagggctgcaatacatgtttccatcaggaaggctgtcacaagtttaacacacttgttgtaccaaggcgtgtgaactatagctattttttctgtcctaggacaaactgtgccacgacgtgttgtagctatttttctgtcccgtattcatatgagcagatacatggtcctgcaagtaacacatatatgtaactaaaaatggtgaggaccgttccatgtatgtactctgtgcttcctaacttttagggcccgttcggttgtaccaaaatgagtcaggattcattccagctcatcaaaatctatctcgtgc

SEQ ID NO: 127582 - DNA, 944 bp, Zea mays
  Clone ID: MRT4577_47824C.1
ctcgctgctcgcccaaaacgttatgaccagggacagagtgagggaggtcgggcctagcagagcacgacagtaatggtgtgtgaggaacaagagcaattcgtcgcccacgtccaccatgagccaccgctggtgccggccggggctatggactcccccccccccacggtacgcacgctggtgagttccagaccttattaagctttgcgttatgagggtcttgctacattccttcagtatggagagttctattaaagatatttgttcccttcatttaagtaatgaggtccattgcttttcttttgggcagctatgcatcttttcacctcccttgtgttttaataatctgtcaattggctttagaacctcagtggctggtgagagtatagtggccccaaggaattctggaacaatgatgtacaaatttgagaattgcagggaccgaccagagttgactcagaaggccaattgagggaagtttagtgcatgacatgcaattctcaagattcaaaaacacaaggctgtggtatttaaagagaaacactacaatgaccttatggtcatttgctgcttcagtgaaatcggattgttttccaaatcctcaacatatggattttcatttcagattgtattttcattcaccatgtttttgtctgatgcccaaattggatttccccaattttagtgttgacaatcctcgcttgtgggaagtccattttgagatatagtttgaagtgcatgccatcaatgattctttgacgccatgatttgcagcacttaactttgaagggctgttgctaactggttgcaatcagttgagctcaggggcaggttcacctcttggccttttttctgtgatgcagtttgtgttcattttaatagagatcaataacacatccatatgaaccagctggacaatataaagcagactggttatattgtggcag

SEQ ID NO: 127583 - DNA, 919 bp, Zea mays
  Clone ID: MRT4577_47825C.1
taggaatactgtttgtttgccttactcaaccaatcaacgctctggcttttgtttttgatggaatcaattacggagcatcagatttcggatatgctgcctactcaatggcaagttggcagacttctacttgtcacacatattcttctaataaacctcgtgccttacaaattttttactgaaccatgcatgtatcgttaggtccttgttgccattgtcagtatcatttgcatcctcactcttgaacgttatggcagttttattggaatctggatagctctggtgatctacatgagcctccggatgtttgctggattttggaggtaaacaatcctagcaattttattcgtatgctgccttgcggggcatgaacatcgagcaacgaatggagagtatgggcgcacatcctgcacatgaaaaacaccatccttcttttgccttgttttttttcttcctcaaaacaccagctgcagtgtggctgcttcgcgtatgttaacaatggttttaccgctctttcgttctgttcttccaggatagggacgacacaagggccctaggcttatcttcgcggctgaacatagcggcagatgcaaaattaagtcatggttggctactatgcattgcagggctgcaatacatgtttccatcagggagcctgtcagaagtttaacacacttgttgtaccaaggcgtgtgaactatagctatttttttctgtcctaggacaaactgtgccacgacatgttgtagctatttttctgtcacgtattcatccgagcagatacatggtcctacaagtaacacatatatgtaactaaaaatagtgaggactgttccatgtatgtactctctgactcctaacttttaattggtatcgactaaaaaaaaaaaaaaaggcgccgtctaaggaccaagttacgacg

SEQ ID NO: 127584 - DNA, 266 bp, Zea mays
  Clone ID: MRT4577_47826C.1
caaaggctttggcagaatcgtaaggctactcgccagattacccctgcagagctacaaggtcgaactcatactctgaaactactcgatcatcagaatcatatacatgacctatatgatcaagtatgacactgtacactgacagtgaatataccaacatgtctaggtgattgactcatatacctttatatcctatgagaaggaccttattgagctttacagccataactctgacgatatctcatgaaaaccgacatgcgctgaatatt

SEQ ID NO: 127585 - DNA, 183 bp, Zea mays
  Clone ID: MRT4577_47827C.1
gccgaacaagtcgttcacgctggccgccaagcgaacgggtcccgtgtccgcggcaccgcgcgcgagcagcaggcgccgcaggtcgcagggatcccgcgtggccgacggtggtaatggcggatacaggcgtccagctaagcttgtcgctgtcggagtctagcgcccaagagagccacgacattg

SEQ ID NO: 127586 - DNA, 468 bp, Zea mays
  Clone ID: MRT4577_47828C.1
gggaccgctcgtccggacgccctttacggcgggccgtacggtatgcatgggcggcgcaggtgcgcggtgtctggaggggcatcaaggggaagggactgactaacttcgtcctggacgtccgggacaaacgatactatagatgccttctggacgggaaccttacgcaaacgaagatgccaatgttgacgcagcacttgtgacgactcattcgaagggatcaatgccgaactttatgccagagaactattgggtggttgccaaaagatcggagcagagacctaacgtgctccatggatgagaacacgctgaagctgttgtcaaggctgccaatgaagcacgcatccctggttcttccactgttatagatgctcactctgatggaaaggatcttcacgcatgaaacataggagattctggattcctggcgattatgcacggagaggatcatttgaaagcaatcccaacgac

SEQ ID NO: 127587 - DNA, 248 bp, Zea mays
  Clone ID: MRT4577_47829C.1
tttatcttctgcttagtttacactctttttttttttcttttgtttcatcttcttagtttgttgttgtctgttctttctcttgaaaagggtttgttcgtttcacccatttaccaggcctctcacttcttaatttccacacagggggtaaatgtcctttactaccctcccccccggactttgtaaaaaacccaaaacctttttggcgcacggccatttgtcagaaaaaaaaaaccccctcggttgggggg

SEQ ID NO: 127588 - DNA, 351 bp, Zea mays
  Clone ID: MRT4577_4782C.1
ccaacgcgtaagcggatacgaccctacctttcaacgcccacttaaactgctactgctctggaaaaaaatgacactgtgccaacctgctagaaatgattacagaagcatcattcaatcccatctgaccatcgcacacctgctacgatgttgctatttactacgatgccctctagactccgcctgctaaatagtgtactgatagctacatatagaaattcagatatacggacgctactcacacgatttctatgctgtcctactcctacgaactcaacagctttctctacatcacgcactaaacaagatggctctcaatgtctccagatcatcatgtacatactaaccgatcat

SEQ ID NO: 127589 - DNA, 391 bp, Zea mays
  Clone ID: MRT4577_47830C.1
gtgcgtcccttcggctcatcgcgcaaagcagggaggcatggcagctagggttcgtgcgccactcatccccatctccctccgccgtcgactcccttcataccagtagcgccgcccaccccatccgccgaatagtagcgctgcccattccatccgctcggaaggaccgccgccctcctcccttcaccatccaccgcacctatccaaggtaaaagcacaatctgcgtcttcgccgaaaagtagcgctgcccactccatccgttcggaagacccgccgtcctcctcccctcaccatccaccgcccctatccaaggcttaagtgaaccaccttgagttacgagctacagctttagtacaggatttcaagccgttcggttgctggtcatggtgttgg

SEQ ID NO: 127590 - DNA, 400 bp, Zea mays
  Clone ID: MRT4577_47831C.1
caaagctttttttttttttttttttttttttttattttttttttttttttttttttttttttttttttaggggtattttcattacactggcgggcgttactagcggacccgggggcggccccaaggggggggcaacaacggacagaggggggccccgagggaaaccggcatccgcacacaactccgcacaacaaacggaggccaaaagcataacagggaaaaaccggggggcccaaaaagggaaccaacaaaaaaaaaaggcggggggcacacagaccactggggaggcaaaaaaacgggccaaccaacagcaaaaaagaaccgcccaacgccccgggagaagcagggaaaaaaatgggcgcacccgccctaacaaaaaaaccgaccccctgggcgaggg

SEQ ID NO: 127591 - DNA, 1354 bp, Zea mays
  Clone ID: MRT4577_47832C.1
ccggccgggatctgcatctcccttcgcggcgcgaacggttcctctgacgtccggccgctgccatgtggggcatgccatccccgatcctgccggccttgcggtctgctcactcgatcgtcgaatagtgcgtcccttcggctcatcgcgcaaagcaaggaggcatggcagctagggttcgtgcgccactcatccccatctccctccgccgtcgactcccttcataccagtagcgccgcccaccccatccgccgaatagtagcgctgcccattccatccgctcggaagaaccgccgccctcctcccttcaccatccaccgcacctatccaaggtaaaagcacaatctgcgtattcgccgaaaagtagcgctgcccactccatccgttcggaagacccgccgccctcctcccctcaccatccaccgcccctatccaaggacattctccgtgcaccgcccttctatccccgtgcggaggttaggcctccacgccgaagcttgtttcaggcttgtcctagtacataatattgctcgcctctcctgtctcctctcctcgtcgagcggttgtgggtggtcgatccataaggccggaatggcaaaccaccaggagaagcccaccacgtccccaccgccccagccggcggagggcagcgtcgctcgcccccgcttgcccggcgtcggcaacgcacacccgggcagtgccggatacccaaacccgccagatgccgcgatccccgatgcggcgactcttcgggaccagtggcggtttgccgtgcggcagtacagccgctggtactcccacgcctggggcaccgccatccttgccggcgccgccttcttcgcgcttgggtggcttgtcaaggggtcaaacccgctcccgtcccgggccgagccacaacacggcgccattggcaaatccgtcgctaaggaggacaattgaccggcttaggtgaaccaccttgagttacgagctacagctttagtacaggatttcaagccgttcggttgctggtcatggtgttggctgttggtacagtatttggtgagagcttgatgtcacagcagcagtagaagcggtgctgtaaaacctggcagccgaacagcgtgaaaggaaggtttgtatttcaaaggatctacaacaatcaaattctgtggttttgattatgtccgttctatcgttgagctgatattgtagttcagttctttcttgtgcttggagtattattacatacatgtatgacaatatgagttaataaacttggagcgctttgaattaaaaaaaaaaaaaaaaaaaaaaaaaaaaaaaaaaaaaaaaaaaaaaaaaaaaaaaaaaaaccgaggggggggcccgggtaccc

SEQ ID NO: 127592 - DNA, 419 bp, Zea mays
  unsure (1)..(419): unsure at all n locations
  Clone ID: MRT4577_47833C.1
cagnattgcaaccatgtattttttaaagaatggtgcggatatatcttacacaactgntatctgtcatggataggcttgcctgccgctcacgtacgtcgccaggacatgccccggcaaatcgctggagaattcgtcccacgatgtagaaggtagcaccacaaaatcggcgtatttcccttcagaaaggctgcccacggcgtggtccaggaagcaggcgtaggcagcagacatcgtgtgcgctttcagtgattcatccagggtcaagcgctccgcagggatccaggggacctcccatccaggaggcttgcggaacactgcggatcggatagcttgcaaggggtttgatgtctgaaataggccagtcagaaccaaaagctagctgcgcaccgncatctaacagtgatcgaaatgtgtaggag

SEQ ID NO: 127593 - DNA, 1035 bp, Zea mays
  Clone ID: MRT4577_47834C.1
cagtgcggccctcgaggccggccggaggccgggcgccaaccacagccacaaccccgagctcagatccctcgcctcgtgtcgtgtctccggtcgacgacgaccaacagccagtgtgggccagacggacaccgccgagctatagcgcttggtgatagcaagggacgaccggcggccggaccggagcacgtacgtaccgcagcgatggctcggcagcaaagcgtgcaggccttgtgtgtgctggcggcgcttctcttcgccgcctccctgccgtcgccggccgccgcgggggtgcacctctcctcgctgcccaaagcgctcgacgtcaccacctccgccaaacccggccaagtcctgcacgccggcgtggactcgctgacggtgacgtggagcctgaacgccacggagccggccggcgccgacgccgggtacaagggcgtgaaggtgaagctgtgctacgcgccggcgagccagaaggaccgcgggtggcgcaagtccgaggacgacatcagcaaggacaaggcgtgccagttcaaggtcaccgagcaggcgtacgcggcggcggcgcccggcagcttccagtacgccgtcgcccgcgacgtcccctcgggctcctactacctgcgcgccttcgccacggacgcgtcgggcgccgaggtggcctacggccagacggcgcccaccgccgccttcgacgtcgccggcatcaccggcatccacgcctccctcaagatcgccgccggcgtcttctcggccttctccgtcgtcgcgctcgccttcttcttcgtcatcgagacccgcaagaagaacaagtagaacgagttgcggctgcgcgccatacatgcatacatgtaaatcgtcggcggcgatgagtggctgtcgttgctgattcattggtgcgcgcgactattttggtgtatcatgtaagttacttttctgcagtgtgtgcgtcaaaattaccaaataataacttaagtttctctgctaaaaaaaaaaaagaataccaaggctggccgagctagaggatcctagctttcg

SEQ ID NO: 127594 - DNA, 736 bp, Zea mays
  Clone ID: MRT4577_47835C.1
gccggccgggctcgggagatcagatcggcaagcccaatccgaaatcttgagcgctcgcgccggcgaccacagcaaagaggaggccgcagcacgacagcgccccagggttcctactctcgtcgcagcggcagcactggtagcggcagcagtgaggggaagatgtcgtcggtgttcagcggcgtacgggacggccaagagtggcgtcggcgtggcgtccatgggtgtcatgcgcccagagctcgtcatgaagtccatcgtgcccgtggtcatggctggtgtgctcggtatctacggcctcatcatcgccgtcatcatcagcactgggatcaaccccaaggccaagccatactacctctttgacggctatgcccacctgtcgtccggccttgcctgtggtcttgctgggcttgctgcaggcatggccattggcatcgttggtgatgctggtgtcagggcgaacgcgcagcagccaaagctgtttgtgggcatgatcctcatcctcattttcgccgaagcgctcgccctatacggtctcatcgtcggcatcatcctttcatcccgcgccggccagtctcgtgcggactaggcacgtttcacatgtctctgtcaccgagtcgtgttttgtatccgtgatgagccgacaagctggagcacttaattttttttatgctgtctagtttttgaacttgcgttgagtcgagaaacaaaatagaacttgtgtagccgaggggtgacc

SEQ ID NO: 127595 - DNA, 1107 bp, Zea mays
  Clone ID: MRT4577_47836C.1
ttccgtcccggccgcagcccgcagggtaaaaccgtccttgtctcaccaacgtcgcagcgccgtggccctctgagccctctctcgtcttcttccccaccccaccaggtacccacgcgttcctcagatcagatcggcaagcccaatccgaaatcttgagcgctcgcgccggcgaccacagcaaagaggaggccgcagcacgacagcgccccagggttcctactctcgtcgcagcggcagcactggtagcggcagcagtgaggggaagatgtcgtcggtgttcagcggcgatgagaccgcccccttcttcggcttccttggcgccgccgccgcgctcgtcttctcatgcatgggggcggcgtacgggacggccaagagtggcgtcggcgtggcgtccatgggtgtcatgcgcccagagctcgtcatgaagtccatcgtgcccgtggtcatggctggtgtgctcggtatctacggcctcatcatcgccgtcatcatcagcactgggatcaaccccaaggccaagccatactacctctttgacggctatgcccacctgtcgtccggccttgcctgtggtcttgctgggcttgctgcaggcatggccattggcatcgttggtgatgctggtgtcagggcgaacgcgcagcagccaaagctgtttgtgggcatgatcctcatcctcattttcgccgaagcgctcgccctatacggtctcatcgtcggcatcatcctttcatcccgcgccggccagtctcgtgcggactaggcacgtttcacatgtctctgtcaccgagtcgtgttttgtatccgtgatgagccgacaagctggagcacttaattttttttatgctgtctagtttttgaacttgcgttgagtcgagaaaacaaaatagaacttgtgtagccgaggggtgacctttttccccttgtggccattcttttccctgtcgtggtgggtggtgggctgtggctgatgcttctttctgcacacttttttttttgcttgggctgggggcgttggtgtaatctggtgaataagcgagtgcgtcccagtgcaatgggagctcaggactcctttgttcaaaacccccctgtattcgtcgttgtctt

SEQ ID NO: 127596 - DNA, 1625 bp, Zea mays
  Clone ID: MRT4577_47837C.1
ccgggaaaaccgtccttgtctcaccaacgtcgcagcgccgtggccctctgagccctctctcgtcttcttcccaaccccaccaggtacccagatcggcaaggccaatccgaaatctcgagcgctcgcgccggcgaccacagcaaagaggaggccgcagcacgacagcgccccagggttcctactctcgtcgcagcggcagcactggtagcggcagcagtgaggggaagatgtcgtcggtgttcagcggcgatgagaccgcccccttcttcggcttccttggcgccgccgccgcgctcgtcttctcatgcatgggggcggcgtacgggacggccaagagtggcgtcggcgtggcgtccatgggtgtcatgcgcccagagctcgtcatgaagtccatcgtgcccgtggtcatggctggtgtgctcggtatctacggcctcatcatcgccgtcatcatcagcactgggatcaaccccaaggccaagccatactacctctttgacggctatgcccacctgtcgtccggccttgcctgtggtcttgctgggcttgctgcaggcatggccattggcatcgttggtgatgctggtgtcaggtaaagacgcttcctcttatcatattctgctatatgctttggtttggctgataatatgctggtcaatgcagcagcagtaatggcaggcacttctaaaactccatcttgtcaatacctgtttgtagactagtttttatactattgaaatacttaacttaaagctaaagtgaatactacagttatatctgatatgttgtctggactaaataggaatcttttaatatgcctcagatctcaattgacctttgcattgcatatttgtaccttatgactttctagttaataattttgataatattaaaattgcacttttctctttttaaggcaaacagccaaacaccatatttcaagtagtaaatgactgtcacaccattgacataaaccaagcttatttgaggtgttactagctagttcattgataagctgaagttgaacctttgtcagcttgtctctgctattcataatggtccttggttcactactattgtcgtgactattatagctcccgaatcaggaagctatccagttcttcttgataatcattattttctcttacaaatgcagtttatagtcaagtatgattatatatggctttatgttgatatcttgtttaacttataaaacttgtcttaatggataaaaagataaagggatgcatttgttgatgtatgctgtgctttcaactttgtttgtcttgtacctcatgttccatatttggtaatatttcctatcagcacattcattcagatctgagaccagaccacttgtgttacctctatgctattttcctgtatagcatgtttgcgcccaagagaagactggtactttgtaccttgttgctttagatgcttatagttgatgacataaataacttaattgatgtggtggtgtctgaaaggagtttggaactaagtttagacctgcatgcagtagattgtttccaaggattgtaatttgtattggaataggctgtttgtgggatcgagtgctggtaatgtttctaaaggacagaatatatcgagcacatcaacag

SEQ ID NO: 127597 - DNA, 1163 bp, Zea mays
  Clone ID: MRT4577_47839C.1
aaaaaaaaaccgtccttgtctcccaacgtcgcagcgccgtggccctctgagccctctctcgtcttcttccccgccccaccaggtacccacgcgttcctcagatcagatcggcaaggccaatccgaaatctcgagcgctcgcgccggcgaccacagcaaagaggaggccgcagcacgacagcgccccagggttcctactctcgtcgcagcggcagcactggtagcggcagcagtgaggggaagatgtcgtcggtgttcagcggcgatgagaccgcccccttcttcggcttccttggcgccgccgccgcgctcgtcttctcatgcatgggggcggcgtacgggacggccaagagtggcgtcggcgtggcgtccatgggtgtcatgcgcccagagctcgtcatgaagtccatcgtgcccgtggtcatggctggtgtgctcggtatctacggcctcatcatcgccgtcatcatcagcactgggatcaaccccaaggccaagccatactacctctttgacggctatgcccacctgtcgtccggccttgcctgtggtcttgctgggcttgctgcaggcatggccattggcatcgttggtgatgctggtgtcagggcgaacgcccagcagccaaagctgtttgtgggcatgatcctcatcctcatcttcgctgaagcgcttgccctatacggtctcatcgtcggcatcatcctttcatcccgcgccggccagtctcgtgcggactaggcacgttccacatgtctctgccacctggtcgtaaccgggtcgtgttttgtatccgtgatgagccgacaagctggagcacttaattttttttatgctgtctagttttttgaacttgcgttgagtcgagaaaacaaaatagaacttgtgtagccgaggggtgaccttttttcccttgtgccattcttttccctgtcgtggtgggtggtgggcttgtgtagtcgatacttctttctgcacactttttttttgcttgggctgggggcgttggtgtaatctggtgaataagcgagtgcgtccagtgcaatgggagctcaggactcttttgttcaaaatccgccttgtttcgtcgttgtcttgttctgtgttctatatgaatattgttgtgtgggaaatacatgcgtggctcatgaactagtgcttgtt

SEQ ID NO: 127598 - DNA, 444 bp, Zea mays
  Clone ID: MRT4577_4783C.1
aggccattagaatttgagcggactgactggtcactgtagttcgatctaatccgagtacgactgatacagctcgatctcgtgcggtaggcatggggtccgaaaagcacttgcatagtacgtcatcctcggcggcagtgcgtcccgccggggaacgcatcgcggcctgctaccaaacactgagctaacaacttggcatcctagcacggagctcccagcaagctttacaggtcctgaggaatcaaatggatgggcatatactccccctatcccaaaaacgtcgccagactgccaaactccgatatatgggtcatactcgacaccggcaacgggggccgcggattatctgctcacagatgcagatggttcaatgagcttgcccgactgtatactcccgacgatgaagcacaaagctcttctctagaatagagtgcagcagctgctaca

SEQ ID NO: 127599 - DNA, 1225 bp, Zea mays
  Clone ID: MRT4577_47840C.1
ccgggcgggtgcctcttctcgcgcatcccggccgcagggtaaaaccgtccttgtctcaccaacgtcgcagcgtcgtggccctctgagccctctctcgtcttcttccccaccccaccagtgacccacgcgttcctcagatcagatcggcaaggccaatccgaaatctcgagctttcgcgccggcgaccacagcaaagaggaggccacagcacgacagcgccccagggttcctactctcgtcgcagcggcagcagtgaggggaagatgtcgtcggtgttcagcggcgatgagaccgcccccttcttcggcttccttggcgccgccgccgctctcgttttctcatgcatgggggcggcgtacgggacggccaagagtggcgtcggcgtggcgtccatgggtgtcatgcgcccagagctcgtcatgaagtccatcgtgcccgtggtcatggctggtgtgctcggtatctacggcctcatcatcgccgtcatcatcagcactgggatcaaccccaaggccaagccatactacctctttgacggctatgcccacctgtcgtccggccttgcctgtggtcttgctgggcttgctgcaggcatggccattggcatcgttggtgatgctggtgtcagggcgaacgctcagcagccaaagctgtttgtgggcatgatcctcatcctcatcttcgctgaagcgctcgccctatacggtctcatcgtcggcatcatcctctcatcccgcgccggccagtctcgtgcggactaggcacgttccacatgtctccgccacctggtcgtaaccggggtcgtgttttgtatccgtgatgagccgacaagctggagcacttaattttttttatgctgtctagttttttgaacttgcgttgagtcgagaaaacaaaatagaacttgggtagccgagggggtgaccttttttcccttgtgccattcttttccctgtcgtggtgggtggtgggctgtggctgatgcttctttctgcacacttttttttttgcttgggctgggggcgttggtgtaatctggtgaataagcgagtgcgtccagtgcaatgggagctcaggactcctttgttcaaaatccgccttgtttcgtcgttgtcttgttctgtgttctatatgaatattgttgtgtgggaaatacatgcgtggctcatgaactaaaaaaaaaaaaaaaaaaaaaaaaaaaaaaaaaaaccccccccccccacgc

SEQ ID NO: 127600 - DNA, 1145 bp, Zea mays
  Clone ID: MRT4577_47841C.1
gggtacctcgaggccggccgggtagcgccgtggccctctgatccctctctcgtcttcttccccgccccaccaggtacccacgcgttcctcagatcagatcggcaaggccaatccgaaatctcgagcgctcgcgccggcgaccacagcaaagaggaggccgcagcacgacagcgccccagggttcctactctcgtcgcagcggcagcactggtagcggcagcagtgaggggaagatgtcgtcggtgttcagcggcgatgagaccgcccccttcttcggcttccttggcgccgccgccgcgctcgtcttctcatgcatgggggcggcgtacgggacggccaagagtggcgtcggcgtggcgtccatgggtgtcatgcgcccagagctcgtcatgaagtccatcgtgcccgtggtcatggctggtgtgctcggtatctacggcctcatcatcgccgtcatcatcagcactgggatcaaccccaaggccaagccatactacctctttgacggctatgcccacctgtcgtccggccttgcctgtggtcttgctgggcttgctgcaggcatggccattggcatcgttggtgatgctggtgtcagggcgaacgcccagcagccaaagctgtttgtgggcatgatcctcatcctcattttcgccgaagcgctcgccctatacggtctcatcgtcggcatcatcctttcatcccgcgccggccagtctcgtgcggactaggcacgttccacatgtctccgccacctggtcgtaaccggggtcgtgttttgtatccgtgatgagccgacaagctggagcacttaatttttttttatgctgtctagtttttgaacttgcgttgagtcgagaaaacaaaatagaacttttgtagccgaggggtgacctttttcccttgtggccattcttttccctgtcgtggtgggtggtgggctgtggctgatgcttctttctgcacactttttttttttgcttgggctgggggcgttggtgtaatctggtgaataagcgagtgcgtccagtgcaatgggagctcaggactcttttgttcaaatccgccttgtttcgtcgttgtctgttctgtgttctatatgaatattgtcgtgtgggaaatacatgcgtggctcatgattcatg

SEQ ID NO: 127601 - DNA, 264 bp, Zea mays
  Clone ID: MRT4577_47842C.1
tcgcgcacgcgttgctcaaagttcacacctactttaatgctaactgacttatgcctaggggcgcccttaacacgtatgaggacacccttctctataacccacaacccatcctaagaactcacttttcctaatcattacacatgcagacttcaacccaaacgacttactgtctaccagtgaacctgacaaaaatatcacaatatcctgaaccttaatgaccagaacgatgcatattacatcatctttaacatgaatgtgcacaac

SEQ ID NO: 127602 - DNA, 432 bp, Zea mays
  Clone ID: MRT4577_47843C.1
gggcaagcccaaaagaaacttaatttaggggggggacagaaacccaaaaacccaggtacaaagaaaacctaagggactaaaaaaacacatggggaaacgggagtatccggggggggcccccagggggaaaaaaggacttaatccttggaaccaacccaaaccttggggctgccccccccggccttttttgggagaaaaagggtatggggggggggcaaaaaacccccggtagggaggggcaccgggcccaaaaagggggaaaactttttttctttgcggacgggaaactggaaggggggcggaacaaagcgggtttttttgggggcacgggcccaattgccggccaactaaaaaaccccagaagaaaaaaaccccaacccgggaacgagggaaaaagggggcccgggcccaacttttttggaaaaattgccg

SEQ ID NO: 127603 - DNA, 239 bp, Zea mays
  Clone ID: MRT4577_47844C.1
gattgagagaaaccaaaaccaaatgaggaggggggcccgccaagtaaacgcgaccaccgccaacagaaaaacaaacgggtcccaagaccgagaggagcaaaacggatcctaatgagcagcaaagcggggccctggcggaaagagaaataaatccccaagcccatacaaaatgagagccggtagcataaaaaaaaaaacccggaaggccaaataagagggccaactcacacaaatcgggg

SEQ ID NO: 127604 - DNA, 288 bp, Zea mays
  Clone ID: MRT4577_47845C.1
ccgcggacgctggcaacctatggtgcgagggctcggagacatcgtcgcagtttgctcacggcgcacatgaaaggcgtcaaccaggactgctccgccgtctggagatcgcgagctccgcagtctcgcacgacgccggggacgatctgaagaacactcgaacgttgcgaggagctagcgacacggactcgcatacgtgccctgaggatcggagtggggccgccgtgctgacgttgcaaaggggaagtggaggagcaccgctgcagtggcagctagccgccaccgaccaca

SEQ ID NO: 127605 - DNA, 407 bp, Zea mays
  Clone ID: MRT4577_47846C.1
attcggctcgaggatgatcttgccgctgcatttattgcggccttcgccaaggacgtattgcaccttctaaaattcgtaggggggggcgcagatgcaacatggacctgtgtagaggatgccttgcagcaccacgaacttttcctggtcaaacattgcctaacttgccataaggacagagcgtgaaaccagtaccgccgtacttaccagaaattctacactgatttattagagtcctatccagaccttcatatgatcaaaaactacgatgcggcatctagaccacttgaccatcctgaccattatgctgaattccatgtatatactgattctacggctgtgctttacatgaggagcacattagacacaacattacctatcggacctaaggcctttgtgagcgagtaccc

SEQ ID NO: 127606 - DNA, 225 bp, Zea mays
  Clone ID: MRT4577_47847C.1
aacatatgtactgccattggacaatacatatctggaaaaaaagcataactacctttactttatcaggatcgacgaatacattaatgatgttataaaactgtatgaagagcgtctgactgcatgcactaggtatggaaaattctgaacacgttctgtgcaacgtattggggataaactaagtatacacctatcaaacaatgccctgaatagtgctactcatggggt

SEQ ID NO: 127607 - DNA, 772 bp, Zea mays
  Clone ID: MRT4577_47848C.1
tgtcgaacctccactgagcacaatgttccccggtatcgctgatcggatgagcaaggagatcacttcccttgcaccaagcagcatgaagatcaaggtcgtcgcgccacctgagcggaagtacagtgtctggataggagggtcgatcctagcctcgctcagcactttccaacagatgtggatatcaaaggaggagtacgatgagtctggcccggcaattgttcacaggaagtgcttctaggtttctgccaagttcgtcaagtgcttttagggttcgccatgttcatcatcgctacctagtcttaagttatgcccccttcatttgctgagatatgtgtggcagatttgcatcgttttggtatttcgtggctccatgtgtgagcatgctgtgtcctataacctggtttatgagatgagttgttaaacttgcttggcttgattggttttacctgtaagagctgatagttatataaattgcttgtacttgtttgcatccagaacatccgtgcaagtatgaatggccctgtacatgggctgggttttctggcttatataaaaaaaaaaaaaaaaaattgtgtggtgtgtgtgagagagagagaaacagagttcttcagtttgctatctctctctgcatgtttggcgtcagtctttgtgctcatgtacgtacgtgtgtctacctgcatgttggttgatccgattgcatctgctgtaaccatatattaattggtccacgatgatatgatttgatactaaaaaaaaaaaaaaaaaagcggcc

SEQ ID NO: 127608 - DNA, 343 bp, Zea mays
  Clone ID: MRT4577_47849C.1
tcttttttttttatagtaagtcaaaatctatcatatttttttcccattcttatccaatccatatgccataacatgataatttcagcacgcgttcttacatcacagagggggtggtaagtaatacaacctgctgctccgaaccacaccagccactccgcttttttttgctcgaacgatcgactgctcgtcgcgtcgggccacggccggtcgtcagtttgggtgtgtccactccactgtaaagctcctcctcttgtttttttgggtcctccctgcgtgcccaagttagcggacgtgcactaggtgtggttcggggcggcgggttgggttactttccaccccctct

SEQ ID NO: 127609 - DNA, 383 bp, Zea mays
  Clone ID: MRT4577_4784C.1
aaaaagggctgattattgggcttttttggggaaaaggaacaagaatttcttgcccaaaattttttggttaaaaaaaaaaactggggaaagaagatcccaaagggcccttacaccttgttttttttcaagcaagggttttttttttttaaaaagggaaaaaaaaagagggggtgggttggaattgcctttcccaaaagggttgcctttaataaccatcgccttagagggggaaaccttttggtttaagggctggaaacggtctaaaagggtgggtttaattttggggggtgaacccttgaaggaaccttttttttcttaaaacgggtttttcaaaaaattggccttaagaaaagtttttagccctttgttgaaaaaattttatt

SEQ ID NO: 127610 - DNA, 156 bp, Zea mays
  unsure (1)..(156): unsure at all n locations
  Clone ID: MRT4577_47850C.1
gcttacttcgcagcagatgctgctgctcatgcctcgaagaaatcctcaccccgtngtgaccaatggagaagtccaaaatgctgctgctgctctcaacggctctgaccatcgccgtgggaccaacgtatagtgctagattagatgcccagcaaagaa

SEQ ID NO: 127611 - DNA, 591 bp, Zea mays
  Clone ID: MRT4577_47851C.1
taaaaaaaaaaaaaaaaaaaaaaaaaaaaaaataaaataaaaaaaaaaaaaaaataaaaaaaaaaaaaaaattaaaatataacattaaatttttttggcggttctttttatatttgtttatcggctggggtttttcctttcctttgggtgttttttttaaaggtttctttttgtgtttttttccctccccctctggggggggccttttccttttttcttgggggggtctgttttccttttttgccggttttttccccttgcgttcccgtttgttaacctcttccgttcttcggtactttcgtttggcccccttttttttcttttgcccggcctttcttttttttcatttgttttttgaaccgttttgtttattggcagcgctttttattgtttttgtaactcccttgagcccggtgctttcccttttttgccctctttttttccccacttttttagctttttctttcttggctttattgccttttttttttcccttttccgcgcttttttttttttttcccttttattttccgaacctttttttggtttttcggccccttttttgggtttggggctccttttggggttttt

SEQ ID NO: 127612 - DNA, 277 bp, Zea mays
  Clone ID: MRT4577_47852C.1
tgtccacgcgggagcggacgcggcggcggccggatggttacaccatatgtgtgctatagacgaggctgaaatgaagacaatgagcggctctatacaacgtggtgaatgagaaaacactcgcactacaagatttactcgctgggcagttcatatccgttaagagagctggcatctttcagattaggtggcgactgactgactggcccaacagttgtgcaggctgcatggcaaatggtacacgctctgtattcgcggaaagaagagaggaaagtgaggt

SEQ ID NO: 127613 - DNA, 845 bp, Zea mays
  Clone ID: MRT4577_47853C.1
cattgggaccctcgaagccggcctcctgctcctgatgctgctcccgttctcgaccacaccgaacctagccgacacgatggccaaatcgccgctctccgccactgtagtgttgccgctcctcgcggacgtataccccaccggccactattatgataacatgaacattgggaacccaccaaacccatactacctacaacgtggacactgacaacgatctcacctgcctgcacagccacgcaccctgccactactacaacaaggtcgtcacatcccttgtatcgaccaacggcataacctcctcgtaccgagtgacaacaaactctgcactgcacttaacagcgaacagacctctaataacagctgcccttaaccaaaactatgcgacctatcaaataaagcacaccgacagtgcatcttctcaaggtgagctgatacaacgacagcttctcactggccatgacatcatccaacattcgtccagttctcacatttgaactgaggatatgaacaacaagtggagaaaacatggcttgtgcaggcagcgattgacggcatgcttgtgctcgcctagagctatcacctacccttgtttcacagctcaagcacctagtcatcaccaaaaatgtagtcggccattgcctaagcactaatgcaggccagttcctcttctttgcggatgatgatgtgccatcatcacgagtaacttgggtgccgatggctcacatgaatctgagaactactactcacctgactcaggaacactgtacttcgatagacgttcactacgcgtggagccaatggatgtggtatttgacagtgggagcacctatacttattttactgct

SEQ ID NO: 127614 - DNA, 603 bp, Zea mays
  Clone ID: MRT4577_47854C.1
ccctaacatataaaaaaaagctacatggtagtcctgtgtgctcaaggaaaaaaacttttttctcgaaaagcgcaggagaactgcgcatctttatattaagaaggaaacagaaaggccttagagggccagacatgttacagttataagaaagatcttaatagtacagttatacacttagactacttaggtggccttattatggttgtagtgctgctacgctgtgaatctagcttttgcggaaacctttacaaatcctagtaaagacctgttcgttatcatcttaatccatgtggattggacaggattggatgagtttgaatccatagcaagtcaaaatctatactgttttttccaatcacatccaatccatgtgacataagaataaccgaacaaggcctaacagtttgcagtgataggtcctaaaaagatgcttttaacaaaccacaccatccaaatctagcaaaaaatgcttttgaaatgccaccgcaatgcaaagtttttagtaccatgcaagattgaacacatacttgatggtggcattcgatgaactgtacctcaccaatataaaaatagttaaattgcacattttgggtttttctgccc

SEQ ID NO: 127615 - DNA, 264 bp, Zea mays
  Clone ID: MRT4577_47855C.1
aaaaaggaaaaaaactttttttttttaatttaaaatggtaattaaggggattggtaaaactgacactggcacccatgggggggggggacaaattattacttaatcatcgccgctaaatgactcaactaggtagctaggcagggggtattctaaagaaaatagttttttcagggggggaaaaccccaggagcaacgtaggggcatggagtccggtgattgaggggccaaattgtcgagaatgggtgcgataactgggccgaaaaa

SEQ ID NO: 127616 - DNA, 249 bp, Zea mays
  Clone ID: MRT4577_47856C.1
cccacgcgtccgggcaaaggaaaaccggcagagccaaaccagagacgcggcaccgacgcggaaagaccaacaacggcggggccgcgacatcgcgaggccaaggcaaaagccagacgcgaggagtcccttgcagcataggcagcttcctcccaacggagcggtcggccaaggtcttcaacgggggggtgaatccgggggggggagtcctcgaggcgatggttgccgccaaagtcgccggccaacaagccc

SEQ ID NO: 127617 - DNA, 308 bp, Zea mays
  Clone ID: MRT4577_47857C.1
ccctttttattaaaaggggggcggcgtgccccccccaccacaagtttttcccatgtttggggggggggggaaaaaatcttttcttttagcccacccctttttggttttattaaaattccccccctcttttgtggtttaaaaaaggtgtggggaaaaaataaaaaaagatctccacctgggttatataagaaaaaaaaggggggaaccggtgggaatactctattggggggggtctccccggggtattttctttgttgggaaaaaaaacgccgtctccactttttttgtaatgagaaaaaagccccctc

SEQ ID NO: 127618 - DNA, 322 bp, Zea mays
  Clone ID: MRT4577_47858C.1
gccacgcgttcgcccacgcgtccgttccatgcgagccagcacgagctggcatgcgcgcgagctcctgagatttcagctcgcttctcctccagaggtcagagcagaccatactactacgaccgaagctcgtccacttcccagtgagcctgtccaggaactgactggccggacatccaaacgcacgtctgtgcaggggtgctccggagcaccttgcgctcgacggaggtttccgtcttaatggccatggggagactgctaaggaccatgggcggcatcctgatgccaaatctctgagctttatgaacatagccactcacatgtg

SEQ ID NO: 127619 - DNA, 704 bp, Zea mays
  Clone ID: MRT4577_47859C.1
ttgggtacctcgaggccggccgggctccaagtttacttactacacgtctacaccccatctcacaaagctaaaaaaaacgctatttgcgcctcctcctccaagtgacgtacgtcgtcgcgcgccctcggagtatctacctagctaggctaggacgatggcgttactccggtcgtgtcggctggctgttcgcgtggcggtcgcggtggtgctcctgcttctctgcggctacgctcttggcgcggcggagggcgccaggcctctgccaggcggccacgggggcgccagcggcgggttctccacggcgaacttgccggtgttcgtcgtcgcgagggccgggcccagccgccgaggagctggccattagcagtcctgtgtacagacctgcctctgcatgtcgttcgaagtcttattaattctcaaagtgcaatcattaatcaaggatttttttttccctctcttttaatttactcttctagctactacttcttctgctgtttcattggttctttgcctgttctaaggatgctcagcccatagctttcgatgtcgatctgacagggtgagcaagctaagttttgtgcccttcgatgtttatattggttttttatttatccttgtacatgtaaaacaggataatggcttttggttgtaagaacaatgagtcaagatattcaactctaatccctcatcagtccagaacatgc

SEQ ID NO: 127620 - DNA, 306 bp, Zea mays
  Clone ID: MRT4577_4785C.1
taccgacgcgacccacgcgttcgggcctcgctaacgcgcccttgctagctccagcggtggcacccacgcacacggttatgggccactagtccggaccccggaggagccaagccatggcgtccacctcctgctgcctcctccaccagtcaaccgcccgcctcggcgcgtcgccgcgcctggccgacgccccgccgcgcagcgcccagctgctcgtctgcaaggcccggaagcatgaagccgtcgcggaccatatcgacgtttcgcgccgctccgcgctcgctctcctcgccggtgtatctgccggtg

SEQ ID NO: 127621 - DNA, 345 bp, Zea mays
  Clone ID: MRT4577_47860C.1
aaaaaaaaaaaaaaaaaaaaaaaaaaaaaatttaaaaaaaaaaaaaaaaaaaaaaacaaatgggggaaccaaaaaaaaaaaaaaagggggaaccaattttaactccgcggggagggggacgtcatatcccttccttgggtgctcctggttgccagtctttgggggtcgttttttggccgtttcgtctgttaaacccctggcgtgtcttcaccttttggcctggggggtcattcccgtttggcccggtactgtcttggcttcccggcccttttcggtcggcctggcgaacggttttccgcccgggacggtttatgggtcgcgccctgtaccggggctttttgcccg

SEQ ID NO: 127622 - DNA, 420 bp, Zea mays
  Clone ID: MRT4577_47861C.1
atgttcatcatccgtgctggggaggagggcgagccgagtgggagctttgccttccgcgtgggctggcagtccgcttcttcctccagcattcgggggagaagggcgttcgccggccttgcggaggaggtgaactctgggtgcgcggggccggccgtctgtggcgccgtcaactgccgcgtgtctggctccccggcctgggtggctctggtgccacctccggcgctgcctcttgccgctggggcggagcgtggctgcccgtccaccaggtggtcgctgccactggtgggactgatgtggtcgcctccgctggtgaggctgcccactgcagaggtggttgcctccgctggcgagaccgtcagtgccacctgccgccggacctctggccctttggttttaatggcctcgctgttacccccgtag

SEQ ID NO: 127623 - DNA, 748 bp, Zea mays
  unsure (1)..(748): unsure at all n locations
  Clone ID: MRT4577_47862C.1
ctcgaggccggccgggacacccataggtagacgtctagaacgcagcaagctgctttgcctaccctggtttcaaccatctccagcccacctgcttgggtacggcagttttactttccgacatctcccgcgttctccaactgccccagattgtgcgctttcctaatccggaggactagccacacccacgcatgtgttgaccgtcgttatcactcccagccgcgccagctaggaccagccatggatgctttcccatatatcccaccacatctcaaatatgctggcctatccaagcaagaaagagatagaaatgccgctgcagaaaaaggacgtgacagcaccaaggccagcgtcaccttcttgagccaggccaattccccggggaccaatttgtcgcaagcggaccctctcaacaccgcaaggagacacagcaccatgagcacccgcagctacccaacaccatttcccggaggcatggagaccacggaagatgatgaccttcccccgtttccggagccggaggtatcttcactggccctcgatactaaacctggcgcacagatacattacacatattaccctgcctcaaagccgcagggcaatcacccccacccgttttcccagacgcttgtcgtcttccctcacggngccatgatggcacgaagctcctggggacgctgcatacgcagctttctggaaaacgaatcacagggcgactaccgtatccagggttactaagctacgatcgata

SEQ ID NO: 127624 - DNA, 1161 bp, Zea mays
  Clone ID: MRT4577_47863C.1
ttacattcccttacaagcgggaccccagctccatctctgcaggaatggactacgctgcaccaacaagagtcgcgctggaagctggttccggacagccccaccaatggcggcgaccacctctgcaccagcagcgacaacgacctctgctccgagcggctcgccagcagcagcgatcacctcagggtgagcgctactgcggatagatcctcgcccccgtcctcttgcggggggtgatagcgaggccattaaagccaaagggccagaggtctggcggcaggtggcactgacggtctcgccagcggaggcaaccacctctgcagtgggcagcctcaccagcggaggcgaccacatcagccccaccagtggtagcgaccacctgaagaggtcttctctcttgtcctcactgcgagagcgaggacaagaccatccaagaatgtcgtcgccgcccccacggcgtacgacgtcttgtacgacctccctgtgcggccggtggcgcgggagaagccgtggatgtggccaacctgcgcacggcgcgaccgtcgcccgtgcggtggacgggcagccacgctccgccccagcggcaggaggcagcgccggaggcggcaccagagccacccaggctggggagccagacacgcggcagctaacggcgccacagacgaccggcctcgcgtgcccggagttcgcctcctccacaaagccggtgaatgcccttctcccccgaatgctagagcaagaagcggaccaccagcccacgcggaaggcaaagctcccactcggctcgccctcctccccaacgcggatgatgaacatccttgaagctaagggcagggggaggcagcaacccgactcgcttctctccaccacaaggctggtagtcatccttgtggatgaccaccgaccggaggttgcgaccgggttgcgtgatgaaaatccttgaagccgaatgatggtggaaggatgccgactcccatggggttgcacccctccaacagcagtaagaagacaagatcggcgacaccaccacgagcgcgcgccctccgacggtgaagtcgccggaagagacgaccttgacgcggatccctccagagaacaccggcgcaccccatctggaggcccggaaggcgaaagggcgcggtggtcacagaaggagcgaggcat

SEQ ID NO: 127625 - DNA, 192 bp, Zea mays
  Clone ID: MRT4577_47864C.1
gatcacaaacatgactccaccaactgaggccttcatggcggcccgggcaaagggggagggggacatggtaatgattagtcagagcaatctcttgaaaaccatgaatccatcataatgggcgggcatgcaaggatacatccctgctctgactttattgttttgtgtgcgattttcaaagtgtaatcatgttgt

SEQ ID NO: 127626 - DNA, 549 bp, Zea mays
  Clone ID: MRT4577_47865C.1
gagctgagagtcagctgaacaattgtttgaaacaacgattcctcaagaatgtacactactaaaactgcagcaacgaggttacagtgttaccacaatcgttacaggggtttacaccaatgattacaggctgacaacacgataaatatctaacgacttcgttcacatcagattatgtcacagtgatccttcgagaggagcagaacatcacgaagacaccaagtctggcgtctccgcttcaacagaaagcaagatcgtatcgaccttcccaatccatgtatccaaccggtcatgcaagcatttcacttggtctatgcccaacacccttggtttaacccgtgaaacatggacaactccatcaacctgatcaattatgccttctattagacgagcagagaggctcttcattaatagatactccacatcttcaacagggagcttggtctgttctgctatatcccgcattgggatcgtgcggttttcagatgatcgactgaaaatgatttccatcaagcaaagcatgttgatcttttcaagtagattcctctcatt

SEQ ID NO: 127627 - DNA, 436 bp, Zea mays
  Clone ID: MRT4577_47866C.1
aaccattcctcccaacaccacctcgccgcgatctccgtaccctccgtcgcgtcgagcatcgatcatgtcggcctactgcggaaagtcacggctgagctcatcaagaatagctgcctacattggcacccctggcaagggtatccttgctgatgatgactccactgtcaccattggcaagcgcctttccagcatcaatgtccagaacgctgaggagaaccgtccagccctccgtgagctactattctgctgccctggcgcttctccagaacatcatcggtgtgatcctgtgggaggagaccctgtcccacaacaccaaagatggcaagtcttccgtccgcaggcttaaggacggaagcctccttcctgtcatcaaggataaaagggcaccatattagttcttgaccctgatactgagacccccacccacagccattaa

SEQ ID NO: 127628 - DNA, 428 bp, Zea mays
  Clone ID: MRT4577_47867C.1
aaaaaaacggaagggggcaaaaaaaggttactttgctaccaaaaaatcgaacaaaaataccgcaacggggattaaggcctgaggatgtcctaaccctagccccgaaccactcctgggaacaaaaccctgaaaaaaagcccgcagaaattaattgcctaaacaaaccctaggggtattactaaaatactacagcagcccagcacagtactagtacccaacaggctactaggctagccctacaaggagtactaccacaatgcacaaggaccctttttggcccccctcgttttggaccccccctgctccggggggggaaaccccctgtcgaggcaactccggaaacgcctttccacccaacctttcttgtaggggaactgggccctcggaacaaagtgccccccgccaaaaacccgggcgaggaccccccc

SEQ ID NO: 127629 - DNA, 531 bp, Zea mays
  Clone ID: MRT4577_47868C.1
ctcagcccttgacgcatgatttggctgtgtctggtggcgtctcagcttttctgcggcccacagtgccgcctcgctgctccaggcctgactccgccgccacgcgcagggtgagggagtaagagaccgagctcgatcgctcgccgagatggcaggacactaccggagttgggcgctggggctggggcggatctgggactaaagctcggccaaagagcgcatccgcgacttcatctgcgtccccgagctccgggtggcctgggggatgttcatctccggtagcagccccatcggggcacgcatcaatgggcccaggatgacttcgaagaaccttatcaacgagatcttcagggacgctggctctacttatggcgagactggggcaatcatggttcagacaaaggtggacagcgtgacaacaagggaaatggtcatgcggattctcctggagccagatatgcaatgctgagcaactggacgtagcgctgggtcagttaatagcgtttggcgggattgcaagaagataattggaag

SEQ ID NO: 127630 - DNA, 123 bp, Zea mays
  Clone ID: MRT4577_47869C.1
gcactcctccgtatacctcggctttcggttcgggtctagaggcagtaatgacgattttgttgttggcgatgtggttgtaccggagggagctgacgatctatcatcatggggtttggtgacaat

SEQ ID NO: 127631 - DNA, 484 bp, Zea mays
  unsure (1)..(484): unsure at all n locations
  Clone ID: MRT4577_4786C.1
gacgaaggggccaccaggagcgnggngancccggacggcnccacggngcgcggcnncgnggcggacgaggcggccnncgcgcgcagcccggacgcgcgcnncgccgcgccggacgccaacggcgacggggggggggcccncnccnagcnccggcgcgcgcaaaaaaccnnccgcccccccgacggcggcggcnncgggnccgcccagccggcgccgcnccccgccgagggcgccgcgcncaacgacgcccnccncgagcagnncgacgccgaccacagcggcgcccncgaccgcgccgagnnccacgacgagaagccccgcancaagcccgccggcgccgacgggccccgcncccagccgcnccaggncgcccgggacgacgagggcgggagccccccgcccgaggcagccgagcacgaggccgcngggaacgccgccaagaacgaagccaaccccaaggcggaggccgaggcggaggcggcca

SEQ ID NO: 127632 - DNA, 335 bp, Zea mays
  Clone ID: MRT4577_47870C.1
cgcgcgagtgccattcgttgatgggcgtggccaagagctaagaccctagcttttgttgaatctcacggtcgcgctctccttcctctccacactctgtctcagcaccgtcccgcactctcgctctcaacgccaccatcgccgctgacgaggcctcgtctccatcggtccctgttcttcccaccggcagtatgacagatggaccccatgtctccggcagagagaatggcgaggcaaagcataggtaggcactgaacggacccgacatagcccgatccagttaattggcgttgcgctcgttctccctgttcagatctgagggttcagtttggttggct

SEQ ID NO: 127633 - DNA, 291 bp, Zea mays
  Clone ID: MRT4577_47871C.1
attgtgacgcgtcactacgatctctccacgccatgccatacacgcccgccatcacgtcttgctcctgctgcagagcaacaacacgctcgccattccctaatcaacctcgtcgtcgttttcaacaccgtcgagacactcctctgctcaacgcgtgtctcctgcttgtcggaatgtgtgactggcctcctcgaccttccagtgggctggttcacgtcggccaccgtgtatccaacttccgcagtaacgttgttgtactctccttggtgctcgttgccgactctgctacccggt

SEQ ID NO: 127634 - DNA, 584 bp, Zea mays
  Clone ID: MRT4577_47872C.1
gccggccggttttggggtcgctccactccttcctctctccttcgggtctcctccagatctctaacacccgaaggccggggagtgcgcctcggccgaaccgacgtggtggacgacgactcccacagacgctatgggaggaggcgatccaaacttcggcggcgttgtatggagggagtcgaattgctgctggactgaagcgtggcccgtgaaaatgtgccttcctgaactggagaaataaggacctacaccctgcactggactacgagaacggacgcctggacgcactcggtcacctctgactggagagacacctctccctatcttggaccaagaagaggtacgtctacgctggaagcgtgatgtactgctcgatcgaagttcaaattctgccggattatgcacttggcttctgcggtaacctgttccacttccgaggacatcttgagcattgtcacttgcggtggcctgcgcaaatacagtcaccatggtcgagactctagatcttcctgatatcccatgtgtgtggtcctcatgttgtctgcactgcagcatgcatggcgcaggcggaagctattcaccccatt

SEQ ID NO: 127635 - DNA, 490 bp, Zea mays
  Clone ID: MRT4577_47873C.1
ccacactacacaatgcgactcggacctaccaccctccactcgctgcgcactcgcatcccccaccatcctcatcctcctcgagatgccgacagagtcatcctcgccacccatgtgtacctcgctgacgtggtcaaccatcatgatggttaggatcctcatgtgccccgctaggctgaactccactaacaataaaacccgcgaatcgtacacagtcgatcagcatctcagctcggcatccgaaaaaatgaatacctctctcgcttgatgtgcacgtctgctcttactaaatgttgagagtctagcccgacatcacaaaacatttgctctgcaaatagataacaagctagcatctgtcaatgatctttatgtcgacgatgattatgtcactgaatacacatgtcgtgatctccacgatgctgccaccatcaaatgggactctgctgtacctgacttcctcatgcagaatgaacttgactaccttgtgtaaact

SEQ ID NO: 127636 - DNA, 260 bp, Zea mays
  Clone ID: MRT4577_47874C.1
gtcaatgacatgtggggttcatgatatatatctaaagtttggatcttttaatggtatatatccaattgttccaaaaaaaaccctactgctggccactcccacgtgagtgcagtctgcggaaggaattgaagcaaacatcaaaataattctcatttaatatttttatttattcagtgtaatgtctaaccatcaaggcatctcttgtctgcactgtacagtaatgtaccaccctgcctgatcaaatgatttagagctaggat

SEQ ID NO: 127637 - DNA, 297 bp, Zea mays
  unsure (1)..(297): unsure at all n locations
  Clone ID: MRT4577_47875C.1
ccggngtcgaccccacgcgtccgcttaggtacatatcaaatttgctagctggtcaaaacgttatatgatgttctcaaccctccgttgttctatatcgttgaaaacaagtattttaatttaggtgcggtttggtttggcgctgcaagcgaaaaaaaaaaaaaaaaaaaaaaaaaaaaaaaaaaaaaaaaaaaaaaaaaaaaaaaaaaaaaaaaaaaaaaaaaaaaatttaaaaggatccaagattaaatacaacaaaaatgcgaacgtaaaaaaaattaatataggggcgcgctaatt

SEQ ID NO: 127638 - DNA, 1269 bp, Zea mays
  Clone ID: MRT4577_47876C.1
ggaaaaaaaaaaaaaaaaaaaaacgttgtacaggaaacgatgcacttgcagtgtacagtattccaaaatgaaatcattttacacaaaaaaaaaaaagaaaaaaaaaaaaaaaaaaaaaaaaaaaaaaaaaattgggtacctcgaggccggccggggatttctgcgtgattcgcctgcctgccttccttcctgttggttgcttctttctactcgcgctcgcaccaaccagaggagcaaccgagcagtagcgactcctctgcgtgaggcctgccgtcatcccccgtgggccgtggccgtggccgtggccgtgcgcaaaaaaacaaaccatcctcgattcgaccggaggggaaggagacgcgccgggagaagggggaagagacgcggcgaccatgtctccgatctgggtgttcgggtacggctcgctgatctggaacccaggcttcgcctacgacgaccgcgtcgtcggctttgtcagggactaccgccgcgtcttctaccaagggagcacggaccacaggggcacgccgcagttccccgggaggaccgtcacgctcgagcaccagcccggagcgacttgctggggagttgcttacagaataaaggaggaagataaggagatagctttggagtatcttgaggtcagggagaagcaatatgatgagaaggtttaccttgacttgtatactgattcatcgcccaaagtaccagctgtcgaaaatgtgatggtatacttcgccaccagtaacaaggagaacaatcaaaactatcttggtcctgcacctctggaagaaatgaccaggcaaatttaccttgctcaaggcccatctggacctaacaaagagtatgtgttcaaactcgaggacgcgttacacaaattaggagttgtagaccaacatgtccaagaactggcaaatgctctgcgtgagtattctgacaccgagttatctaagtgaaagatcacatttaccccttgtttggagggtaaggatttataaataaagttagaattcattcatgcatgtcccaacatggatatattcttgtaagctgcgttttgagtgactacattacgattatattcctgtgcacatgtggtttgcaaaaatctgttggtttcccctgttcactttttctgatctaggagagcgatcatttgctttgctttctacttctagcaatgagcaacaaaaaggcgaccaggaaaaaaagatgaatggaccaaagaaacgatgggcaatctattatatgctaccaaaaaaaaagtttaca

SEQ ID NO: 127639 - DNA, 346 bp, Zea mays
  Clone ID: MRT4577_47877C.1
attcccggacggacgcacacttacacaaggtccttgatcttctgctcccgaacatttccatttactccaaggcaatctggataccgaactcattaagtcacaatatgggcccataaactatcttctaaaaacgtctaactcccgctctataacaagactcctaccattacctaatgcaagatccacatctccatacgcatcaacctttcctttgatcttttcaaacactctttatcctaaggcaccaacgtcataaccaactttacctccttctacgcttttccatcgctctatatgatccaatattacttacacctacattctactttatagctcttctataatg

SEQ ID NO: 127640 - DNA, 660 bp, Zea mays
  Clone ID: MRT4577_47878C.1
ttttttttttttttttcgatgtagaataacctcatccaattaacatatactttcttaattcccatcaaggaaaggctagctagctaggaacaaatgctatgctcagcatcaaagaaaacaatgcatgtgtataaacactaggcagttacactgttcgagctgtgcagaatcaactacaaaatcaaaatactctgcccctcatcccatttgaaacacatgatctactcaagcctggaccaggatggaaatgaattccatgaatctcaacatatgatgagctggaatttaatgaatgtcgaaccaacccaaccatatatgcactaaatgacgctaaaacaattttcatatgaacattgtctcgaatggagtaatcattgagagatcaaaaaaccatatccactaagtatgcaggagctggtagaacagagttacagttatcttctaccatcaataagccagtaattgaatcagcgaggtccggcaacgattaacgaaagctggtcaatgcgagtacaaatcgtatggatcaaagccatgcaagcatacagttcagatcattctgagtttctgaccccgtgaggtccaacgtcctgaagcaaccaacggatcaagctagcagtcatgctccgaacaacacccatccgacaaccgtttcccagc

SEQ ID NO: 127641 - DNA, 416 bp, Zea mays
  Clone ID: MRT4577_47879C.1
gaattggagaccaccgcgccggcgccgcccggggaggactttaaaacgaaccgggcggaccaacacccacaggccgggggaccccgtaggggggcccggcccgcgctggaggcaccacagcaagagcaaaacagccacgcagaccacctcccccccccgccctcgggaggacaggaggccccgggggacacccccacacgccagaacccagccccgcgaccagccccgaagccggataggaacgcgctcgctccaccggacgcgtgccacggcgggaacggacacacccggagacccccacgggcccaaccccctgggaccagcccaagaagcccaccgcggggaccgacaagcaacgggggcctgaagacagaggcacgcaaaccaccgcacgaagggcagagccagacaggggg

SEQ ID NO: 127642 - DNA, 180 bp, Zea mays
  Clone ID: MRT4577_4787C.1
caactaacctagcacttgcgaagggccccaaatcatttttaagggtacatgacaaagtgcacatgacttggacggagcccataatatatttaaagcttccaggcacctttggtgaaggcttaatccaaaaacaagaccaacagttttcaccagacggtgagtgacaccaaaggtgcccat

SEQ ID NO: 127643 - DNA, 181 bp, Zea mays
  unsure (1)..(181): unsure at all n locations
  Clone ID: MRT4577_47880C.1
gaaccaggacaagggccncacggagagccggggcgagcacaaggacgcgggggaggacggcagcaacccgnncaacaaggcgcacgggaggacggcggacgaggaccacgggacggacccgcgctaaaaccgcgggnncaacgagggcaggaagaaccacncggngagcaccaccaaaaag

SEQ ID NO: 127644 - DNA, 571 bp, Zea mays
  unsure (1)..(571): unsure at all n locations
  Clone ID: MRT4577_47881C.1
cgtcatctagtctactctctaacccatttctcaggaattgactcctacattcctgatggcctgaattccaccgtgagtcagaacactctcagcaatgagagactgttcagtgggccagccttagacttgagacttacatatccgcagtcatggaaataacactgtctatttcttgctgaacaatcggggttttgcttcatcattgagcttgtcctgccagcctccaccagttcctgaagagaacaggccaaagtgtggaacatacaggatgaagcgattacaacctgggcgcagtatactggctggctttgctgctcactcccttacgaatagctgtgatgggatatgaaatccaagggaactgttagccccccagagcagctgctcccaccgaccctgctccaagagtgctgggatgtccgctggcctcgaggcaagacaagagctccaatcactctgctgcaagcgccaccattaaagtcaagatcactgtggtggggggagttgaagtgtgcattccagcatgctcatgatcttactgaccttctncactgatgaattagaacacccc

SEQ ID NO: 127645 - DNA, 316 bp, Zea mays
  Clone ID: MRT4577_47882C.1
cttttgtgcctgacgaatataagcgttgctggtttggagtgcggattttaaagataaaaaagaggagaaaaaaaaaaaaaaaaaaaaaaaaaaaaaaaaaaaaaaaaaaaaaaaaaaaaaaaaaaaaaaaaaaaaaaaaaaaaaaaaaaagggcggccgctaaaaaggacccaatgtaaccaacgaaacaatagcaacggcaagatgaacatatgaagcaacccaaacaaaataaagtggaccggatttaacagactcactacgagcaaaaacctggatgttacctaagaaaaaaaccctgaaaaaaaaccccttt

SEQ ID NO: 127646 - DNA, 202 bp, Zea mays
  unsure (1)..(202): unsure at all n locations
  Clone ID: MRT4577_47883C.1
atgggtaccctncggagtcctggccgggcaccgcaggggccgccgacaccgctgtctaccgtgccgagaccccaagcaccactgcggcggcggacgcgttggctaccatggctgtccgaaagaacacaggactcagggaaagatggaggaggaaagaccgcacctcttcttagacgatgattgacataaagcgcagcggtgt

SEQ ID NO: 127647 - DNA, 475 bp, Zea mays
  Clone ID: MRT4577_47884C.1
aggccgcaatcaattcctaggatattacctgattacgggaggcaataaacaaccatttgaatgcgtcacacatttccaagtcttaaaatacatgctagctgaagcgacagccctcagttaagaacctaaagatggggggggggggggcttagagggcctagcccaccggcactgagcaccatccacatcagaacaaaaatatgacctgggataacactgcgtttgcgctgatcattgacgaccacttggtgaccctgttcatctcggaacttgatcggcccactctccatttggccgaatcgcgaacagcgtttgagggagtcgctcatcatttcatcatcttgagatcagctcggctgttgaactccgccttacgtgatcagatagtggtcgtcgggctcatagggagcgcctgactggcctagtttgttctccatccaaaatcctgagatctttgtttacggccactcgccag

SEQ ID NO: 127648 - DNA, 294 bp, Zea mays
  Clone ID: MRT4577_47885C.1
ctcctttttctactgctctctcgggcagtgagtcttttttttttgtttcgcgctctagatctccttatagggaaaaaaaaaaaaagggagcctctacaaaccaaatgggcggggcggtcttccaccccccttttgaaggcgatacccagggaacggaactcacccgtaaagtcccaacccccaccaacctgccccaaacatcaactaccccccactgaggcgcccattggcattttaacactctgccgccaaagtccatggatccgaccaccgccccagagcacatgaacaccc

SEQ ID NO: 127649 - DNA, 308 bp, Zea mays
  unsure (1)..(308): unsure at all n locations
  Clone ID: MRT4577_47886C.1
ctccaattcttatcacacatcaacatttcacactctacatactctaacaagctttaacatgatcaacctatcacacaatatgttaccagccatcatccctccataactctctattatgtcctctcttacccatcttaatctatcttatcatgatctacatctcataatttcaatgcatttattatctataaatcctttagctatatcacttgttctcaactccacactctatacatctcanatcatatatgcacatgcccttcagtcatgttgccttaaaagaaaaatcaacacaatactacatcatt

SEQ ID NO: 127650 - DNA, 366 bp, Zea mays
  unsure (1)..(366): unsure at all n locations
  Clone ID: MRT4577_47887C.1
tctttgcaaatgctactaaatatttccaaaanncttctgggttcgctacctttaaatgatctgcacaccaactcattanacttntcatcaaatacacctaaactgcactcttatatccactatcaaattgcttctcaagctgcaacacaatcatcctcagcctcaaatccaactcaatcaattaacaataagaacaatgacacctacttctgttactatttttgtaaatctctaatccttttcgctttcatttctgcatttttttaattatcaaaatcaaacattccttccccacctgcaccatccacatttaaacttatctattcacaaaaattcttctcaaaatattctaacatacccccattt

SEQ ID NO: 127651 - DNA, 113 bp, Zea mays
  Clone ID: MRT4577_47888C.1
attaaaatcaaatgtctcctctgtactattgtattggaccggggatcatatccatcgtgtggcacctatgcttagacgcccactcaacttaccattctgattacatttctaac

SEQ ID NO: 127652 - DNA, 253 bp, Zea mays
  Clone ID: MRT4577_47889C.1
accccggtcaccacgcgtccgcccacgcgtccgaaaaaaaaaaaaaaaaaaaaaaaaaaaaaaaaaaaaaaaaaaaaaaaaaaaaaaaaaggggggtcttgggggaaagtaaaaccttattttcgtttgcatgcaacgcacttcctctcttttattttgggttcaccttcaatatgctaggtcttcgtttgctttcctaagaaatgccaaaacactttctttacctacacctttctatttgatccccataccc

SEQ ID NO: 127653 - DNA, 203 bp, Zea mays
  unsure (1)..(203): unsure at all n locations
  Clone ID: MRT4577_4788C.1
ggggcgtgtctcacccctccggacgaagtctgacccggtttcacactccgctgctccggcgggggagccgggccaaggcctggatctcgctggggctcgcgctggccgtcgcgctctccgcccgggcggaggaggagcccgccgacgcggctgagggcgaggccgngctcaccctcgacgacaacagcttctattaccccgcc

SEQ ID NO: 127654 - DNA, 467 bp, Zea mays
  Clone ID: MRT4577_47890C.1
tagaaaagaattttgcaggctttctagcctctagtaaatagtaaagtctgtatagctgcgtaataaagaagtaacccccacatcacgcgtgccttgttccataattaaagaaataaaaatgtgatgcgtttcctttaccattacctaccctaggattttaatctcgggacgagattcttttatggggggaaggatgtaacacccctggtgttactataactaaaacatgagcatggcatcataagcattggcattgcatatgtttgacacacctagagtgcattcactaggcaaaaatttcaaacaagttgtattgctttaatgtttttgcaaattgaaccttgggttaaggatttaaccctaaacagggatttaagggggtaaacctaacccaagttaaggaaaccttaaaacttttaggtaaaagccataatatgacccctagaattaaacttggatctcatttt

SEQ ID NO: 127655 - DNA, 300 bp, Zea mays
  Clone ID: MRT4577_47891C.1
gtgggtttttttttttttttttttttttgtggtggtttttttttttttttttttttgtctttttttttttcgtgcgcttggggggccccgggtggcccgggccgcgcccggcgggctttctttttctccccatggtccgcctgttgggggggggggggtgcctgggtcatggggggctcccgcgcgggattggtggtggttgccctccccttacgggttcggcccgggcgttccggccgtcacgctgggcgtcctggtgggtgccgtgctttgccctgtctgcctttcgttccctggccc

SEQ ID NO: 127656 - DNA, 259 bp, Zea mays
  Clone ID: MRT4577_47892C.1
agcagtggtaacaacgcagagtacgcgggggtcctcgccggagctgtcgtcgaggtgccggatgtagtactcctgcaacgcaacgcaaggtcactcaccacgaggagcagaaacgagctagcatgtgtccttttcagtctgccgaacaaaacaaacttttctcgcttgctgttctgctgtagtacatgtacatttcagtctgccaaaaaaaaaaaaaaaaaaaaaaaaaaaaaaagtactctgcgttgttaccactgct

SEQ ID NO: 127657 - DNA, 415 bp, Zea mays
  unsure (1)..(415): unsure at all n locations
  Clone ID: MRT4577_47893C.1
tttgggctgatttatgtagcttgtttatgtgcttgtttatgtgcttgtacggngaccgaggcccgtgcgaaaaccctgcttgcccggcgcggcgtcaaccgacgacacaccccggccacgtcccgtacgcccgcctggccggacgtaacaacgggtcggccatcgtccctacgctgaactcgaccatcctcgaccgacgtacacttcccccggtcgccggtcagtgaacgtccctagaaattattctcctcgcccagtcaccccgggtagcaagctaagtagcgtcccgcaccccgcaaacaggtacctcccacgccaacaaactcgcacagaaataaaaccggctacctaacaactaacagcaccactagaaccataccctcgcatcataataaccaccccaactaataaggcc

SEQ ID NO: 127658 - DNA, 200 bp, Zea mays
  Clone ID: MRT4577_47894C.1
aaaaaaaaaacaactaaacactcatatttttttaaaataaaatcagaacctactaagggatgggtttttaaaaccaatcacgttctaaagacgctcttgcagatatgaatgaatatcgtgcctagacaaaacaaacttacaaggcttgctgaagctgccatatataatgatcatctggtgatcgatgtatatttcaatga

SEQ ID NO: 127659 - DNA, 353 bp, Zea mays
  Clone ID: MRT4577_47895C.1
cacctctagctcgtttgaatcatttctaccagagaggccctactgttaatgatggcaattatcatatttcacacattctaaacgagctaaactccataggctccagaaggacaaactggattatctattccatccattccttacctgcttaagatggtaaggaaactgctacacatactacacatactcttatcacacttaactctctcccatcatttccattattcacatctttatcatctaaaatagacaggataaacaggcaatcatccaatccaagcaaacatagggtagatctgaagaacctgtataacaagtgtcacaaacaactccaacaactgcaccttaatttc

SEQ ID NO: 127660 - DNA, 2559 bp, Zea mays
  Clone ID: MRT4577_47896C.1
ccggccggtcgagccgaatggtcatggcagcgccagtgccgctccggcggcggcgggcgctcctggtggtagcgacgttactcgccgtggtcaccgcggcgttggcgcaggactataaagatggtggcggcgacgactacgaggaggacgagaagaagaagccgcagttcaaggcgcaggaggcgtgcaacggcgtgttcctgacgtacacgttcatggagcgcgccaaggagtacccgcacctgaagaaggcggcggcgcagccgtacgcgttcaaggccacggcgacggtgctcaacaccatgaccgaggacctcaaggcgtggcagatgttcgtgggcttccagcacaaggagatcctcgtgtccgtcggcggcgccgtgctgctcgacggctccgacctccccgccaacgtgtccggcggcgccacctttgcgggatacccaatggccgacctcctcaactccatcgagacggcgggcgagccgtccctgatcgagagcaagattgagatcaccggcacccaattcggcgtgaaggcccccgggaagcccatgcccaagaccatcaagttgaccaaccccgtgggcttccggtgccccgcccccaaccacaaagacagcgtgatgtacgtgtgctgcgtcaaggaccgcaagttcaaggcgaagaaggctaacagcacgcggtaccagacacggcggaaagcggacctgacgttcgcctacgacgtgctgcaggccaacaccaacaactaccaggtgcaggtgaccatcgacaactggagccccatcagccggctggacaactggaacctcacctgggagtggaagcgcggcgagttcatctacagcatgaagggcgcctacacgctgctcaaggaaggccccgcctgcatctacagccccgcagcgggctactacaaggacatggacttcacccccgtctacaactgcgagaagcggcccgtcatcgtggacctcccaccggagcgggagaaggacgacgccgtcgggaacctccccttctgctgcaagaacggcacgctgctgccgcccaccatggacccgtccaagtcgcgggccatgttccagatgcaggtgtacaagctgccgccggacctgaaccgcacggcgctgtacccgccgcagaactggaagatctccggcaagctcaacccgcagtacgcgtgcgggccacccgtccgcgtgagcccccaggagttcccggacccgacggggctcatgtcgaccacccccgccgtggcgtcgtggcaggtggcgtgcaacatcacgcggcccaagaagcgcgcctccaagtgctgcgtctccttctccgcctactacaacgactccgtggtgccgtgcaacacctgcgcctgcggctgcggcgacgacaccgcgacgtgcgacccggacaagcgcgccatgctgctgccaccggaggcgctgctcgtcccgttcgacaaccggtcggccaaggcacgggcgtgggccaagatcaagcactggcgggtgcccaaccccatgccgtgcagcgacaactgcggcgtcagcatcaactggcacgtcatcaacaactacaagtccggctggtcggcgcgcatgaccatcttcaactggcaggactacaccttcaaggattggtttgccgcagtgaccatgggcagccacttcagcggctacgagaacgtctactccttcaacggcacgcggatgggcgcccccttcaacaacaccatcttcatgcagggggtgccgggcctcgcttacctcgagcccatcaccgacgcgaagacgacatcggaacccaggcttcccggcaagcagcagtcggtcatctcgttcaccaggaaagacgcgcccaatgtcaacattcccagaggggaaggcttccccaagaggatctacttcgacggcgaggagtgcgcgctgccggataggatacccaaggtgtcgagcgcgcgccgacgggctgggaccgcgagcctgggtcagatagccatggcggcggcgctcgtgatgattgtggcgctagtggattccttgtgcctatgatgactgaaaacttctttggttcatagaggatttgactgacctagcgcgctgcatttgttgaacacttcattcattaattggaagggacaacttttttcactccagttcagagatcataaatgatccccacaaaatggaggaacagcattctacaaacgagagcacacaagcatccaagtggaaactgatccggattgaacagtggagggtaggatgaacatatattctggattggatccaacaaatgtttgtgaggatcatacgggtatgatgatgcttgtgagttgtgtgtaagggggaaagggcatgtaacatttcaaggctgtggtattattggttggacgtctatgctcattgggtttacacttttattccactttctttgtgttacacaaaagctcacgagtttgtgtatgcatattccgcgtaggtagtcttcatctacagaggaggttgttttaattttctatgcactctacagtgcaaaaatatattttacacagcc

SEQ ID NO: 127661 - DNA, 921 bp, Zea mays
  unsure (1)..(921): unsure at all n locations
  Clone ID: MRT4577_47897C.1
ctcctgtaacagcggaaaggaataatgaaatcttggtataatgggaccgccaatttattggacgtccttcctgctgtttaatagcgcacgtaaatcttcagtcagatgtggtatgcctatgccgttcaacaccgaaggtaacagatactactgatgcggtggggggaccatgagtccatgattataatttggtgcacttgccaccctctcacttcctgtcctgtcgaccagagacgacgtgaactgtgcaagcaacttgtgctcttcgtcacatggccccagatgacatgtggtcacccaactgcccctgatgccatggccaatggatcacggataggaggataaacaaaacactcagagctagcccacacagaacgttgcagcagctccgcagcacgccgtcaaagccgtaggcgttgagctcccagaacacgacgtagtggcccggatcgcgtgacgcctccgcgtggctgctgtagtccaccacctccagcttctcctccagcagtatcctggccgcgctgtccacacagctgcaggtcctgctcgctgttcttgtcgacgttgatgctcaacatcaggttgagccggcacacgaacttgagcttcggcgtcaagttgtagaacccggccaccttcaccacgtcctctagatggcaccggtacagctatgccaagatgtagctgcatcacccgtggctcttgtcattcagccaagtttaatgtattcagacagtngggcatcagtggtgtaggttccaaagaagaagagtgcctgtccacatgcactgttaccaaattaaagagccatctgctttatctgaaagtgaggcctccctccgtgccttgtctgagaccggggagtcaatcccgtccgcaaaggagatggcagtagagagaccgcgcgaagtcagatcgcga

SEQ ID NO: 127662 - DNA, 282 bp, Zea mays
  Clone ID: MRT4577_47898C.1
cggtttctccagtctcgactcaagcgacccatcaggcgatcacaactgacatcttacctttttcaccctcgttccatgcaacactaagggaggggtattacatcagttacgtgtggtgcatctattgctactaatcatcatggctcaacaggttctaccgcttgcgctagcaaacctgtgtctctactgtcaccagcagtatacggtggcattcatctaagtcgactgctggaagtatgcttactagctgcaacgctaacatctaccatacagctacttact

SEQ ID NO: 127663 - DNA, 503 bp, Zea mays
  Clone ID: MRT4577_47899C.1
tcggtatgatactaaccggatcaatctgcacaaggcacaaaaaaaaaggcaacgacgatggctgcttgggggggcatgatgctcttcgggagactggcggggcttgtgggggcgggccttctctgggcggcggccgacattggggcggggcaacaggcctttaacgtgcgggcgaccaaccacctgtacaaaccgagacaaaacggttgggacctgaaccgcgtgagcgcgtactgcgccacgagatgacacctacaagaccctgtcgtggcgcaagaagcacggctggacagccttttgtggacccgccaggcactaagggcagagcgcctgtggtaatagcatataagggtaagaaccgggcgacaggcgcgtgcatcttggggaggatcgtgtaccagtgcagcaacaggccccctgggacctgtactaccagacggtgttctataaaatagacaccaacgggcagtgataccacatgggctccctcaacaacaactacc

SEQ ID NO: 127664 - DNA, 271 bp, Zea mays
  Clone ID: MRT4577_4789C.1
agaggtctctgaataacatgagtatcacaactctagaggcgcgttagacatttcgcttcatcgttccttaaatttgtagacatttttaatctgtgttattgtacatttacactagccgttcatatttgtacacaaaagtgttccattaaatacgttgtattttccaacagcaatttgtgttataaaaatattccccatattgtcagtttgtcactaaaaaaaaaaaaaaaaaaataaaaaaaaatataaaaaaagaaaaaaaaattggtta

SEQ ID NO: 127665 - DNA, 433 bp, Zea mays
  Clone ID: MRT4577_478C.1
tttttggaggggtttttgcgttttttaaacaaaaacccaatttataaacttggccgggatgcaagcgtacagaagcctggggtcccctagaccctcaaggccagggaacaaaagcccaactaaacgaccccggacaggtgggggaatttatagaagggcctggcctacaacagacaaaaatcagttttttatgccccagaatgggggggacaatccccagacgggggataaagaacatgtaagaacagattttttagccatcagggctttttggaccatgcgactggattgatttccgatggggcactccggtacaggtccagcctttttgcaagggtaggtctgggttccatgactggggggtcttcgtcgagaagcttggaaaggtgttttattttttttgctcccagttcaaagaaaaagtgatcgagca

SEQ ID NO: 127666 - DNA, 302 bp, Zea mays
  Clone ID: MRT4577_47900C.1
aaaaaagccaaataagaaagaacagcttactctagtaaacaatgtattaaagctgtccaccaagttgttgaaagagctggacacaccatttagactctatggactgacaatgaatcccttaatctacaatatcacaagagtagttatcctttctgctgtctcaggtggtataagtgatcgtctaggatttaatataagactgtggaaaattaaatcataagctgagttaaatgcctggactctcccctggctggtatcaaaacttacctatcaaggaaagtgatgactgcagaaaccagtga

SEQ ID NO: 127667 - DNA, 305 bp, Zea mays
  Clone ID: MRT4577_47901C.1
ctcaaatccatctgaatcgacatggttagcgctcgtcatggcagaccgcattccgacgctcctcatcccaacgacgacggtgacacttcgacactcctcccaacggtggcgacgatggtccggcgcgtgtcctcccagcggcggttacagttctccgacgcttgtccttacaacagcggcgatggcgctccgatgctcctcgtctcgatggggcaacaatgctgatcttgaagaaggcgaggatgctgctgctagttttcgagccgatccgatcctatcttcagcgccgcagatgccttacctgc

SEQ ID NO: 127668 - DNA, 392 bp, Zea mays
  Clone ID: MRT4577_47902C.1
cccacgcgtgcgcggacgcgttttttgaaactggacctacgcggtctactgaatgagattatggccctggcagatatactgaacaaacacaattgtaaggctactctggtgcgttcatatatgtacagtaaggggacagttgacatgctgcccacaacgcatgctcggatgcaaaaaaaccacgctagcaaggataaattttcaagagttatttctatgtccccagcactttgtagcttgcattcactctaatcacatgagaactacttgttaggaagctgcatggattgatctatcaaactcttggatcttcacctgattcacaagggaggtatacagtagtatggggggcatgtgaacttacacacacatttaccacttgctgttgattc

SEQ ID NO: 127669 - DNA, 823 bp, Zea mays
  unsure (1)..(823): unsure at all n locations
  Clone ID: MRT4577_47903C.1
ccggccgggaccccaagttaaaaaaccttcgattaattacaaatctctcccacaacatcacacacactcaaaatgactccctcactacaagacgcaaagatcaccttcctcggcggcggtaacatggccgccgccatcattggtggtctcctcgccaagaacaccaacaagcaaaacatttacgtctctgaaccctgggacgtcaaccgcaacaagatggccgacctcggcgtccgcaccaccgccgacaacaaggaggccgctgctgatgctgatgttgtcatcctcgctgtcaagcctcaggttgccaagggcgtttgcgaagagctcagctcagcttgggctggacgcgatagccttcctgttgtcatctccatcgctgctggcatcacccttgctagcattgcacagtggttcaagggcgatagtggaaaggcccctcatattgtgcgcgtcatgcccaacacgcctgcgctggnttggtgagggtgcttcaggcctgtatggctgctgaggatgtcactggctgctgagaaggagttgacttctgctctcctgngcagtgtaagcaggccaccgagtgggttgacaaggaggagcttctcgatgttgtcaccggtattttctggttctggccctgcttacttctttgctttcgtcgagcacctcatctccagcggcgtcagcctgggactatccgaggagcaagctacccgccttgccgcgcagacctgcctcggtgctggaaagatgctcgtcgagtcatccgatgagcctttctcattgcgaaagaacgntacgagccccaacggtactacccatg

SEQ ID NO: 127670 - DNA, 181 bp, Zea mays
  Clone ID: MRT4577_47904C.1
cccccaaccaaaaaaggcctttttttgcggggtttgttccaagtaaaaatttcccttgcggcccaaacttaacgggttcctcacccagtaaaccaggattttggtcccgtccctttttgggtcccgttccaccaaacccctggcttgttgaggttttgaaatcccagacccggtttttttt

SEQ ID NO: 127671 - DNA, 266 bp, Zea mays
  unsure (1)..(266): unsure at all n locations
  Clone ID: MRT4577_47905C.1
cnctggtagggtactactaggggggggggggcancaccacacanttatctttgaactgggccggcgcccggcggccgacctggatctgggggctggctggcatggcatggccgcatgcatgaagtggtagtggatagattgagggagcaggtagcttagctagcacagcagtggggaggggcttactcggggtctaaaatattctgcggcaacggcaaggtaagcgcgtgcccccccgggaatgtcgtccgggaaaggatctccat

SEQ ID NO: 127672 - DNA, 457 bp, Zea mays
  Clone ID: MRT4577_47906C.1
gcagaacgaatattacagtaccaacatctccatgacatgacatcctagtgttcacatatgttactttcagggctagcaactggggtggagaagacaagaacaagtgccttaacgaaacagagccgatctacaaaaccggatacaaagctgcaactacagactacagcttgatggccaaagctaagcactactttcgaacattggagccgaaaggcatacatgttcagatactgaacatcaccgagctgtctgactaccgcaaggacgggcatcctacggtgtacaggaaacagtttgctcctctgacgaaagagcaaatcgcagacccagccagttacgcggattgcacgcactggtgcctccccggagttccagatgtctggaacgagtttttatatggctgaatctgctatcgccacaggttccagttgtcgtcggcccgccgcaccgcgtgcag

SEQ ID NO: 127673 - DNA, 1264 bp, Zea mays
  Clone ID: MRT4577_47907C.1
gcagaacgaatattacagtacaagcatcaggatttttttgcaggaactatcgtcaccaacacattctgggctagcaactggggtggagaagacaagaacaagtgccttaacgaaacagagccgatctacaaaaccggatacaaagctgcaactacagactacagcttgatggccaaagctaagcactactttcgaacattggagccgaaaggcatacatgttcagatactgaacatcaccgagctgtctgactaccgcaaggacgggcatcctacggtgtacaggaaacagtttgctcctctgacgaaagagcaaatcgcagacccagccagttacgcggattgcacgcactggtgcctccccggagttcctgatgtctggaacgagtttttatatggctacctcgtgcaaaaatgatgtacaaaactgtcagtcagggcgacatgattttgcaattttcgaagaaatttgtcatgcaaaaaggaacagtttaagaatgcccctaaaattcagttcagttcaattcaattcagtcataccggcaggcaggcaacaaaagcacattccacatctgattggtgggtaatataggttagggagagaggagcaacctgaatctgctatcgccacaggttccagttgtcgtcggcccgccgcaccgcgtgcaggaccaccccgccatggccaccggacaccctcgccggcgcgtcgcgcagttacaggctacagctactacctggaaggccaggccagccccagcccatgcagtaacacttggatgatgtggcccgacaacggcccaagtttaacggtctcaaagcttagaggcctcacattgccaaaattatgaataaccgaaatggtacaagtttcttatatatgaaacgcggttcaaaacacggcttctagggctatccacgtcgacttttattttttcagccgttagattcacaatcgaaggacaagcaaacgcgatgtcgtttctatcctccacagatgacacgatgtttccagaaatcgcttcttctttccttcctctgggcatctctctcccgaggctacgggcatacggcttcgatgttaagccagtggagttcctccgcagctgacggcgatggcggagaccacctgcttctccgtgttacgccacagatcttggctgccacggtctcgcgcttgccgactgtaatacccaatttgtaaattgtaagaaataatacaaatggagaaaacaatttctccttatgtaaaaaaaaaaaaaaaa

SEQ ID NO: 127674 - DNA, 156 bp, Zea mays
  Clone ID: MRT4577_47908C.1
agtctttgctatacctgatgtccaactgctaattcaagctttagatgccaggattatggcacggcgtgcaggtcttcattctacatggatctgtgaactgcgaccctcatcatcatcgcgcgtactaacataaagtgctatcttatctggtggaga

SEQ ID NO: 127675 - DNA, 170 bp, Zea mays
  unsure (1)..(170): unsure at all n locations
  Clone ID: MRT4577_47909C.1
ctccctgcgcccactctanatctccttcgcatcgtcacctgggtcgggaggcacaactcctgccccgtctgccgctgccgcatccccccggccgtcgaccctgagcaggccgnaccgttggaggaggacctgtggnggacgctggttgtcgtgcgcttcagctgcagggg

SEQ ID NO: 127676 - DNA, 273 bp, Zea mays
  Clone ID: MRT4577_4790C.1
aaacaattcaattcaatctgcctcgatcatggagaggaaaacatttgggtttttgttcttgctcctccttgtcttagcttctgatgtgacggtgaagagagcagaggcgaaagattgcttgacaaggaggcacgggttccagggtagatgcttattcgacaggcaatgtgcacatgtgtgcaggagcgatggtttcatcggtggtcagtgccgaggccctcttcgcaaatgcttttgcagcaggccatgttgatcgagattactactgccaaa

SEQ ID NO: 127677 - DNA, 400 bp, Zea mays
  Clone ID: MRT4577_47910C.1
agagcagcaaaccatgtagacagaagaaaagctaaaggactacatgttgaagtagtaatagttactgcagtactgcatctgatttgacttgttgtatggtaaattgcccgtccacgcaggttctatactttgaagattttgtaccttgtcagatatcacagtcctcttttgatgtgttgatgagcacagaccggcaaagctatggtttcaagttaaaaagaggtttgctggatgatgaaggaaatgcttttcttgagtgggatagtatgacatttgctcgtattgaaggtggattttctgtcgatccttgattttctctagccaatgctatgcaagaacagcagggatctcaacaagaaagataccttgtgaggaaggcactcaagtctgctctatctca

SEQ ID NO: 127678 - DNA, 381 bp, Zea mays
  Clone ID: MRT4577_47911C.1
gtgattttctctatctaacatggggcctcaggcaggcatggccgtgctcgactggaggctccgaccaaaagcttttcccgccgccgaccgacttacccaaatgtttatcagactgttcctgcatgtttataccggcgcgcgcttcaaattaagggggactagaattagacaaaggtttgaataatgcttgcatgctttcttcattgcttattgcaattcacacaaccttgcattttaaatcgaccggcccgatcctagctgacgtggagtctaatcaacatttgtttatgtcgtacggcggccgccgcagattttgttgcgcacggctgccgtagtgcaccatcgctgccctccggcggccccatgttgtgtgcgcctccc

SEQ ID NO: 127679 - DNA, 419 bp, Zea mays
  Clone ID: MRT4577_47912C.1
gccacagatgcggaaacctgataacctgggaatcttctcagacctttgtggtttacatacccaaaacaagatcgccatgccagcgctatttggtcatacagaccataaactcagcactagcatgcgccggggctgaagtatacattaagtggaatgcatcatctgtgcttacaagacgagctgttgctttattggagtacgactaggtggacgatgctccaccagggctaggcgggtgttatgcccatatcaccgcctacaaagagaccaattcggttggagttaacatatgaaaagcctacaccggtgcaaattgggtttacctacatagaaccttgcgaaaaagcaccggtattcatcctgaccacagagacctatgccggacttcatcatggcttgcaaagcgtacactcgttgca

SEQ ID NO: 127680 - DNA, 563 bp, Zea mays
  unsure (1)..(563): unsure at all n locations
  Clone ID: MRT4577_47913C.1
tccgtaaacctagccacgctgnaagntcattgctccaacctcaagcgactcaaggttgagaacaaccaaaagctgaccaacgatggtgtcaaagcgattgcaagtttgtcggctctagagcatcttggacttcagctacagcacaagactgaatctgacgcttacatcgaagtcgtctcgaggattggtgccaacctcaagaccttttctctgaagattgttcctgaggttgacgacacgctgttgcaggctattcacgagcattgtcgctccctttccaagttccgaatcacggacagcgagtttatgaccgaccagggttttgttgatcttttcaccaaatggaccaatcctcccttgcgatttgtggatctccagaaatgtcgacagattgatgcaagtaagcctcgggagaacccagatagcgtcggactctgcagtgagggtttcaaagcgttgatggcccactcgggtgagaagctccagtacctcaacattcatgcttgtcgtcatatctcacgtgaggcttttgaagaggtcttccataaggatgctcagtatcc

SEQ ID NO: 127681 - DNA, 1245 bp, Zea mays
  Clone ID: MRT4577_47914C.1
tttaacgggagaagcctggcccaggaatgccgaggagactttttaactttcacggaaatttcccctctcttggtctcttctcttgcgcgttcctcttcttcctagtcctaggctactttcttcgatcccaactccgagtcgcctgtcatctctctctaccagattagattggggatctcatctcatccgaatccttcatagtattacacaaccagcaaggccgcccgcttgccggcaacatgaagaagatcttcggcgccaagaagaacaaggatccgccgcccacaatccaggacgcaaccgacagaatcaccaagcgcggcgacaccgtcgatgaaaagatcaagaagctcgacgccgagctcgcgcgctacaaggagcagatcaagaagacgcgcccaggccccgctcaggaggccgtcaaggcacgagccatgagggtcctcaagcagcgcaggatgtacgaagggcagcgtgacatgctctacaaccaaacatataaccttgaccaagttgcttttgcggcagagggacttaaagatgctcagcaaactatgactgcgatgaaggctgccaataaagagctcaaagggatgatgaaaactgtcaagctcgaagatattgatagtatgcaagatgagatgatggatcttatggatgtgagcactgaaatacaagaaactcttggcagaagctacaacgttccttgatgacatcgatgaggaagaacttatgggagagctcgatgctttggaagctgacatggactttgaatcagagtcagtcccatcttacctccaaccagaccaagaacctgaactcaacttgcctgctgcaccaactggccatgcagcagtcccagcaaaccagcagcaggaggatgagctaggattgcctacagtgccacaagcatccattcgtacataatcaagcagaatcacgtttcttgcagtcaacgatataaaggaagtcgtattatatatctacagctgggtgtaaaaatgctgttatgtaccgcaccacttcgattttttttgtcactccacttgtggatggtgtaaatctgattgaattgaattagttgggagttgggacattttaagatcctcttgtatttgctgtatggttgtacagaaagcagcaaggccagagcagcacgtttataccgtactgtgagaaaaaatggtgatacgtggctaatgtgctaaatagctcttccttgttgtatttggtggtggagggctg

SEQ ID NO: 127682 - DNA, 258 bp, Zea mays
  Clone ID: MRT4577_47915C.1
ccacttcaaaaaaatttcccactgggcatagccatacaagactccaacaccgtccaaactaaaactagcttccccttttaacaaaggggaggggcccttcggcagagggcctttcacaggaaaccctccacggccccaggagggattaccaagttccccggagggggcttttccttaccgtacccgggggctccgtttttttctttggggccaaaccccttttccgggagcttttaaagcttttccagggctttcttt

SEQ ID NO: 127683 - DNA, 318 bp, Zea mays
  Clone ID: MRT4577_47916C.1
agccccatccgactatccgaggggccgctggtcgtcgggcggctcacgtggtgggggctcggcttcatgcccccatgcgtcttccccgggtactactgtagctgagtacataccgcgagctataagctagtgcgagcagcctgaccgatccggaaggagagagagagacaggggggatggaccgggcgggcgacctgcgggtgtcgggtctggacgacacatacatgatactatggtgagagcttgctagatctaagcaaggggcgtacccttgaggccaccaagacaatggctcgcatggtcgggtgaggccgcgga

SEQ ID NO: 127684 - DNA, 294 bp, Zea mays
  Clone ID: MRT4577_47917C.1
cccacgcgtccgcccacgcgtccgggggtcaggacaagatcagacctccttcgtcgcattacttccagatcacccactgtcacacctttgttgcgagaagcaatgagcgtgaccgtgttgttgaagccatatatgagctccacaggatgctgaacgaggatgagctacgtgatgctgcgctgcttgtctttgcgatcaagctatatgttctcggtgccatggatgctgctgatgttactgacaagcttggattacactccctgcgccacgacactggtacatcccgagcacttg

SEQ ID NO: 127685 - DNA, 354 bp, Zea mays
  Clone ID: MRT4577_47918C.1
actgatcgtacaactgataggataactaagccgtaaacgatgcaactgtggctagaactgcagctcgctacaaattgcgctaacaatcgtgctgatcatctcattgattgtcacctagaatgcaccctatgtgacaccaaaccagatactaaatgagactattgctgtaaatatgatcattcaagcgatcatgtcatccacataatgattcaaatgaagcatgactcggacaatgacttcgagatggaggacatcattgatgatatccatgatcacacttatgtactcactaatgcaaggaatggatcactgattgagcggccgcatgagcgtgctcatatggttgctattagt

SEQ ID NO: 127686 - DNA, 353 bp, Zea mays
  Clone ID: MRT4577_47919C.1
aagcggaacaattttgatctggtggaggggcgtgttcgacccctgcagctgcagaaggagatgaaatcgatctgcatgcagttttgaccaacgggaacctaaaaacaacacaaactaccggtgggcttccaagttccttttggccaggggacaaatataactggggaactttgggcctaccttaaatccttaatctctacgggggggggagaatacaagagcccttgcaaagccctctatttttaccggtgggaaaggtgccccccccgaaggggaagcttttttgggtggtccacgtccagccgggcgccgttaaacaagctttttaggggcccttgggggggtcggggggg

SEQ ID NO: 127687 - DNA, 838 bp, Zea mays
  Clone ID: MRT4577_4791C.1
ccggacgcggacgcgcttattgcggaggtgttcgacgccgtctccggggtgcgccgcgcctacgccgcgctccaggacgcgcactgcccctgggaccccgacaagatgcggactgcggacgcggccgtggtcgccgagctccgccacctcgcgcgcctccgcgaccgcttccgccgctccgcagccgtgggccacatcccgcgcccgaacccgtccgcgccgccgctgcgcgaggccgtggcgccgtacgaggcggcgctcgacgacctccagcgccagctccagtccaggcaggccgaggtgaacgcgctcaaagagaagctcgcggcgggccaccagccgccgcaacgggcgccaccaccacgtcccgccctccaagcagaacggcggcgcgccgacggcggagctcttcaccacctgcgccgagcaagcccgcgcggcgacgcgggccttcgcggggcacctcgcgcacctgatgcgcgcggcggggctggagctcgcggcggccacccggtcgctcaccaagatcccggtgtcctccccgcagctggccaagcacgcgctggaggcgcacgccacgcgcgccctcctaggcggcttcgagcacgagtccttctacctggacggctccctctcgtcgctgctggaccccgccgcgttccggcgggagcggtacgcgcagttccgggacatgcgcgggatggagcccgcggagctgctgggcgtgctcccgacctgcgccttcggccgctacgccgccgccaagttcgcggcgctcctgccgccgcgcgtggaggaggccgtcctgggcgacgccgagcaccggagggtggtcaac

SEQ ID NO: 127688 - DNA, 235 bp, Zea mays
  Clone ID: MRT4577_47920C.1
aagcccagcccatttacattaagagagagggatacgcaccttctaatgctccagtcctagaacaagcagactagaaaatgctactcctagcgctactaacaccactttgcaatcagatggtgcctaactaaaccctggattcaacaagacggacaccgagaaaatgttctatcactggggcaaaggggtgacctaatcgtggaaaccgtagagggtgctgccctggcacttggat

SEQ ID NO: 127689 - DNA, 297 bp, Zea mays
  Clone ID: MRT4577_47921C.1
gcaaataacccccggaggaccttaagagacttttcgtggaacaccactgtacatgttcctatggcagatcggatggtacgacgtgaaatcaaccgaccagatcttgtccgtttgcttggcttgcatggatgggtccatccaggttcactgtgtccaaattcttttgagcactggatgctgctgacctggctgatggaggtttccactggccttactggcgccgcgcagccccacagggctcactggggccaaatgcgctactttacagtcaggactcactgagcaacctggcaatgg

SEQ ID NO: 127690 - DNA, 356 bp, Zea mays
  unsure (1)..(356): unsure at all n locations
  Clone ID: MRT4577_47922C.1
cgggccgagctcgcacacaaggtcgtggtcntactctcctacctccntgggtgaaacctttcccgcttctcccaattccctccgtgggccgccggtccatccccgcacgaccacaccatgagggagtgaattctcgatccagatcggccagtccggtatccaggacgaaaacgcgtgctgggagctgcactgccttgaggatggaattcaggcctgacggtcagatgcctagcgacagaaccatcgggggaggcgatgatgcgttcacaaccttcttcagtgacactggagctggcaagcccgtgccccgtgctgtcttcgtcgaccttgaacccactgccaccgacgaggcgagg

SEQ ID NO: 127691 - DNA, 246 bp, Zea mays
  Clone ID: MRT4577_47923C.1
actcccactcccgctctatgtcatccttctccgcgcctgcacgccgcctacatggggacagtttgatctggtgagattcttttagtcaccccctctagcatctagatcttcccactcccacacgctcagtttcctaaaccctacacatctctctcagccacggcatgtgccatcgccatggcctggaggcgcccgacacaggcgatcatcctccttctcgccgcggctttcgcccacatcttcccc

SEQ ID NO: 127692 - DNA, 469 bp, Zea mays
  Clone ID: MRT4577_47924C.1
tgggaccctcgaggccggccgggccgggagagcacatacatacgaccctgctcatctatctacgagtacgagagagacacgaaagctacctaaataccacgaacgctgagcggagtcatataggcagcacgtggtgtgttggcgctgctgcttctccagatggtgttagctccgacaacgccgacagaccgcctcctgcaagtgtgtcacctccaccggggaatgatcccgacacaactccgagggattgtggacaaacctggcaaaactgacgtctgccgagaagctagtaacaaccaaccatgtccactggtgagctcacggtcggccaaggctgtgtatgtgatcggcgaaaagagactatctgcaccaacactatttgcactttgtgttggtaaaaaacaccttgccaccaactgcctctttgatgactgcatgctacgaggagaacaaggaccaggatggcttc

SEQ ID NO: 127693 - DNA, 113 bp, Zea mays
  unsure (1)..(113): unsure at all n locations
  Clone ID: MRT4577_47925C.1
tgagtcgtattaaaccggnacggatgcttctacgtgccggttcacctctctcgtttgatcggcgcttcggctcgggactggcgcttgtgaccgagtgatctgggatggcattt

SEQ ID NO: 127694 - DNA, 233 bp, Zea mays
  Clone ID: MRT4577_47926C.1
cgtgtgctggattcgccttagcagtggaacaacgcgagacttttttttttttttcttgcgggatcattgaagtgagggaagagatgattgagtgtagattgtgaactgagttcattttgggcgctgatgatcgtcagctatatatattagcaattgagctaaacattaattggggcgatttgttgatgtgaagcttcctcgcttcctcgctcacatattgatgatgataatat

SEQ ID NO: 127695 - DNA, 3057 bp, Zea mays
  Clone ID: MRT4577_47927C.1
atgtctgaagctgctaagaaggctgctgctgagatgaagctgagtcttgatgaagagaagaacctagggtttcttatagcgatgtcgaagtccaacacagaaaagattaccaaggaaattctggaggggctgtctgaagatactggtgacagtgaaagttatgatatggacaacggtggcgaagactccgaagatcgcccctggcgaccaagccattcagtttatggtaaatcaactatcaaagagaatcatcttgttaatatgagaggaaggtatttccgggatctgtccattgtgagggcggacgaaggggaaaaaacttgtccacaccctgaagaaaatgaagttgtggtgtaccgaagctttttgaaagctggattgcgattccccttgagcagcttcgtcgtggaggtgttgaaaatcttcgaagtctatcttcatcaacttactcccgaggcaattataaggctaaatatcttcgtgtgggccgcgaggagtcaaggtctgaagcctgacgcaagaagcttttgtaatgttcatgaattattatatgaaacaaagccttggggcaaagaacagtaccataacaactttggctgctacagcttcgtttctcggtccggggcaagctgtcccgtaccaacctttcggaagagatggcccggggattggatgacagaatggttttatgtgaagaatgacttatcagcacgagaagacatcaaaggtataattatgcgtcctatttggcaaagcttcggccttcggaggccgaaggttgaaatgaacgaagccgccgaagagtgccaaagagccttcggcgttgtctgctcttttataggaacaagggacttagtacaagaacatatcgccttcagggtgtggccgcttgctgagaaatgggaaatgccacaagaaaccataaaagaggccgacgaaggtgagcttgtgagactgaagtacaccttcaaatttggagataaatttattgagccagatgatgagtggttgaaaagcattgacaatttaagtgatgagctactcgggacctactcgaaggctgaagataacgcaatgtcagcagccttcggaggccgaaaaaagaagagactgaatcgggtatttgatgccattgggtttgtctaccctgattactgctatcccattcgaaggcagaagagaaaaaacacaatctctgcaaaagaagaagctgcagctgctcctagcgagccagaaccgaaaaggaaaaagttaaaggttcttacgcatcggccgcgttatattgaaccagcttcggtgcccgagtttaccggaaaaacttcttcggccaccgaagctgaaaaaccaaccgagccagccttgttgccagagatcgcagaaacggccgaagtgccaccaaagatagaatcagaacaatcaaacattttgttgtcagaaacaaaagagaaaaccgaagcgccgctcacagaaaaaattgaggaggtaagagaagcaactgagggctccaaaacatcagaagttttgagtcctacagcaatcattgggacagcaaaaaaccaaaaggggccatcagtgaccccaaaaaggaaaagaatggtaaatgtactagacgtcttggagacaattaagtcttcaagcacaattccaaaaaaaggtgttgaagttgctgaagcttctactgaagcttcggctcaacaagctgaagctgaagctgggccttcagagcccttcaaagaacatccttttgaagccgaagcagtaaaaattccggaaccaatattagttgaagaaacggacaccgtcatccccgaagcacctgccggcatgcatgattacatcatacgacatgcttcggggaaaaagctatctgaggaagaaactcatgaggccaaccattatgcaaaggagctgaaatatccgaagggggcagtaatattcaatggaacaaatgaagatgacttcttatactgcctgcctgataacaaagagctatccgtctgccgagagatggcgagaagcataggctttccgaagcttgaagctgggttaagtgccatgacgaaagaggatctcgcagacagcctcgcgtacaacagcctgaagggcctgatcctaagcaacgcgttaagagcgcaaaagagcgccgaagatgaaagttatgaaattgcgtttaataatttacgctccgaagttatcaaactgagaaacgaagctttggaaaaagataaaattctacttacactggtagataaagtgaaaaaagacgaagctgcttcaaaggcccaggccgaagctcaaaaacgcgagattaaagatcttcagaaacagctggctagagctaaagaggagcgcgcgcttgaggaaacgaaacgagaacttagtgattttatggtcaacaaattggaatcaaaagttaaggagcttcgcacatctcaggggaaatgctatgtcaaatctgtagaatgtgtgaataaaattaaatccagcttcgccagcgtaggcgccttttccagcgaagagaatttctctcgaggcaatcccgaaggtccgctggaatggattagccacgaagcagaggccttcgaagagattctgaacagtcgtggcgacatatgtgctttttcgggcgccagaggaattgcttccgtcttagagaagaaaggttgcgaacatgtaaaatttttagctcaatccgaagctaccttatctaccgaagacatcaaggacccctcggccgaagcgagcgtggttggtggcaaattttttactgatatctggaacgacggcggccgaggaatggcgcgagagatcattgaaagaagcgaaaaaggcattcacgatgctagaagagtagcagacgctgccgaaaggagtagggagcccgaaggacagttagtactgaagaagtgttctcttcgctcagaaactgttggacgatctgccgacccccacacaaaaggggatgaagaaattaatcaaatggccgaaactatcatggacaaggttgttgaccaacttctgaatgaagccgccgaagcagtattgagggaagattag

SEQ ID NO: 127696 - DNA, 2965 bp, Zea mays
  Clone ID: MRT4577_47928C.1
cttttaaaaacagtttttagcgcttccgaagatgtctgaagctgctaagaaggctgctgctgagatgaagctgagtcttgatgaagagaagaacctagggtttcttatagcgatgtcgaagtccaacacagaaaagattaccaaggaaattctggaggggctgtctgaagatactggtgacagtgaaagttatgatatggacagtagtggcgaagactccgaagatcgcccctggcgaccaagccattcagtttatggtaaatcaactatcaaagagaatcatcttgttaatatgagaggaaggtatttccgggatctgtccattgtgagggcggacgaaggggaaaaaacttgtccacaccctgaagaaaatgaagttgtggtgtaccgaagctttttgaaagctggattgcgattccccttgagcagcttcgtcgtggaggtgttgaaaatcttcgaagtctatcttcatcaacttactcccgaggcaattataaggctaaatatcttcgtgtgggccgcgaggagccaaggtctgaagcctgacgcaagaagcttctgtaatgttcatgaattattgtatgaaacaaagccttggggcaaagaacagtaccataacaactttggctgctacagcttcgtttctcggtccggggcaagctgtcccgtaccaacctttcggaagagatggcccggggattggatgacagaatggttttatgtgaagaatgacttatcagcacgagaagacatcaaaggtataattatgcgtcctatttggcaaagcttcggccttcggaggccgaaggttgaaatgaacgaagccgccgaaaagtgccaaagagccttcggcgttgtctgttcttttataggaacaagggacttagtacaagaacatatcgccttcagggtgtggccgcttgctgagaaatgggaaatgccacaagaaaccataaaagaggccgacgaaggtgagcttgtgagactgaagtacaccttcaaatttggagataaattcattgagccagatgatgagtggttgaaaagcattgacaatttaagtgatgagctactcgggacctactcgaaggctgaagataatgcaatgtcagcagccttcggaggccgaaaaaagaagagactgaatcgggtatttgatgccattgggtttgtctaccctgattactgctatcccattcgaaggcagaagagaaaaaacacaatctctgcaaaagaagaagctgcagctgctcctagtgagccagaaccgaaaaggaaaaagataaaggttcttacgcatcggccgcgttatattgaaccagcttcggtgcctgagttcaccggagaagcttcttcggccaccgaagctgaacagccaaccttgctgccagaaactgcagaggtggccgaagcaccatccacagaaaaaatggaagaagcgaaaaagccgactaaggaaaaaacattagaagttttgagtcctgcagtaaatattgaaacagcaaaaaaccaaaaggggccatcagtgaccccaaaaaggaaaagaatggtaaatgtactagacgtcttggagacaattaagtcttcaagcacaattccaaaaaagagtgttgaagttgctgaagcttctactgaagcttcggctcaacaagctgaagctgaagctgggccttcagagccctacaaggagcaaccttttgaagccgaagcaataaaaattccagaaccagtattagttgaagaaactgacaccgccatccccgaagcacctgtcagcatgcgtgattacatgatacgacatgcttcggggaagaagctatccgaagaagaaactcatgaagccatccattatgcaaaggaactaaaatatccgaagggggcagtaatattcaatggaacgaatgaagatgacttcttatactgcctgcctgacaacaaagagctatctgtctgccgagaaatggccagaagtattggtttcccgaagcttgaatctggattaagcgccatgtcgaaagaagatctcgcagacagtcttgcgtacaacagcctgaagggcctgatcctaagcaacgcactaagagcccaaaagagcgccgaagatgaaagctatgaaattgcgtttaataatttacgctccgaagttatcagactgagaaacgaagctttggaaaaagataaaattctgcttacactggtagataaagtgaaaaaagacgaagctgcttcaaaggcccaggccgaagctcaaaaacgcgagattaaagatcttcagaaacaggtggctagagctaaagaggagcgcgcgcttgaggaaacgaaacgagaacttagtgattttatggtcagcaaattggaatcaaaagttaaggagcttcgcacatctcaggggaaatgctatgtcaaatctgtagaatgtgtgaataaaattaaatccagcttcgccagcgtcggcgccttttccagcgaagagaatttctctcgaggcaatcccgaaggtccgctggaatggattagccacgaagcagaggcctccgaagagattctgaacagtcgtggcgacatatgcgctttttcgggcgccagaggaattgcttctgtcttagagaagaaaggttgcgggcatgtaaaatttttagctcaatccgaagctaccttatcttccgaagacgtcaaggacccctcggccgaagcaagcgtggttggtggcaaattttttactgatatctggaacgacggcggccgaggaatggcgcaagagatcatccaaaggagcgaaaaaggcattcatgacgccagaaaagtggcagaagctgccgaaaggagtacagagcccgaaaggcaattaggtgccgctgggtcaaatgtcgacgaagaaattaaacaaatggccgaaactatcttggacaagattgctgaccaacttctaaatgaggccgccgaagaagtattgagagaagattag

SEQ ID NO: 127697 - DNA, 199 bp, Zea mays
  Clone ID: MRT4577_47929C.1
tcacatacagggagttcattaccattacaaaagccgatctggtaacaactggcaacacgacaaaactgtatttggcaaccctccaaatcaaaagggagccaaatacaccatgatcattcaccgaaaacacacccaaaattttattctcctcaatgaagacgagacacaacgtggggggcgctctcgattgtgtgatgat

SEQ ID NO: 127698 - DNA, 375 bp, Zea mays
  Clone ID: MRT4577_4792C.1
tgacagaagtaacaagctatttgccagcttggttggaggtgacaaatccgacgtaaagtgtcccctcaagcacggtgagaatctcagtggcacgtgggtgtgtgtgtggaggattctgacctagtggtgcgtagtcaatgcgagccaacgagatccccaacgtgttgagtccaggcagctgcatgacattgatcaaagtaacgagctatttgccaaggttctcaacaagggcgatgtgtttgtattaccccaaggactcatctacttccagttcaacccagtacatgacaagccaacagtcgcgctcgctgctctaagtagccagaaccctggagctattactattgccaatgcagtctttggatcaaagccacc

SEQ ID NO: 127699 - DNA, 123 bp, Zea mays
  Clone ID: MRT4577_47930C.1
cgagggcaaggtcacgatcggacgcacttttgcaacatttaaaagtactttatattttacaaagtagcatgtttcattttgattaaaagctaccaaaggaattttgatcatgtatatgcgagc

SEQ ID NO: 127700 - DNA, 1215 bp, Zea mays
  Clone ID: MRT4577_47931C.1
gtcgtaagctgatccttagagcggcgcgcggaggggtgatagcggcagctgctcaagggggagatcgcggtgcacccgctgtgcgagcagctagtggcggcgcacgtggggtgcctgcgcgtggccacgcccatcgaccacctccccctcatcgacgcccagctcgcgcagtccagcggcctcctccactcctacgccgcccaccaccgccccttcctctccccgcacgacaagcacgacctcgactcgttcctcgcgcagtacctgatgctgctgtgctcgttccgggagcagctgcagcagcacgtccgggtgcacgccgtggaggccgtcatggcgtgccgcgagatcgagcagtccctgcaggacctaaccggggcgacacttgaggaagggacgggggcgaccatgtcagaggacgaggacgaggcgccgatgctggaggtgggcctggatatgggctccgacgggcacgacatgatgggcttcggcccgctcatgcccaccgactcggagcgctcgctcatggagagggtcaggcaggagctcaagatggagctcaagcagggtttcaagtcgagaatagaggatgtgcgggaggagatcctgaggaaaaggagggccgggaagctgcctggggacaccaccagcatcctcaagcaatggtggcaggagcactccaagtggccataccccacggaagacgataaggctaagctcgtcgaagagaccggcctgcagctgaagcaaatcaacaactggttcatcaaccagaggaagaggaactggcacaacaactcccagacgtcaaccctcaaatcgaagcgtaaaaggtgatggaggagagctagctgcaccgtatataccgtgtatgtaacgcacacctgctgacacacatgtacacatgtataccataccaacacgctaatcaaacggagctctgcatggcgactgtactcacggaaataaagaggaccatatcgaccggttcaactgtatatctagccattagtctgaccactggcatatttgtttgctgcggctgatactttgagctgatgatgtgtgggctcacagcatactttattcttgttcttattgtgttgacatagtttgtcccccataatattgaggattaaaaaaaaaaagaataaaccgaaagggagggcaacggtacccatgggcctatgggggaggggattacgcgcgctgact

SEQ ID NO: 127701 - DNA, 218 bp, Zea mays
  Clone ID: MRT4577_47932C.1
tcggtcgagcttctttaggtgggccccggaccgggaccaggtgcggcgtgctcctatttggccgaggggaggagtcttaggatacaaactggggacgctctgggggcgatgaggggatgatggcctaagaagcctgaccactctggggctgggcatcgaggtaccatttacgtacggcctttacagctatcttgcattgccccgtaggaaaagtggct

SEQ ID NO: 127702 - DNA, 615 bp, Zea mays
  Clone ID: MRT4577_47933C.1
tacctcgaagccggccgggtcttcttgattcctcaattgcctgatccgtttttttcgttagcgggccctccaccaaaatcaatcatgcccgagtttgtgctctttggtgattcgctcactgagtggggctttagcgagactactcagggcttcggccgttttcttcagcaaaagtaccagtacaaggtggggatcgtgaatgaaggtagagcaggctacacaagctccgacctgcaagatgactttgcccgcataatacgcagcacaacagcttcaggcgcaacgcagactctcctctttaccatcttcctcggcgcaaacgacgcctgtatcggcttgcaaggcgccgagtatgtaccatggcccgtcttctctgagaatatccgcggcttcctcgacactatcctcacagagcaggccatggacaataccaaaatcgttctcatcacgccaccgccaattaacagtcaggttgaggctatcagcaacaacatgtccaaggcggaggtcgagcaggaaaattgcaagaggaacgaaatgctcgggtataggacgtacatgaacaagaaggcgtacgccgagggagtgatgaagattgcataagagtaccaggag

SEQ ID NO: 127703 - DNA, 283 bp, Zea mays
  Clone ID: MRT4577_47934C.1
aaaaaaaataaaaaagaaaaaagaaaaaaaaaaaaaaaaaagaagaaaaaaaaaaggggggaaaatcaaaacggataaaagcttaaatgggcggggattcaaatgtgatagttcttcgggtgggtctccatgagatcttttcactgggcgtcgttttaacatgacttgattgggatgcccttggttttactaaaccttctcgggttgaatcctgtcttcctttccctaagtggccttccagtgaaatcggccttttccgatcggccttctcaacaattgggcc

SEQ ID NO: 127704 - DNA, 976 bp, Zea mays
  Clone ID: MRT4577_47935C.1
ttgggtaccctcgaggccggccggggtggttgttgaactccattccccaaaacgttagacggtgtgacacctaacccacgacccacctttctctctctcgaccttgttccctctcgctataaagaggagcatgcctcgaggccggccgggagcccggatcggaggtggagggtgggctttgtgcagaggccattccctcgctctctatactggagtagatagcagcaggaggaagataacatctcctcaaaaatagatatagcttcttcctctttggttctcttcgttcttttctttcttcttcgatctaaacacgccttcgatccatcctagtatccttgctgttttttcttccccaaggattttgctagctctcctgttgcagatttcctctcaaactaatacgagttctctcagctcctaaccacctgaattctttttagggagcgcttccttttccattcagcaatcaatatcgaaaacctgtctttcttgagcaaaacagcgcaaatactacctaatcaagaagcttttgttctatagatcgacaaaagcaagatggaaaacgttctcctggatcgatcatctagaagccttgagttcccgaagcgatccctaattggtcgcggccggcgggggccagctggcgcgaggacggcggtgccgccgttcggctcgtacagctcgttcacgacgtggcaatcacacaatcacctgcacaaaggtggcgcatgggcctccgctcccgcgcttccatacgcgaggcctccggtgatatactcgtcgccgtctcttcctctcctgccgtcccaccaaccgccgctcctgccgctcccacgaccgctgcaaagtacgccactttccccgccctaccagcagctccgcccccggccggcgtcggcgccacgcgccggcaggtcagcagcgggaagcaccacagtatcagtttcggcagcagtgccgccagcccctgcgc

SEQ ID NO: 127705 - DNA, 198 bp, Zea mays
  unsure (1)..(198): unsure at all n locations
  Clone ID: MRT4577_47936C.1
agagtgcgaagagcagtacaaaagattccattctcggttcttggagtggccgcgatcgactccggaaagagagagagaanacaagcaatggcgacagcagggaaggtgatcaagtgcagagccgccgtggcgtgggaagccggcaaaccgctgtccatcgaggaagtggaagtagcgccgccgcaggccatggaggtt

SEQ ID NO: 127706 - DNA, 121 bp, Zea mays
  Clone ID: MRT4577_47937C.1
cagccctactcgggggtccgggacctaggggctgccgagtctaggcacgcaagcttgcgcgtaatcatgggccatcatggtgcttcgctgtgtggaaagctgtgaatccgctcagcagcca

SEQ ID NO: 127707 - DNA, 818 bp, Zea mays
  unsure (1)..(818): unsure at all n locations
  Clone ID: MRT4577_47938C.1
ccggccgggaatgtaacaaccaaaatacaacaacaaatcctatctttagctccgaaggtgaggccccgtcgtcgtctactgttttagcaccgcttaaattgcaagatccaattttggattgtgcaagggatggaaggactcatacagtcaattcatttcttgagcggcctattaattttagaacggctacgtggagtaatcaagctgctggaagtaggttattttcttttaactatccttcggatgtggtgaagaattccatgtatagcagaaaattgcaaaattttcttggtttgcgagctgacttagttgttcgcgttcaagttaacgcacaaccatttcacgctggtagactaatgttatcgtggactccttttcttaattcgttgggtgctagtagaaaatattactataccgaccctacaccatcgtttttaacctgtatcagtggtaatcctcgcgttgaaatagatttatctactacgacagaggctaccatgactatacctttcgtgtccccttttctgtactataatctggtgacgggaacaggcgatattggaacttttcaattaatcgtttattctccgttagtagatttggtgtcaggagggaatatagactacacaatatgggttaacatgactaatgtacgtactgaatttcctactggtatgccaacttctatcgctcaagtgggagaagagggtaaacaacaacagaaagcagggtttgtcacacgacaggcggaagcttattctactattatgngaccactcaccaaaatacctggtgtgggccaactaataggatttgct

SEQ ID NO: 127708 - DNA, 428 bp, Zea mays
  Clone ID: MRT4577_47939C.1
gtgactggatctttttagggatatgaccaacaccccttctaaatgcttgaccaagcttttgacactgaaagacagccagaggatccatggaaagctggtctggcattaactcaaacaactgcggcgctcattcgtatgcaccaggcacgggactcttgctggtctgaccgactgatgggactgacagagatcggcaaccctttcctagacaacggagcatatgttgcacccctcggatcaaaatgtccatgtggaacaggaacccggatctatggttttagccgtacatgttgaaaaggggccgatggttctgccgttgacaactcctgttttctttataaaaacacccatacccatgctgtggacattcgatctcgaaccgtacgcgtggatcatgcccgcatttacggaccgtgccctgccagctt

SEQ ID NO: 127709 - DNA, 257 bp, Zea mays
  Clone ID: MRT4577_4793C.1
ctataagagagcttggaactttcactttggcgacgtgattaagccttcttagacggctcatggtatgtaaaagcaacgatggaacgagtgatggcgtggtcgtccttaccaaagaaacccttttgttttatcgaaaaaaaaggcagaagctgcaacctttgtgggatggaaccaacgtctggattcacggagacatgccccccttgtagctaaagtgcccccccccttatggttggaatggatgcccactgcaaatg

SEQ ID NO: 127710 - DNA, 424 bp, Zea mays
  Clone ID: MRT4577_47940C.1
ccgggaaatttctgacagtgatgtcgagaaccgatctgctgcaggatctctcaaggagaagcgccgacaggatgaggggcttatgcctcagaccagcggacaagcttaaaatctcatttctgttaaagcgagtatgtgagcgctggtcgcaatgaatgcgagtgagcgcgctgcgtgcgccatgaaaatcggcaagccgatgcatatatgcgttatgtctggtgaaaaatatacccggcgctgagtcgccaaccaattccgggcttcaggattctttatgcagacagttgttgagctgcatgctttccagcatgtaggctttttctttttaatatgttgcaattgtttgcagcgcattgcattataccatagatcgactaaacgtcgagtacgtactttgaataccatagttttctcctgttgg

SEQ ID NO: 127711 - DNA, 401 bp, Zea mays
  Clone ID: MRT4577_47941C.1
acgctcggcgtcttcacaaacgccggcgcaaactgtcgcccgagcccgacagatgttcaaggtgccattccgcccaccgatcgaccttgacgccaatctcggtctcttgcaaaagcgttacacgcggttgtttgacaggagaggacgaagatgacggattgcatctctctctcacatcgtgcagctcgccatccaagtcggcaacgcgagctgggaactctactgcctcgagcacagcatgcagcctgatggccaagagcctggagataacaccgacagacatcacgatgatgccttcagcaccttcttcagccagactggtgctgggaagcacgttccccgtgcaatctgagctgatctagaacccactgcgatcgatgaggtacgcactgacacgtacc

SEQ ID NO: 127712 - DNA, 234 bp, Zea mays
  Clone ID: MRT4577_47942C.1
attcccgtttcgacaccactcgttcgagccatcatcgcgccgtcctgcgccgtctattgtctcgacaacctggtcatccacatcgagctaaccacgatcgtctgcttcgtcacgtgacccgtgcgtaagagctgaccaagggtagccaatcacatgaaagcagcccctatgacgaactatgtgaccaagccctttaactctgctttcagaatctggaacagaacataggacgct

SEQ ID NO: 127713 - DNA, 416 bp, Zea mays
  Clone ID: MRT4577_47943C.1
aatacacttaattcgactgcaagtagctgtacacatgaatcattgtcattgtgcaccagggctatctgcatttatggtttgtttggtttctagagactaatttttaatacttctattttattccattataacgcttaaattactaaatactgaatctaaatatacttttagtctacatatataccagcttaggtactaatatcgattataatggatagacttaaaattagtccctagataccaaacacccccttactcagacacctgttatctcatggacagatagcatacctgctcgactacactacatagacaggagccgctccttggctcatggatgctgccatccaaggcgcctattatgcagacaagcctgtctgttgcttgaatattgcatatgaagctgtttaatggac

SEQ ID NO: 127714 - DNA, 153 bp, Zea mays
  unsure (1)..(153): unsure at all n locations
  Clone ID: MRT4577_47944C.1
cggccggggaagaatcgaagaggggaacagagaggagagagaagggagatggcggnaggcgacggcgtacgaggagcagcgcccggaggcaggtggaggcgaacaaagcgaaagctggaggagcttcagctccactacctctccgccgccgtc

SEQ ID NO: 127715 - DNA, 824 bp, Zea mays
  Clone ID: MRT4577_47945C.1
ccggccgggatcacgtagcacttgcactagccctttttacccaacctatcgcgaatacatacaacttttaaatccagcctcccttttttcaattctcattcctcatccaccgctttacaacatcccaacatgaacgcattcttttacgccctgatgtcacttgctattgctgcaaccaatgtcagcgctatcggtgagacgatgacctgcactacctattccgcatcgccgaaaggctttgcctgcaacgacaggcccgacattgtatgcacggagggatgcaagacattcgtcaccagcagccaatgcaaatttgacaagtaccccaagaagccgacgacttccgagctttgcaccgttgggtttggatctaccagtgctactaccaagatttgcattactggtcagggctccttcagctgcaccggcaagtccaccgggtctgcaaagtgctacggttgtgtggcctacaacaaaatcccttgggcttcataagcagcaaggcctcaaaccaaatcgtctcgcaatggactctagttacactcttacccttacatgaaattgtgtcacacacgatggacaggttagagctcctgtcggtgatcttcgttggacaattgcaagcatatcggctgtcttcactttctcaatacaacatttgtccaatggcgtatttgagccgcctttcatcccttctttttttacccctcacattaagagtttattttggctttgtatgcctccgctcaatgttgtcgcgcgtacgtggcctttcttgacggtgtctttgaccagagcaattaaaacctggtgagatcattccc

SEQ ID NO: 127716 - DNA, 435 bp, Zea mays
  unsure (1)..(435): unsure at all n locations
  Clone ID: MRT4577_47946C.1
tggggaacaaaccattgntgggggcggtttccttctgcacgcagggggatctcgtcctccagatccaggatggccgtcctccttgagaccttgcctcgccggtgagctactttttttttcgatttatcaggaaatccgtttgcttcatgttgcgcagcctcagatctgattgctggattcggcatcttacgggcttgaatagagctgggactgggagaaaacaacaaacccgcgttggatcctgtatcggttagtccttgcctgcaaggttcttgttgttttgttttggtggtcgagcatcgcatgttctgcttctggatccagatctggcgaaatcgcgaagtcgtcgtcgtcgtttcggttcggagcggatctgaggcgacgatggctggttcggtcttgagtcctgctccacctcgatggatgatgtctctg

SEQ ID NO: 127717 - DNA, 298 bp, Zea mays
  unsure (1)..(298): unsure at all n locations
  Clone ID: MRT4577_47947C.1
cggaancctgggncgacccacgcgcccttggacgcgcgggcggacgcgaggggccagggggcggggagctgcagaggagcaggcaagcaaggccaatgcacaggcaacagagcccaagaagcagaccgagaagcacaagaaggagaccacagaacaaaaaaccaaaaaagcagccccggaggccagggccggcaaagccgacaagaaggagcaagagccaaaaaagaagccggagaagcaccagaggacaagcagcgaacaaaagcgcaggacgcagaagaccgaacaagccccgaaa

SEQ ID NO: 127718 - DNA, 495 bp, Zea mays
  unsure (1)..(495): unsure at all n locations
  Clone ID: MRT4577_47948C.1
actctttctattgttcatttcctatgaatctttcttcattcacttcattgaagtggtaacaacgcagagtacgcggaagatattgtgcatttacctaatttcctgtcatagatagtctagtgaagctagcttactaataccaagaactactactcaccaaaacctatccttactaatacacggctatatgatattcttatttattattctatttctatatttactcatattctagtttcgtaaagctatactttagagaaggaaagagagattctaggaccacttgcccataagaataagaccgaacttaactacctgtaactgccccaactgcccatgtgtactaaccccccaaaaaaaaaaaaaaaaactctcaatttgcaaaaaaaaaaaaaaaaaaaaaaaaaaaaaaaaaaaaaaaaaaaaaaccaaaaaaaaaaaaaaaaaaaaaaaaaaaaaaaannccctctgcgttgttcccacggtttaggggca

SEQ ID NO: 127719 - DNA, 2061 bp, Zea mays
  Clone ID: MRT4577_47949C.1
atgcaacatattactagagacattttatccatgttgggagttgagttctctgactttgctttcctcccttctgctggtgccagtgggggaatcctggttgcttggaaaagaactgtgggtcatactggtgctcagagagtggataaccattcaatttctgttcagttttgcaaagatgatggtgtcccatgttggttaacttgtgtgtatgggcctcagactgatgctgagaaagtgcttttccttcaagacataagggctgcttgtgttggaccatgggtcattgaagtttgggacccagtcaggaatttgcctgctgacaaggcccccgggcctgatggattcactagaaaatgttacaaagccattgatgaaactgataagataaggaagggtctcttatggagagggagaaaggaagcaaagggagtgcactgcctggttgcttggagaaaagtgtgcagcccacagaatttagggggcctaggaatctctagcttctctgagctgtgttgggctatcagaatgagatggttatggctgaaaaggactgatcccaccagaccttggagtgatcttcctattcaagttccaagtaaggccaggttcttcttttctgctgttctggtcactgagcttacaatggcctctttgctggttcaattccttttgatcatcataaaagaatctggaagttatgggctccacccagatgcaaattctttttatgttctcctgcgtttttcgagaaaaaaggctgcaaagaaggttgaggatgagcgtgcaatcagagacgggctccttgaggtcacagagggaggtcgccatgtccttcatctggcggcaatagttggtgacggagaggttcccttgacgaagaaagtgacaaaggagaaaaatacattagcagaacagctgaagaatgctgaagcttcaaggaaaaggtttgatgatgaattaaaacgttatgcagctgaaacacagactcgtgaagaaattcgaaaatcacttgagaatgaagtgagaaggctgacacagacagtggggcaaacagagggagaaaaaagggaaaaagaagagcaaattactcgttgtgaagcatacattgatgggatggaatccaaactgcaagtttgccagcaatacatccggacacttgaaacgtccctccaagaagaggtggcccggcatgctccactatacggtgtcggcgtcgaatcattgtcgtttaatgagctggaggcactcgcaaacatccacgagcagagtttaaggcagatcaaagctatccagcaaaggaaaggtagcagccatctcttgggtggcaccgccctttctcacatccctgccctattctccccgccgcctccttcagcggcagttggctctccggcctcacggatccccgcatccccaatggcaccaaacggtgcagggatgcacgggaacgggcaccacatgaacagcacgactggcggccgctggttcaacccgagctgagtgataaggtgcaaagattttgtgattcaacgggccacatttgcataggcgtattttgcagccgctgagcaagcccaacgtcaaccccattttgttcctggccttccgtcaggctttcttcttgtacttaggctctcctcaccataagatctaagtggatgtgcagaacacttctggcaatataggcatagtggagttcggaatatagatggcgggggtaggtcttctggtgaggtcggccttacttggtagtgccgtcgtcgtcttgatatcgcatgggcgtggagagcttggtatgaaataatgcatgtaataatcaagtgaaccgatggaaataccaggtacaagtggagggctatgggaatggttgtgcttgttcactttctaaagaaaaaaaaaaaaaaaaaaaaaaaaggagtaaaaaaaatggtcaagacgaccgagttcgaagcttttattttctttagagttgcatacatagtagtccttgcacatgtcaggggtgtcacttcggtataaacttcgaaagcagaacgtgtttgcatcgcatgcctctaagct

SEQ ID NO: 127720 - DNA, 633 bp, Zea mays
  Clone ID: MRT4577_4794C.1
tacttcccatgcacgcgtacgtatagctgcgtatctctctgatacggtcgcccttgtttttatttctttactcgttctatttctactgtgctagggaggaagaggccaggagaatatgcagatcttcctgaagaccctgacgcgtgaagaccgatcaccctgcgacgaaggagagcagtcgacaccttatcacaacggcaaggccaacatccaggacaaggataggattcccccaaatcaacagcaactgatattcgctggcaagcagttggaggatggacccacgctggctgactacaacatacaaaaggagtcatacctctttatttggtcctcacgcttaggggtgtgtaaccattgatcaaggtgctaacctctcactgatgaaagcatatcctgatcggcattaaacccactttcttgtttgacacgataaatgatcctgttgaagagaaagaaggcattactgccgagcagcatatgctcatctatgctggtaagcagcttgctgatgacaagaccgcataggactacagcctcaagggtggatctgtccttcatcttgtccttgctctgacgcgtggctactattctacacctgatgaactagcaatcagataaactgttgagttg

SEQ ID NO: 127721 - DNA, 358 bp, Zea mays
  Clone ID: MRT4577_47950C.1
cgatgatggatacccgttcgcgttgctctccaggggggcgttactgtagcagacgggcggggactcccactcgccactgatcaaccagaactacccgtttttgaaccagatgcaggtgtaccaccacctcagtgggagttagcagccgtcgatccaccaggacggtagcgcggcggctataggggacatgttaagctctcgcctgccgacactgccaaccgacagaacgcaggcggagctacatttgaaccaattcgacacctacagcagtggtgggctgctggatcagttgatgctgaacggcgacaaacacctgctgtggtccaacccgagtatggtcaaggtcttctccatgccc

SEQ ID NO: 127722 - DNA, 1944 bp, Zea mays
  unsure (1)..(1944): unsure at all n locations
  Clone ID: MRT4577_47951C.1
tcgaggccggccgggccggaatacttgcgagntgtcaccaaccatacgtgtggggatatttcaccaaggctccgacgaccaccggtgaaagtgaaacgtcggtgtccggcgacgaccgagttcccatcgccggaaatcatggagaagcttccgtcacagcagcaggttgtgctgttggcgagtcctggcgcgggccacctcatcccgatggtggagctcgcgcagcggctcgccgctgaccacggcttcgcggtcacgttggtcaccatccccggcatgtccaacccggcaacggaggccgtcgtgctgtcctcgctgccgtcctacgtcctgaccgcggtgcttcctgctgttcctcttgacgacctcccgtcggacatcggcttcggtgccctcgtgttcgagttcgtccgccgatcgctcccaaacctccgcgcgctcatggaggacgccagccgcggctcggtgaccgcgctcgtatgtgacttcttcggaacctcggcgctgccgctcgccgcggagctcggcgttcaggggtacgtcttcttgccgaacagcttcgccatgatctccatcatgcgccacctcgcggggctccatggcgacgccgctgcccccggcgaataccgtgacctcccggacctgctcccgctcccagctggaggcctggttcttcaccacgccgacctccccgaagggttccaggaccggaaagacccggtgtacgcctatcacgttgaggaggcccggagatacggccgcgccaacggcttcttggtgaacagcttcgaggagctggaggtcgtcatggtggaaacgttcaagcgggacgccgaggacggcgcgttccctccggtgtaccctgtgggaccctttgtcaggtcaagctccagcgaagaagccgatgaatcgggctgccttgagtggctggatcgccaaccggagaactcggtggtatacctctccttcggcaccgggggctcgctatccgtggagcagacggccgagctcgccgccgggctggagatgagcggccacaggtttctttgggtcgtgcgcatgccgagcctcgacggcaacccctgtgcctatgggtcgatgcccggcgacaaggacgacccactggcgtggctccccgagggattcttggagaggacgagcggccggggcctcgccgtcgtggcgtgggcgccgcaggtgcgcgtgctgtctcactcggcgacggcgtgcttcgtgtcgcactgcgggtggaactcgacgctggagagcgtggcagccggcgtgccgatggtcgcatggccactgtacgcggagcaaaagatgaacgcagccatcctgaccgaggtgaccggcgtggcgctgcggccggcggcgcgcggcaacggccacggcttggtcacgcgcgaagagatcgcggcttcagtgaaggagctaatggagggggagaaaggaagcgcggtgcgcggccggacgagagagctgcgtgaggcttcgaagcgtgcgtggtcgtcggaagggtcttcccggcgggcgctcggggaagtcgccggcaagctgaaggctgcacttgtcaacgggaacggatcggctccatgattcgttttcttcccgtgaatcggatgagataaaaaaaactattttttactgcaattcattgggtgtggtaattatggcatatgtatttatggactagctgtatctattcaaagttttttttgcttgcgtacatgtttcatttctatgataaataaattgttgaaaacaaagcttattggatgccaaaataattaaaaaaaattagtgtaggagtcggtggcggatcccccaatatggcgaggcctagcggccgccagacctgttgctcatactctattaaaaataaacattggattcaaaaaaaaaaaaaaaaaaaaaaaaaaaaaaaaaaaaaaactcgaggggggg

SEQ ID NO: 127723 - DNA, 349 bp, Zea mays
  unsure (1)..(349): unsure at all n locations
  Clone ID: MRT4577_47952C.1
ccctcgagccggccgggacggagtacgagcccggccggctgggaggaacaacacacaccgcttctagctagtagctagctaggatccaacgatcgatcgatccatcgacgacatggacaggccagatcaccaccagcaccagttcttcatgccgacgacggtgcaggtgtcacagccacagcagcagcagcagcagctttgcgttccgatgctcgacgagccgccgtcctcgtttttggcggggagaggcggatgcggggcgtcggggaggggggagaggaagaggcggttcacggaggagcacatacggncgctggagtccatgttccacgcgcaccacgccaagctg

SEQ ID NO: 127724 - DNA, 490 bp, Zea mays
  Clone ID: MRT4577_47953C.1
aaaaaaaaaaaaaaaaaaaaaaaaaaaaaaaaaaaaaaaaaaaaaaaaaataaaaaataaaaaaaaaaaaaaaataaaaaaaatttttaaaaatatccttaaactgaattatgattattcttaattttattgggccctttttcccttattttggggggggcttaaattctcccttttgggtgtttttttgcgcctttttggggttatttttagggttccctatcttaattttcttggggcacatccctttttttccggggggttttttacctttttggcctggaaaaattttccttttcaacactttttcatcttttttggcaaatggattccccctgttttggcaaatttagccccgcctttatggtggtttttcgcacgttttcggtactctttacggccacttacccccctttttttccgcttttttaccccccttttttttaaggttccccccctttttccttcaactttttaagggggttttccc

SEQ ID NO: 127725 - DNA, 253 bp, Zea mays
  Clone ID: MRT4577_47954C.1
ggaagtttgttgtctgttcgagtcatgtgtgtgcgccggtgatcatgatgaagtcttgagtattggacgcaatagtagtgtgacgtctccttctgtgttaagtggcacattgtcgaggatgtggataagtctattctcaggcacatgatgctggagaacattgagatgaagattgtcacacacacgagttacattcacgagatcaggctcgaccaatgcgttcagatgctcgaggtattctcggatgatgtca

SEQ ID NO: 127726 - DNA, 1208 bp, Zea mays
  Clone ID: MRT4577_47955C.1
cctcgaggccggccggggccgccctcattccagccgtccccagccgcgcgtgagcttcatccggtcggccaccagccatcctccaaccgcgtgccctgctagctagcttcttcctttgttttttctaagctgacgtgccccactgctactccagaggaacaaggctgaccaagcgcactgctacaagtccggtggagaagcgccggccggcgcggccacggctgtgcgcgcgcacaggcctacgtacgcggttggttaagagtttactgccgtccaatcccagatactcttatatttgaaggagtggaggtgacaggataccagatatttgaggatcccaaggtgcagaaagcaatagaatttgctagtacagcccaccttgggcaatttaggagaacaggggatccatatattacacactgcatacacaccggaaaaattttagctgccttggttccgtcaactggagaaagagctgttaacacaattgtggctggcattcttcacgatgttgtttgtgatacatcagagagcttgaagagcatagaagagcagtttggggctgatgttgctagcttggtatctggtgtatcaaaattaagctacataaaccagctacttcgcaggcatcgacaaaaaaatactggtgggagcactcttacttcagaggaatcaggcaaataatctacgtgttatgttattggggctggttgatgatcctcgtgtggtgctcatcaagctggcagatcgcttgcacaatatgcggacaatttatgctcttcctgtacctaaagctgaagctgttgctcaagagacattggctgtctggtgctcacttgcttctcgattgggagtctgggctttgaaagctgagctggaagatttatgctttgctgtcctccagcctcaaatcttcaagaaaatacaatctgaacttactttaatgtggaatcataccggaaaatctaaaaatatgagaagatcatcaattcgaaacgaattacttgcttcaatgaaagatgggaatatggtgtccatcaatgattggtttagttcatgtaaccaagaaagaccaaatatgaaggacttattgcaggcagttttgccatttgacatctttttggatcggaagaggcgttcatacttccttagcaatctcaatagtaattctggagaatctataccaaatcctaagatagttgacgatg

SEQ ID NO: 127727 - DNA, 342 bp, Zea mays
  Clone ID: MRT4577_47956C.1
gtagccacgaaattgccagagaagggagtttgggccgccaccatcgacaggtgggtgggacatcgattcaagccgcgttttattggcgtgcgaggagcctgagcgtggtgctggtgtgttcgttgcaatggagggctgggtggaattccgcattgacctcatccgccgacgtgtgattccaccactgcttgggcaacgctcccgtcaccttgattcgagacgagcaagtgattgaggagcccggagctcagcaggtggataattctgagcaggagctcgttgaaggtgaagagcatgtagtccaggagaagtctacaacgaggaatacaagcttatctaggt

SEQ ID NO: 127728 - DNA, 280 bp, Zea mays
  unsure (1)..(280): unsure at all n locations
  Clone ID: MRT4577_47957C.1
tctttttttttttttttttttttttttttttttgggttttttttnttnntttttttttttccacgcaaaccaactgttttcatttaaacatccacgttttacaaaaatgacggtttcacatggtggtttaaaaaggcaatgactccggaataccagtacaactcctggtttaacctttaacaaaaatccttgtgcttttgctaaaggaactagcattatacctgaacagccagctttgcaggcaggggggctttgcacagagctagaaatagcctttccg

SEQ ID NO: 127729 - DNA, 477 bp, Zea mays
  Clone ID: MRT4577_47958C.1
accgccgcgtgctctccggattgttgtgcttgcggagtcggtcgcggcctcggcacgacggcgccggcctccgatccacaccccgccgagcagtggcggaaccacagggtatgccgtatatgccacggcataccggcataccctgcccggcaatccgatcgagccaacgcttggagacgccgtctccgattgaagtaggggagagcggggtgccgggggtcagtttgttgccggtcatcctcctcgtcgtccaaccaggtcatcgcatcgttcacgttcactctccaggactccgagacgcggttgctatgtcatatttgttgattattacgggaatatggctgatgaggaatgcagtttaaaaactggagcaccaccgcgtggtcagttttgcaggatagtgtggcccatggctttgacaaagcattgcatttctagtttgctgttacatacctagaccctagtgaatagagaagt

SEQ ID NO: 127730 - DNA, 342 bp, Zea mays
  Clone ID: MRT4577_47959C.1
ctaaacgatcgccagcctcttatctatttcttatgtgcttagttagtagtacccaatgctccactcacgacagtgctgaacgtctactgatatcatgctaggcgctctacgactgtcaatcattctaactcgatgctgtatgtcatgatcataacctgaatcctctgagttacttctaagatcgtatctgagagggtaccgtcgacttgaagcatacgaataatcttgagcacaagaacggcagtgccttagtactttcgaaaagacttactgctcatctacaaatagatgctgcctaaataaagatcttaacagatgactttcagtattgaggatccatga

SEQ ID NO: 127731 - DNA, 611 bp, Zea mays
  Clone ID: MRT4577_4795C.1
gctttctcgagttttttttttttttttttttttttttttttttttttttttttcttttttttccttcggggggggggggtgggtacctggtatttttaacatacataacaggcaataggcaatatacaggactaggcctacaaccagcacgggggccgcagtcacacgttgatctgctgggaaacctaaaaaggggaggcgttcagcgcccgccggatgcgagaggggggagcgtgtcatgccttctttggaggcttgtctaccacaacggggaagccgacaacgagcaccttgccgatggcggccatcaagggggagaagaacgcggcgtggctgtcatcccccatgtaggcggggaggtctgcggcggaggcaaacgtgatccataaaacgtgcgggaacccctgggtcagcttcttctggttcagcacggcctgcccccactcgaaagacttgacgcggatcatccggggggcgagggaaggacatgcccttgagcacggggcccaccacgacgccctccttgaacttggccactcacaggggcgttacctcccccatgtccggcgccggaggaagccctcctccattggggaagaggtaactagctc

SEQ ID NO: 127732 - DNA, 1851 bp, Zea mays
  Clone ID: MRT4577_47960C.1
tattctgtacctcgaggccggccgggacttctcgtcccaactcccaagttgcaacccagccacctcgtctcctcccctccaactccaagcctactcccacccgatcccccctgccccgcccccggcgccgccggttctcgcattcgcggcagtccatctcgctgccccttcccggcggcctctgatccgtgctgctcgtcgcccacgcgaaacctgccgcctcccttgttgccgcgaccgcgagccctcttccctcccctcgcggccctgatctcagttccactgtgccccgaccgtgatccgtccgcacccgcttcatgcccagcagcgttcaatccgtcccctaatgccgctgcctccaaatagttctccgtgtgctggttcttgcggattgcgctgtcaggtccacataatattggggacggtgcagagtgtcctccgttttttcctctctcgcacctaaagttttcgggagcagttagttagagtatattcgattccccctgatatagtttgtttatttcacactacgaagtctatgcactcgagagaaaaatcactggtagcgacggcatcaattcttgtgacgtttagtggctagaacaccctcactagcgctcattcatgtttacccgaccttgtccttttcccttccgccttccgtgtgctggtatcaatttgttgtaatttggggaggccaggagttttctcgccttcttgcccttgttctgcccgtagtaagtgcttgccgtttggttgattggaactcccaagtgttcgtcggtcacatttatatagctttacctcactaggataatcataagcaaggtttccccaaaattcttagaccagttgggatcaggacccgaaggtagattgtgttggctatttgccggtagggcattgtgactccgtgatgtcttgcacctctccagatccaccagactactgctcagccgaatcgcctgagctcaagctgtaccaggccttcatcttctcggtgcctgtcttcttcacgttcgtcttgcttctcttcttctacctcttctacttgaggcggcgcagggccaattggcagtccttgcggatgaggacaaataatttgatacgaggagataatgccagactggagtgtggcttaaagaaggagatgcgggaaatgttgccagttgttatcttcaaagagagtttcttgatcagggagacacagtgctcggtctgcctagcagaatacgaaccggacgagaggcttcagaagatacctccctgtgggcataccttccacatcaactgtatcgaccactggctctccacaaacaccacctgccccctctgccgagtatcgctccttcccgcccccaaggcaaccagcaccggactggatctggaagcacagactgtggtagaagaggagtccccgaacgcacatcatcgccaggaggagggactagttgatgccaacacaccacaggaaggtgaggcggccggaggtgacggagcaagtagcgtccagattgaagaaccgcaccgcgatgcggccgagccactggtggtgacggtggtcgctgtcgctgcacctcaggctgacgctgaaggttcaccgagtacagcatgccaaactgttaaagggaagaaataaggatagcctagcccatcgatgtatttctattaccaatgtgtgtttagctgggaaaggaaaaaaacgcataaagatggggccattgatgttatgattgccatttttctggggaggaagaagaagagcaagagttcagttgtggggaaatcttattgatacagcacttaacataaccgagattagtagtacttgtgagctgtttttcatctggt

SEQ ID NO: 127733 - DNA, 145 bp, Zea mays
  Clone ID: MRT4577_47961C.1
tggttgttccgcccattcgccctctgccctgggcccattcttcgacgacgggcatgcgccctgcgccctcgccccacccggcgacgacctcgttttctacgtgcgcgggcctcggctagctcctgattggcgctgggtagcgggc

SEQ ID NO: 127734 - DNA, 528 bp, Zea mays
  Clone ID: MRT4577_47962C.1
ggcgggctaatatcaaaaatcatataaggggaccgattcaacacaaggaagaccgggggaaaaccgaaaccatagtactttgggcaggagcagaaaacccaatcacatgcctgacccaacaaaacaaaggagatcccagtaatagctagaacgaacaacaaagggggatactaggagctacaacggacaccattggaggcccccggccgaccacaaaaaaacttgagctagggcaaaagaaaaagcactggggcaaaaacccaaacacttggaaacttgaggctagggaccgcaaaactcgatcgggtaaacccctaggtagctaggggaccatggctaaaaaggaggggaagcagcaaaaaccatggcatcgatgtcccacttgaccttgctgaaaaccctgtccatcagcacgaaaaacaccactgataaattgctcccaaggcccgggccgggaagcccctcgccgtcaacaccggggaggtccaccttcctggggaacaccatgcttttgtaaaaggggcgccc

SEQ ID NO: 127735 - DNA, 227 bp, Zea mays
  Clone ID: MRT4577_47963C.1
gtccgtgacaaactaattaaactgcgtataggacgtacaaacaaacttgcttctccgaccggggtcatgcgttggtggagatgggcgcggtccgcgtggtcgtcgccggcaacctcccgatcgggtgctcgccggcctacctctcgggggcgaacgtcacggagccggccgcgtacgacgcctacgggtgcctggccgtgctcaacggcttcgcggtgctgtacaac

SEQ ID NO: 127736 - DNA, 534 bp, Zea mays
  Clone ID: MRT4577_47964C.1
ggcagaaaacaattaaaaaaaaggattttccgttttggggtacttttccccccccaaaaaaaaaaaaacaagctaattgcccttagggccttaactttttaaaaattccctcacacaaaaaaaacaaagcatatttttatttgcaaagaaaccccccccctttgataaaaacaaaattagttaaccgccgggggaaaaacaaccaacgtgggggggggggcagtattagaaccccccagccccccctgggttattaaaacccagccccaacctttttaacaagggcaaccccttttttgggaacctgggcaacctaaaaaaccttgccgggaacgggggcccccgggggggcttccacgggggggaaaaaaagcccgcccaggcaggggtttttgtccgggaggggggggctgaaccaggtttgcacgttgttgaggggccacctaaacgcgcgggtccgggggggggccatcccggggccgcttattttttggcccgggtcggggagggggcccaccctgcccgttaaatttt

SEQ ID NO: 127737 - DNA, 482 bp, Zea mays
  Clone ID: MRT4577_47965C.1
ctgggatttcggttcggggtgggaggctgcaaaacctatacctgctgttgaacaaactcctatatatgatgaagatttagctgtgtgagtagagaacagattgactagttactgtgttgaatcttgacgcctgtcataaattataatcgaacaatataaccttgcagggagagcatctttgatgctttggaggttattgagccatcaaaactgtttgagcagctacttggcgtcattgtaagttcaataatgccacccccccttttttttgtctaactttttagctagctgaccttatttatcttacgacacatgttatcaccttactgatttctatttgtgaataccagctttctgtatgctttgtggcagcagaatcagttttagcagcagatagcaatctgtcaaaattattctacgattgcatggactacataattggcgtttaccacactgacatgtcaaaagatgagcttgatgac

SEQ ID NO: 127738 - DNA, 610 bp, Zea mays
  Clone ID: MRT4577_47966C.1
gaaccacaaagaaccttttttttgggggaacggaaaaaacccttataaaaacagccccaacgaagcaactttggaagggggacctgggtttttgcccaaaacccgcccaggggaaacccccccttccgggaagggagggggaaaccccaaacaattggggggaaacccggccgccctcagttaaaaaaaaaaaaactaaaagggaaagcctgttggaaaccccctgggggggaagcccgggggggcccccctttggggggggggggggggggaaaaccaccgggaagggaaacccgcccggcccgttggggtttttgggggaagggccccctttaaggggaacaacccttttttaaatttgggaaaccccccccccaaaccgttaaaacccccccggcccctgggggcccaacgcccactcttggggggcgcgcgggccggggacccccccgtggaaggaggggcggaacagaacccccaccaacaaaatcccaacaaggccctgaaacgggttgggaaggggccccaaaaacacctttcccggttgggcccccagttccgggaactcggggttccccgggcccggaatgggtttccggttaacgaacgg

SEQ ID NO: 127739 - DNA, 2046 bp, Zea mays
  Clone ID: MRT4577_47968C.1
cgggcgaagttcctagcctggatgaggcgcatgaaagtctgaacactggaagcccaagtgttgaggaagcaggtggatatttcaagaaaagcaaaaagaagaggtagagcagcaccacagatgcattttttttagcagaaccagctgttgctgtacctgaaaataatgtgatagctgcagagcctgagaaggttgagaagcccaagaagaagtatgtaccgataacaccaacgatccatactggtttttcattctctgttgtacatcttttaactgccgtaaagaaggctatggtcactcctgctgaagatactcctccagccacagcgacacaaccggatggagaggagggcaaaaagtggttcaacagtggagagcgcagcaaaacgccccatcaagaacaaagtgcaacagatcaaactgaacaggtccttgagggtgcaaatgccagtgctgtagaacagactgtaccaatcaatacaccagcgcttactgttcaagagattgtcaatcgaattagagcaaatcctggagatcctaggatacttgaaacacaggagcccctccaggatttagttcgaggagtattaaaagtactttcatctagaacagctcctctaggcgcaaagggctggaaagcactagttgcctatgagaagtcaaacaaaagttggttctgggttggtccagcaccttctgtttcatcatatgatgaccccgatgaagaaacctctgctgaagcatggagtataccacacaagatgctcgttaagttggtcgacgcattttctaattggctgaaaagtggtcaggaaacccttaagcagataggttccctcccaccacctccaccgccaaatcctgcaaacttggatctgaaggaaaggttcaaggagcttaaagcgcagaagagtctgaacacaataagcccgagctcagatgaagcgaggacatatttccagcgtgaggaatttctgaggtactcaatacctgatagagcattctgctacaccgctgctgacggggagaagtctatagttgcacccttgagaagaggaggtggaaagccaacagcgaaagcgaggggccaccccatgctcttacctgacaggccgccgcacgtcaccatcctgtgtctcgtaagggatgccgcgtctaggttgcctgcaaggactggaaccagagccgacgtctgcacactgctcagagattcacagtacctaaaccatgaagaagccaacaaagaggccgcaattaatcaagtcgtcagtggagctctcgaccgtctgcattacgagcgcgacccttgcgttctgtatgacaacgacaaaaagctgtggacctatctgcacaggggcagggaggaggaggatttcgaggacgacggcacgtcgtctacaaagaaatggaagaggccaaggagggatgtctccgatgctgcagagccaggtgcagcgaatgatgatatcgacgacgatggcgctggcacccctccatcaaacaatgtgaaaaaacagaagacaacattgtcaggagaagctgccaacgatgagggaaatcatccgactcagaatccggcttctggtggcctggaaggtgattctgatctcaatgctgttccgtcttcaaaattttttgaagaaccatgtggagatgcctacattgatgcaagaccagatgacggtggcccaaattcagtagatgcgaaaccgggcagcacagctgacgacaacacggcactccctgggaacaccggcatggacgctaccaccccaccatgaataaagaacgtatcatggttcaatcagctagagatttgctgaagggtcagcgtaggtaacttgtgcagaaaccgtatctcatctgcgttgttcttatcgctacagttggctagtattaggagagtttgattcatttttagtgttgcttctcttcccctcgaagctgacagtaatgtaaactagaaatgctaagatgggggtttttcagcatacctcgttctgttttatagtgaagttgccatgttatacctttcagggggattat

SEQ ID NO: 127740 - DNA, 264 bp, Zea mays
  Clone ID: MRT4577_47969C.1
ttttggaatcaacgaaaaaaaatcatattccgacatatggaagagaccacctcctatatagtactgtgtcccattatccttcaaggaaggcaaccatacatacagaatcctgctggctacacttattaaagagaacatggctcactcacgcgagagagatatgtgatacacactatgcttgacattctgtattcacacactcagattatgagatacaacagacagtcggacaagccactcatatgccagaagctcacatatgct

SEQ ID NO: 127741 - DNA, 626 bp, Zea mays
  unsure (1)..(626): unsure at all n locations
  Clone ID: MRT4577_4796C.1
aattcggcacgagggccctttgtgactgggacacttgtgcaccacgcacgaggtcacgcggacgctgacacacaacgttagttgccgtgatgccggtggcacacactacgcgattttgttcgggcatgctgtgactacccgcgcncgtgcgaggatttatcggcgcgcggcctgtatatgcgtgccacagatcgcgggagaaccttacgcagaacatatggaacggcactagacgggggcttggagaatgccctgcctgctgagaaggagaaggcgaaccgggcgatggagtactgctgacgatgcgagcggtataacagccattctcatgctggagctaactacgttcgggcgaaaacgggatcagaatgggtttctctaccaacgaacaagactcggcacgctgatttggatcatgaacaaacaatctgttaacgatcgctgtaaaatactgcgagatgccgtggttaaaggctcgtgctgcataacatgcatgcaggcaatgtggaatagctctatgaaaaggaggtgtagaagaaacagatcaggcgtggtcatggggtgagtgccatgaagtgcatatgggcttcgtcgagggctaccgcgtcggcggcggcccgctcggg

SEQ ID NO: 127742 - DNA, 326 bp, Zea mays
  Clone ID: MRT4577_47970C.1
ttttatcgtaagtaacattgtttctgtcggaacgaactggttgggtttattctctcatctaccaatgaagcatgaaaaatacacgagcaaactggtttgctaattaggcattaaccggagcactgtggctgacagggcgcagaaccagacctgtgtttttattagaaaccaatcttggagcctctcaaacatcaaaatgcttaggcttcggtccacttggtaactgacaatcgaaatggtacacaaaggtgtgcattgcaagctccaagttggccaatccaagatttgattccgggcacatgcaacagacagacccgaacgggagg

SEQ ID NO: 127743 - DNA, 810 bp, Zea mays
  unsure (1)..(810): unsure at all n locations
  Clone ID: MRT4577_47971C.1
tcggcagnanaanaaacgcgcaggtgagcaagatcctgntggnagcaaaagctgatggnagaaggacagttccaagagacaggagaagattgataatgaaatgtacctggcacgagagaaagcactagcagatgcaaactactacaggattttgaaggaagcagaggcaaataggctcaaactgacacctgagtatctggagctgaggttcattgaatcaagtgccaccaactcaaagattttctttggtgaaaagattcctaacatgatcatggatcaaaggttgctcaagaattaccttgatgctgttcctaggaaggaccattatgaaatgtagccgcgggttccgtgggttggaagcagaagtctttcttttttgtgtgatcccacgcagtagataggattaccgtgtagccgtccagtatactagtaagccagaaaggagtcatcaggatcctcttgaagatgaaattagcagtcatgagatctttggcttgttttgtgtagtagcagcattagggcacctggagcattcgcatgtgaccgacagtgatgcaaccagtgcaaatcctgtagtcttcaaaactgatggtcaaggccgctggcctccaaacccaggtaatctcttgaaaaggatctgggttataatttttgactgatgggcagaacaatttgtagcactgctgatgccaaagttttctcgatcataaatgtgcaagtttgctccctgacttaaaaaaaaaaaaaaattaaaaaaaaataaaaaaaatatttaaannnnnnnnnnnnnnnnnnnnnnnnnnnnnnnnn

SEQ ID NO: 127744 - DNA, 1739 bp, Zea mays
  Clone ID: MRT4577_47972C.1
tgggtacctcgctttactcgctcgaaccaaaattacccaacacgggcaacactccacgccaggagtgggcgagtggcacaccgcacaccagccttcgtcttcctcgcggtttcgtccactcccgtcgcccgttccacctgtgacctgccaaggcaccaagcctgaccgacttcgcttacggttcccggtgacccccgcccaccctcctcgcgatgtctgacgtcacctccgactcggcgcagagacgccgctcgccgccgccgccgtcgccgtcgccgtcgatgccgcgtttccagcagcagccgagcgggcgccagccgcccccgcccggagccgaccccttcgccttcggcatcgtggccttcattggcatctgcttcgtcctggtttcactctcagtcccatcaagtgttctacatcaagttcctgaaggacatgttggggtgtactggagaggaggtgctcttctgaagacaatcactcctccagggtttcatctgaagctccctttgatcacccagtacgagccaatacaggttacacttcaaacagaccaggtcagagatattccttgtggaacaaaaggtggtgttatgatcagctttgacaagatagaggtcgtgaaccgccttcgcaaagagtttgtgcatgaaaccctactcaactatggtgtgcactatgacaagacatggatatatgataaaatccatcatgagattaatcagttctgcagtgctcacagtttgcagcaagtttacattgacatgttcgatcagattgatgaaacaatgaaagaagctattcaaagagactgtacacgctatgctcctggaattgaaatcatcagtgttcgtgttacgaagccaaatatacctggtagtatcagaagaaactttgaacttatggaggaggagcgtacaaaggcactgatcgccatggagaagcaaaaggtagcagagaaggaggcagaaacacagaagaagattgcgctatctgaagcagagaagaacgcacaggtgagcaagatcctgatggagcagaagctgatggaaaaggacagttccaagcgacaggagcagattgataatgacatgtacctcgcacgagagaaagcagtagcagatgcaaactactacaggatattgaaggaagcagaggccaataggctcaaactgacacctgagtatcttgagctgaggttcattgaatcaatcgccaataactcaaagattttcttcggtgaaaagattcctaacatgatcatggatcaaaggttgctcaagaactaccttgatgctgctcctaggaaggaccattatgagatgtagaagcgtgttccgtgagttggaagcaaaagacctttgtgtgtgtgatcccaccgtccacgcagtagataggattcccacgagccgttcagtacctcagtaagccagaaaagactcatcaggaccctcttgaagatttagatgcaaaaattttcttcgccaaaaatgtacagttttgctcactgacttaggacatgtttggagcatctatttttttagaaactggtttatgaaaactgaaatggtttcaaacatatctgattatatcccagtttatagaaactagattcctagtttcttaaaaactaaaaagctagccttatctagctaaaaccagtttataaaaactgaggtggtttcaaacaccataaaccagtttttttctacaaattagtaataaaaagttgattcttg

SEQ ID NO: 127745 - DNA, 370 bp, Zea mays
  Clone ID: MRT4577_47973C.1
caggctcgaaaggaaacatgtttttttttttatttagtgctaaaccagggcggaacactttttttttttgtgccgtgctaacaaactggcagcccccaaaagggcctttggaacggtacggaaccaactgttggcttacaaagaaagcagcctcccaggggtttgtccctagccagggttatttgaacctttgtttctaataaagtccccttccaactcccaatttttgcacctagtcacagacaccgtaatttacacaaaaccagaaggcggtaggcagcccaaaatgttatggctcccctaacgttttcattccacccgatgtccaacggttatccgttaccggtttccctaaccaaaatggttcaac

SEQ ID NO: 127746 - DNA, 335 bp, Zea mays
  Clone ID: MRT4577_47974C.1
ttgacccacgcggccggcgtcacacacaacacaaccccactcaaccggcagggaggcccttttagtcggcggaggccatggattccctaaagccgcacaagaggctccccgcgggagtcctaaaatgtgccaagggagaaagtgtggctccaccccttttttgtctacgagatcttgtatggccaactcggtgtaagaacatatctaagctggcggaaggatggatccataattaagaagccacagaaaatccactcaagggcccgggcaagggagggcccttgaagcctagcataaggggaggcccctccgttactgtaagcgcaggggttcca

SEQ ID NO: 127747 - DNA, 355 bp, Zea mays
  Clone ID: MRT4577_47975C.1
ttcttgatctataagacacactaaaataccacaggtgaacaagcaaacgtcatatatccggacgaaagagaccaaacatgaacgggaactgacacatatgccaaaaccgaagacatacgcctatggacacttgaaaccgaagaaagccctatataccaggtacgtactgactacctagatatggatgaacatatccatcacacaagactaaaagagccgagccgctgccggtgccggaaatgatgtgcagccattagctgctaactagctaagctccgattccggacatgaggcattcaatacgagaggataacaagaagacaagcagcacaaacgcagagaagccccgaggaga

SEQ ID NO: 127748 - DNA, 386 bp, Zea mays
  unsure (1)..(386): unsure at all n locations
  Clone ID: MRT4577_47976C.1
gccggccgggcttgggctatcactcctccctcgtcctcagtttttttccctcgtctgctataaatggagctcaccttccacgacctctggcagttcccatccgccgcccgcgcacttgttccttccggcacagcacacaggacaccgtagacagattcatcgcgacgatggggctggacgtcgtggagatcgggccttgagcgctcgagaccaaactgatgcttcgggtttgtacatcccaaagagatgagatgatacagttttgcggctaatccatgtttcgggcttttttgtcnaaaaaaaaaaaaaaaaaaaaaaaaaaaaaaaaaaaaaaaaaaaaaaaaaaaaaaaaaagnaaggaaaaaaaaaaaaaaaaaaggccccta

SEQ ID NO: 127749 - DNA, 435 bp, Zea mays
  Clone ID: MRT4577_47977C.1
gcagcagcaacaacaaaataatggtgaggcaaaggctgaagtaaaagacagctctagcaacagcagtagcagcgggagcagcaacttgcaggtggtgcagaaacggaggctcctcatgggagtggaggaggctgcttttctgctgatgaccctatcttcgcccacgttcacattgctacatggctaagagccctccaacaccaaatcaacaatgtacatacacagacacaccaacctttgcacagccactacccaacgattccagtccaaatcatacaaagttactcacacctgtatgagatagggagggagggggcctatctcaggattgtgtgatcttgtgataggcatgggttattagtgccaacctaatcactccattgatcatcttgttctcctctgttttcgccgtacccgtagatcttgatgtcagcc

SEQ ID NO: 127750 - DNA, 255 bp, Zea mays
  Clone ID: MRT4577_47979C.1
cactgtagtttttttctaaaggacccgaatgacaggcgcattaatcggcttaagctgaataaaagcctcgtgcacgaccaacacataagggcacgctaagcacagctagacttacaacgggtagggatactcccattgggtaatctggtggggggagtgggaatagaccacttactagtctggactgaagggacgaacacagcaaagtccatggcatcttggcgaagtactgtcttgcaatcctggtaaacagag

SEQ ID NO: 127751 - DNA, 341 bp, Zea mays
  Clone ID: MRT4577_4797C.1
gtgttttttttttttttttttttttttttttttttttttgttttttttttttttatagcaataaaacacaccagggaagcttgttttatttattgggtaacacgtacaataacaagaggcaagggagcagggtaaactcaaaaaagggaaagagggggggggggctgctttcggtatctgcttatccatcataaaccaggcaggttttattggatatatgagcgcaggcggagccaaatccggagactttggagtgcataagttcaagggatggggtcaggttcaggttcaggttcagagaccttgtattcattgagggagggcatggggggaaacgcttt

SEQ ID NO: 127752 - DNA, 143 bp, Zea mays
  unsure (1)..(143): unsure at all n locations
  Clone ID: MRT4577_47980C.1
gtgcgcgtataatctacccatcggcacccgcccaccccccaaatcccaccaccctntttcccncttccaaccactcggtgtatctccctctcggcccgccaatgcgaggttggttctaactaacctcgtggttccggcggcgc

SEQ ID NO: 127753 - DNA, 1957 bp, Zea mays
  Clone ID: MRT4577_47981C.1
gggccttcggcacgcgccaagccgaaagcccgttcctttttctcacctcgcatcgcactccctcaatctctcgtctctatcgccgcatcgcttctctgccggagctccaactatcacccctcgcgccacgccccccatctctcgtctctattgcttctctgccggagctcctacaacctcgcctcgcgcagcactccgctcaccctccctgactccctccctgccgctgggatggccggcaaacgagttacgggccgcgatgggcaagacgagggcggcgccaaggtcgggctcccggcgatggacatctccctcgcgttcccgcaggccacgcctgcctccattttcccgccgtccgcttcggattattaccagtctgatgatttgctgaccagtgaagagcgctctatcaggatgaaggtcaggggtattatggaaaaagaaattgctcccattatgtcagcgtactgggaaaaggcagagtttccatttaatgccattcctaaacttgcaagccttggtgttgctggtggtacaataaagggttatgggtgcccaggactttccattacagccagtgctgttactatgtcagaaattgcacgggtagatgcaagctgttccacatttatactggtgcactcctctcttgcgatggtgacaatagctctttgcggatccgaggctcagaagcagaagtacttgccatcccttgctcaacttactactgttggctgttgggctttgacagagccaaactatggaagtgatgcgagctccttgagaactatagcgaccaaggcacctggtgggtggcacatagatggtcaaaaacgctggatcggtaacagtactttcgccgatgtgctcgtcgtgttagccaggaatgcagacacgcaacagctaaatgggttcattgtgcggaaaggagctcctggcctgaaagctacaaagatcgagaacaaaattggcctcaggatggttcagaacggtgacatagttttgaacaaggtgttcgtccctgacgaagaccggttgccaggcatcaactcgtttcaggacatcagcaaggtgctcgccatttcacgcattatggtggcatggcaaccggttggcatatcaatgggggtcttcgacatgtgccaccggtatctgaaagaaaggaagcagttcggagtccctctggcggcgtttcagctgaaccaagagaagctcgcccggatgctcggtaacgtccagtcgatggtcctcgtcggctggcgtctctgcaagctctacgagtcggggaaaatgacgccgggccacgctagcctagggaaggcttggaactccaggacggcccgcgaggtggtctcccttggccgagagctgctgggtgggaacgggattttggccgacttccttgtagccaaggcgttctgcgacctggagcccatctactcgtacgagggcacgtacgacatcaacagcctggtgaccggcagggaggtcaccgggatcgcgagcttcaggcccgccgcgccagcgaaagcccggctgtgacgtgataacctgtgtccccgtgttgcagggaactggaggcgaataaatcatgatcaggtcgtcgtcgtcgtcgccatcgaacaaactgagcacgttcctggaacccgcccggtcaacgttggctgctcacatggtgtaccgtagccgagtgcggatgggaacggattcctagatatatgtagtactatacgaagatatctgttgcgggtggattactgtaaaccgggtctaatctctgttgcggtgtttgccgtctttggtcagaaggtaaggggggaacgccaggcagatctggtgggtttggttaaaaaaaaaaaaaaaaaagcggggtagcatgcgagagtggaggcctcgaccaataaatataacatggtgccgtttgggcggtagtacgtaaaaaaaaaaaaaaaaaaaa

SEQ ID NO: 127754 - DNA, 684 bp, Zea mays
  Clone ID: MRT4577_47982C.1
atggcgcacgaccatcccttctcccttcgcctccccgtccatgcatcggaccatctggaaggtgcatgggggacttcaactgacgcgtatgggaagcaaggtcatgagatcagatcaactgttgcagacagagtacgtcaaaggcaacgtggaagcaacctattgatgtacacaaagatccttggttatggagctttagcgaggttagtgaagacgggttattccatatctagagatgaagctgcaaaagcattgtatgctatatcatctttgatcagaaataatgtaaatggtcaagaggcattcaattcagaaaatgggagtgcaatgttgcagctaaattttagaatcgctcaacttcctttgtttagtgatggcctttttctgaagtcaatagttgatatgttatcaagcttcgtttttaaccatgttgagaagtacccttgctccttaaggactacaccagcgaggtccctcatccacttgaaggacgtcgtcattggttcactaatgaaaacattgtgtatggttgttaagtctgttacgttctcagatgtagacaacactatggcaaagacttttttaccatccaatactcctgaaagttccgccaacacattagaaagccctgcaaaaaaggttgctaaatctattgcatttttagatgatgtcaataccatgtaa

SEQ ID NO: 127755 - DNA, 581 bp, Zea mays
  Clone ID: MRT4577_47983C.1
ggccgcttttttttttttttttttcttttttttttaaaattaatacccttcctttttatatccggtccatgatgaataaaatggagggacaagggaacaacccccccggatcactaagggttcaaacaaaggggcaagcattgggggtctccccccttaaaaagggggtgaaggggcccgtggcggcgggggccaaactggaaatgcccttccgcaccggcggcgggtaggaccaacgggacctggtggaaaaagacctgggcccgcttggggggcccaagatttcccaaccggggaaccgggaacggccctaccggcccgaacccggcccggacccggacccgtacccgggtgaatcccgccggggccccggggaattagaccaccgatcaagccgggggccctggtggtaagcccccgcccccgttggcccccgggggggtttattccccccccgggggttgttacccggcgcgggcacccgggggcccggaaggcggaaccggacctggttcctcctcctcttttttctgggcttgggccgtggcttgcttcccgcgcgtttggcaggggcccccccc

SEQ ID NO: 127756 - DNA, 439 bp, Zea mays
  Clone ID: MRT4577_47984C.1
gggccgggatttccctcccaactcgccgtcgtcttctgttgttctgccgtgtacgcctccaatggggcctctctcccctgcaagtttcagcttcttcttgcgccaccgcgcaaggacaatgtcccacatcaacattgtggtcactggccacgtcgactctggcaagtcgaccccccacggcacacctgatcacaaccttggatgcactgacaagcgtgcagtacagaggttcgacaacgaggccgttgttatgaacaaccggtccttgaagtatgcttggtcgctcgacaagctcaaggctgcatcgagagaagggcatcaccattggaacttgccccgtggaagtcttcagacccaccaagtattactgcactgtcttttgatgccctctggacaccgtggacctgatcaagcaaaggatccctcggtacctcccagg

SEQ ID NO: 127757 - DNA, 583 bp, Zea mays
  Clone ID: MRT4577_47985C.1
aattcggcacgaggcgaagatgtagatctagctggtcacgaacagggggagaaactgggtccgcttgtcgctgttgccgtgaacgacgctggagcccatggtgttcttaggagccacctaggacgagcaagcacgatagtacggtcacgggccagctgccgtcttcttctagaagaagacggagacacggtgataccttagctttactacaccatctgcctgaggcagtaggagatatggagggcacaggttgaccgcgtcgaaaataccacaaagggacagggtatcctctgacttcaccttggcagacgacacttgagggtacccaactgaaggtgcttgtactgaacaatgaaagggggaaagcacgtgggatcacttgtgccacaatcattcaaagaggatactgaacaggagcagatacaaacattgcagccaattgaggcactatgtacaaaacggacgtctagacgctgaaggaaatgggcatggacgcatatatgttctttatctcttggtgcagaatactgtcgaagggaaccacggaatgaggtcttaacccggatggcatcaagtactacag

SEQ ID NO: 127758 - DNA, 178 bp, Zea mays
  unsure (1)..(178): unsure at all n locations
  Clone ID: MRT4577_47986C.1
nntacgcattgctcactttgtttcttgcattttctgaacctccttcgcctggggaatcatggtaattttattgaggtgaaggagctaatgcacccaatacacaccaaaagctatgacgatgtgtactaaccctacgaacactacgttgctgattatcaccacacaatcaaatcacctt

SEQ ID NO: 127759 - DNA, 279 bp, Zea mays
  Clone ID: MRT4577_47987C.1
aaaagatgtaaaactaactttggagcgttttaagaaaaacaaaatgcccgcatgcatgtgacgatttttcttgttctaaactccgacaggggaataacataacatggcattttaaagccgggtgtttaaagcgattaaggtgccattcctgtccaggcacagtgagtttttcccggtggctgcagccctcaaaaagccccacacgagttgccgctacctttataggatcataatataggtcttggataggcatatgctctttgggtgggagggggggat

SEQ ID NO: 127760 - DNA, 500 bp, Zea mays
  Clone ID: MRT4577_47988C.1
atcaatatccttcccttcccttcccttatagttatagttatagatagtattctttccttcgcttttcttcctctgggcatcaaaggagggcgtagaccaatatttcattaaataaaaaagctcttcatcgctggaaacggactcgcttcgctagctctaggtgaatttgcaaaacggggaagaagggtattttatttcgaaagtcaaccgttcccgtaaccagaaccgaacaaggaagctgggcgtagacccgttacttcttactttactacggtggaggggatgccattattccaatgcgtattgactacgtcgtaggaacagcgatagcgattgcgtgggaacacctttcgctcgaggagaggaatgcggacaaccggcgaatagttttcagatgaaggtacagatccggattcacggatcaaaaaagcaaggagctcctcattagaggacagacccagcgctcgaggatacggattcgattgaccctctccatttgc

SEQ ID NO: 127761 - DNA, 149 bp, Zea mays
  Clone ID: MRT4577_47989C.1
agcgtggtaacaacgcaagacgcggcttgtgttgaagcggataatgcatatatatttgagattgacatgatggcgtattgatttactgacgtagggagttgataaaagtggatttgttgcaatattagtgtgaaatggatgaagtgggg

SEQ ID NO: 127762 - DNA, 458 bp, Zea mays
  Clone ID: MRT4577_4798C.1
aaaaccaatttttattttttatgtttttttatttggtcatacctcaattgatgggggggggcaaaatactgcattaaaacatatatagagagagacgaaaaaaaaagaggataaaatacaaatctcagggagaaaaaacaggggggaaaggaagcggagaccccacaaaggttgggcgcggaagctgagcaactggtactgaaacaggaaaagtccacccatggccgaaatgtggtgcggcatcataatggccacggggaaaacaccctgggctcccaaaagcttatcatgcttcttaataaaagggggcttaaaaaggctggatgaagatggaaaaagaactctcaaactgaaaataattttcagctgatgggcaacggactgcacgttcataatcctaaactgctaaaagcaagagtggtaacggagcggatggtacatggctcttgggtggccac

SEQ ID NO: 127763 - DNA, 183 bp, Zea mays
  unsure (1)..(183): unsure at all n locations
  Clone ID: MRT4577_47990C.1
agacaaccatccataacgacgttcttaataacccagnggcacagngggggggacataaccagaaagttttacaacatcaggtggggcagaccacagcggggacaacgatttcacgttaagcttgaggaagaccggatggggaggcgttttagtacttatcaccatnatnacctttctcaccct

SEQ ID NO: 127764 - DNA, 532 bp, Zea mays
  Clone ID: MRT4577_47991C.1
aaaaaaaaaagggggttttggtttttaaaggggaaaaaaaacctttgggggacccaaggaaagggcaggggacctttccaaaccaaagggttcttttaccggccccgttttcggggttaaacccccggggggcccccccgaaaacccccccccccccctttttgacaagaaacttttcaatgcccttaaaaaaaccccccggtcctttttaaggccaaaacccccccccctgggcccccaaaaaaaacccccccccagggttcccccaagggcccatggcccccccccccccccaaaaaaggccccccgaggggggggccccttaaaggcccggatccttggggggatttttcccttccccaaaaagggcccgggggctttttttttggaaaaaaaaacaggaggggggccccccccccccccaaaatttctccctttttccctaaaaaagccccggaaaaaggccttattttattccttccccccccctttaagaagccgttggggggggaaccccgaaagtttttctttt

SEQ ID NO: 127765 - DNA, 504 bp, Zea mays
  Clone ID: MRT4577_47992C.1
tacggcggccgcccgggcaggtataaaaaaaaaaaaaaaaaaaaaaaaaaaaaaaagcttgtaccttaggctggcacctcgcctcagggaccacttttggggcaaattcctcaaactggtcctccgcactgagcgtccgttctaagggggccctattggggcccctaatgagccccttattacagattcacttggccagattttttgaccccgtagttttaatagcgaaaacccttggggaaacccctgttcaatacccttcttaaatcatcccgactttacatcacctgtttgcaacagctgaggatgcccgcaaagaggccccttcccaacaactttccaaactgattggcaaattgactggccattgaacgcccccttaagcgccgcattaagcgcggttactcccaaggttacccgtacacttaccagtacacttgcccccgctctttcgcccgtttttttttcttttttccctacctttgtcggcttttcccccgaatt

SEQ ID NO: 127766 - DNA, 1568 bp, Zea mays
  Clone ID: MRT4577_47993C.1
gtcccttttccctcaccttctccacctccctcctcgtcgcctaggctctcctccgttacacctcacatccaagctcacgaagtcgcagtgccaccgaggcttccaagcaagaaccacccccgcctgcctgcggagctcggccgtcccctgcgctgcggagcgggagcgggagcggcggcgacaatgtcctccaacggcaagcccaccccacagcccgcggcggccagcgccggcgccggcgccggcgggccgccgaagatgtaccagcgacccatctaccggccgcagcaggcgcccgcgaagcgccggcgcggggggcggtcgtgcccgttcagctgctgctgctgcttctgctggacgctcctcgtcgtcgtcctcctcgccgtcctggccgccgtggccgggggcgccttctacctgctgtaccggccgcaccggccggccttcacgctgaccgcggcgcgcgtgacgaggctgagcctgtcgtcgtccgccaccgcgcccgcgctgagcgacgccatcgacgtgacgctgaccgccaggaaccccaacaagaagctggtgtacgtctacgacgacttcgccgtgacggccgccacggccgccaacgccgtgccgctgggcgcggccaccgcgcccgggttcgcgcacgaggccggcaacgtcaccgtcatccgggccaccgtctccgcgtccgcgctcgcggtcgaccccgccgcggccggctccgacgtcaagaggtccggcgagttccccatcgtcctggacctggagaccagggccggcgtccgggttggcgcgctcaggaccaagaagatcggcatcctggtgcactgcgacggcgtcaaggtggccgcgcccgcgcccgcgccggccaagaagacgaagaagctggcgaaggccgcggccgacaccccagcccccgccgccgcggccgtcgacgacgcgccggcgccgcccgccgcgtcggccacggccaccgtcgctcgcgcgtgccaggtcagggtccgcgtcaagatctggaagtggaccttctagccacgtcgtcgtcgccagcctccgaggggccgcattgcaaaatttttcgggtgaaagggaaaaaggttgctttgctttgctttgctttgcaacaccgggtgaagtttctccagtcagtccagtaggagggaaagcaagggaaacagaattcgaatcaaatgccggccgctgtaaatttttttccgtgtttaattgaattttaccaaattcggcggggagggaaggagaaggagaggtcggaggagcggcaaggcaggaagtgacgtgccgtgtgcattctgttctgcagtgtgaggcttgaacgatttgttttctctctctctctttctctttatcgctttgtgtagtgccatttttttaaattttttcacgcatcttcttgttggtagcgcaagtacgatttggtggtctcttacttttaaccatgtaatccaaaagtgtctggaatgtataattggtagtgacatgaagtgtagtactgtactctctccgttttttgaaatgtgtgctaattttattcaatttgcatc

SEQ ID NO: 127767 - DNA, 268 bp, Zea mays
  Clone ID: MRT4577_47994C.1
catgaatccttacaatccctaccccggttacactcaaaccacctacacttcttcttacaccactccccctcctcaacaaccgggaatgcaaggttcctttgttgtcaactttggccaacctgcctacgttcctcctcctcacctcaagttgtcttcaacgttggtgctcctattatgaacaacggtggcgccttctacatcgtttctagaatgaacggacttgttttggacgtcgagggtggtagccgaaaccaaggtactcgtatta

SEQ ID NO: 127768 - DNA, 415 bp, Zea mays
  Clone ID: MRT4577_47995C.1
tgggggttttttttttttttttttttttttttttttttttttttttttttttttttaaaaccaggaacaacggggagtatctgcccagttgaaacttataaagctttaaaacaacatacccatatttttgcaacaaaaccaacccgggggggggggtttttgctaaccctcctattttacaggtaaaccaaaacgggcacccttttttgggcccacttagggggtacttactccataagagccccccatacaaatccataagggtttcatgggtccagggccatttttataacaagaacattccatgcataaaggggggcggggacacaccaaggcaagcaattattttggacggggggggatttactggcgccccttgcaaaggggaagggggttttgtaaggcccaacggggc

SEQ ID NO: 127769 - DNA, 246 bp, Zea mays
  Clone ID: MRT4577_47996C.1
ataaagggggcaagaacaaaataaaggaacgcttttctatctgcgacatgcctttttatttttcataaccaaataaaaaccacataacacaaacaagaaaagaccaggttattacaagtgtcacagatagatatcaaatttccgatttgggacccactaataaaacataggtccaaatttttagcttaattgcctagacccttaaattaaagggcaacaaggaattgatttaaaaagggggctggc

SEQ ID NO: 127770 - DNA, 319 bp, Zea mays
  unsure (1)..(319): unsure at all n locations
  Clone ID: MRT4577_47997C.1
ttactcttcttaactagaaccctnngcgggcgatgtggactttaccattttgctgtaaccngaaaagcatggacatgcaacgctccaatggcctacggaatgtggaatatttttttaccgtttctgtatacttcctataaaatgaaataatcaactgttccttatattagaaacacatatgcaccaaataggagttttcaacgagtcaaaattgcgcttacagatactgaggtgcttggaaacttttctttctgtaattcttgaagatcttgaccaaaggaatgtttatgattacctgaaaggtctggtgacttgccac

SEQ ID NO: 127771 - DNA, 431 bp, Zea mays
  Clone ID: MRT4577_47998C.1
tttcttcccagcctcttctttcctcatctgcatgctccataatcaaaggaaggctgggagaccctccataaaaaatgactctattacgatgcttccaaatcatccacgaccctaaaatgatgagggagtcaagaccttccctgaccagaccatttactgtctctgaaaccatctcccaccaatccataaaggaaactgcatctggctgtggggctaaactatgcagcccgaactttcttagtaggttgtaccagaaaatccttgagaagacacaattcacaagcaagtggttcagagtttccccttgctggtcacataaaggacatctgatagggtgattcaatccccttcttaccaagcgatcagctgtccaactctattttgggccaccaaccaaatgaaaaaacacattttggtggagcccaagatct

SEQ ID NO: 127772 - DNA, 397 bp, Zea mays
  Clone ID: MRT4577_47999C.1
ggggcccagaaaaacccagtttattttttcgaataggaaacatgtcaggaagagggcccccttggaggacttaattaaataactaacgaagggggggggggggagcatttttgctaccaccaccatccattccacgccatggggcccttcacagcatgaccttacaacgggggggggggggggaatgaaactaacgatgggttaaggggggcaggaaaggtcaagaggcttggtcttagggggatcggttttcggcagggctccagcgtttaggagatgggggatgcacttaatttgcatacccggggggcccctttccaggtcttttacgggcggacagcagggcccagctggggaggggggccgaacgggggttcctttgtggtgggccctttgg

SEQ ID NO: 127773 - DNA, 342 bp, Zea mays
  unsure (1)..(342): unsure at all n locations
  Clone ID: MRT4577_4799C.1
gccgcagtgtgatggaatctgcagaatcgccttagcaggggtaacaacgcagagtacttttttttttttttttttttttttttttttggtttttttttttttttttttttttttttttttttttttttttttttgggggggtgttgaaggcccacttcccccccggccccttngccggccccgccgggggggaacccncgccaaacgggggcaaacgacagcctttcaatgggaagaggaacccttgggagcccaagctcgntccttaccgaacccggtgtggtcccccggccttcctttggcccccaaaggccccgcggcccccgggggggtaccccgggt

SEQ ID NO: 127774 - DNA, 107 bp, Zea mays
  Clone ID: MRT4577_479C.1
cgtctggcactgcatgggcacagcaagtgtgcaatatcagtgtttaatgagatgacgggtcaacgggttgaacctgatgtgattactttcgttggactgcttaatgc

SEQ ID NO: 127775 - DNA, 2922 bp, Zea mays
  Clone ID: MRT4577_47C.1
atggcgcccaagaggaagacctcgagttcgtctgctgtggtgattcctccgatcgaccccaacagccagttgcctttcgcaggtaaccacatgtccgttatttctgagcctgaacttctccacctcgtatccatcggggttcttcctccacgggaactctgttcttggcggatttgccatgggtttaccgttccaactgaggatacccatgagtccgttgtctatgcccctttccttctctacggccttggccttcccatttctccctttttccacggcctccttgatttctaccatcttaacttgacccatttgaaccccaattcaatcctgcaaatctccattttcgttcatttatgcgaggcctttcttggcgtgctgccgcatttcggtctgtggaaatacttgtatcattgtcgccctgggatggccgggggacaaaatcagttggttgggggtgccagcttggagatgcgccgcgggaggaagactgaatatctcgagatccctctcaaggatagtatcaagggatggcgcttggagtggttcatagttgagaattatgggaattctctcccctcccggtcgggaagacagccggacgttcacaccccaagctggaccgagtctcccacggatcaggaggtagctgaggcaggtgtgttgctagctgaagttggactgctgaaagagaggggtctgactgctgaagccgtggttactgattttgttttcaagaatattcagccattgaaagacagggcatacccagcttatctgtatcgagggctagccgactcaactcgggttaccaacagaagaattccctctacagacttggtgagccgacttgagatgatccttaggggtaaagtgtcaaatgttggtgctccagtggcatactcggcctggaacctgcctcctcccaaagccttcaccctttttgtgtcgaatccacctgtcactgatggcagtttgggccttagagtgcgatcctctgctgttgaagttagcgccttggttgcttcgcttggggagattcctgacgatgaacggcaggtccattttgaggtgcccttgaaccctagtgatgcagagataagtgctatgcttgatttgctggctgaggattcttccgacgctgctcctgctggggcgttggtagtggcgcccctcccagaggctgatacaactttggatactcagaagcctatcaaagtgcctgcgactgaatttactgatgctgaccccaatgggtgtacccaatccgctgctgatcccaatgtgggtgctccatctgttgctgatcccaatgggggtgctgcttgtgttgccaatgtggatgatgaggaggaagaaaatgaaattcctttgactcggaaaaacagtcggcagttcatcgccagcggtgaaagtagtggagttccctctcctgctttgtctgccctcattggtctgcaagaactgtccctggccaactttgatcagactcttgaggatatggtcccagaggacttgttatcggagccagtggatgatggtgcaatggaggtttgcgctgacgtgcctgatgctgggttgaggtcatcccgtgcctcgtcgaccttagagcgcgatctcgagggtcgggagactgacttggatcgtcctggtcctatggaagtagctgagggcccgtcgaccttagaggtggctactgcagagaacttggaccccaaggatggtgttgacacatgcccagcccccgaggatgtcgtcggggatgacttggctcgggtggggagtgtaagccactgcccagcccccgagggtgctgccggggatgatccggctcaagtgggcagtgcaaactatgacccagcccccgagggtgcccgagcggggtctccctcctgtacttccatggacgttcatgcgggatctcctccacactctggctatatggtggtagcccaagccttggatcagggagtcgctttagagggcagcgtccccgctgaccgagtgttgagctctgttgatggtatcgagctggttcctgctggtttgttgcaagctgcttcgggcggtggccttacacctggttatcaattgatctctcctgatttggggatcccttcgttcttttccaacctccaggctttggtggatgggatggctagccagctgaggctacagggtgcttctgtcctagaagtagcttcgtctcttgcatgttggaatccagtgtcacttcaacatcgcgtctctgaattggaggcaaccaacgctggaatgacttggcagatctcaactcttgaggaaaaacattcccgaggtcaggctgaattggtccagtggtgtaccgattttgaggaaaagtactttcagagccaaactgaactgggtcaggtctccgctgccttggatgacgccaatgcactgagttcttctcttcatgctcagctcaattctgagaaggaagaaaaacgtatccttgctgcttctcgtgacagtcttgacagattgtatcgtgattctagtaactcgttgaccatcttggagaggagtcaccgctttactatggaagaattggacaatcaacgctgtaagctgcaggaatccgcggatgaagtgacccgtctcaagcagctgatatcagcgaaggacgctaccatcaaagaactccgagcttccaagaaatccattgtccaggagttagaaactgctcgactggctgccaaggttgccgaagaaacttttgttactctcagagcccagcgcgacagagccatggacaaggctattcgggcggggcgaatcttgatgaggagacccggcgtggttgttcctgaagatataagggctgatgtgaatgctgcccctgattcctcgagtcgtccttcctcgtcaatcgcccctgagaaaaatatcaccaagtag

SEQ ID NO: 127776 - DNA, 687 bp, Zea mays
  Clone ID: MRT4577_48000C.1
agtctcgatctcggtggatcaggaaaaggtccgatgaataggaaagaggaagaacgcgtctcgctaacatgaggcttgcacttggggcgcgaccgggacccttcacgtagcgcggtgctctcactggccggcgcggccgaggccatgcgttctcggctgacccatccaggtccgccacgacctctccatcgagtccaccaacgaagaacctacatgcttgcaacgtgcaccctgttctgatgcttatacgggtaatgaattatcgaggcgtgaatgtataatggtgtacacagcgactttgaacatacaattgtgacacaactatgctgatccatctaatctctccagccgattgcacttgtccttggagctaccggaatatactttgattacaaaaatctcacatgacagtgacaatgtcaatctttacagcctgtactcctgcattggcatatgaacaatgactttgtatgcaattctctgcataattggattcgtcaccgtcttattcactggcgatgcatgaaactctgacaactgtgtgcttacttggatacgaactctatgggctctttggctacatcttaacactgattaatgcagaactcaagtctcttgagaagctgacttttctctagagtataggcttctacaaatatggcacttaggcattcttagtgaacttca

SEQ ID NO: 127777 - DNA, 386 bp, Zea mays
  Clone ID: MRT4577_48001C.1
aacacaaaccaacagcagaatttcaacgccaagcccccgggggggcgacgcagagcacaacaacggccaccgcgacgcgcacaaagcacactggcactggccgacctcccgcgcgcgggcgcggggaggacaagggccagcaccaaacaacaccagacagcgcgacgcaacgcccgacgaacacaacagagcctgggggggcggagagacaggcaggctagcgagaccaagcagagggcacagcgcgagagaccccgcccgacgccagaacggcaggcggtgctgcggtgacatggcaaccaaacaaaaagaacccggcgcaacgagggtcgaaagaggcaggcccacgcggcaagcgactgcaatgagcgacagtgcgtaaacac

SEQ ID NO: 127778 - DNA, 232 bp, Zea mays
  Clone ID: MRT4577_48002C.1
agtccatctactgccgtcttgtccctgaccccaagattacgatctactatgttagcatgaatagaaagggtgttgatgagttcccctactgtgttcaccttgtctcttgggagaaggagaatgtctcctgtgactctcttgagactgcccttattgactgcaacaactacatgaccaattctgcaggaaatgatgccttccaccttcaccttccggttcaccccttgaatgt

SEQ ID NO: 127779 - DNA, 211 bp, Zea mays
  Clone ID: MRT4577_48003C.1
acggtcagccacagcagtatacattgcacgcagctagcttggaccagcagcagctgtggtcatggcggcctccatggatcgcctcgtcagctctggcggtggcgcctcatggcctgcggcccctcggccgtcgcgccggcatctcttcgctgtcgtcggctccaggaacaagctcgtaccgacgtgccctatcggattgggggtggcctga

SEQ ID NO: 127780 - DNA, 2239 bp, Zea mays
  Clone ID: MRT4577_48004C.1
gtcaaatgcaagtgatggtgctcaagaaaactgggttgattttgattctgacgtggaaaatgctagcatcaatgaaaattcacacagtgacactgatgagaaggaatttgaggagccagtttctgattgggaagatttggatgacaatgctcttcaataccaattcagtccttattcaaattcagatgaggtcagtcaaaactcctcatacaaaacagtttgccaagaagtggagcttgctgaatgcattcctccagttgtcaatcctgcgagtgaagaaaaactcaccatgcttgtacataatgagcataaagctgctgtgtgtattggcaaaatagagagtgaagttaacagtatcatggatggtgttgggctacagcctgaaagacacactatcctgaaaaagctgaaagagttattttccatgcgacagcaaggggtttcttcgcaggattgtgttgagtcaagcccagatcaatgtgtacctgaagaaaccctttcctgtgacccattagatgtcactgtggaagacaaaacctcttttcaggaacaccttggagaatttgatgagcttcgacaaatcattgctgatttatccaagagggctgaagcattggagaagaagcagaaaggatcagatcaagatctactttttttgagggaagttgttaaagattcaggaagaaaagtacagcaactggaatatcttgtagatgagttacaattccgatttgactcttcattgtctcttcctggaagcatgcacaatactttagccaagccatcgatatttctgatcggtggctacaatggtgtgacctggttatcatctcttgattctttttctcctgagaaagacacaatggtgggtctcacaccaatgagttttgcccgctcatatgcatctgctgctgcattggatggtcacatatttgcttttggtggtggaggtggcaagtcatcatggtataacacaggtatgccatgggtatctatgatatgatttcactacttttgtgtgacctttttatgttttgtggcatgtacttctatatggttgttttcatttgatagtggaatgctatagttcgaggaataacgagtggatagaatgcccctcgttgaaccgcaagaaaggaagtctcgctggtatcagtcttaatagcaaaatatatgctattggtgggggagatggaaatgaaactttttcagaagttgagatgtttgatccataccttgggaaatggttatgtggtccatctatgctgatttctcgatttgctcttgccgtggctgaattgaatggaacaatctacgccactggtgggtatgatggaagcatgtacttacaatcagcagaacggtatgaccaaagggagggtgtctgggtccgtcttccaagcatgaacacaaagaggggatgtcatgcccttactgtcctgggagaaagcctatatgcaatgggcggatacaatggagacaagatggtttctagcgttgagatcttcgaccctcggctcaacgcctggaggatgggagatcccatgagcgccccaagagggtacgccgctgcagttactctggatggaagcgcgtacttaatcggtggcctggagtccaatgtgcagatcctagctaccgttgaagtttacaacgcgagctccggctggtcagttctcggtttgagttcactcgggaagaggtcctttgcatctgccgtagtcatgtagttactgatcacgatgttaactactgtcgataacatcaggtttaacatagtcgctgcgttatgcaaggagtagttagggtaaggtgggtggggctagatcacccttccgatgtgtaatgtgttgagatcttcatcaggggaaattcgcatggtatgggagactacggcccgtatacctttgaaccctcgtaggaagtcttgagaacccttgcatgcattcgctgttgtatgcgtgccatgctgttgaatttagctgtactacaccagatagtgatacccgaactcacggagtttaatggaaccggatagaaagctgcccatatagtttggtgtttgttgcttacgttgtggattttactgtagtgacttgtctaatgctccgtttctccgtttggttatcgaccatattggagggcatggaattaaaataagttcaataccaaatcaaatatagtattgaaatgagatgtaatttcaattctattgtttggatgtcgctgatttggaatt

SEQ ID NO: 127781 - DNA, 443 bp, Zea mays
  Clone ID: MRT4577_48005C.1
aaagacacaatggtgggtctcacaccaatgagttttgcccgctcatatgcatgtgcggctgcattggatggtcacatatttgcttttggtggtggaggtggcaagtcatcatggtataacacagttcgaggaataacgagtggatagaatgcccctcgttgaaccgcaagaaaggaagtctcgctggtatcagtcttaatagcaaaatatatgctattggtgggggagatggaaatgaaactttttcagaagttgagatgtttgatccataccttgggaaatggttatgtggtccatctatgctgattcctcgatttgctcttgccgtggctgaattgaatggaacaatctacgccactggtgggtatgatggaagcatgtacttacaatcagcagaacggtatgaccaaagggagggtgtctgggtccgtcttcgaagcatg

SEQ ID NO: 127782 - DNA, 203 bp, Zea mays
  unsure (1)..(203): unsure at all n locations
  Clone ID: MRT4577_48006C.1
tcgccctnagcagtggtaacaacgcagagtacttttttttttttttttttttttttttctttttttttgcggcattataagaaatctacttgattagcccaagcataagatttgagtttaaaaaaaaagggctactggagcgaaaaataaagattcacccacattggacactttcccgcgtactctggggtgttaccactgct

SEQ ID NO: 127783 - DNA, 1165 bp, Zea mays
  unsure (1)..(1165): unsure at all n locations
  Clone ID: MRT4577_48007C.1
gagggaagttgttaaagattcagaagaaagtacagcaactggaatatcttgtagatgagttacaattccgatttgactcttcattgtctcttcctggaagcatgcacaatacttangccaagccatcgatatttctgatcggtggctacaatggtgtgacctggttatcatctcttgattctttttctcctgagaaagacacaatggtgggtctcacaccaatgagttttgcccgctcatatgcatctgctgctgcattggatggtcacatatttgcttttggtggtggaggtggcaagtcatcatggtataacacagtggaatgctatagttcgaggaataacgagtggatagaatgcccctcgttgaaccgcaagaaaggaagtctcgctggtatcagtcttaatagcaaaatatatgctattggtgggggagatggaaatgaaactttttcagaagttgagatgtttgatccataccttgngaaatggttatgtggtccatctatgctgattcctagtgtacctcttgacgggtctgacttgtgtttcagatatgcaatgcgcggatacatgatagacaagttggtttctagcgttgagatcttcgaccctcggctcaacgcctggaggatgggagatcccatgagcgccccaagagggtacgccgctgcagttactctggatggaagcgcgtacttaatcggtggcctggagtccaatgtgcagatcctagctaccgtacgtaactgttggctcctgacaattctacatatatagatgtttgtgctctttcctgaagatgctcttctcttctgtcacaggttgaagtttacaacgcgagctccggctggtcagttctcggtttgagttcactcgggaagaggtcctttgcatctgccgtagtcatgtagttactgatcacgatgttaactactgtcgataacatcaggtttaacatagtcgctgcgttatgcaaggagtagttagggtaaggtgggtggggctagatcacccttccgatgtgtaatgtgttgagatcttcatcaggggaaattcgcatggtatgggagactacggcccgtatacctttgaaccctcgtaggaagtcttgagaacccttgcatgcattcgctgttgtatgcgtgccatgccggacgcgtggg

SEQ ID NO: 127784 - DNA, 244 bp, Zea mays
  Clone ID: MRT4577_48008C.1
ggcggggctccttctcgtcaccccgttcattttctatctcccgatccaattcgcgagttctccctcctctgccgccatggcgctctctgtggagaagacctcgtctggacgggagtacaaggtcaaggatctctcgcaggcggacttcggccgcctcgagattgagctggccgaggaagaaatgcgcccccaccgggcgagagcggcggagaacccaccgggaagacgtcatctaagcacaaag

SEQ ID NO: 127785 - DNA, 654 bp, Zea mays
  Clone ID: MRT4577_48009C.1
agaggccgcttaccctggcgtcgcctactccaagtccggccactgccgctacgcgctcctctcccgcgtctgcctctccatgttcgacggcttcgactcctaccagttcggcgccacagccgacaccacggagcttggaggaacccagctggcagcccgcaggaacgagtcactgcagcaattcatcgagcactcagatgcagatcccatggagctgatgaattctagcccggactgtgactttgcccgattctgcgaccgcaagtacagacagctgatccatccaggcatcgagtcctcactgttcgggaactcggagtgcgggacactgccggtggtgagcgtggccggcccactctacgagctgttcgtggcaatggcaagctcgatctggacactccacaggttagcatgggcatacgaccccgcagtcggcatattccaggtcggccggggcgcagagttctcgacggtgtacatggagaacattgtccggtcgaagaagcgttttgcggggagcaaggagccccggaagccggtgcggccgaaggtcgggttcacggtggtgccgggcttccggctcggagggacagtgatccagtgtacggtgtatctggatcacgggaagagggaagaagacattacagattcggt

SEQ ID NO: 127786 - DNA, 308 bp, Zea mays
  Clone ID: MRT4577_4800C.1
agccaagcggcagtgtgtatagaggatcgtcgaacagaacagcatgaacatggtcatggctgctcgcgtgtgcctgggtctggcagctggcagcgcctgtgcaatgcatatgccctgcccctgcacgaggctgcagggcttgcacagcgctggcaccggcctgacgacgatgatgggcgccgccgggctgtacccatacacacagtacctgaggcagccgcaatgcagtccactagcagcggcgcgctactacgccgagtgtgggcagacgagcgccatgtaccagacgatcctgcaacactgctgcc

SEQ ID NO: 127787 - DNA, 268 bp, Zea mays
  Clone ID: MRT4577_48010C.1
cgacgtcataaacatgaacatgttacattacggtgctccggtttagcagattgcattggcactgacggctggatgccacacagcaacatcatttggggaagaatgccgtgatcacttctattgagaggatatccacatacacaccctcctataacccaataggggcgcctaacacagtaacgcaaggggctgaataattcactgtaatgaatggaacacatagctatgtctctgaaaccatacatcccgtggggagctagtctttaaa

SEQ ID NO: 127788 - DNA, 403 bp, Zea mays
  Clone ID: MRT4577_48011C.1
cactatctatagacctatgacgcacgcttccctcagcctttaactcggattgagagtaaagcgcatactttgcttggactcctttacacgggcgtaggcaactataaacgcagggctagcctatccttaccgtttcgccggataaaccgtgtctggagtggtttctgaccatgtacgagtacgaggcggcgaagacctctgtgtggtgtgacatgcagaactgccatgtcctccgctcgtgctaagcccacctgatgcaccagaagcatgagctcttccatcgtagtagccggctgcaccgttcccttcagaatctctgtctacaaagacagctaccgcgttttcaacctcgtttaggacgctttatatagcaccggcatctagctcaagcacggacacccag

SEQ ID NO: 127789 - DNA, 260 bp, Zea mays
  Clone ID: MRT4577_48012C.1
cgtccatgcaccgtacgtagctcggaatttgggttgagggttccacccactgcttttctgccccgtgcgggacatccgtggctgggaagcttcaaactatgatcgggcggatagctcatggcacccagccccttgcgtcagccaccccctggcatgaagcctttggctgtgcaactctctctgtctctgatgccttggatttgtgccgcgccctgactagctgccctggtaagcgcccattcacaccctttccgactttc

SEQ ID NO: 127790 - DNA, 1318 bp, Zea mays
  unsure (1)..(1318): unsure at all n locations
  Clone ID: MRT4577_48013C.1
cccggngtcgacccacgccgtccggccggctagagccattatcccatcgcgtgctcccctcctctgcctccatggccatcgaccctccccttccattgaggtcacgcctctgctcatcctcgctactccccagaacctgccgatggccaccgctccaagtcctctgctcgccgtcgcctatggctgcctcctctgcctccgatccgtggcaacatcgtgggctcgccctagcccggtagctgtcggttgtcgtcgccctacccctctgcacgccggcgccctctcctggagctcaccccgccagccgcgcccggtgctcctccaccaagcctcgccggggtgctcttcatggcgcgcctctgctcgccgtgaagctctatctgctccagttcgcgcccctgtctacttgcccgaacctccgacctcgcccatccatggagctcgctctagactccagctcgccttagctccctctgccagatcggccatggcgagtcccttccgtcgttcccctgcgcgtgcgtagggcgtgtctcccagctgtcagctcggctccaccagcacgtacaccgacgaccgctgctctccaggccaccagatcctgcgctcacctcggcattgaccccgttgttgtcttccaatttcagcagctctgcctcagccctatgtcgacctcgctgaccaaccatggttaaagacaccccaccatcaatccatgccttcgtgccgtgggtgatgctgttactaggcgtcactacaggttgtgttcgcgatcccgtcagcctttgctcgctgtccgcatcttgtgttcgtatcagtgagattctgttctagctccgtcgttttgtcacccgacgagatttccgtgtgttgattatgtgtatatgtgtatttgtgcgtgatgaggagaataatcctaggattatggggaaaggaaagctccagcgcatcagccatcaggtgttctgtgatttgggtgaatcgacggtcgtcgtcgttcttgctaataccaaatcgaactgtgatgtagtaagctgatttgatgagtgaattggctagatgtattggtctcattgattctcgtcgatgcgctgtgtggtggtgtccagtttctttgtggtatatatatgatgttctgtggccagggtttgtggtttggtcgtgtttgcctggggatagcagacatgttgtttgatgattaagtttttgttgtgacgcaaattatgcataatgtgtttgctaaaacacactgtctcatgtaatgttatgtggtatgtatacatgtgaagtaatcgcatcgtttagtagagtttagatt

SEQ ID NO: 127791 - DNA, 271 bp, Zea mays
  Clone ID: MRT4577_48014C.1
atattcataatatcaccatctctttgtagcatcgatcccaaataacggaaggtgttcttctttggtaatacccggcctcccaagcttacatctccatcctcactaattgtagtaccgaagtcacatcttatatactcagttttggtcctgctaattctaaatccttttgactctaaggcctgacgccataaccctagctttctatttactccttcctgactttcatctactagaactacatcgtcagggacaagcatacacagggatattt

SEQ ID NO: 127792 - DNA, 250 bp, Zea mays
  Clone ID: MRT4577_48015C.1
acgaaccatgctaagcggaatggcggcttctggtgagggcgcgtcgctgccgtctcctgcgggcggcgaggatgctcaccgccgtcgcatcagctatttttactagccgtctatcggaaactactactacgggcaaggctacccaatgaagccccaccgcatcctgatggcgcactcactggcggtccactacggccttcaccgacttctctagctctaacgcccctacccagtctctgaagccgacatt

SEQ ID NO: 127793 - DNA, 1215 bp, Zea mays
  Clone ID: MRT4577_48016C.1
gggattcaattctgctctcaatttcttaatatgttcgggcatgttttgtttcacctgatgcctgtgcctacctgagcgagtgcatggacctagacatcacagtggaattctggtcccttcaggcgctgcgcagtttcttctcctcctaccagacatctagcactggacctaaactagacgagcacttcgtcatgagcaacaaccacgccgcgcgcgcacaatattttttccagcaaatggaagtaaattttttgtgttgattcagtcacccatttgttgtgttttctccaaatactctaagttggactgattgatttcagatctgtttgtttaaagttcatctattccagctttataacctagtttgactaaactcatctgccgaacaaaaagaccaagttataatccagtcgcaagcacctacgcccgcccacccgcaacgctcaatattcctatgcctgcaggctgcaaatgaagaacgattacgtgaagagtttgtgagggaaagcagaaagcttcctccaaagcagcaatcacaaacatgtgattcaaatgttattactccaaggactgaatttatggctgttttatcagttgctttggagtgttacatccatcttagattgaattatgatcatgaatggaaacaaaacaaagttattttatccgatgccaatgttcctggtgaacgggatctgtctggttttaacccaaatccattgcctgtatggcctggacgcatatctgatcatgctagctttgcagacacatgaagtacgcttctcaatactgagagaggtattttatacacctggacaacaggataaatgtttcttatgtatttaggtgggacatctagcagcaaaatgtgaaggaaaggtgaaaatgaaagctggggagttttgatgagaaggctgatgctattgttcccaagaagccatatcaggttatttgtctattgtacaacatgtggtagtgtgtgtgtgtgttgggggggttcgcgccctcactcacgatcaatgacccgactctttccctctcttcccctcctctgccacgagccctaacccacttgaagcacaacatgatccatgtgagttgtgctttggcctgcattagggatcagcaacttcgcacgcgacgaaatgaaccgccacgactgcgttgggatcaacttcgcacgcggcgatattatttcagtgtcgtgtttttttt

SEQ ID NO: 127794 - DNA, 1576 bp, Zea mays
  Clone ID: MRT4577_48017C.1
cccacgcgttcgcccacgcgttcgaccaatttgccaatgccacatcgggatttggggaagagaggctcatcaagcatggtcactcacgtgatctataccatggtgtgctccaagacgggactgccgtggtggtgaagaggatcactttgcgcgtggctcggaaggatgcctatctggcagagttagatttgtttgccaaaggattgcatgaaaggctggttcctttcctgggtcactgccttgataaagaagaagaaaaggttcttgtgtataggtttgtccgaaatggtgacttgtcaagtgcactgcacaaaaagtcaagggaggaagatgaaggcttgcaatctttggactggataaagaggttgaagattgcaacgggagtagctgaggctctttgctatctgcatcatgagtgttctccaccgatggttcatagggatgtgcaagccagcagcatccttcttgatgataaatttgatgtacgccttggtagcttgaacgaggtgtgtcctcaagaaggggaaggtcaccaaaatgttatcacaaagctattaagattttcttcgtcagcagatcaaggttcttctggttccccatctgcgacttgcccctatgatgtctattgttttggaaaagttttactggagctggtgacagggaggcttggaatcagtgcatcaaatgatgctgccacaagcgaatggcttgatgccaccctgcggtacgtcaacatttacgagaaggagcttatgagcaagatcattgatccaacgcttatcattgacgaggaccatctggaggaagtctgggcaatggcgattgttgccaagtcctgcttgaatcctcggtcctctaaacgcccgccaatgaagtacatcctaaaagcactagagaaccctttgaaggtggtgagagaagacaatggcaatggctcgggcaggttaagagcaacatcgtcacggggttcatggaacgctgcactctttgggagttggcggcatagctcgtctgatatagggccttctagggaggacaacattctgaaacgctcagagacaatcaaatcgtctggcgggagcaacggggaccattcatcctcccgcaggaggcaatccaaggagatcttccccgagccgtccggctctcgtgacaccgaggattaagcatgaaggataatctttttacgaatcatttttcggtaaggcgggagtccttatgaaggagggctttgttagaagctccgcttggtgcttctatagaattctttcgtccaaaaaagtcacaatggcttcacaacagcacaccggcgccatggtaatcatttttgggttaagtagcaatggtggcatgtacgttggtgtaccaatggcatgcagttggcgccagtgtaaaaatcttcacagttggaagtctggtgtctcttctgtccattttctcgtttctgctcctctcggttaaagaaagaatggcgagctgattctttttcttctcccttctgtaattgattgtttcattgttcatcatagaggaaatgttctttttattaaaaaaaaaaaaaacccccccccaacac

SEQ ID NO: 127795 - DNA, 3022 bp, Zea mays
  Clone ID: MRT4577_48018C.1
gcgcttccttccgcctctcctccccaatcccatcgacacctgtaacgcaagtgcacatgggggacggcggcggcggtatcggcaggaggccctcgacctcgaggcgatgacgcgcgcgcgcgcgaggggtctctgggcgctgctgctcgttgcgctggtggcggcggcggtggcgcccggggcgctggtgctggcgcagggagggaccctgacgtcgcggtcggatctcgtggggctgtacgcgctgcggggctcgctcggcctgagggcgcgggactggccgcggcgtgcggacccgtgcgcggcgtgggcgggcgtgggctgccgcgccggccgcgtcgtctcgctcagcgtcgccgggctgcggcgcacgcggctggcccgcctgtcgccgcgcttcgacgtcgacgggctgcgcaacctcacgcgcctcgaggccttcagcgccgcggggttcgggctgcctggctccatcccggcgtggctaggcgccgggctcgcgcccacgctccagtccctcgacatctccgcctgcgccgtctccggggagatcccggcctccgcgctcctgggcctcggcaacctcaccaccctcaacctcgcaggcaaccaactgtccggccaactcccggccaccgcgctcccgaggctcacgcgtctcaggacccttaacctctcgcgcaatgcgttctcgggcgccctgccccacgcggtctggtcgctcccggggctcagcgttctggacgtgtctcgtaacaacctcaccggcgcattgcccacgccagggcttgcgctgccagccaatgcgcaggtggtggacctgtcggggaacttcttctatggcggcgtcccagagacctttcgtcggctgttcgcccaggtgctgcttgccaatatttctgggaactactttgacggcgagctaggagtgtccgacggtggtggcggcaatgtttcgtttcagttgaattgcttccttgatgttctgggacagcgtacacaggttgattgccagcagttctatgccagtcgtggcttgccttatgatggtccagttatcccacccgcaccacagcctgcaccttcaccggtaaggaagaagcacaagaatctgaagtacatactgatcggggccattggtggaggcctcctgctgatagccgttgttgcagccattgtgttctgctttgtgtgttctgggagtacagggaggaggaatcatcagagagaaagtggggcatcaccaagtgcaccatcgggagtgtcagctaccggcacagctgcagctactggtggcacgcagccttctgcattgtctgcaaacacggtgaaagtcggcgattcgtttgcttacgaccaacttgtcaatgccacctcgggatttggggaaaataggctcatcaagcacggtcactcaggtgatctataccatggtgtgctccaagacgggactgccgtggtggtgaagaggatcacttcgcgtgtgcctcggaaggatgcttatctggcagagttagatttgtttgcaaaaggagtgcatgaaacgctggttcctttgttggggcactgccttgataaagaagaagaaaaggttcttgtgtataggtttgtccgaaatggtgacttgtcaaatgcactgcacagaaagtcaagggaggaaaatgaaggcttgcaatctttggactggattaagaggttgaagattgcaacaggggtagctgaggctctttgctatctgcatcatgagtgttctccaccaatggttcacagggatgtgcaagccagcagcatccttcttgatgataaatttgatgtgcgtcttggtagcttgagcaaggtgtgtcctcaagaaggggaagggcaccaaaatgttatcacaaagctgttaagattttcttccagatcaaggttcttctggttccccatctgcaacttgcccatatgatgtctattgttttggaaaagttttactcgagctggtgacagggagacttggtatcagtgcatcaaacaatgctgccacgagcgaatggcttgatgccaccctgcggtacgtcgatatttacgagaaagagcttatgagcaagatcattgatccaacgcttattattgatgaggaccacctggaggaagtctgggcaatggcgattgttgccaagtcctgcttgaatcctcggtcttctaaacgcccaccaatgaagtacatcctaaaggcactagaaaaccctttgaaggtggtgagagaagacaatggcaatagctcggccaggttgagagcaacatcgtctcggggttcatggaacgctgcactctttgggagttggcggcatagctcgtctgatgtaggtccttctagggacgacaacattctgaaacgctcagagacaatcagatcgtccggcgggagcaatggggaccattcttcctcccgcaggaggcaatccaaggagatcttccctgagccgtctggctctcgtgacaccgaggattaaggggctgtttggttcgtatctaaatgtgccacactttgcctaagattagtcgttcgaattgaagaactaaccttaggcataaaagttaggcaaagtgtggcaacttaggcataaccaaacaggccttaagcgtgaaggagaatctttcttactaatcactttttcggtaaggcgggagtccttatggaggagggctctgttagagctccgcttgctgcttctgatagaattctttcgtccaaaaagtcaggaatgtgaattctctctcctactcaatggcttcacaacagcacactggtgccatgcagccatggtaatcaattttggggcaagtagcaacggtggaatgtacgttggtgtaccaatggcatgcagttggcagcagtgaaaagtcttcacggttggaagtctggtgtctcttttcgtttgcccctcctctcggttaaagaaagaatggcgagctgattctttttcttctcccctactgtaattgattgtttcattgttgatcatagcagaaagttcttttc

SEQ ID NO: 127796 - DNA, 268 bp, Zea mays
  Clone ID: MRT4577_48019C.1
gtgaattctctctcctactcaatggcttcacagcagcacactggtgccatggtaatcaattttggggcaagtagcaacggtggaatgtacgttggtgtaccaatggcatgcagttggcagcagtgaaaagtcttcacggttggaagtctggtgtctcttttcatttgcccctcctctcggttaaagaaacaatggcgagctgattctttttcttctccctactgtaattgattgtttcattttttatcatagcagaaatgttcttttc

SEQ ID NO: 127797 - DNA, 1694 bp, Zea mays
  Clone ID: MRT4577_4801C.1
ctggccgggaaagttgttcacccacctccactccacctgtgtgtgtgtgtgtttcacgtcccggcggaacttggcggcggacacgcgtcgtcacagccgaccaacggcgcttgcccgttcccccatcccccttgattcctccgccagcccagcggcggccactctccacgcatctgcatccgcatggctctccacgccgcggcgccggcctgcgcggtgttctgccgcctcccgtcgccctccccatctcacgtcggtggcagacgctcccttcccgccgtcgcgagtccccgcggcgttgtctctgccgcgccgctacggacacgcgcagttccaacaaaggcgatcgtaaacagtgatggcatccctgaaacgagtgattctccacatgtggtttgctttggtgaattgctaattgacttcgtcccaactgtcaatggcgtgtcactggcagaagcacctgccttcaagaaggctcctgggggagcacctgccaatgttgcagttggaatagctcgccttggtggctcgtcagctttcattggaaaggttggtgatgatgaatttggctacatgctagctgacatattgaagcagaataatgtcaataatcaaggattgctgtttgatcctcatgctagaacagcttttggcgtttgtgtcactccgaagtgatggtgaacgcgaatttatgttctatcgtaatccaagtgctgatatgctacttgaagaaaaagaacttgatcttgatcttatacggaaggcaaagatattccaccatggctcaataagtcttataactgagccctgtaaaactgcacatattgcagctgccagagctgctaaagatgctggagtacttgtttcatatgatccaaatttgaggctttcattgtggtcatcacctgaggatgctagagatggtatcctgagcgtatggagaactgctgatattttcaaggtaagtgaagaggaggtttcctttctcacaaatggagaggatccttatgatgatgccgttgtaaagaaacttatgcgttcgcccacgcgtccgcccacgcgtccggaaggtccagacggctgtaggtattactctaaggattttagtggtagagttggtggacttaaggtaagtgctgttgacacaactggtgctggcgatgcctttgttgctggagtgctatctcaattagccacagacttttctctgctccaggatgaaggtcgattgagagaagccctgaagttcgcaaacgtctgtggagctctcaccgtgacacagagaggcgctattcctgcgctgcccacccgacaacaagtgcttgatgccctggccaattttgttgcttgaaagtagccgtgcacacctacttgttgtgtattgtaatgtggaccgcctgagcgccatgtcgatagattacaggcgtgatttcgcttgcataccacttggcatttttgttggtgcgtaccaaagcccccccagccaaaccaagtaactcggtggaagaggttgttgtttcccgtcggattttgatgtgtgtagttgtgtgttggggacattggggttaacactttgtgggcatgtgtaatgtgtgtgctgatgttgtaatgctgctggggagaacatgacacagcggagcagttttggtacctgaaaacatgagctatgaatgagtgattcagttattgggccc

SEQ ID NO: 127798 - DNA, 336 bp, Zea mays
  Clone ID: MRT4577_48020C.1
gatctattaactatggcggtggtcgttcgttgctgctctttgtcttctaagtattaaatttacctaccttgggaaggggttgttccgatcatttgatccgggttgtcgctggtagtactctgatggactgaaacaaggggggcgccgcaccgggtgggagggaacggaccacgaggtggggtgcgtgcaagccggtgcggcgctccctttgactgctgttgggatgttgaacgcgcacccggtcgaagggggcaacgagcccttgcccgggggggaaaattaaacttttgaagcaaagggcagcaacgaacccccgccgccctagttttagatggg

SEQ ID NO: 127799 - DNA, 493 bp, Zea mays
  unsure (1)..(493): unsure at all n locations
  Clone ID: MRT4577_48021C.1
cccgcgacatgatgtcagacgggatgagtaagatgctcctactggcattctcgttgattgatgcctgtgctagtaatcccctcgcgtcaatcctacgggggaacattgngaacataatttcccatgagtggcatgagcgaaaaaacattcaccgattctttgacatgccataccaagggttggtccgtggtgatccagaaacagcatgcccaggacagtcccaatttttctcgaacatgagacaccaaattggatgtgctcagacatactcaaagatctgagactttatatgacagatagcacgatgcctgatgattatgaggcacgatgacatgcatgcggcttgctgtcagtatccatctgcaacacatcgcacgagcaatggacagactcccacctgctcttggagcactggacgcttctataatcctgattgatccagaatggaacagttaggggataaaacatagaactggtatggctgaccgtatca

SEQ ID NO: 127800 - DNA, 280 bp, Zea mays
  Clone ID: MRT4577_48022C.1
tttcccttcttacccttcttgccaccttgccatctttatttcatttgcaggaggaggcaatgcccatgcattggctctctttcctagccacgtcctacccgtttactcgggttgcctctcgctctttttatttatttcctttgtgttttatctcatcttaccatctcccagaaaataaggcaagagccacgaggaaatggcgtctagacgaatcctcgtttgttcttatcccgctcttgtccccttttggtcactttgtcacgtgcaagtctctgcttgt

SEQ ID NO: 127801 - DNA, 825 bp, Zea mays
  Clone ID: MRT4577_48023C.1
gacgccgatagtggcacgggttcgcgattgggcggcagcgtgctgcgacgacgggaggtagtgtgccgccagcacggtgaactgccgctcgttgttgcggtactctattgatccctagatttcacaacgaacatggcggaggcggctgccgattcctccaactcggccgtcgatggcggcggcagtaacgtccaaaacgactatcccaccattgaccccacctcgttcgacgtggtgctctgcggcacgggcctcccggaatctgtcctcgccgccgcctgcgccgccgttgggaagacggtcctccacgttgatcccagcccgttctacggctccctctactcttccatccccctctcctccctcacctccttcctatcccctgaggcctcccctcccacctcgtccgcggcggccgccgcctctgattcgcgcaccgtcgtcgatctccaccgacggagcgtgtactccgatgttgagacttcggggacggtgccagagccggctaggcggttcaccgttgacatggtgggacctcgtgtgctgtactgcgccgatgaggcagtggacctcctcctgcggtcagggggcagccaccatgtggagttcaagagcgtggaaggggggcagtctcctctactgggagggctgcctctacccggtgccagactcgaggcaggccatcttcaaggacaccacactcaagctcaaggagaagaacatcctcttcaagttcttcaagcttgtgcaggcacacattgctgcagcatcagcttcatctgatgagacggggacagggggatgcatctaccaagatacccgagg

SEQ ID NO: 127802 - DNA, 500 bp, Zea mays
  Clone ID: MRT4577_48024C.1
gcgttttgcccaccttccccttcctttctttttcgtgtgtttagtctctccttcttcttctggccggaaccagattattttattgaccttgccccacatatctgtattaaactaacaaaggtcgaaagctggttcaaacgggagttactgaccccgagaaggcttgccttcaatgtcctcttttacgggtgtgatgtcggtctctttgcatatggatggtggagtcaggcaactaatgtaaaattggctggtctcaataccttgaagtggtctgtctggacttctcgcggtgccggtctggttctggcctatgacggcggtttgattctcatcccaatgttgaggaatatcatccgaatcgtcaggccgaagctagcctggtttttcccggccgatgagaatatctggttccaccgtcaggtcgccttttccatggctttctgggccatgcttcattccacgggccattatgtcaactttatgaaagttgggggcgttcc

SEQ ID NO: 127803 - DNA, 436 bp, Zea mays
  Clone ID: MRT4577_48025C.1
ggagagatgaaggatggagtcccagagggagcacaacttcagggaccggttcatcgaaatgcaacttaccgcccaaggtaccgtagcaggggacctcctcgcccacgacctgccccagcagttggagaggctgaagataaagaaaatcagcaagccaccagtggtccaaaccagccgtctgttcgccgtggataccggcgtccctacaattaccggcgtcgcccgcgtcctcctaacgctccttcacaagatggcaaagaggccaaggcagctgaagcaccaactgagaaccctgctccacccacccagcagagcagtgctgagtaacaccaggctcctcaggcaccttcaccatcggcaggtgacctaaagaattaatgaccattcagaaataaagcaaaaagcggccacaaccttaaccaacaccaaagaaaca

SEQ ID NO: 127804 - DNA, 705 bp, Zea mays
  Clone ID: MRT4577_48026C.1
gacttaaaacaaaataattgttgcctacttgtttttcaccaattcacgtgaagacagaatccgcgagtactcaacgaacatatattcacaaaattaccgatcctctactatacagagtatgaaaaccccaaaaacttgagaaaaaagactcacaatctaaacccacaccttaaaactgatactctactcaggagtttagattgcaggctgactcaagttttaatatttgacacgacgaagctcgtggattgaccttggttaaagagttacaagaagaacgacaaaccggaaaggcgtaacagctgttaaattaattggttaaccggagaaatgtattggccatggagtgtagctcacacaatgagtcctttgaagctgagtaatcagaatctgatgcaacactgctgatgatctgctttatcattgctgctaatttatgatcggtttttctatggtttttaccgtacaaagcctcgaattcttgggattttatcacggctctctggagtacgtaatctggaagaccagctaaccgagcaacgttaactccataacttttaggacatgcaccaggagtcaatctatagagaaatgtaacttcttctactccaccgattccttctcctatttgacatgccatatggcaaagtgagacctttggattggtttgataatccacagagagacgatgataatgagtagaga

SEQ ID NO: 127805 - DNA, 1383 bp, Zea mays
  Clone ID: MRT4577_48027C.1
ccggccgggactttaaccgtacgctgcggtgtagtatagggtttagcagacaagggaggggactgagaactgggaagccgacgctccgctcggcaaagcctgaggcggcgacgacgcttgatcgcagcccgactcacaccgtgaggagttcgagggatggctttcgctagtagaattggaaatgcgctcaggagaactttagcgcccacttgctccccactgcttcagccagtaagatgcatgtcctcttccaagctctttgttggaggactttcttttgccaccgacgaaaccactctgaaggatgcattttctgagtttgggaatgtacttgaagctcggatcatcattgatcgggaatcagggaggtcaaggggttttggttttataacttttacatccactgaagaagcctcagctgcaatgacttccatggatggcaaggaacttcaaggacgaaatataagggtgaaccatgccaatgaacgcgctggtgggatacgcgggggtggtggattcggatctggtggtggttatggtggtggaggtggatatcctactggtgggtatggcggtggtggatatagttctggtggtggttatagttctgggggttatgctgccaatggttacggtgttggatctggcagtggcaactacagcaatgcatcaggtggtggatattcaggcagtgatggttacggcaatggagctgccagtggtggttatgctaacaacttgagcagcggatacaacagcaatggtaggtacaataccattggcagttctgatggaaacactggtgggtacaattcgtatcccaacccgtatggtgcaggcaactacaatactggaggttcgagttccagtggtggaaccttaggagagtttggtggtggaggttttggtggcaacaactttgctggaaatgttaccgggggggtttctggcggtggggcaagctatggagctaacaagccgcaatacaatggcgacgacgacctgctgggcgaaggtttcttcgacaaggaagtggcagagtaaatgagggagcggcgtactcgcacctctcgcactgtgctgcggatctttttttcccccaaactgcatctgatcggtcgtgctaaatggagcaaataaaactttgcttgagctcattaggatatagaacataatcctttgttcttttttattctgtttcagacaaggcacgtatgttattttatccactcagctagcgtagctttactacaactatattgtgagaagaaagagttgttatttcaactatattgtgagaagaaagagtggttatatcttctcaacaagaaataaaaaaaaatcaggtgccggctttcttaaaaaaaaaaaaacaaagcggcc

SEQ ID NO: 127806 - DNA, 402 bp, Zea mays
  Clone ID: MRT4577_48028C.1
ccacgccgagcacctccctcacggtgtcctcctccttcccccatggccgtcgtcttctcccttgttctctggtggccgagctcctccccacaacagcagggctcgacgttccccatccatagcgtctaggtgtgcgccatctgctctggccatcctcaaagaaactcagtgtcagcactccagctcaacaaataaagcaaaccaaggatggaggcatggaggagaaggaatctggacacggcaaggaagcaaggcccaaacgtgtgccgaagcccaataccaggatcatgggccctgagtgggtctatatgtaattcaggggctgggtgtgtgttgcgagagatataagattctgtattaagaaaaagggagacaagaaagaaatacaatcaatattcccgt

SEQ ID NO: 127807 - DNA, 592 bp, Zea mays
  Clone ID: MRT4577_48029C.1
aacttacctctataaacctcagaacggcagccatctcactagatgattgtgcagaggagatggagaccgagggaggagtcgacgccgaggctttcttctcctgatctgtgctgttgccctgcgaagtcctcgcaactgctcccctagacctcgccgagaacaacttctctctcgagaccggcctggtccacgtcaagtacgccgtcaacgtcctcctcctcaaatacactgagatcgggtcgatgatgacggtcgccgatgacatcctcgatacgaagcacgagaactccccagtgctgtcacacagcagggtggacaaaatagttggattttgttcgtacacgaacttctggatcatgatggaagtgactgctgacgatgcaacactagaggaacatgcccgcgtcgaatgtcacatgcatattcgactcagtacagcgagccagtgaccgacccatcctccatccaagatatctgcgacttaactctgccgtatctcgacgatacctcctacgacaacgacacggacattcgaatgctctcgcctcagtgctggacatgacgagaacgttcctagactggactacgctga

SEQ ID NO: 127808 - DNA, 634 bp, Zea mays
  Clone ID: MRT4577_4802C.1
ttggtgaccccaaagatggaaatcggaaacatgaaggacagttccaatcctctctcaaatcctgcttacgcaagggcgcttgtaataaagcagcaagagcagctccttcagcaatataaattgggcagttcaccgcagcgacagcatcatggacagcatctctacatcaaagggccagctctgtttgagaatgatgacccgccaccggtcaagccgctgggaacaaggtgccagctctgcaagcttgatgttgctttccggacacaaggggatgctggccgtgatgccaatgctccaccagtcattgcagttttggcatgccaccatgtgttccacagcaggtgcattgaatctgtttacgggctcgctgagcctgctgagtgccttgcctgcctggagtccggtgcagcgcactgattgctaaccagatacaccaggtcaagagtctgaagtgctccatttctgtggccctttagatcccgtaagtaggctaccattggagttcaatagggagctgaattatgggacatgtcacatgtctgatatatatgtttatttatttctccctgtcgtggtcataggtaaaatctgcagtctattgacgctgccattttgcctcccccccccccccccc

SEQ ID NO: 127809 - DNA, 344 bp, Zea mays
  Clone ID: MRT4577_48030C.1
atcaagtgcataacaccttcagggaggcccgcaggacagctgtttgtgctggaagatctatataactctggcgcaccatggtctccgtggtcgctgcacgctgttctttggcatttcagaatggcacaaggcctagcaccgtcccatatcgttttaccaacgagatgtgctgcgtgtgcacaagggacgacaaggacgctgaagtatattggcttcaatctgaattgaggggagcctgttcatatcataatgaccaccattgatgggagaacattgcagacaaagcacaccattagctacacaggtgcaacaatggtaggccatggatcctatctaaccgtttt

SEQ ID NO: 127810 - DNA, 912 bp, Zea mays
  Clone ID: MRT4577_48031C.1
tctgaggaatggtcgaaaaaggctggggagctcgaaggtgttattaaagcattagagacacatctgacccaagttgaagatgaatacaaggaaaagcttgagaaggagaccttgtccaggagagaccttgaaaaggaagctgtcaacttgaagcagaagcttgaaaagtgtgaatttgatctggagaatacaaggaagtccactgaattgagcctcgttccattgaccagcattgcagcaggctcttctgatgtagtagacacaacagtacaaggactgcctatttctgatgcagttaatcagaatgatctaatggttattccaaaggtacctagtggtgtttctggtactgctttagctgcttctcttcttcgtgatggttggagtcttgctaagatctatgagaaataccaagaagctactgatgcttttcttcatgagaggcggggaaggagacatgcagaagcagttttggaaagggttttgcatgaaatagaagagaaggccgagcttatcctagatgaacgggctgaacatgagaggatggttgaagcttatgctatgatggatcagaaattgcagcaagcattgctggagcacgacaattttgaaaacaatgttaggaatctaaagtctgagctgaaaagacgggaacgtgatcatagcgtggcacagaaggaaatagatgacctgcaaaaacaagttgctgtccttttaaaagaatgccaagacatacaacttcgttgtggttctagccttcctaatgtaggttatgtcgcttcttcttcaagcttagtcaatgttctttccaatgtagagcatgatatcaaggacaatatgtcttttaaagacatcaacgggttagttcaacaaaatgttcaactaagaaatcaaattcacatgctctcagtc

SEQ ID NO: 127811 - DNA, 233 bp, Zea mays
  Clone ID: MRT4577_48032C.1
gcacgaggctgggctcaccggcctgtgagctcacctcctcagcattccagtactgagctgacgtggattcgacacagatttggaagtgcacgaaacatttctcgcgagtagccagcatgcaggaaaaataaatgtgtgggtggggactggggtgggttcgctccgtaggaagaacaggcttggggctctttgcaatgtgggaatatttctcatttccagtgtttttcttataa

SEQ ID NO: 127812 - DNA, 958 bp, Zea mays
  unsure (1)..(958): unsure at all n locations
  Clone ID: MRT4577_48033C.1
ccacgcgtccgatcagtgatgaattcagtacttcttcaagcatcgctagaaaagataggtgtggagacacgagtccaaaccgcattgatgatgcaagaagttgcagaaccttacattaggcgtcgagccatacgccatcttgaaaaagggagagtggtcatctttggtgggattggtgtgggcattgggaatccattgttcacaacagatacagctgctgccttaagagcttcagagatcaacgcagatgttgtccttaaaggtattgttggtgatgatgagtatggctgtcctcctaggagcaacagtaatgcttcatttgagcacatctcctttagggagttagcagcaagaggaatcaccaaaatggacatgacagcagtaacatgttgtgaggagaacaacattcctgtcgtcatctttaacatgttggagcctggtaacatctcaagagctatttgtnggagatcaaataggcaccttagttgaccagtcaggaaggatcacataaaactaggaggatgaatggtagcagagctccaggacatgccgatactctggggggacatcctgaattctttgctcgtggaacttttccggatagaaaaaaaacatgttcatcagatgcgttcttttctgatttgcctgacatgttcactaggaagcgttcaccttgatttgcctgggatgcctattgtgtattatgcgttgtggtcaattgcccacattgagaaaagtattaccttgtaatgtctatttgtaatttgtctgtagattagtggaagggctcatgtaaagtgtttcacggtgcccagatcagaatgtagtgttgtaagttgtaatgctattatttgagtcgtagtgtttgaggtgtcacgttttgcacgattaatttgcctgtggctttccagcaatcaatctttttttttgttccaaaaaaaataaaaaaaaccaaaaa

SEQ ID NO: 127813 - DNA, 1379 bp, Zea mays
  Clone ID: MRT4577_48034C.1
tactggccctggttcaaaaagatggagcagatccttcaaaactccgcatctcctgcctctgtcaagcttctaactgctgccgaggatgagaaaccgaggcagcagcagcagcacagcagcaaaaggtatcctctttcctgtactggccctcctactggggttggtagctccagaacgaaccctctttcaaatccaagatggaagagggtgcttctgaagattgggggcactgccctatgtggagcagctcatcaaaatgttgatcccaaggtgattatgctgatcgctagagaagttcaagtggcatgccatcatggtgtggaggtggcaatcgtggtaggagggcggaatatattctgcggtgacaattgggtagctgcaacaggcactgatcgagcctcaacgtacccaattggaatgatggcatcagtgatgaattcagtacttcttcaagcatcgctagaaaagataggtgtggagacacgagtccaaaccgcattgatgatgcaagaagttgcagaaccttacattaggcgtcgagccatacgccatcttgaaaaagggagagtggtcatctttggtgggattggtgtgggcattgggaatccattgttcacaacagatacagctgctgccttaagagcttcagagatcaacgcagatgttgtccttaaaggtattgttggtgatgatgagtatggctgtcctcctaggagcaacagtaatgcttcatttgagcacatctcctttagggagttagcagcaagaggaatcaccaaaatggacatgacagcagtaacatgttgtgaggagaccaaacattcctgtcgtcatctttaacatgttggagcctggtaacatctcaagagcaatttgtggagatcaaataggcaccttagttgaccagtcaggaaggatcacataaaactaggaggatgaatggtagcagagctccaggacatgccgatactctgggtgggacatcactctggggggacatcctgaattctttgctcgtggatcttttccgtatagaaggaaaacatgttcatcagatggaagcgttcaccttgatttgcctgggatgcctattgtgtattatgcgttgtggtcgcaattgcccacattgagaaaagtattaccttgtaatgtctatttgtaatttgtctgtagattagtggaagggctcatgtaaagtgtttcacggtgcccagatcagaatgtagtgttgtaagttgtaatgctattatttgagtcgtagtgtttgaggtgtcacgttttgcacgattaaaaaaaaaaaaaaaaaaaaaaaaaaaaaaaaaaaaaaaaaaaaaaaaaaaaaaaaaaaaaaaaaaaaaaaaaaaaaaaaaaaaaaaaaa

SEQ ID NO: 127814 - DNA, 444 bp, Zea mays
  Clone ID: MRT4577_48035C.1
ctgtactggagggagcatcagtgaagacaaaatccctctaccatccatattcaccgctgagacaaaaaaaccagcagcatgtctaaaaaatgttggaagaaactatttgtggagagggagaaaagagaccagaggtgggcattgcatgatatcttggtccaaggttactaggccaaaagagcttggtggtctaggtatttctgacctacagctacaggtgctgaactgggctctcaggacgcgctggttatggctaaagaaaactgaacctacaaatcattgggcctcctttcagctgcagtcttgtaaggtggtgagaggcattattgttaacatggccatgtcgactgagattggtgatgggagtagcaccctgttctggaaagacagatggctgttgggacagcacatagaagagcttgctcccctcattttcagcttggt

SEQ ID NO: 127815 - DNA, 250 bp, Zea mays
  Clone ID: MRT4577_48036C.1
ctcgtcggcaacctgttgctgccgtctttagtttgcgctcgcgccgctgtccgtgtgcgcgagcttcactcgccggccgcggcgcgtctgccattccaagaacgctttggacgaagttgtggtggcggactagaagaactgggacgggttggtgatggcgtgcgagacaccggtgctggtggaattttgggcgccattgtgcggtccgtgccggatgatcgctcctgtgatcgacaagctggccgttgac

SEQ ID NO: 127816 - DNA, 1145 bp, Zea mays
  Clone ID: MRT4577_48037C.1
cttcttggggaccctcgggtttccgggctattgggtacctcgagcccggccgggaataataaaaataaaaataaataaaaagtgagagagggaggaaggcgcacacttcctccttccttctttccctcttcgtcttcgcttggccggtgggtggtgcggtggggatgcggcggctatggcggtggtaccagcagtgcctggccgcgcacccggtgcgcacgcaggtcgtcagctccggcatcctctggggcctcggcgacatcggcgcccagaccgtcacctactactccgctagccccgaccgtcgcggccacgacagcagccctcccgaccccgaggataaagataataaagacaataaagagtttaaagttgattggaagagggtgggcatcacaagctccttcggatttgcttttgttggtccagttgggcattactggtatgaatacctggatcgcatcatccggcggaggtttcagcctaacacgttcaaattcgtcgcctcaaaagttgccgcggatggattcctcttcggaccactagacctcctcctgttcttctcatatgttggtctgggtcaaggaaggagcatagagcaggtgaaggaggacgtgaagagggacttcattccggctctggtgttaggcggaaccatctggcctgctgtgcagatcgcgaacttccgcttcgttcccgtgcggtaccagctcctgtatgtgaacttgttctgcctcctggacagctgcttcctgtcgtggattgagcagcagggtgacgcctcctggaagcggtggttcacttcgttccagaaaatcgaagaccagaagggtaaggtttgatttgagtcatgcatggttcgttgtctggatcagtacctgtaaactccggttgatcaaggaagataattgcgatgccagcaaggctgaacattggcgtcgctatagagaattctttttagtctttgacgggatgaaacggttgccgagttgctctgttaactgaagtgcctgtgttttgccgatgtgttaaactttctttttagtctttgatccaagaaaattaagtcatgtctgggaatgggtggaattgacgattgcaacgcgagcaaaagctgaatataaaaaaaaaaaaaaaaaaaaaaa

SEQ ID NO: 127817 - DNA, 684 bp, Zea mays
  Clone ID: MRT4577_48038C.1
tgggacctcgagccggcgggccggtttcaaaatcatgcatcacaacgaacattgctctcgatctcaccgacaccgaggaagaatagatcatgtcgtccgaacacggagtcgcgatcgcgtgccacagcaaggctagattttcgacgcccacatgaccaaggaccaggaagccgacaagctggtggtcattgacttcactgccctctggtgcggtccatgccgcgacatcaccccactgctcatcgaacacgcccaaaaacttcactcaagtcacgatcctgaacgaggacgagcacgaagagaacgaagtcaccgtgccctacgacgtcgaggctgatgccgaccttccacttctataatatcagcaacactgtctcgaacatcgtgggtgacaagaaggacaaactcctgtgccagatctacaagcatgctgcgcctgcgcctgcgtctgctgctgactaaaggaaatcagatcagtcgtctccgaccataaaggcaccacgtatgggtgtaaatgttgtcgatatcaggtctgcttttgtgctttgtgttcgattgagaactatcatcatgatggcatctatgctagtcgagagacagacttaaccatgatatacttgccgtgagctccgtgactggtacatccagagcacttgtgccacaactggcgagggtctgtatgag

SEQ ID NO: 127818 - DNA, 362 bp, Zea mays
  Clone ID: MRT4577_48039C.1
aaaaccaaaatttaattttttttttggattacagggaatttgggaaacacaaatttgaaatttaccagcaaaaccaatgttaatacacaagttacaaggttggaaacatttgttttttgggggggcacactaactaaaagtcatccacatgtaaatgggggcaatgaatttagtttgggactgcctgcaaaactttgaaaataatcgtccagggactagttaaaaagctccttggaacaaaacgcgttttttaattgttgcaaatggggcatcaggcaacatctttggggaaaacggggggagggccccatccttttggaccattataaattaatacatgggaaccctactccaaaaatttt

SEQ ID NO: 127819 - DNA, 570 bp, Zea mays
  Clone ID: MRT4577_4803C.1
cattgggtacctcgaggccggccgggaaaaaaataccaccctacgcgatcaatctccgtctcgatgggacgtcaccgggaaactgagctacgacgacgactggggtgcgacacctgccgtcccccgtctccggccctgcgccccgcgtccactctctccggggctacgccgcccccagggcccttccgtgggcactctagcccgctcgggcgcactggtacagggcctccgaccaggggatcccttgagactacatccaatgcgccaccgatctgatcatgttgcactcacccacgcactacttatgctgttccctgcacggtgacaatggcttccacccgctgaccctgaggcaacacccggactaactgtggaggcacgcgactccggacttgataaacgtgaccccgccgatgtctccctctgcgacacattgtgctgccggaggcgctgacacatcctcggctgatcaactcgcgctcaggggtcacagaacaccggaagccctcagaacattatcattggtctacataccctacgtcgcgcatcgagtaacatcatgactcacta

SEQ ID NO: 127820 - DNA, 428 bp, Zea mays
  unsure (1)..(428): unsure at all n locations
  Clone ID: MRT4577_48040C.1
aaataantttttctttttttttttttttttttgttgttttttttttttttttttttggtttttttttttttttaacaacacaaaattgtttgtttggggagagattatcaggcatgccgttatttacaaaggggggggggggaatatgccccgcccattaaaaaaaaaaaaaggggggcctttaaaaagaaagaagctcaagggctcccaacgaacgggatatacatttcctttacgggcaacactttattaaagatggggggtatcccgggggaagctgggcgtataaagaatcggatgaatctgtaaaccctggctccggaagaagaaattcacctgccggaaaggggctagcgaacggttctccaacaggttccactgcaagaacggagagccaaaaaatgccccttgggtgaaaccatgtaccc

SEQ ID NO: 127821 - DNA, 396 bp, Zea mays
  Clone ID: MRT4577_48041C.1
atggatcccaacgacgccttctcggcggcgcacccgttccggtgggacctgtgtgcccgccggcgcccgccgcgcccgcgcctccgcccccaccgccgcccgcgccgcagctgctgccccacgcgccgctgctgagcgcgccgagggagctggaggacctggtggccggctactgtgtgcgcccgtccacggtggcgcggatctcggagctcgggttcacggccagcacgctcctcggcatgacggagcgcgagctcgacgacatgatggccgcgctcgcggggctgttccgctgggacgtgctcctcggcgagcgcttcggcctccgcgccgcgctgcgggccgagcgcgggcgtgtcatgtccctcggcggccgcttccacaccgggagcacat

SEQ ID NO: 127822 - DNA, 619 bp, Zea mays
  Clone ID: MRT4577_48042C.1
aattcggcacgaggcttacccaagcgtgtctctctccctggcctcaatctccagccgccactcactaggagatcttctccttcacgccacctaacgtgccatcgtcttcacccggccgtcgtccaccctgccttctccagcttgcgccaaacgtgcgctctttgtgccgccttcgtgacctcccctagctcggccatggatgtcgcgccgcccttctcctatctctctgctcgaccgtgcctcttcttccttgagccacgcccggtgctcctccaccaagcctcgtcggcatgctctcctggcagcggtcggatctggcctcctgcttcccctctagtacgctctcgcttccagctcgttgtgcctctgtactggagttcgccggacagtgcccttgctcggcttctccaatgcgccctaccgccagcacccctctcttggtcatcccttcccctgcgcatgcgctgggcgtgtctcccagccgccagctcggctcctcgcttcaaccgtagacctggtactcctcccgtcgtgcctgtcctctgtgcgcacgcgccatcgccttctctagccattgtgctcggccgatgactcacttcgtgccactcaggggtgacta

SEQ ID NO: 127823 - DNA, 178 bp, Zea mays
  Clone ID: MRT4577_48043C.1
gcacccgctcctggccgtgttttcgtcctttgactctttttttttttggggggggtgtttctgtacctgattccgtgcgcccacgcccacaacgagagggaccgcccgctccatgtgctcttaaagtgccccgaggcgtagccgacaacctttcccaacaaggccgcctttctttttt

SEQ ID NO: 127824 - DNA, 827 bp, Zea mays
  Clone ID: MRT4577_48044C.1
caggtgctgatgctgcagagcccaaaggggctgctggagagctgcatgtcattgatgcgaaatctgtggacgacatacatgctgctttccagaagcactttgatgctattgtgaatagttccttggaagaaaatgaatacaaggataggcatgtagagatggcagaatccatggagcctgatcaacttactgaagcaatacatgccgaaagtcagcacaacttgggagatgctagggaggctttaccagcggaggagggtacaggcgatatgagtactagcgaagcagagagtcacaacaacattggtgcagcatccgataaggtctccgatagcagtgccaagaatactgcgcaggcagtggtgttggaggtttctagtgaaagacaagaggaaagtgaacagcagtgaagacaaaaatgctccttggttgaagtttgaaggagctagcaagcattgatggggcgctattgttgttgagtttcacgggcttgccactgtgcatatacttcacacattcaaaacacaaagttctgatgtagaccttttgtgaatgcgtttgcttttttgttttttttactattgttttgaggttttggtgggtttgttttagattgatcccccctcgtttggctgtaatttgaagaggtaagttttgcccagacagttcggtgtggctgcagggacatggaacgatctgttctgccatgtgaattgagattttgttgtattgttttgaactagcgaagctggcaatagaagaacttgacaggtgtatttcacctttgaaaaaaaaaaatttaatcttatatacttaatattcttttt

SEQ ID NO: 127825 - DNA, 143 bp, Zea mays
  Clone ID: MRT4577_48045C.1
tattccgaggaaactttcgttcacgctggtctcctgccgccgccggtaattaaatgcctaggacttggtccgtgctgttgtccaagagatttaaccttcacccccaccggcaattaaaggaacttgtgggacctcatggattc

SEQ ID NO: 127826 - DNA, 455 bp, Zea mays
  Clone ID: MRT4577_48046C.1
cggacgcgtgggtgggtccaagcttccccagaagttctactactggttcttccagacagtgcggggtatgacaggggtgctcctgctcctggttcttgccatcatgtatgtctttgcttcccaccacttccgacgccgcagcttccggggcttctggttgacccaccacctctacatcctgctctatgtgctgctgccccgtttccacatctacttcctggtcccagcacttatctacatgggggacaagctggtgagcctgagccggaagaaggtggagatcggcgtggtgaaggcgcatctgctgccttcacgagtgacccacctggagttccagcggccccaaggctttgagtacaagtcaggacagtgggtgcggattgcctgcctggctctggggaccaacgaataccaccccttcacgctgacgtcagcgccccatgaagagacgctta

SEQ ID NO: 127827 - DNA, 535 bp, Zea mays
  unsure (1)..(535): unsure at all n locations
  Clone ID: MRT4577_48047C.1
ngagatcttcaatccaccgcgcgaccctctagccctatgattccgtagtacctcccctattgccataagctcgcaccgtgctgcctttgccaatagacctcttcatgttctcgtgtaagatgacaaccgccgattactctccccacctcatctggaaaagctccaccaagacatcaatctttctttcctatcggagatgcgctgcggatcgccgagatagaccgagcaaaacgaggcgatgctcgtcttactccgaatacttcttgtggcgtgaagagcaaaacaggagccctgtgccgatgccagcactgggcaaaggcaagggccgcagggccctagtcctcgaacactgtctagcgcgacgactgatggctgctcatatccggagtgtgagcgaccacaccgaacgatcgatgccacccagctatgcacaagagcacgtgcattctcgtcttttcgctacgatccgtgaacgattatgtctatctagctacatgaacaagagatgatcatgtatctgcactaatgactgtgc

SEQ ID NO: 127828 - DNA, 597 bp, Zea mays
  unsure (1)..(597): unsure at all n locations
  Clone ID: MRT4577_48048C.1
ngagttaccaggtcatgaagagtcatacaatccttctgttgaatacattcctacacaagaggaaatagattcataccagcttatgtatgaggaggatcgcccaaagttcattccgaaacgatttgagtgccttcgaagtgtacctgcatatgagaaggcgttgagggaaggttttgatcggtgtctagatctttatctatgccctagaacccgcaaaaagcgtataaatattgatcctgagtcactcaagccctttttacttggtaacttgggccaacctccagcccggaatcgagagcaatggcgctcgccaaggccaaggagatcgttgcctccgctcccctcgtcgtcttcagcaaaacttcctgccctttctgcgtccgtgtgaagcagttgttcgagaagctcggagcaagctacaaggccattgagttggataaggaaagtgatggagctgagctccagaatgccctgaaggagtggactggacagaggactgtcccaaatgtcttcatcaatgggaagcatattggcggctgtgatgatactatggcactgaacaatgatgggaagctggtgcctctgctngactgagct

SEQ ID NO: 127829 - DNA, 1579 bp, Zea mays
  Clone ID: MRT4577_48049C.1
gccggccggtctggggccaaggaataccgatgggagacgtgcctcttgagtggtacaaggacgaagagcacattgggtatgacatcgatgggaggaagatcaagaaacgtgatagggaggggcgcattgaagcctacctcaggaacgcagatgatgccaagaattggagaaagactatgatgagtataatgacgaggaggttcagattacaaaggatgaggctaagataattagtatattgttaaagggaaagactccacataccaatgttgatccatatccagattatgttgattggcttgaatatgaggataaaggtcatcctctttctaatgcccctgagccaaagaggcgatttgtaccttcaaagtgggagcagaagaaggttgttaaacttgtaagagccattcgcaatggatggataaagtttgacaagcccaaggaggaacaaaacttgtatttattatggggagatgaaactgatacaacagataataagcggcatggcttgagctacattcctcctcctaaacctaagttaccaggtcatgaagagtcatacaatccttctgttgaatacattcctacacaagaggaaatagattcataccagcttatgtatgaggaggatcgcccaaagttcattccgaaacgatttgagtgccttcgaagtgtacctgcatatgagaaggcgttgagggaaggttttgatcggtgtctagatctttatctatgccctagaacccgcaaaaagcgtataaatattgatcctgagtcactcaagccctttttacttggtaacttgggccgggagcgccggccgggccgggctgggaatcacctcctcaacctccagcccaacctccagcccggaatcgagagcaatggcgctcgccaaggccaaggagatcgttgcctccgctcccctcgtcgtcttcagcaaaacttcctgccctttctgcgtccgtgtgaagcagttgttcgagaagctcggagcaagctacaaggccattgagttggataaggaaagtgatggagctgagctccagaatgccctgaaggagtggactggacagaggactgtcccaaatgtcttcatcaatgggaagcatattggcggctgtgatgatactatggcactgaacaatgatgggaagctggtgcctctgctgactgaggctggagccatcgccggttctgcctcgaagacaaccatcactgcttgacatgtgtgttaccattcccgtgcttaaaaataatgatgctttgcaagtgctgaacttgcagatgctatgtgggagtgactgttcgttccctgtgtaaaactccctagacatcagtcgagtcgtgttgctgtggtggttgtgaaatctacaataatcattgctacaataatgtcgtgttccctagacatcagatgagaaagatgagaagaaataacattataatcttattcgaactatcatctgtaagcttcttttgatacaatatttttatttatagattttaaaaacataagtaagacaaaaaaaaaaaaaaaaaaagacccctaaattcgtggctgggaaaaaaaaaaaaa

SEQ ID NO: 127830 - DNA, 495 bp, Zea mays
  Clone ID: MRT4577_48050C.1
aaacggttaccggatgaatgacttgctgctggagatgactccctgagagaccaactcttgtaatattctgagctcacattgcatgaatgaacacaactgtgatgtcagcttgagtgatcttactcttcttctgcatactgcttttgagtgtacttgacccactgaagactatgctttgaatgatgaccatacactttataacactcttcaggctagcttttgtacttaacagcatttcacaaacgcattttcttttataacggttcgcatgcaatggcatgggaagagatttgcacccagctggcacaaatgctatgagggatgttgacacatttcttacactgatattagtatacacatctgtcaataccatggcatgcagtaccatcactaacgatactctttctagcaaacggcataacaattggaatgtacctagccggactactagattgtgcaggcacgaatgcactcttcatgacataatagaacaca

SEQ ID NO: 127831 - DNA, 282 bp, Zea mays
  Clone ID: MRT4577_48051C.1
gacccacgcctcacgcgacaacaaccaaatctaattctccatacactctatttattcatacacattgccaccctcgccgtcttagtgcaaaaaaagagccatcccaccctaaatctacatccacgacccgagccacgcaccgaagaagacaacaaccccctcgggaatcaagctaacccccccgacgcacgagacctcgcaagacaagacccagaaggccaccttcccccgctatgattactacatgcaggtctattaccaccgcttgatccttatctaccc

SEQ ID NO: 127832 - DNA, 394 bp, Zea mays
  Clone ID: MRT4577_48052C.1
cgcgccctcttcttttttttttttttttttttttttttttttttttttttttttttttttgggaaaggaacaggaccttcccttttgcaaccatacaaaaattttaagaaacacgtttgaccataggggttttattttcaattttgagctaaatagcaaacaaatccggaaacctttttcgttgaaaattcggggctagggcatgctaattttattcgataaaccattttttttaaagagctttgcaaaataatgttgtcagttggacgtttgaaaaccggatgagatgttctagcacacaaatacacactggggatctttacccaaaaaaggatttgtagcaaatccaaggggagggctttgactgaaccaacgtggaaagactttggggcct

SEQ ID NO: 127833 - DNA, 262 bp, Zea mays
  Clone ID: MRT4577_48053C.1
ccgtgtggttcgttcttccaggcctggcactactccacatttggttctggaggaaagagtggcaaggtgcgatggtcatctggatggtagcacggcccaacccgagccactgctcgtgatggcaaaccgccagcggtccttggccggcgtacagttttactcggctaaaaccggcccccttggtgtattaccagattaccaacaaccttcgacgcagccccagaattcacatcccaaccgtgtgtaaaggttgtctgatccc

SEQ ID NO: 127834 - DNA, 122 bp, Zea mays
  Clone ID: MRT4577_48054C.1
gcggggatcacagatcaccacacctcgctgactgcattggactctgatcttgaagtcaagccattctcactcactccgattagctagcctattatccttatgggcaaggaccatggatcggc

SEQ ID NO: 127835 - DNA, 648 bp, Zea mays
  Clone ID: MRT4577_48055C.1
cgggaacacctaacgtatttcttgccatacaccgaatactttgaaattgagttgacatatttaatacttcactagtagtttgaatttgacgtgtcatgctcgtcatgaaaatcaagatcaggaactaaactatgcaacctattgaatctttattagtgaattattgattaattgtctaaacatggttgaagctgacacttggttgtaacctgtgcgatcgaataatttggaaactgatttgatgaaaattcgcgaaacggcatttatctgagttggttagatgttctgagtagcactcctgagttcgaattctagtgggtgcgaatttcaggttgaggctaaaaaaggtcactcgctggttcccctagttgtgtgcatatcagatgaactgacctatggagagtggatccttgtgatagcctgggagggctcaaagcatgagtaaagatccgatctataaggggtggaccctcatgctgcacggggggctagctttcgtgacctttctcggtcggggcttcaattgaacttaatataattactgtggaggactggaggcaatcttttccctactggtcgatttttttttttgtttaatgaaaattcagtttgagaatgaaaccgacagcaacggaattcgagctcgga

SEQ ID NO: 127836 - DNA, 148 bp, Zea mays
  Clone ID: MRT4577_48056C.1
acaacgcctacggcagcaagaacgcatctgccttgagatgatactggctgtaaccaactagatcttggctgaggacactgtccaatagagtcatctacaagtatgaggtgaccatggaggcatatccatggaaggcaaatgacaggct

SEQ ID NO: 127837 - DNA, 410 bp, Zea mays
  Clone ID: MRT4577_48057C.1
aagtacttgttttttattatgcagttgtatcagttacatagttcttggttggggatagatttgtcacaaaggaaagaaacttttgagcaaaactggacaggataaatgctctatcacagaacaaggccgagaaaacgaacacccgaaaggggaaatacttctgacgctggttttccctcagggccttcaaagaaaaaaagagcttggaaaggcgcctgccccaggcgcggtcacttaaaggggcggacgtcgagaggaaacagcttcttcctcttgtacccctcacgcagcgcgcgacaacgggttctgcgaaaagacggccaccacgcgcccgaaggaggtgcgcacaacctggaacatggagagattgttgggagcccgggcggggacccaggctaccggacgcgggg

SEQ ID NO: 127838 - DNA, 439 bp, Zea mays
  Clone ID: MRT4577_48058C.1
aattcggcacgaggcttagctctgcctcaggagtctgctcactggcaaaatatgcacgtcctgaaaaaggccctattcatgagcttgatggtttaaatctcatggaagatagagctggagcatctcactaatttattgtcttctgcaccagcagagataaaatgttgttggaagcatatgcttttgtcgtgctttcaactcctccagcctagttatacggacgttacataggacatctcatttatattgatgttacaacactagaacgaaataaatactgcattaccggaagctccaaatttttttatgttaacagtaacaaaggaagtatattcgactctaaacctacaaaacatggactggatgccagcactctcataggcctactacagaagatcagtaccagatttaagaaaggttctcgtgaactctagcatcg

SEQ ID NO: 127839 - DNA, 964 bp, Zea mays
  unsure (1)..(964): unsure at all n locations
  Clone ID: MRT4577_48059C.1
cacgggcatcacgtacacaagcatgttcgaggcgcagctggactcggtgtactcgacgatgaagaagctcgggttcgagcacgtggagatcgcggtgggcgagaccgggtggccgaccaaggcggagtacgggcagatcggcgtgagcaccgccgaggcggcggagtacaaccggtacctcatcggcgaggccagcggcgggtcgggcacgccgctcatgccgaagcgcacgttcgagacgtacatcttcgcgctcttcaacgagaacctcaagcccggccccgtcgccgagcgcaacttcggccggcacgaggccaacctcacgccggtgtacgacgtcggcctcatgaaagacggggtgaagacagcggccacgccggcgccggctccggatgaatccaaggctgctcagagtgccgtcaagaaagacgacgtggaggcggccgcggcacctgaagagaccgccgcatccgcatcggcgcctgggccgtcgtctgtggacgtcgaagcttcatccaaggccaccggaccatcgccgtcagaggcgccatcgcagagtggttcgaccggcgaagacaagacgccggaaaaggaggagggaggaggagacgctccgccaccggcggcatcggccagcgggccgcccgacgaggcgtcggagacagcagcaaaggacgtcgatgctgctggaggcggcaaaacgccggcgccagcgggagcagcgtctcagggcaacaacctccgagtccccgtctcttgcgtgcttacagttgctctgtctctagctctgaccggtggtatctaattaacccatctcttcatttcgtcagccgcgcgccgtatcattgtgacaacatttttttagtagctgagcatgctgtaaaagtaatttggttgacaattgcacattagctggacctatatatttaaagcacgcagatagcatgatgtctgttnnnaaaaa

SEQ ID NO: 127840 - DNA, 1899 bp, Zea mays
  Clone ID: MRT4577_4805C.1
gggcactctggcccatcttgcagtgcacctgcatatcagttgtttcgccctgttactcgttctatgacccgtgggtctgatcctatcgtggcttcacctggtttcaaggcaggaggatctgatagcgcaagcacacaaagaagtatttcatatgcttcttttagcgctcaattagttgcctcacgactgactgccactcgtacccggacccctctaaaagtgacttcatctggttggaagcctcttactcaacctgttgctctgaacgaagagaggaaatgtgcaaaccttacaatcaaccctactgctaagcgttccagagttacttcctccagagctgtcaaagattcaatcaacaattcagcttcaaaagccaactcaagtgttcccagtgacaaaaagtacagaaatgaagataatgtgagcctgggcgatcagtcagatggggccgtcatgccatctcccacaaagaagctgcaaatatgcaaaggcccttcagatgcaccttcaattaggaaatcaactatcagaatcctgggtgttaagggagctgctctaccacccacagggaaatctcaagttgaaactcggaaatgctttgctaatgctacagcagaagtgatttctgctagtacaaacgagatcagtgagccagataatgcagctgccccattgcttgcacagcagttgccaccagacactgcaaagaactccactgtcatcatgcatacccatgaaacaagtaaagtcaatcagttggctgctacatggccaagggcgaactttcaaactgattacaacaagaagccttccaatgtacccataatggctaaccagcccagtgggttcgctggtgcgactgctcccttggtgacaccaaagatggaaatcggaaacatgaaggacagttccaatcctctctcaaatcctgcttacgcaagggcgcttgtaataaagcagcaagagcagctccttcagcaatataaattgggcagttcaccgcagcgacagcatcatggacagcatctctacatcaaagggccagctctgtttgagaatgatgacccgccaccggtcaagccgctgggaacaaggtgccagctctgcaagcttgatgttgctttccggacacaaggggatgctggccgtgatgccaatgctccaccagtcattgcagttttggcatgccaccatgtgttccacagcaggtgcattgaatctgtttacgggctcgctgagcctgctgagtgccttgcctgcctggagtccggtgcagcgcactgattgctaaccagatacaccaggtataggataaagtttcctcttatattgcgtatagagagggtgcagtatcatctccattgatacaagtttccgatggtataacggtgcaggtcaagagtctgaagtgctccatttctgtgggcctttagatggtgtaagtaggctaccattggagttcaatagggagctgaattatgggacatgtcacatgtctgatatatatgtttatttatttctcctgtcgtggtcataggtaaaatctgcagtctattgacgctgccattttgaataaacctggtgtctgcgctggttggcttggtgttgactgatgacttgtgtgagccccgccccccaagtcgtccaggaagacaagcaacaaaggatgatcggtcgacaacccaacgtccagggatccggacgacagtgagccccggctggaaggcgacgacaacgtaccccgacatcggcggccaagacgtggcaacgttcgcgtaactggacctgagtgggccgtgtaattccctatgttgggctggaccgtcggttagtatatatcccacgacattggcggccaaaacgtggcaacgttcgcgtaaccggacccgagtgggccgt

SEQ ID NO: 127841 - DNA, 423 bp, Zea mays
  unsure (1)..(423): unsure at all n locations
  Clone ID: MRT4577_48060C.1
acacgagtacgagggttttgggatccaggttttgagtgtggttgctgctcgttttgatttggactgatggacgataaacaagcagtgaaactagcctttatttatggctaactttgcctgttgtatgccgcaaatctactttttttgttgggggggggggagaaaaaacacatatnccnnatccctcgccctttccgacggttgtgcagcttgtctggttaatggccgctccctctaagggcgcatttagcgccgctggtgtagggtttccgcgccgcgggaccgcttctcttgccagcggcctcacgcccggtggtttggcttccttcccttcctttctgggcgccttttccggctttgcccgtttcgttcttagtgggcggctccctgttaggttccggtttagtgctttacgggaccttt

SEQ ID NO: 127842 - DNA, 288 bp, Zea mays
  unsure (1)..(288): unsure at all n locations
  Clone ID: MRT4577_48061C.1
agcagtggtaacaacgcagagacgcgggtactagtcctaagttaattacaatgtataaagtttttcaatgctttggttgaagaacacacgccatgtcgtcttctccgatctgtaagttatttggcatagaagagatgtctcctctctttatgtgtaaaaaaaaaaaaaaaaaaaaaaaaaaaaaaaaaaaaaaaaaaaaaaaaaaaaaaaaaaaaaaaaaaaaaaaaaaaaaagaaaaaaagaaaaaaaaaaaaaaaaaaaaaagncctctgggttgttcccactgtt

SEQ ID NO: 127843 - DNA, 434 bp, Zea mays
  Clone ID: MRT4577_48062C.1
tcgcccatgcgtacgtttatccatatccctgctgtttcagatcctcatggatccagtcaagccagggatcgatcatgatgactcggacgagcaccgcttcgaatctaaggcctacgccagagctgttaagagctatccgtagcagggctgtcacacgggcagaagaacagctgcatcgtcatcaagaaccgcccctgcaaaggtgtgcaggtttatacctgaaatactggatagcatggccatgccaaatgccactttgatgcatagacatgttcaacaggaaaaagctagcagatatcggtacttggtcacacaactgcgatatttcgcatgtgaaccgaactgagttccagctgattgatatatcacaggatggatttgggagacgtttttactcaaatggcaacactaatgatgatcttagactcccaact

SEQ ID NO: 127844 - DNA, 338 bp, Zea mays
  Clone ID: MRT4577_48063C.1
ggcagtataacagtagttttgatggagacccacactaacggtttttgcgttggccgggggagctctgtccacgaacccaaggcgatatactgtgtagaaggcccgtccacctaacgcacactgtttaaaacgcaagagtcactggacacacttagtaacttaggatctacgaaaaggtcccagcgccggctccggtgctaaagaagactaaggaactggatacgaggggaaacctgggaataccaagcggcggtataagacgcccaagcttggaactgttgcccaaagtttaccgagaccaaccggcctagaccgggctccatcagctccgagggtgt

SEQ ID NO: 127845 - DNA, 1823 bp, Zea mays
  Clone ID: MRT4577_48064C.1
aacgacaaaaatgacaggactgttgtattcatctcatgaagtgtacatatatatacatagtgaagggacaccacaacgggtcgcaccccttggaattagatcacataaaatattttctaacaggtatcagccgctcgtaggcgctgccgcgtcggacgggtgtagatagcggccgacccggcgccgcggcgcgccccgcgtctatccccccaccacgtttcgtggcgctgaagcgctgctgccctcctgccgtgctgagtcagggttgatgagggttacaacttacaacccccaacggcttctcgtggccactcgcttttcacgcaagacggcagaacctgcacccccgtcccccgccggctcgtgtcgtggtgggtggccacccctcctccgctccgctccatttgggcggaaaccgaatcactcgggtcagtggccacttgaccccctgagctttccttccactttgcaggctcgagatcaccggtcacaaacggcagtggtcgtcgtatcgtaccatggtaatcatgggatcactatgaacggacccgacggaccggcgagagttgtgcggcaaaaggggtcgactcatcgtccatggtgtggttcggccggacgttaaccgacccagtgaagcgcgcgtcgttgtcgctgtagatccgatccggtgcgttgacgatgccagtagtagtatgtactgtagtagctaggtcaactcgggtagtgttatccccaacccttttgccacgtcaggcccaggccaggggagattaccaggggctctctccgccttcccagccagcctgggatgctggtgccgctccccgtccacgcacgccaaaaaaaaagtaaattaagttacgaggaaacatacatacggactctacagcaggattaacgaaagcgagagtggaggggccagcatagcaacgccaacgatggagcaaaagcggcgaagggataaggcccccccgagtggggtcctgtcgcaattctttaatcggacccatcgtgtttccacgtggcggtccaaccctctccgggcgagaagatcggcaagatgacttgcgcggagacgcgcaacgagacccggccggtccgcctccgcccccgacgccgttatatacacgcccctgtctcccccctcgcctggttcgttgccgcacccgctgcctgccgtagcccgtagtgctgctcccggccctccctctaattgctcttgccgctttatgtatttgccgcgcgcggcgacagagaatatacacgagtatatacagtagccgccgccggtggagtctctatctggcagccggccggtcggtcggtactctgctctagaagctagagagatactgtactactctgcaggctagctagctagctagctagaggtagaagaggccggcccggcccggcccgattgaagaataacatagagctgtctgctgctgagcgacgacggcgatggtgctctacttcaaggcgcgtccggacgccggcgactacaccatctacatgggcgccgacaagaacgagaacgaggagctcatcaaatacggcctccccgaggacgtctggtacgtacgtacgtcgtcgctagctgctgctacctcttacttcctcgcgacgacgacgacgacgacgacatgccgcatgcgattcagtggtgaattgaatcatggcgaggcgattcgatggtgggttgggttccgatcgaccgcgacatgcgcgcgtctcggtctgccgctacacgtagaggcagcttagcattgcgcatgccgcacgcatagaggacggcagatggagggacagagacctacgac

SEQ ID NO: 127846 - DNA, 928 bp, Zea mays
  Clone ID: MRT4577_48065C.1
aacccgaagcagcaggagctcccctgaccctgctccgcctccgatcaaggaaaaggaagatgagctactacggccagcagccccccgtcggcgtcccgccgcagcaaggctacccggggaaggacggctacccgtcagcggggtacccgccggccggctaccccccgccggcgcagggctacccaccgcagggctacccgcagcagggctacccgccgcagtacgcgcagccgcctccacagcagcagcagagcagcgggccttccttcatggaaggatggtatgttcttcatcctccccgttccctccactcatgtgccgctcttcgaaatttcctcgccgtattagatcaaaagtagtcggggctaaccggccagatccgtccggcgccggcggccgccgtgctggtgcgcgccttggccgctgtagcgtgggtggggtcttgactcgacgcgtgaaccacccttggaaaagggagccgccgcccaccgtgggtcgcctggctttgccgtggcgacgtgtcggttgctacacgcaagcttggctgccctccgcggccgtccgatctgagactggcggtgctgattgcgagctcccgcggtcacatttttctgctgccgttctgcatgcgttcggttcggtggagatagctatccaacggctgggttgctgccagttgcccagttcctttgtttttttgggtaggtttggttgaatggatgataatacttctgttgacgcgctaataccagtgagatagatgacgccgtagcacccactttagatttaacatatgaccacaattggagatcggaatattattgcaattgatggctaggcgtttggaagaagcgtgttaaagcccccccgcttccgcagcttcggcgctgcacggcgccgccgcgtattctggaacgggaatatatgc

SEQ ID NO: 127847 - DNA, 1875 bp, Zea mays
  unsure (1)..(1875): unsure at all n locations
  Clone ID: MRT4577_48066C.1
tgggtaccctcggagccggccgggnattatgatatagttgttaagataggagagttgatggtaacaacactaactgaatctatacagcagcaatgcattcaaattatgctacaattttttctgaactatccactttctgagaagcgcttacagcaacatattgtcgttatgcgggcaaacttaagttatgaacatccttcaggaagagaagcagtgcttgaaatgctccatgacattcttaccagatttccccagaggattattgatgagcagggtcaaaccttttttcttcatcttgtagttgctctagccaatgaacagcatcagaatgtgtcttcaatgatccttagagctattcaaaagctgttaggacgcattggtggtcagggaaagagttacatttatgagtattcactttcgtggtacactggtgagaagaaaagtttgtggagtgcttcagctcaggttattggtttacttgttggcgaccacacattacaaatgggcaagcaccttaaaagtattctggctgttgttaagaaaataatggaatcatctattattgcttctggagctatacaattaggtttatctgatgaagctgtcctgccattgtggaaagagacttactactctgttgccatgatggagaggttacttcttcgctttccggagttgtattttgagcaaaacatggaggacatatggataatattatgcaagttgttgatccatcctcattcgatgttgcgtagtatttcaagctctctggtagcatcatattttgctacagcggagaagaggaaacatgaacagaaattggatgccccatcatggttgcttgttcaaccgagcaggctattcataatagctgtttccttgttgaagcaattgaggagtgaactgagtgatactacggcaaataatctgattgtacagaatcttgcatactcagtctgcaacttgcatatgttgattaggcaatcgacctccacacatcagttttggtctagcattagttctgatcgtggtgctttccttgagggttttgaattgcttggttcaagaaaagcaaaaaatatatttctcctttgtacttcaacatctagtgatgtatctggatctagcctcgacaccaacgaagagcctacatctttgttagtttcgtcaatcctaaagaagatgggaagaattgcaatgcaaatgcaggatacacagataaagaacgtgttcaattgcttcaatatgatttcatcagctcttggtcctgatgaatcactaacctatgctgatcacctcttggccccattgtataaagtttctgaaggatttgctgggaaagttgttagtgatgaagtgaagcaactggcccagggggtccagaacaagttacgtgacctgattggttccgagaaatttgttgaagtctacaagagcgttcggatgggcctgaaacagaagcgggacggtagaaagcaggcacagaagattgttgcagccgtggacccagaacgcaatgccaagcgaaagcaacgaatggcagccaagcaccgggaacacaagaggcgaaagataatggcgatgaagattggcaggtggatgagatagcttggtatttaggctctgcggaattcggtgaatcatataattgtagaggataatttttcgtgctacaagtgctggcataaaattatgtttctgttttatatgctgtctcactgacttactgcccgacgtaattttactgttgagttaccgaaccataccgtaagtaaaaattaagaggcatatgcaatgaagacagagaattgattgaataaaaaaaataaaaaaaaaaaaaaaaaaaaaaaaaaaaaaaaaaacacccccaacaac

SEQ ID NO: 127848 - DNA, 538 bp, Zea mays
  Clone ID: MRT4577_48067C.1
tcaatttggtgataacacacatcatcttaccggtgcattgcatcttcgttacagctataaagcggttgctactaacaacttaacacacgcatatcatatatattgcagtacaactgacggttacgttgttcacgggtgatcggccggcaggctggcggcggcgtggaccacgtaaccgcggagcgagggcgtccgggcgggcagcggctgctggcgccgccggctccgcacccgccggcgcgcgacgtggcggcgcacccggggggtgacgtcctcggcggccttgatcatggcgaagaagagcaggcggtagacgacgaccatgcagagcagcacggccaggtcgagccacttggaccgccccgcgtccatctggaacacgttctccaggatgaactcgccggggatcttgctgggcagcacgtcgtcctgctggccgtcgaacagcaggcccttgaggtcgttctggtactggccccgcagcgcccagtagtggaagctgatgtaggacatggggtacctccagaagggcttgggg

SEQ ID NO: 127849 - DNA, 145 bp, Zea mays
  Clone ID: MRT4577_48068C.1
cggacgcgtggcagcagccaaaggacaagacaagagacacaacgaaaggagaggatccaagagaaagatcgaggagagaggagccgtcgcttttggacttgcaccgtcgtgatctgtcacgcggcgacatgaggatccagccagc

SEQ ID NO: 127850 - DNA, 432 bp, Zea mays
  Clone ID: MRT4577_48069C.1
cacccgtccgggcacgctccacgaccttctctacgactgcccattttaccgttttccctcacgcgccgacctcggggtcaagcgccgtcttcctatcgaggccggcgtccatcgcgacgaggaaatcaatgagcctcttgagccacgactcgccgcttgctagcctgacaaccccgcccgactcgggggtctttactcgcctatcatccgcctcgtcgccgcctagtacgaccctctacgtgactccgcccccttactgtgcctcgatcgctcccgtaacacgcacccagtctaccattacgagcttaaggaccgtggccgctgccctcatctacaactcgacgagacgcggttcgactttcctaccaggtcctacctcgaaagcaagacggaagagcctggccgagtcaaggatgtgcttcagcgactgct

SEQ ID NO: 127851 - DNA, 264 bp, Zea mays
  unsure (1)..(264): unsure at all n locations
  Clone ID: MRT4577_4806C.1
gaagccgcgaccaagctcaggatcctctagagcgagncgccttttttttttgctgtcgtctttctcttttctttttgtctttacttgctcgtctgctagatcgctgttatctaggaagtccgaagaagcacggaaccccagggcgcttgctaggactcgcagggggcaagaacctgagaacgagtactgaacccactagaactattcagcaatcggcctctagctcgatatgtgtaccaatcgatagggtcggtgggtcggcca

SEQ ID NO: 127852 - DNA, 192 bp, Zea mays
  Clone ID: MRT4577_48070C.1
agacgatggggatgcttaaaatccattacaatcacttgttctgcatacataaagggtagacccaaactatctgggctttcaaaaaaagaaaaagacctattcttttttttgcactactataattttccttaacatggccaattcagaggggccgggtgttaacaccccccaaaaaaaaaaaaaaccgaccct

SEQ ID NO: 127853 - DNA, 265 bp, Zea mays
  Clone ID: MRT4577_48071C.1
ctttctgctacaccatatctagctgagagaaatggtgacaaaccttccagacagctgacaccacccaaacaccgtgaatatagtggccttcggaggaaggatgaaaattctactaagccatccatgacacctgttaaaaatgtgcaaagtgtcaagaaaattagtggaaaaccaaaagctgagggtttcaaaggtgtaaatattctcagaatgtctcgcattgctaaattaaatttgcaaagggaaagggacaaggagaactaca

SEQ ID NO: 127854 - DNA, 468 bp, Zea mays
  unsure (1)..(468): unsure at all n locations
  Clone ID: MRT4577_48072C.1
agccacgcggcaaggcgcggccacggccgacgcagacgcggcaagaacggcggacgggcgcaccggcgccagggggacaaaccgcccgaccaggaacccggccagcaaggacgagggagggaacccccgccccgccaggaccaggcggcgcccacaagacggggccagcaagggcacccacgccaggaagcgcgggagcccaggccacgccaggagggcccgccaagggncaggagcgaggccgaagggcacccccaagacgaccaccggaacagagagccagagccaaacggacaaggaggcgaagggggcaggcacggcccaccagagcacgaggagggaccgggcaggggagaccggcccggaaaggcccgcggagcacccgacgaacaagcaggggcggagcccgacccaaagcagggggaaggacagagggcacagcaaagaacgccgcggccgaggccagaa

SEQ ID NO: 127855 - DNA, 686 bp, Zea mays
  Clone ID: MRT4577_48073C.1
gtacctcgaggccggccgggccgggtttccctacgacgtgcccgtaccgaagtcttttattgccgtctcacttttgcgtgagcccggaacagagagtcgagacatcagcctcatgatctgatgtctccccaatatcgaagcaagattccacatgccgagctgaccttcattaagaaggaggagctccacaatatagcctaggacttccacttgaaggaggacgggtagctccactccaaggaccaacaatagcacaaggtatgcttctcccaaaactatcaaggtaaatgatcaccactgagcacggtgacaagtccgatactgacgaggagaagaaggaccataactagaacgctatgaataatacggcgagagccaccaccactactgcgtatacagtaacaaatccagcctccttcactgatatctggagtcgcagcacagaagctacacatgtatgcttgctgaataggagaatgcctaccagctgatgctgatgtagatgtgtcactgtgcgtcatgaatgtatcgtgctattatcatcgacgtgtgcccagaataacggtctcttctgcatgtgattgtctgctaaaactgcaatcagggccctagacacctcttattccatcttttggacactgtttcgagggctaaatgctcccttgccacaagctggaacatatctg

SEQ ID NO: 127856 - DNA, 397 bp, Zea mays
  unsure (1)..(397): unsure at all n locations
  Clone ID: MRT4577_48074C.1
cgccatatcttcacggatccactgcgagcacccaagccgagggnaagggtgaggagcgtatggcgcgcggncgtggtgtcggcgaagggcgtgcgcggtcgcgggccaagaagaaggggntcggtttcctntcacgtatcgacttgcaccatagccagtggaggaccaagatcatggnnaggtcgccgtggcttcganaagttccntgcagggagcgcattcaaggtcgccggcgggcaagggctggcaancctcggcngacttcccgtcaccattctcttcgcgagaagaccaagtgtcacctgtcactctcttgacggacctcttctccaagaggtaccttgaagtacttngaccaagnaagtactttgaagaaagcacaacgttgcggggattg

SEQ ID NO: 127857 - DNA, 371 bp, Zea mays
  Clone ID: MRT4577_48075C.1
ttcagactttcgggggggaaagggacgccggctgatgacgattgtctgggatcgctcacaaacccgttgtgctgaacccttacacctggatagaccatctggtatccatgatctggcttggtaagatcctgcccgcgcggtgactgtctgcaataagagccgtggttggccgtcattaacacgggcgctaccgcgccatttctcccttgggtttgcatggccaacccgtccaggtgcttccactgtctggcgacagacaagcgcctatcgaccgtaacgaccaaacaccgttacgcgctcaccatggacgtcactcgcggggacaaacggaactctagagagttcatggccgccgacaccccagacgtgct

SEQ ID NO: 127858 - DNA, 435 bp, Zea mays
  Clone ID: MRT4577_48076C.1
agaaatacaacgggcatataatattgatggaaacattaaaaagggtaaaggatacagtttagggcccacattcgctggaaactcaagcactcaattgcggggggggaggagcggtatctaaatatggctccaacgtaccatatcctttaaaattacagatctgtaccatactctcattcatacagaggaaacacgtataactcaattataactaattccgaacatgtacagagaggcaccagttatggataaaggtcttcaccagagtatctgaccaattgccgactttgcgattcatatattgagaaccattcctttacaaaaatccctagccttaaactaaatgctgcgctctcctaagaattgtactgcctgacgacctcaaactggaatactgtagctttgatgatatacaacatattggacaagaagaac

SEQ ID NO: 127859 - DNA, 630 bp, Zea mays
  unsure (1)..(630): unsure at all n locations
  Clone ID: MRT4577_48077C.1
ctttncctggggggaagcaggatcgatgaagcctccgtcttctcctggatgcacctcgctcttcctcctcccttgcatcctcctggctgcagtcatgtacctggtcctcttccccgacaacttcaggctcccggccgggatgttcgggtcctctacgtcgtcgtcatgcaacgacaacaacggcgcgtcggcggtcggccgtctcgccgccggaggctctcctcctacggatgaggcggtggacctgcggctgttgatgggcatcgtgaccaccccaagcacgtacgagcggcgcgcgctcctgcggctggcctactccctgcagccgcggcccgtgcgcgcggtggtggacgtgcgcttcgtcatgtgccgcatcgagcgggaggaggaccgcatcctggtggcgctggagatcatcgcgcacggcgacgtggtggtgctcaactgcacggagaacatgaacgacggcaagacgtacgcctacttctcggccgtgccggggctgttcgccggcgacggggagcggtacgactacgtgggcaagaccgacgacgacacctactaccgggtggcggcgctggcggagtccctgcgcgggnaggcgcggcgggacccgtgccagggcttcct

SEQ ID NO: 127860 - DNA, 326 bp, Zea mays
  Clone ID: MRT4577_48078C.1
aatttctcgaccgacgcgttcactattccgctgccggccttttttttatatccatgttaggtttttagcaccccaatggtccgtggggtttttttagccaggccgaacgacactactaagcggacctacttaaactacattcctaacagtcggagtgctgaattcttagctgacgacttaaatcgcgtcggggcattgtaagtgacatagtgatcttgctgtcacgtttcaatgagattcatccctgtgtcgtacggatttgtcataaaaaataaagaaatttgcaataaaaaattattattataaacactattttaaaattattt

SEQ ID NO: 127861 - DNA, 1543 bp, Zea mays
  unsure (1)..(1543): unsure at all n locations
  Clone ID: MRT4577_48079C.1
nacttgtagcatttccttccgctgcgaacacccaaacggcagctttctactaggggaagagaaacgttttcttgtctcaacgatcgatgcgtcgaccgcacgagcagctgcctagattggcgtcaggtctcgctctactggcctgcctcgccgtgctcgctcgttctcgcgttgccggcgctggtggcatgccggcgaccttcatcttcggcgactcgctcgtggacgccggcaacaacaactacatcgtctccctgtcgaaggccaacttccccccgaacggcatcgacttcttgggccaccagcccaccggccggtacacgaacggccggaccatcgtcgacattctagggcaagagatgggactgggagggttcgtgccgccgtacatggccccggagaccacgggcgacgccgtgatgagaggcgtcaactacgcgtccggcggcggagggatcctcaacgaaaccggcagtatcttcggtgggcgcctgaatctggacgcccagatcgacaactacgcgaacagccgccacgacctgatggcgcggcacggggaggtggaagcggtgagcctgctgcggggcgcgctcttctcggtcaccataggctccaacgacttcatcaacaactacctcacgcccatcttctccgtgccggagcgcgccacgacgccgccggtcgccttcatcagcgccatgatcgccaagtaccgccaacagctcaccaggctgtacctcctggatgcccgcaagatcgtggtggcgaacgtggggccgatcggctgcatcccgtaccagcgcgagacgaacccgtcggccggcacggcctgcgccgagttcccgaaccggctggcgcgggcattcaaccggcggctcagggccctggtggacgagctgagcgccgccctccccggctcgcgcttcgtctacgccgacgtctaccgcatcttctccgacatcatcgccaactacggatcccacgggttcgaggtggcggactcggcgtgctgctacgtcggcgggcggttcggcgggctgctgccgtgcgggccgacgtcgctgtactgcgcggacaggtcaaagtatgtgttctgggacccctaccaccccagcgaggcggccaacgcgctcatcgcccgccggatcctcgacggcggacccatggacatctcgccggtcaacgtacgccagctcatcgtcacttgagttcaaccgttggatcaccagccggtgctacggctcagcgctacatattgatttgcattcactttttccgaaaagagattagtttgccttttttcaacaaaaaaaagagatcagtttggggtgattcaaactccggtgtaacatcatttttcgtgtttagatagctagtagtaggcagtagcacagtatcttatctcgtgcgcgttgttctatttttatctctgtgccgtgcgttctagttcaccatttgaactcttgagacgtgaacttatgaaatgttttaggggttgtttggatacatcaactaattttaggggtgtttgttttctagggac

SEQ ID NO: 127862 - DNA, 427 bp, Zea mays
  Clone ID: MRT4577_4807C.1
cacaaccggacccgacccgacgccccgaggcgagggcgagggcgagcggtcagccggccggggcggggaccaggggggatcccctcggcggcgtcggcgtcggcggccatgggcgcggcctccgcggcgatgtgggccgggctggtcctggtggtgttattggccgcatcgggcccggcggcggcggggctgccgaggttcgccgaggcgcccgagtacaggaacggggacgggtgcccggccccggtgacgggcgcgggggtctgcgacccgggcctggtgcacatcgccatgacgctcgacgcgcactacctcaggggctccatggcggccatctactcgctgctcaagcacgcctcctgcccggagtccatcttcttccacttcctcgccgcggagggcggcggcgcgccggccgtggccgagc

SEQ ID NO: 127863 - DNA, 354 bp, Zea mays
  unsure (1)..(354): unsure at all n locations
  Clone ID: MRT4577_48080C.1
aaacgaacggggggacacagtttttatttcgacaatgcagggctacatatttttatggaccctgaactgaacacaactatacaagtacccgtgcctagtgatacacccaccatgctactaaagttgcacatgtttggaactcgcatgtctttgtttattatgggcaaggcaacacatagagactgactgacagacacggactcgttcgacacaagagctcgcgcttcggtgatactcgggcatgccatgcagaaaatccggtctggaaaactcaccgccgctaatggcagggttgtaatctccgcacttgaagccaacaggggcggtcggcaaggttgcaancgtttggggatg

SEQ ID NO: 127864 - DNA, 366 bp, Zea mays
  Clone ID: MRT4577_48081C.1
ctggtgcctgagcttgggaaattggagcatcttcagtatttgtaagttcttacacaaggacaggcctgggtttgagggagcttggacgtccaaccctttgatctttgacaactcttcaagtatgtgatatgttttcccttgatactgtgccctggtaggtgtgacactgccttgctactgaaccaggaaaacctgtaggtgaaacctgggatcaggagaacccagtccaaaggtcaaacagagtcagtgttcacgacaggttcagcatctgggtcctatgttatccttcagtttgagaaacctgactctgatctgatgacaatttgaaggaacaatcaggctcaacttagagaatacacaccccct

SEQ ID NO: 127865 - DNA, 534 bp, Zea mays
  Clone ID: MRT4577_48082C.1
ggaaaaaaaatccggccccccccccaaaaaaaaggggggtaaaaaaaaggggggcttgaaacaaaaagggaaccctaattctggtaaaaaaaaaatctgcttttttttggacccaaacccccccccccctttaccaattttggcgaactggaaaatttccctgggggggaaaaaaaccccaatgccccgtttttttttgaaaacacccccttccctttcggggggcccaaaaatttccccccaatggggaaatccctggacggttttttccaattttaaaaaaaaaaaaacctgaatttaacgggcttaaagggccccaaaccttttaaaatttgggggcccctaaaaaaaggggggggatggggcccccaccccccttgggggggttttgggggacaaacccccccccattttaagaaaaaaactttccttggcaaataaaaggggggaaaaggggaatacttgtcccccccctggggccctaaaggcccccctttagggggaatttggtataacccattccgaagggggggg

SEQ ID NO: 127866 - DNA, 191 bp, Zea mays
  unsure (1)..(191): unsure at all n locations
  Clone ID: MRT4577_48083C.1
aaccgcnaggggcagcgcgccgagggccagaacaagcccgaaaacaaacaagcccgcaccgcggagaaccaccccgcaaggcggcgacaaacacgaagccacaaggccggcanggccaannccanncaccangcccgcgacgngaacaagcagcggcacancaaggnnggcaggcaaaaagacaacgnccc

SEQ ID NO: 127867 - DNA, 134 bp, Zea mays
  Clone ID: MRT4577_48084C.1
cctacctaactaactttattaggggtgggctttcctgccccttttccgtcctgaatacctgtcccgccctctggctcacttaatgggggaaggcgcgtttaaaaggcgccctttggggattggggtttcttccc

SEQ ID NO: 127868 - DNA, 1007 bp, Zea mays
  unsure (1)..(1007): unsure at all n locations
  Clone ID: MRT4577_48085C.1
ctagttctaggagcatgcataggtcancctgaacanaactacagcaacagaggctttaatccacgccagcggcagtcaagcagagcatcacgttcacgttggtacagcaattcagacgattactggtaaagaagccattacatatggagtgggcatgtggtgcgaagcaacttttgcatgtgtggagcaaaaggcctccttgcaccaagatggcacctgcctttctgggtttttttaggtgccggtgctgacgcaccagccttcgcagtctcagctttcgtgtctgtttgctgtgtttcttttccagagggtgaaaatattaggattgatcaactggggatctggtatgattggttgacactaatagtgttgtgacttgattagcacagaaaatacgtgggattaggaagtggtacatcaaattatcttttgttggcctggtgatttctgaacactgactgcttgggagtggctggcatgatggtattcactcttgaggagttgaacaccgagaacaacgtcgaaagttaggagcaaggataaagatgccggttcctcgaatatctgcaggcactcttttgctggatgcatggctactgtttagcacgggcagtttgcagcagatcagctggaagaaaagagacatgctcttctgtttggcgcgtgcaattctgttctgttgcttctgtttaatccaaacgacgtagcgctggaaacagagtgggtacatattatacctgtgtaactgctcaatgtcgggatctcgatttttttatttattcattgttattagattgttagctagcccaatgttgaaaggatcgatgttccttcgaagaaaagaggctcgggttccggtgatattggccaagcgcaggttctgtcatgttgcttatgatgaaatatttggaacgacttaaacccgtgggctgctgcatatgtttttttttgcgtgaacgtttcattgataaacggtatatatacacatattcgaaggccttaagcac

SEQ ID NO: 127869 - DNA, 672 bp, Zea mays
  Clone ID: MRT4577_48086C.1
gcgaacttgcctgcctgaaggcgcgcccggaggagagcagagcaggagacagaggaggagaccaaggagatgccgctgggcaagtactactgcgactactgcgacaaggagttccaggacaccgccgccgcccgcaggcgccacctccagggcgcccagcaccaccgcgcccgcgccctctggtacgactccgtccgccgccaagagtcccacggcggcgcatctcccctcctccagcccgacggcgctatcctcggccagggcgtctgcaaccacttcgtccgcacgggaacatgcaagtttggggatgcgtgcaggtacttccatccgaagccacatgctgtgaacccagcatttgctccgtctgggcctgttccaggagcaatggggcaacagtctaattttcttggaactcaaccaaattttgttggatatcaggcgatggaaggaaattctttctcagggaacatactaaggggccacacttcttggggcaacttacctccatcgctgcaacctccccccgaaggtggctatcctccgcttccttttgtcgactggggttgaactgtcacctgtctgaaatgttgatcatttgggatgctgtatatttgaccggccattgaaatgtgtgaaagaaatttcaccaataacaagtgcttgcttcctgta

SEQ ID NO: 127870 - DNA, 452 bp, Zea mays
  Clone ID: MRT4577_48087C.1
agagcgtaccgcggacgcttagacctcctcaggtgcaaggattttactttttggttaagaattaggttggagacatgcctggagggtgcattcttgttcatgccccaggctcaggtaaaacatttgtgcttataagcttcattcagagcttcacggcaaggtatccatctgcacggccttttactgcgctgcccatagggattctaggtatttggcagacagaatttcatcgatggcaattgcattttataccattgtactatttttactctgtccaggctgaaataagagttcaacagttgcgaatcctcaaatgtgtgaaagacaagatgcctgtactatttcttggatacaagcagttttgcacaatcctcactgatggtcgggtccgctttgccacagcttcatgcccagacaagctgcttaaggttcccaaccttttgatacttgac

SEQ ID NO: 127871 - DNA, 243 bp, Zea mays
  Clone ID: MRT4577_48088C.1
gcaaccttcatacctgcctgctaccactgagcccgaacccaaggctcattaggccaaggattcttctaacgccatctagatcggctactcacgagctggaggatccctcctacatatgcggaggcaatgagaataagagaacatgccatcacgaatctcacagactacctctccacagagaacagaggtgaagacctcacgaaccttttcccccacctcaggctttttttggcattgatcccc

SEQ ID NO: 127872 - DNA, 255 bp, Zea mays
  Clone ID: MRT4577_48089C.1
aacaatgacaagctcaagtgtcaaatctaacgaccagaaactgaacatcagaagaaacagctgaccagcaccagtccctgtcacgatgccgggctcgtgtgactgagcagatccaggctgagcctaggctgcaccgaactcccgagggatagcgcgatccacaccagcttcatgacgacacacgagcgtgcgactacaccattttgtcatagcttcgacaagcttgagaactgtctgaataacctgttttgaatg

SEQ ID NO: 127873 - DNA, 362 bp, Zea mays
  Clone ID: MRT4577_4808C.1
cctcgatgggacttgcgagagtttgatgttcatcgaggcatcttgtcgaaaaaaaaggggggggggaaaaaaaaaggggggagagacaaaataaggggaaccaaatttacgaacaccagcatgccacccgcctggctcttctatcgtggcccctttttttcgtcccctttccttttttttccggctccgtttctggaccccccttgctgtgccccccctgcgttgccccccttttatttccggtttccccattcccctttcgcccgcgggggtttccacctattgcccttcccaacattctccttttccccacttggcgtctccctccttgcccctgtggcccccccccctattctgccctc

SEQ ID NO: 127874 - DNA, 582 bp, Zea mays
  unsure (1)..(582): unsure at all n locations
  Clone ID: MRT4577_48090C.1
atattctctactcgattccgacgccgctgcgcctccgctccgcctgaacgcattgacctccgccacagtgtagcgccaactgatcgatcaccttacactttctctcatggcgctcgtagatgcgcaagcgtacggtgccgccgtggttccttcgaatagggcgatccgcgaggacaggtacggcggcgtccgagctatatgcagctgtcctcgacctgcgcactccccgacatccaccacgtcgtccacgcttgcgacaaaataacgttccagaggaggctgaagaggaaacccatgtagctcatcgagaaactggggaaggccaacaaggatgctcctgcgtgatgataatactgagtcatgtcgacagatctctcactaaccatgatcctcgtccctgataggactgaaagcattgttggagttcacgacgataagatatttctccatgctggatatcaatgctgatatgatctcccgctaccttggctgagatgctccatctcctataagacgtacaagcatggaaagaccatgatcgtgggcgccnactgccgcatgaattattgctctgtgaatgac

SEQ ID NO: 127875 - DNA, 406 bp, Zea mays
  Clone ID: MRT4577_48091C.1
catgacggtaccgacatcttgctctggaagtggtgcgagggcgacaaccagagctggaagatcctgccttggtgaacgaacgaaagatactactagctgccaccctaaaagtccttacgctggctgcggcgatccccagatcaaagaggcagactgcgatgcatcgcgggcttctcgactctcgagcggtgtccgagcaacacagccaaccactgcgaggatagtgttacaacattgctcaacctgatcgcgcgacgaaacgaggatgactgactcaacataagggctctggacataggctgctgcattatgaatcaatgattatgtcttatatctgcactctgaatcaactatgcatgacatctcatattctttctactactgaatgaatgaatcattatagcct

SEQ ID NO: 127876 - DNA, 968 bp, Zea mays
  Clone ID: MRT4577_48092C.1
ggacgaaaggattatagtagtattttgatatattttccgggagcgatcttgatttatgaggattataggagtacactagtaaaatgtatatgtacatgtgttaaaatgagacgtaagaataaatattacaatttaattaagccagaaagtcacgcccataactagcgcgtggtctcttagagagagcgcggcgcgagagcgccaacggcgctccatgctttctagtggtgatcgaattgttcttcatcaaaagtacatatagcctacgacttcatcaaaagtcgtgccatatagaaactccaggtcgcgcaccaccgtcattcatcaggcagtgactcctccatcctctgagcgatcaaacggactgcagcgttggcggccgagaaggggccgtggaagctctccctgtacgacagcttgtccaggtcgcccaccatcctcagcaagatctctcccaggtcagactgccgcgctatcagggattcgcgatacgaccgcgcggcggtgctgctgatgtccacgttggccggctccgggcagtactcgtcgtcgagccacttgcgcagtgtctccctcagccattcagattcctgcgttgctcctgcaggcgtcagccaagaatcgggcaccctcagctcctgcacgcggttgtcccgctccccgtcggcggcgcggagaggccaccggggaggataggcgacccggacggaggccgaggccaggaaacgggtagggttgttggggagagctaggaaaagatgcgccttcgacggagggaaaggataatgggggcggccatggagaagagcagctaaggaggtagaagataacattttttcctcttctcccttcctggcgccgaaaattgccaggacttttcagaggattgcgctctccagcggaaaaatttgtggatttcattgtcccaaatccatagtgtcgtccccggccggcctcgaggtacccaa

SEQ ID NO: 127877 - DNA, 196 bp, Zea mays
  Clone ID: MRT4577_48093C.1
attattttttttttttttttttttaaaaccagggggcatttatgttcaattggtggctctgagcacttattagaacaactctctgctctatgcacttagcactcatgggtctgctctaaaatgaacatcattgatcaatcttatctgagagacacacatcacacactatccctaatcctagatacgctcaataaca

SEQ ID NO: 127878 - DNA, 1067 bp, Zea mays
  unsure (1)..(1067): unsure at all n locations
  Clone ID: MRT4577_48094C.1
cccgggctctgnaacctagctgcgactgcgtgggcatctgggcagcgaggcagatcgagccacgcttcttgtcgcgtgaatcccctcgagagccgccggcggagccatggcgcggtccccagccgcctcctcctcctcctacacggacagcacgggatcctcctccgactcaggctccacctcctcgggaatcgaccgccgccgccgccgccaccgccatcggagcagccgccgcaaggagggcacgtcctcgttcgccctgaaggcgcgcaaggaccggaggtcccgccacaagcgccgccgccacgagcgggagcggcggcggtccgcgtcggacgacgacagctacagcacaagctcttatgacagtgaccgtgaggtgtctggcagatctcggaaacataagaagagcagcagatcaagaaagtttagggagagggagcggagcaaagatagacatcatagacgagacaagagtaaacacaaagagggcctgtttctgggttggctctttgacattggagctgggattggtgaacgggtgacaacatggtggattggcctgctgcttgttctgttggtgggttggttgtgttctattataaatgggggagctttatacagaagaaagagagtgagcatgctgatggccctgtccagctttccaagtttcttggacgggacaaagaaaaggaagaaggtactcaacggagtgcaatctctggtaaaaagataatgatgaagcttgagaagacaaaggaagacaaggcagcagagagcaagcggaacgaactgttgaagtttctgaatgccagttacgattgatgtgttcgaatcgctggcgcggaaagtgcagaatgcccttttttatcgtctttgcactggtgcttttggtgatacttaagttataagcgttttgtttcttgtctataacttggccaccaaagttttgttatgctcaactagcgactgagtgaaggtctacatgcaattgatttgaattctgtgttgccagtcatggatttgcagcttttaaacccatccttttttggattgaaaaaaaaaaa

SEQ ID NO: 127879 - DNA, 700 bp, Zea mays
  Clone ID: MRT4577_48095C.1
ccgggctgaaccgaggctgcgactgcgagggcatcagggcagcgaggcttcttgtcgcgtgaatcccctcgagagccgccggcggagccatggcgcggtccccagctgcctcctcctcctcctacacggatagcacgggatcctcctccgactcaggctccagctcatcggcggtccgcgtccgacgacgacagctacagcacaagctcttatgacagtgaccgtgaggtgtctggcagatctcggaaacataagaagagcagcagatcaagaaagtttagggagagggagcggagcaaagatagacatcatagacgagacaagagtaaacacaaagagagctgggattggtgaacgggtgacaacatggtggattggcctgctgcttgttctgttggtgggttggttgtgttctattataaatgggggagctttatacagaagaaagagagtgagcatgctgatggccctgtccagctttccaagtttcttggacgggacaaagaaaaggaagaaggtactcaacggagtgcaatctctggtaaaaagataatgatgaagcttgagaagacaaaggaagacaaggcagcagagagcaagcgaaacgaactgttgaagtttctgaatgccagttacgattgatgtgttcgaatcgctggcgcagaaagtgcagaatgcccttttttatcgtctttgcact

SEQ ID NO: 127880 - DNA, 420 bp, Zea mays
  Clone ID: MRT4577_48096C.1
taccggtctagcattcccgggccgacccacgcgtcaaatgacatctggtgcacataccaacttcattttgccttggacactattataatggaggatgactgtacaatctttactggatccacagtatcgtgaacagctgcaatcatctacttttgttattttgactggtatttctagtttatgtatcatcacatgtcagcattgccatgtagccacattggaatttattcatatatgaaaatttgaacataggctttcatcacttcttatatcacatggttgattcacttgtaccatcttttgctggttattttctgtactaaccccaatcaagtttacaaggtactgttctttctcataattttttaatttaaatgcagcctgttcaagaagaaacaaagaaggatattacagataaag

SEQ ID NO: 127881 - DNA, 825 bp, Zea mays
  Clone ID: MRT4577_48097C.1
gctcgacacggcccgcgggccgggctcgccgctccctccccgcttcgcgatcccctcccttcctccccctcccccgcggttgccatggcggctacgctcctccgccgggcgctccagctccgccgcgccctcccctctccagcttcctcgcgcgccctcctccccgcggcctccagccgtctcctctccgtcaccgcctccacccagcagaacaccgccggcaccgccatcgacctctccaacgacgagagccgccgccgcctcgtcaacagtctgatgtacaggagcaagcagagggccttcctggagctggacctggtgctcgggacctgggtggagcagcacgtccgctccatggacgaggccaacatccgctccctgcttcagatcctcgacctcgagaacccagacttgtggaaatggcttactggtcaagagcaaccgccagagactgtaaactctaatcctgtatttgctgccattaagtcgaaggtcacggataacctgagcaagcactcttccccagagacccggtcagcgcctggccagccttgggtgagagggtgggatgacaaggacaagaggggtctggatggacccaagtatggaaaccagtgataaggtgcttgaaaccattatcgcagtcttaaaactcagcttgttatcctcggtgtgtatgatgcttgtgtaaataaagcaagtcatggttagtgatgcgctatgatttgtattgtcatttgatttgtgctagtaataaggtttcacttgttcccgttgagggaaacgtgtctgactgtagtgggaatgtgcagccaaagtatctcc

SEQ ID NO: 127882 - DNA, 1001 bp, Zea mays
  Clone ID: MRT4577_48098C.1
aaaaaaaaagcgctcgtggaaaggagacgtctctgaaccgaggctgcgactgcgagggcagcggggcagcgaggcttcttgtcgcgtgaatcccctcgagagccgccggcggagccatggcgcggtccccagccgcctcctcctcctcctacacggatagcacgggatcctcctccgactcaggctccacctcatcgggaatcgaccgccgccgccgccgccaccgccatcggagcagccgccgcaaggagggcacgtcctcgtccgcgctgaaggcgcgcaaggaccggaggtcccgccacaagcgccgccgccacgagcgggagcggcggcggtccgcgtccgacgacgacagctacagcacaagctcttatgacagtgaccgtgaggtgtctggcagatctcggaaacataagaagagcagcagatcaagaaagtttagggagagggagcggagcaaagatagacatcatagacgagacaagagtaaacacaaagagaagaaagagagtgagcatgctgatggccctgtccagctttccaagtttcttggacgggacaaagaaaaggaagaaggtactcaacggagtgcaatctctggtaaaaagataatgatgaagcttgagaagacaaaggaagacaaggcagcagagagcaagcgaaacgaactgttgaagtttctgaatgccagttacgattgatgtgttcgaatcgctggcgcagaaagtgcagaatgccctttttatcgtctttgcactggtgcttttggtgatacttaagttataaacgttttgtttcttgtctataacttggccaccaaagttttgttatgcttaactagtgactgagtgaaggtctacatgtaattgatttgaattctgtgttgccagtcatggatttgcagcttttaaacccatcctttttgtgattgctccttgttgtcaatgtcaaactgtttcactggcgattcattgttcttggcagcttactgccgtggatat

SEQ ID NO: 127883 - DNA, 439 bp, Zea mays
  Clone ID: MRT4577_48099C.1
gattgcacccaagctgaaattcgtagtagatctctgaggaattcacactgggacaagcgagggacacccagcagatcatatctgcgaccgcagaaacaccaatggaattcccacctgacttaagggacagctgccttcactgttattcaattgagcccccaccgagctacacattactataaatactggcactacgaggtttggagcctcgcggtgtttgtactgtagatttgatgcacgggagtcgggggacaaacccctacttccccattccagcacatccttgctggggtagtacttgcgcgccacacctccatgaagacaggcaatccttcttctcccgctagcgctgtctaatggaagccgtcaggtcctcctcgttgttgaccttgtgggaccagctcttgcccgagccattgtggatggcgttcacaatgcc

SEQ ID NO: 127884 - DNA, 151 bp, Zea mays
  Clone ID: MRT4577_4809C.1
tcgtcgcatcccccctcctcatcttcgcagcgcggtctgcggcaatggcgatggcctccacctacgctccgggcggaggcgcgcgggctctcgcgcagggtagatgcagggtccgctgtcccgctgggctgggcttcctcggcccctccaa

SEQ ID NO: 127885 - DNA, 273 bp, Zea mays
  Clone ID: MRT4577_480C.1
aaacgaaaagaacattttcaccattttttgttacaaaaaaattagggcgtgtttagatttccttttttaaactttagggggaaagctcaatttgatttaaactttgggcaaccttaaatttgagcttttgggttcaagggggggctaaaaggctttaaattttttgaagctttaaagtttggggggggccccaaccgcccttgtgagggaaactttaaggggggcttccccttaaaaaattgccaaaaacccatttgttttttgttccaaaag

SEQ ID NO: 127886 - DNA, 176 bp, Zea mays
  Clone ID: MRT4577_48100C.1
gccggccggctcatatacgctgtgtgtaattaatggttcgcaggctgctgttgatgcggctgcttcgttcgtgttgccccgtctgattatgttctgtaacccttggctgtcaacgtactgtgctaaaaaccactggttctgtgtggattgaaaaaaaaaaaaaaaaaaggccccta

SEQ ID NO: 127887 - DNA, 138 bp, Zea mays
  Clone ID: MRT4577_48101C.1
tcgctgtcgcgtgggcaggttgtacttctttctcacgcacgatctaccacttgggggggtcatggacggtaatcatgctgacattcgacatctcgggcatgtggagcgtacattccaacatttggtagcagtacttcc

SEQ ID NO: 127888 - DNA, 386 bp, Zea mays
  Clone ID: MRT4577_48102C.1
tccctcgcgtccggagcctccgttcgctcctcttttctttcctcattccagttcctctcctggggaggtgccgttcgtcgtctccgattctccgtctgtccgtcctcttagtcttgtgcgggatccacagaaggatgagtgaagaggatatgactgctgcttctgctgtgctgccgttgtgggcccctatgctcaatgaaaggatcctctcttctctgtccaggaagtccgttgctgctcatccgtggcatgatcttgagatcggtcctgatgctcctgctgttttcaatgttgttgttgagatcacaaagggaagcaatgtttaatatgagcttgacaagaaaactggactgattaaagttgatcgagtcctatactcatcagtt

SEQ ID NO: 127889 - DNA, 1061 bp, Zea mays
  Clone ID: MRT4577_48103C.1
actaccgcaggccgcagcccagcaccggccgctctacgcctccacgcctccacgccggcacgtcctcgtttctgtccgaggtcatcgcctccgcaacttcgtggccggtgaggtcgcaccaccatggcgtcgctcctagcccggcaggcagcgcaggcgctccgcgcgaggcaaacggcgcagctcgggccggccgcgtcggcgatgcaagggcacctccgtacctacatgaacgcggggattcccaagcggttcaaagaggatgaggagaaagaacagcttgcaaaagatctcgcaaaagattggaatgctgtgtttgaaaggagcatcaatacattgtttttgactgaaatgattaactatccgtttgagaagggtcctctgagcccccgcttccgtggtgagcatgctctcagacgttatgaatctggggaagagcgctgcattgcttgtaaactatgcgaagctatatgcccagcgcaggcaattacaattgaggctgaagaacgtgaagatggcagtcgccgaaccacaagatatgatattgacatgaccaaatgcatttactgtgggttctgtcaagaggcttgcccagtcgatgctattgttgaggggcctaactttgagtttgccactgagacacacgaggaactactgtacgacaaggagaaattgcttgagaatggtgatcgctgggagactgagattgctgagaacttgagatctgagagcctctatcgctgaatctgccttccattatggttgataaactgggttcttccattttccatattttgcataactagctgatgaataagcaaacgatgtatcataacttaggtacgatgtttttgtaccttggcaccatctgtgtgttttgttcattgccttgctaaaggtggcaccagatgttctttgatgggaaaattccttctgtagcactgagctgttttcagtcacaccttattttgtatacaatgaaacagaacgatgtgctcatggcacagtgatttggtgaatgttcacatgcttgttccaaaaaaaaaaaaaaaaaagcggcc

SEQ ID NO: 127890 - DNA, 454 bp, Zea mays
  unsure (1)..(454): unsure at all n locations
  Clone ID: MRT4577_48104C.1
gtacatggacaacgtgtcggcgctgttcaggcagatgctcgaggaggggatcccgccggacacgcgcacgctcaacgtgctcatcaggggctacgcgcagtcgctgcatctcaacgacgctctgcgcctgttccatcagatgcggcccctgtacgggtgcgagccggatgcgttcacgtacagctacctcgtgcacgggctgagcgcgcagggtcgcaccaggaacgcgcgggagctgttcggtgaaatgcgcgggagcggtctcctgccgacggagccagcgtgcaatgcgttcgtaggtgcgctggctatggctggggaggctgcggacgcaaagcggntgatggtggagatggccagggcccgggaggggtgttgatgacatcacaaggagagcattggtggatgagttgccagggcccggaagcgggagatgctgacagactaacgaggg

SEQ ID NO: 127891 - DNA, 1188 bp, Zea mays
  Clone ID: MRT4577_48105C.1
gggtacctcgaggccggccgggccggactaccgcaggccgcagcccagcaccggccgctctacgcctccacgcctccacgccggcacgtcctcgtttctgtccgaggtcatcgcctccgcaacttcgtggccggtgaggtcgcaccaccatggcgtcgctcctagcccggcaggcagcgcaggcgctccgcgcgaggcaaacggcgcagctcgggccggccgcgtcggcgatgcaagggcacctccgtacctacatgaacgcggggattcccaagcggttcaaagaggatgaggagaaagaacagcttgcaaaagatctcgcaaaagattggaatgctgtgtttgaaaggagcatcaatacattgtttttgactgaaatggtccgtggcttgatgctaactctcaagtacttctttgatagaaatgtcacaattaactatccgtttgagaagggtcctctgagcccccgcttccgtggtgagcatgctctcagacgttatgaatctggggaagagcgctgcattgcttgtaaactatgcgaagctatatgcccagcgcaggcaattacaattgaggctgaagaacgtgaagatggcagtcgccgaaccacaagatatgatattgacatgaccaaatgcatttactgtgggttctgtcaagaggcttgcccagtcgatgctattgttgaggggcctaactttgagtttgccactgagacacacgaggaactactgtacgacaaggagaaattgcttgagaatggtgatcgctgggagactgagattgctgagaacttgagatctgagagcctctatcgctgaatctgtcttccattatggttgataaactgggttcttccattttccatattttgctcaactagctgatgaataagcaaacgatgtatcataacttaggtacgatgtttttgtaccttggcaccatctgtgtgttttgttcattgccttgctaaaggtggcaccagatgttctttgatgggaaaattccttctgtagcactgagctgttttcagtcacaccttattttgtatacaatgaaacagaacgctgtgctcatggcacagtgatttggtgaatgttcacatgcttgtttccgactccgttttaaaaaaaaaaaaaaaaaaaaaaaaaaaaaaaaaaaaaaaaaaaaaaaaaaaacccccccccc

SEQ ID NO: 127892 - DNA, 463 bp, Zea mays
  Clone ID: MRT4577_48106C.1
aaaaaaaaagtttaattgatatcgttttgttttttattaataaacaggtttgagtacaagttaaaactgcgagcccaaggtttgaggagaatataacttcttatgggggtaaaaatatattaattagcgtgtgtgttactacaccgatgatgcatattcttatgtcgaaatgaagtgaatatccggcccaagtctgcttggtggagaccccgatggaaacaaggagaagggtacattgtttattgggtggaggattgaggcccaaagcgtaatggccaaaaaagggatcccttgatgatgtggccgtaacgaagcctcggagaggggagcgccgttccaggtgctggatttgaaggttcctgggaagcttacgccgggggctggctgcacttagtcgccaggctgaattaattgtccccacttcttggtctcaggagcaagcccgaggagtatggctgaggat

SEQ ID NO: 127893 - DNA, 317 bp, Zea mays
  Clone ID: MRT4577_48107C.1
tttttagcggaaacggactatcgttatcgggaacgatgtgccatccccggctgtagaagacaaaatgccaacatgcttcaggcaccccttgccctctacactccgggctagcacacacttcgtgagctgccctaaacgggcgggagaggaatagggtacggatgatgcctgcggacacaccgctaaaccttgccaaccacacaactaagctcggttctgatcactctgcatgagccggtgcttttatgcagcgaacgcttcagctgacctggacatgccggggccgtgcacgacgaccaaacaacggtacataaact

SEQ ID NO: 127894 - DNA, 296 bp, Zea mays
  unsure (1)..(296): unsure at all n locations
  Clone ID: MRT4577_48108C.1
gggaatgtnnctttttntttgttgggggccccnttcttcagccccttgctttctttttggnttgctcctgatccgccctcttccttttggcccccgccttgctgggttgttggttgaacgctgctgggtttggcggggggggcggtcgtatggctgccgttgttgccgttgttagcgggtgccggcgtctggcgccgcgtgctggtggtccggcggcctcttgcgttgttgtcttgcggttgctgggctcgcccctgcttgctggctttttggttgttgttgttgctgtttgttgg

SEQ ID NO: 127895 - DNA, 320 bp, Zea mays
  Clone ID: MRT4577_48109C.1
aaaaacaaaaatggttgccccttgtttgaaagttactttattacataggaccggaggatcaaaaaaatggttctggaaatgcctaaaaccagagggaaacccttttttggaaacaatagcccctgtattttaacccattttggatatttgtccattgtgcccgcctggacatgttcttggggaagggctgtttttttacccttttggaggcccccatttccccttgaatgatcccctattctttttcaccccactgggaattggggacccctcccaaattattggggaccattaccccactggaggagatgggtctcccc

SEQ ID NO: 127896 - DNA, 338 bp, Zea mays
  Clone ID: MRT4577_4810C.1
gacaaacacaccaagcgaaacgcgctatccacattctaccatcaatggccaccaacatagtaggcgttcttgcgctttatgccctttgattgttctcaacatatgcgttaatcatcacacagtgctcactggctactagcgccaatatttcacattttctcccaacacctactataatgggctgcgaacatacatgcaagcaagcctacaggatactactagctctagcaagcagcgtcttacagcaacaaaccgccataacgctagaacaatcattggcacatcctatcctacataccatcattgctccacaccatcaagagacagtggcatcactg

SEQ ID NO: 127897 - DNA, 830 bp, Zea mays
  Clone ID: MRT4577_48110C.1
gctagatggcgggacccgagacggacgtcaacgacgcaatgacggcgatggcagcagtcgcatccgtagtggcctccatgcagtcggcgtcctagcgcgagagcgcatcagccatcgtgttgatgcatctgggccagtatttgactatgaagtcgtatccgaacaacatcgatatgatggagatgatccgaccatgaatcattgtagattagtatatcatcaatgaaaactagcatgaacctgtagagaaaggggcacagggcgtcgttcatgaggctttggaatgtcgctggtgcattggtgagcccgaacgccatcaaactcaaagtggctgtgatgagtgaggaacgccgtcttcttaatgtcattcacatgcatgtggacctaatgatagccggagtggaggtcaagcttggtgaaaaatcgagtgtcgtggggctcatcgaggagctcgtcaacgatcgggatggggaagttgtcttttggcgtggcatcattaagggcacgattttcaatgcagaagcaccatgatgagtcatgcttcactaatttaatcgacattgatgagtgcgctcggccacacatgtatccgtgctacggtggcaaatgcaagaacacgccaggagactacgaatgcagctgcccagccggaacaaaaggaaatgcaaaacaagcgccatgcaccgacttgtttcctctgcctgcaaagatatccgtaggtggcataggtggacttttcttaatagcactaatggtattcgtagttcttattcgtaacgagaaaaggaagatggcagaatttttcaaaaagaatggaggccctacattag

SEQ ID NO: 127898 - DNA, 572 bp, Zea mays
  Clone ID: MRT4577_48111C.1
ctctgcccgcactcggcgaaatgctgaccatggaacatttgatgcgctcacgatgtcacgctccgtggatgcaacacacagttatgtcctaccattcccatcatcagaggttgttacaacaccaaaacacgtccaccccaaccccagaatgtcgcaccgctacctcgcatcccctggacatccacacttgccattgcctacttcattagaccattatcgcctgacagcagggtcctcgcaacctactgaatcccactagggactgctaccagatcatcttgaataatatctgacttaccccaaaacctgtcgacgctggcgtagctcccagctaagtgcccgactcaccctctggtcatccagacgctatacacatccctaccctctctatcggattgcaataccgagggagatcatccgtcagaatctgtccgtgctgcgaacgattctccataatcccaccagtacaaatctggatccagacttgagagatgattttattgatgatgtactatgcttactaggacactgacatattcttacagaagaagttgagacgtctcaaaaacgaa

SEQ ID NO: 127899 - DNA, 1062 bp, Zea mays
  Clone ID: MRT4577_48112C.1
ttaaccacttgtgtttgacactaaatcaccaaaatacttagaaatggcccaagggcacatttccctttcaattacatgtgacaatttaatattaccatgtttaagcaactcatctaatattttatcacatttagtaatattaaatgtgaacttaaccttttccttttgtgtcgagtgcgggtgagagcgaacagaaggtttggccttagtgggccaaacaagctcagggacgtgtgacttttttggtttttggggcttaggtggccggttatatttatgtcggccttccgcactaggcggatcagaggtgacttctggtgctccggacggtccgacctgcgcagtcggacggtctgtggatggatcggacggtccggtactatcctcggactgtccggtcacgtcaggcaacacctgtgacccttgtggtgggctctgtgtaactccggactgtccggcgtagggtgccgaacggtctgacggagggctggacggtccgcgattgtgtgcggacggtccgaccgtgctcagagttgactcaccatttagcgaagatggtggtgacggtcgtcctggatatgaggccatcggcataccagaatatggctggggaaacccatttgttgccgatgtgtttggcgcaattgtttcagcgcctaatttatgtgataaaaaattaggcatgcgagtttttcctaatgcatgtgccatcctctctacatcctcagtgatacttttaatccgattatcaaaagaaattttaatagatggaatatcatcagctgacctggcatcacctatcgtggggagctgttgcagcacggctgacatgtactcgacgtttatctccctctcttggacggtcttctggtggcagaccaccctgaagtgcgagaggaaccacttatccgccaccgtgaacacctgctctgtttgtcgctgggcctcctcgtctattttcttcatgtcatcttttaatctttcatgctcagcggccgataaattagtcagccaagtgttgttgtttggagaagcactgttgagatctttagaatcagccat

SEQ ID NO: 127900 - DNA, 561 bp, Zea mays
  Clone ID: MRT4577_48113C.1
agcaaggaaaggggtttttttcctaaaagaaacagttccctacataaaacaaacttggggaaaaaaaatttaaaacattcaacccctcaggaataacccccgttaaaagcaaacaaaagggcaggggccattgtaaatttagctggacatgaaaacataattttccccccccaaaccccattgttggggacaaaaaaacaaaaaaatagctcaagtttacatttcccccatgggagttggatgggagggactggtttccattttttgcataaccaacacaaaattttttgggggaggagtcaaatttttggttggtggggggggcgaaatacggaccccatataatttgcaaagctggtggaaacaccccccccaaaagccctggcaaaacctggataggggcttttgactggggctcctgggccaccataagcaattttataggggcttgaattgtatgaagctcccactgaccctggagggtcctggaatggttttggggccctaaaaggttcactgtaaaacaaaaatgccccaaagtcctatgctggggctgggggg

SEQ ID NO: 127901 - DNA, 207 bp, Zea mays
  Clone ID: MRT4577_48114C.1
cgcccccggccctccaccccacctatccacgcacgcgtggcctacctcgtgtaccacctcaatctcctacggatgtccccgcccttgctcccctgcagatgtacccatatgtcgtggccgacgtgcccacgcgccatcgcccttacaccgttgagcttaccgttccctggatgctcgtaactgacaacacatggcgtgcgcttcatg

SEQ ID NO: 127902 - DNA, 194 bp, Zea mays
  Clone ID: MRT4577_48115C.1
gccggtcagccgcccgctcggagcgccggctccttccctatctgtaccgcctcctccatgggggggcacaaccgctgactacccgtcgcccgggggagccgcttcctccgccacgcctcgccggcgccccgcacccctgaccactacccttaccttcggataccaaactggagcgaaacaccaaaacccactaa

SEQ ID NO: 127903 - DNA, 189 bp, Zea mays
  Clone ID: MRT4577_48116C.1
acatcgctcattgaaggtactatctatataatgaactttcagctgcatacttacttattcagactgatccagcatgtggcaacatcggaagctcacatgctaacagactacacacttcattaccattcccatttatagctctcatacttagaataaccaaacgacaaccacgaaattgccactatatta

SEQ ID NO: 127904 - DNA, 676 bp, Zea mays
  Clone ID: MRT4577_48117C.1
gactttcgttcctcctcgtcccagctacgagatctccctcagaccgagcaaggtaacccaccactgaggaggaactcatagcaccaggaagacgaagaacatgatgtccatccagttcagcgaagatgagacgcacaccttcttcaagttcctcgaggccgccggcgacctcgatgtctcatgcatgaccgcagggtacactaccgataacaaccttgacgtggagcgggctatgggcgacgatgatgacaggatctctgcatgaagttcatcgcgcccgcggtcatgattgatgtgctcgctatcaacatgctcatcgtccgcaccatcatcaatagtcagatcatatcccaacggccaaccctactaccgtttagacggctactgtcaactatcgtcctaacttgcctgacacctatgctgcgtgtagctcattgactgtgcatcggaattgttgaggatgatgcagacaagctgaagtgctacaaacgaacctagtagggcacatcgatccgcatccgcattgtcacatgaaatgttgactctgtacgatctcatagatcagaattatactatcatcacgtgatgatgaataccttatcagattatccgcactaccattcagctaataccgtactggatatcatgctagtctaacataatgacactctatgcc

SEQ ID NO: 127905 - DNA, 855 bp, Zea mays
  Clone ID: MRT4577_48118C.1
taccctcgaggcctgccgggctggatgatgaagaaaaataatcggattcccattgattttacaacatgatttttacaccagctacttctgacaaaattttgacatataacatagcctctcgaggccggccgggccgggaaaccctagccgccacacctaacgacccacacgagcaccaagccgaggggaggggcgatggcgagaggtgtggtgtcgacgaagggcggcacggccgcgggcaagaagaaggggtcggtagccttcacgatcgactgcaccaagcccgtggaggacaagatcatggagatcgcctcgctcgagaagttcctgcaggagcgcatcaaggtcgccggcggcaaggccggcaacctcggcgactccgtcaccatctcccgcgagaagaccaaggtcaccgtaacctgcgacgggcccttctccaagaggtatctgaagtacttgaccaagaagtacttgaagaagcacaaggtgcgagattggctccgtgtgattgcagccaacaaggaccacagcgtctatgagctgcggtacttcaacattgctgagaacgagggcgaggaagaagattagactgcattgcacattgctgagaacgagggcgaggaagaagattagactgcattgcacttatatctcagttttgaactcattggatttgatacttgtacccgtagttttgcaaatgcccccatgttatgctctggtgaattttggatggtttatttatttgaaaaatctttgcatttggctgctcctaaaagcaaaaaaaatttaaaagaagctcttaagcgaattttaagtgttctgaatctctggcaaaagctatgtttggggccg

SEQ ID NO: 127906 - DNA, 3096 bp, Zea mays
  Clone ID: MRT4577_48119C.1
ggccgaccaaccccaaccacggacccggactggctgtccgcctatcacccgccactattgctctgaagcctgcttctctccccccttctcgccaattcggcacggggcacgcacgcacaccccgttcgtgccacactgccacctaacccccctcccccacgatcccgaggctactagcactaggcgtcgtcctcggcagcaacggcggctgggctcccgccgatggcggcgtccctcgccgccgccgcctctcgcctcgccgccaccggcggcgagttgtcgtggtcggcgcggccctgccccgggagtctcgtggcgagcttccccagcgccgggcggctccggcgccccgcttcgggcgtgcggtgcggaggtggggttttgcccgcggccgcggggacgggggcggaagcggaggaagggggccgcttcgttggctggttccgggaggcgtggccttacatccggggccaccggggcagcaccttcgtcgtcgtcatctccggggaggtcatcgccggcccgcacctcgacggcattctgcaggatatatcccttcttcatggtctcgggatcaaatttgttcttgttcctggaacacatgtccagattgataagctcttggctgagagagggaagaaggctaagtatgctggtcgctaccgcattactgattcagattcattagatgctgcaatggaggcagctggccgaatacggctaactatagaagcgaagctgtctcctggaccaccaatgttaaatctccgtaggcatggtgttaatggccgttggcatgaaatctctgataatgttgcaagtggaaatttccttggtgctaagaggcgaggggttgttggtggcattgattatggattcaccggtgaagttaaaaaaatagatgtttcacggataagagaaaggcttgatagagacagcatagttgttgtgagcaacatggggtactccagcgcaggagaggtcttgaattgcaatacctatgaagttgctacagcatgtgctttatccatagaggcggacaagcttatttgcattgttgatggccaaatatttgatgagcatggtagagtcaatcgttttatgtctattgaagaagcagatatgttgatcagaacacgtgctaagcagagtgaaattgctgcaaattatgtgaaggttgttgatgaggaggacatcaatcatgtccgctgcctcccaatgaaacatggtacagaacatggtatgaatggaagggaccatattaatgggtatactgcatcttttcggaatggtgtgggtttcaatgatggaaatggtctgtctggtgagcaagggtttgctattggcggggaggagcgcttgagcaggtcaaatggttacctatcagagttagcagcggcagcatacgtatgccatggtggtgtccaaagagtgcatatcatagatggtactgttggtggagcattgttgctagaactattcactagagatggtgttggaacgatgatagctagggatatgtatgaaggaacaagaatggccagagaggaagatctttctggtattagaaagatcattcgtcctctgaagaatctggtgtcctggtgcgccgaacagatcaagagcttcttgaagcattgacatcatttattgtcgtggaaagagatggctcaatcatagcgtgtgctgccctcttcccttttcttgaggataaatctggggaagttgctgctattgctgtatctgaagaatgtcgaggccaaggtcaaggagacaaattacttgattacgttgagaagaaggctttgtcccttggacttgagaaactattcttgcttaccacaaggacagcggattggtttgttcgtcgcggctttaaggagtgctcgttcgattccctgcctttggtgaggagaaaacgtatcgacctctcgcgcgggtcaaaatattacatgaagtggctccaggcagcagaggttgggcatatggctgccgacggttttgccatgagatgatgagtgctgcaaacaagcatctctacgaatctagtcgatggacgtgaggtttctttatgagctgtgcagtcgcttatacatcgtagaaatgtatatttattgtgcaagaaaataatcagtcaataatcgaagatgtggttgtgtttcttgagttgatttcttcttgagcatagcaatgctcaaaagagttgttgatctgcacactgctgacaaagcctgcacgactgcgcgttttaaactgataccctagccgccacacctaacgacccacacgagcaccaagccgaggggaggggcgatggcgagaggtgtggtgtcagcgaagggcggcacggccgcgggcaagaagaaggggtcggtcgccttcacgatcgactgcaccaagcccgtggaggacaagatcatggagatcgcctcgctcgagaagttcctgcaggagcgcatcaaggtcgccggcggcaaggccggcaacctcggcgaatccgtcatcatctcccgcgagaagaccaaggtcaccgtcacctgcgacgggcccttctccaagaggtatctgaagtacttgaccaagaagtacttgaagaagcacaaggtgcgagattggctccgtgtgattgcagccaacaaggaccacagcgtctatgagctgcggtacttcaacattgctgagaacgaaggcgaggaagaagattagactgcattgcacttatatctcagttttgaactcattgaatttggtacttgtacccgtagttttgcaaatgcccccatgttatgctctggtgaattttggatggtttatttatttgaaaagtctttgcatttggctgctcctatatgaacaaaaaatttaagagaagctcttaagcgaatttaaagaatgtgaagttatgaacaagaaaaaaaaaaaaggcaatggcagctaactgaatccgcaaatactattccattgggattctgcacagatgagggtagactaacagttcagctcacagagcaaacagttttggagtgtacctatcaaaatgcagtcggtcgttcggcgcgggtttttttttttttggctgctgctgcagcacacagt

SEQ ID NO: 127907 - DNA, 427 bp, Zea mays
  unsure (1)..(427): unsure at all n locations
  Clone ID: MRT4577_4811C.1
gatgatcatgaactcttccttctttcnacgctgtaactgaagggtctcagtgttaggcacttaggctatctccagcaagataaaggccacgaatcccgggtgtggtgctggcgtggaggcagcaggcaagaagaagcagcagatctaccgatggaccgcgagtgaccgtgactgcgagctcatggggctcatgtggctgctgcagcgcaatgccacacggtacggagcggcggccacggccgtgatccgggccctaatggccgtggacgaggcgttcaccgcaggggtcgcggtggcggcagatacgggggcagccgtggcgtgctcgctgcccgtggacgacgacatgcccctnccggccgagtacgcgcaggtcagcagggccagcgacgcgcctcgtctctgctgcttcctgctcgtgctgctc

SEQ ID NO: 127908 - DNA, 304 bp, Zea mays
  Clone ID: MRT4577_48120C.1
ggcaacacatccacgttctctcaaacgaacctgaacaaactggggctccttaagacacattactgtacagccagactaaagcaatactcattgagtgtaccataccgactgctccccaatagaccgaacgatacacttgctggtaagctgagaaagaacgacggacttacgtgtctacattcagcgcacatttaacaggtgtgaaatagagcgctcgaagctatcgatctgtatgtttgtatgcccgactgatctgacgagctcctgacaagccggattgtattatactacaacatgaagaggc

SEQ ID NO: 127909 - DNA, 296 bp, Zea mays
  Clone ID: MRT4577_48121C.1
ctcgagccccgcgggtgccgcgtgcattcttggggtgtagaatttaatgacaactttcaagccgtgtaggacaaggatccatgtgaaacggtactctgcacatgggtgagcccatcctaacgcgagtgggcgataacccatgtatatagcagcgtatcacgacgcgatcaccactaaagggtaatcggcattaagatttaccgacccgtgacgtgatggcagacagaaacgctatgaattctggtgactcaacctggggcctatcaaagagataacttggatgcttaatggaccct

SEQ ID NO: 127910 - DNA, 301 bp, Zea mays
  Clone ID: MRT4577_48122C.1
gcagaccaaacggattagagtggcttcaccaccggtatatacatattggctttggtcatgccaccgaagtctcaggctcggggagctgggggtgctcggaatggcgctggctacctgttttgacaggtgggaaactgactttatgcagggctcggctgggatttgggtcctgtaacaatggtggatcctgaacggacgaaatatttttttttaatagaaactcaccaaattgatcaatttcaaaaaataaaaaatataaatttttttttcccttatttttggggcgggccttttttaaaag

SEQ ID NO: 127911 - DNA, 272 bp, Zea mays
  Clone ID: MRT4577_48123C.1
ctttgcgtgtcctttttgttcagaacatccaccctccaagtacgagtttcttggtaagggcttcaatacacggccacttttttttaattagcagggcaccagcttcgcgagttaaaaaaatgagcagcctacaagtcacgcacgtgtcactggtactggtagtagaacacacccggcacagatggggaaataaacctgtggcagcaaccacgagtttcactggaaatctctcctaggcctgctgagcctggctcggttttcgaactaccttt

SEQ ID NO: 127912 - DNA, 320 bp, Zea mays
  Clone ID: MRT4577_48124C.1
aatatttatttattatttatcaattcttattgcggttattagggttcttttttgattttagagggatccagatacacataacatgattagagagcccaaaggtttcttgcacaggcatatatgcaacgtgccaaactgcattttcatcaaagagacaacaaataaggattgctcccccgagtggggggaaaaaacaattaaaaagtggcgggccctgttgccaaaaaaaatgagggggagaggccacctcttgcaaaaatattcagtgcggttcaaaggacagacaaaagaggcgtatgtagcatttttgtttctcaaga

SEQ ID NO: 127913 - DNA, 293 bp, Zea mays
  unsure (1)..(293): unsure at all n locations
  Clone ID: MRT4577_48125C.1
gcggagccggcctacaccgnttccnggctcacacacccaaaacttaaacgcgatcaggccccaaggactcgagacgaagtcaagggcacggaccaccgccggagactccaggctctcggngaggaagaccaaggntganaaggacccaaaaaagcccaaaaggcctccgagagcgtcttccgacctcctggaggagctcccgaaggaccaccatgagaacctaccccaaaagatgacgcacggcctcactgactggnaaagacggtggagaccagtgaaaacgccccgccacg
